United States Patent Application Publication US 2014/0259212 A1 - sequence listing, part 12

SEQ ID NO: 37466 - DNA, 1503 bp, Pseudomonas putida GB-1
  CDS (1)..(1503): transl_table=11
atgtcacgctccctgaccggcgccctcgcccatggctttctgggccagtcgccgctttggtacaaggcgattatctgcctgttcctggtgctcaacccgctgctgctggtaaccgtaggcccggttgcggccggctgggcactggtgctcgagttcatcttcaccttgggcatggcgctgaagtgctacccgttgatgcccggcggcctgttgctggtcgaagccctgctgctgcaaatgaccacaccacaggcgttgtacgaggaactgcaacacaacttcccggtgattctgctgctcatgttcatggtggccggcattcacttcatgaaggagctgctgctgttcctgttctcgcgcatcctgcttggggtgcgctcgaaggcaatcctgtcgctgctattctgcgtgctgtcggcgtttctttcggcgtttctcgatgcgctgaccgtgacggcggtaatcatcagcgccgccgtcggcttctatgcggtgtaccaccgcgtcgcgtccggggccaatccgcgtgaagacagtgcactggacagcgaccagcaggtcgcccagctgcaccgcgaagacctcgaccagttccgcgccttcctgcgcagcctgctgatgcatggcgcggtgggcaccgccctgggcggggtttgcacgttggtgggcgagccgcagaacctgctgatcggccacgaaatgggttggcacttcgccgatttcttcttcaaggtggcccccgtgtcgctgccggtgctgggtgccggcctgctgacctgcgtgctgctggaaaagctgcgcctgttcggctatggcacgttgatgcccgagccggtacgccaggtgctggccgcctatgcggccgaagacgacgccgcgcgcactcaggcgcaacgcatcgcactgtgggtgcaagggctcgctgcgctgatcctgatcatctgcctggggctgcatgtggccgaggtcggcctgattggcctgatggtgatcgtgctgatcacggcctttaccggtatcaccgacgaacaccgcctgggccgtgccttccaggacgccatgccgttcacttcgctgctggtggtgtttttcgccgtggtcgcagtaattcaccagcagcaactgttcagccccttgatcagctgggtgctgactctgccgaccgagcagcaaccgggcatgctgtacctggccaacggtttgctgtcggcgataagcgacaacgtgttcgtcgccactatctatatcaccgaagtgaaacaggcatttctcaatggcggcatgagccgcgagcatttcgaaacgctggcggtggcgatcaacaccggcaccaacctgcccagcgtggcgacgcctaacgggcaggcggcgtttctgtttctgctgacctcggcgattgcgccgttgatccgactgtcgtatggccggatggtgtggatggcgttgccctataccgtagtgatgggtgggctgggatggtgggcagtgacctactggctgtga

SEQ ID NO: 37467 - protein, 500 aa, Pseudomonas putida GB-1
MSRSLTGALAHGFLGQSPLWYKAIICLFLVLNPLLLVTVGPVAAGWALVLEFIFTLGMALKCYPLMPGGLLLVEALLLQMTTPQALYEELQHNFPVILLLMFMVAGIHFMKELLLFLFSRILLGVRSKAILSLLFCVLSAFLSAFLDALTVTAVIISAAVGFYAVYHRVASGANPREDSALDSDQQVAQLHREDLDQFRAFLRSLLMHGAVGTALGGVCTLVGEPQNLLIGHEMGWHFADFFFKVAPVSLPVLGAGLLTCVLLEKLRLFGYGTLMPEPVRQVLAAYAAEDDAARTQAQRIALWVQGLAALILIICLGLHVAEVGLIGLMVIVLITAFTGITDEHRLGRAFQDAMPFTSLLVVFFAVVAVIHQQQLFSPLISWVLTLPTEQQPGMLYLANGLLSAISDNVFVATIYITEVKQAFLNGGMSREHFETLAVAINTGTNLPSVATPNGQAAFLFLLTSAIAPLIRLSYGRMVWMALPYTVVMGGLGWWAVTYWL

SEQ ID NO: 37468 - DNA, 1569 bp, Haemophilus influenzae
  CDS (1)..(1569): transl_table=11
gtgataaaaataatggagttcactatgacaaacattcaggcttttatgaaaaactttcttggggcaagtccagaatggtacaaacttgccattgtggtttttcttattataaatccaattgttttcttttttattagtccttttattgcgggttggttactggttgcagaatttattttcacattggcaatggcattaaaatgctaccctcttcaaccaggtggtctattagcaattgaagctattattattggaatgacaaatgccaaacacgtcaaagcagaaattatggcaaactttgaagtgatcttgctactgatatttatggtggcaggtattttctttatgaaacaattactgctttatgtatttactaaattacttgtcaaaattcgttctaaaattgcactttctattgccttttgttttagtgctgcttttttatcggcttttctcgatgctttaacggttgttgctgttatcattagtgtcgcaatgggattttatggtgtgtatcacaaagttgcatcaggcaataatttaattgatgcggttgatatttcagacgatagaaaaattattgaacaacagcacgaaatcttagaaaaattccgtgcattcttacgtagtttaatgatgcatgcgggtgtaggaactgcactcggtggtgtaatgaccgttgttggagaaccacaaaacttaattattgcagaacaagcaaaatggaactttatggaatttttcctccgtatggcacccgtgactattcctgtgtttatctgcggattactcacttgtttcttggtcgaaaaattcaaattatttggttatggcgagaaattaccagacgaagtgtggaaaatcttatcagatttagatcgcactaattcagaaaaaatgtctaaacaagataaaattaaattaggtatgcaagcgttaatcgcaatttggttaattgttggattagcattccatcttgccgcagtcggtttaattggtttaagtatcatcatttttgctacgtctttcactggtgtgacggatgaacatactatcggtaaagcctttcaggaatctttaccctttactgcattgctcgttgtattcttttctgttgttgcagtaattattgatcaaaaacttttttcaccaattattcacttcgttctttctgcggaagaaaatacacaacttgctttattctatttgtttaatggcttgctttcttctatttctgataatgtatttgttgcaacggtttatattaatgaagctaaagctgcactgactaatggagtaattgcaccgcatcaatttgaattgctttctgttgccattaatacaggtacaaacttaccatcagttgcaacaccaaatggacaagctgctttcttattcttattgacttcatcaatttcgccattaattcgcctttcttatggcagaatggtttatatggctttaccttacacgattgtactttcaatcattggtttactggctattgaatttattttaccagctgccacaatttggttagcaagtttaggtttaattttgccaatttaa

SEQ ID NO: 37469 - protein, 522 aa, Haemophilus influenzae
MIKIMEFTMTNIQAFMKNFLGASPEWYKLAIVVFLIINPIVFFFISPFIAGWLLVAEFIFTLAMALKCYPLQPGGLLAIEAIIIGMTNAKHVKAEIMANFEVILLLIFMVAGIFFMKQLLLYVFTKLLVKIRSKIALSIAFCFSAAFLSAFLDALTVVAVIISVAMGFYGVYHKVASGNNLIDAVDISDDRKIIEQQHEILEKFRAFLRSLMMHAGVGTALGGVMTVVGEPQNLIIAEQAKWNFMEFFLRMAPVTIPVFICGLLTCFLVEKFKLFGYGEKLPDEVWKILSDLDRTNSEKMSKQDKIKLGMQALIAIWLIVGLAFHLAAVGLIGLSIIIFATSFTGVTDEHTIGKAFQESLPFTALLVVFFSVVAVIIDQKLFSPIIHFVLSAEENTQLALFYLFNGLLSSISDNVFVATVYINEAKAALTNGVIAPHQFELLSVAINTGTNLPSVATPNGQAAFLFLLTSSISPLIRLSYGRMVYMALPYTIVLSIIGLLAIEFILPAATIWLASLGLILPI

SEQ ID NO: 37470 - DNA, 20 bp, Artificial sequence
  primer
atggagatctcctggggccg

SEQ ID NO: 37471 - DNA, 25 bp, Artificial sequence
  primer
ttaaagcgttgctatccagcccatt

SEQ ID NO: 37472 - protein, 519 aa, Artificial sequence
  consensus sequence
  Variant (2)..(4): Xaa in position 2 to 4 is any amino acid
  Variant (9)..(10): Xaa in position 9 to 10 is any amino acid
  Variant (12)..(12): Xaa in position 12 is any amino acid
  Variant (16)..(17): Xaa in position 16 to 17 is any amino acid
  Variant (19)..(20): Xaa in position 19 to 20 is any amino acid
  Variant (23)..(24): Xaa in position 23 to 24 is any amino acid
  Variant (27)..(32): Xaa in position 27 to 32 is any amino acid
  Variant (33)..(33): Xaa in position 33 is any or no amino acid
  Variant (36)..(36): Xaa in position 36 is any amino acid
  Variant (40)..(40): Xaa in position 40 is any amino acid
  Variant (43)..(43): Xaa in position 43 is any amino acid
  Variant (59)..(59): Xaa in position 59 is any amino acid
  Variant (69)..(71): Xaa in position 69 to 71 is any amino acid
  Variant (75)..(78): Xaa in position 75 to 78 is any amino acid
  Variant (79)..(99): Xaa in position 79 to 99 is any or no amino acid
  Variant (101)..(102): Xaa in position 101 to 102 is any amino acid
  Variant (104)..(106): Xaa in position 104 to 106 is any amino acid
  Variant (108)..(108): Xaa in position 108 is any amino acid
  Variant (111)..(111): Xaa in position 111 is any amino acid
  Variant (115)..(115): Xaa in position 115 is any amino acid
  Variant (126)..(126): Xaa in position 126 is any amino acid
  Variant (130)..(131): Xaa in position 130 to 131 is any amino acid
  Variant (134)..(135): Xaa in position 134 to 135 is any amino acid
  Variant (137)..(139): Xaa in position 137 to 139 is any amino acid
  Variant (143)..(144): Xaa in position 143 to 144 is any amino acid
  Variant (148)..(148): Xaa in position 148 is any amino acid
  Variant (151)..(153): Xaa in position 151 to 153 is any amino acid
  Variant (166)..(166): Xaa in position 166 is any amino acid
  Variant (169)..(169): Xaa in position 169 is any amino acid
  Variant (173)..(174): Xaa in position 173 to 174 is any amino acid
  Variant (178)..(179): Xaa in position 178 to 179 is any amino acid
  Variant (182)..(182): Xaa in position 182 is any amino acid
  Variant (186)..(190): Xaa in position 186 to 190 is any amino acid
  Variant (191)..(194): Xaa in position 191 to 194 is any or no amino acid
  Variant (196)..(198): Xaa in position 196 to 198 is any amino acid
  Variant (199)..(202): Xaa in position 199 to 202 is any or no amino acid
  Variant (204)..(210): Xaa in position 204 to 210 is any amino acid
  Variant (211)..(214): Xaa in position 211 to 214 is any or no amino acid
  Variant (217)..(217): Xaa in position 217 is any amino acid
  Variant (220)..(220): Xaa in position 220 is any amino acid
  Variant (226)..(226): Xaa in position 226 is any amino acid
  Variant (229)..(230): Xaa in position 229 to 230 is any amino acid
  Variant (239)..(239): Xaa in position 239 is any amino acid
  Variant (241)..(241): Xaa in position 241 is any amino acid
  Variant (249)..(249): Xaa in position 249 is any amino acid
  Variant (252)..(253): Xaa in position 252 to 253 is any amino acid
  Variant (255)..(255): Xaa in position 255 is any amino acid
  Variant (256)..(261): Xaa in position 256 to 261 is any or no amino acid
  Variant (263)..(263): Xaa in position 263 is any amino acid
  Variant (265)..(266): Xaa in position 265 to 266 is any amino acid
  Variant (268)..(270): Xaa in position 268 to 270 is any amino acid
  Variant (272)..(272): Xaa in position 272 is any amino acid
  Variant (276)..(276): Xaa in position 276 is any amino acid
  Variant (279)..(281): Xaa in position 279 to 281 is any amino acid
  Variant (284)..(284): Xaa in position 284 is any amino acid
  Variant (287)..(287): Xaa in position 287 is any amino acid
  Variant (289)..(289): Xaa in position 289 is any amino acid
  Variant (292)..(294): Xaa in position 292 to 294 is any amino acid
  Variant (299)..(300): Xaa in position 299 to 300 is any amino acid
  Variant (303)..(304): Xaa in position 303 to 304 is any amino acid
  Variant (306)..(308): Xaa in position 306 to 308 is any amino acid
  Variant (310)..(327): Xaa in position 310 to 327 is any amino acid
  Variant (329)..(330): Xaa in position 329 to 330 is any amino acid
  Variant (332)..(337): Xaa in position 332 to 337 is any amino acid
  Variant (339)..(341): Xaa in position 339 to 341 is any amino acid
  Variant (344)..(344): Xaa in position 344 is any amino acid
  Variant (346)..(346): Xaa in position 346 is any amino acid
  Variant (348)..(348): Xaa in position 348 is any amino acid
  Variant (355)..(356): Xaa in position 355 to 356 is any amino acid
  Variant (358)..(360): Xaa in position 358 to 360 is any amino acid
  Variant (362)..(362): Xaa in position 362 is any amino acid
  Variant (364)..(364): Xaa in position 364 is any amino acid
  Variant (366)..(366): Xaa in position 366 is any amino acid
  Variant (368)..(368): Xaa in position 368 is any amino acid
  Variant (371)..(372): Xaa in position 371 to 372 is any amino acid
  Variant (374)..(374): Xaa in position 374 is any amino acid
  Variant (377)..(377): Xaa in position 377 is any amino acid
  Variant (379)..(379): Xaa in position 379 is any amino acid
  Variant (387)..(387): Xaa in position 387 is any amino acid
  Variant (391)..(392): Xaa in position 391 to 392 is any amino acid
  Variant (397)..(398): Xaa in position 397 to 398 is any amino acid
  Variant (400)..(400): Xaa in position 400 is any amino acid
  Variant (403)..(403): Xaa in position 403 is any amino acid
  Variant (405)..(405): Xaa in position 405 is any amino acid
  Variant (407)..(408): Xaa in position 407 to 408 is any amino acid
  Variant (411)..(416): Xaa in position 411 to 416 is any amino acid
  Variant (417)..(417): Xaa in position 417 is any or no amino acid
  Variant (419)..(421): Xaa in position 419 to 421 is any amino acid
  Variant (424)..(425): Xaa in position 424 to 425 is any amino acid
  Variant (431)..(432): Xaa in position 431 to 432 is any amino acid
  Variant (439)..(439): Xaa in position 439 is any amino acid
  Variant (441)..(441): Xaa in position 441 is any amino acid
  Variant (446)..(448): Xaa in position 446 to 448 is any amino acid
  Variant (450)..(452): Xaa in position 450 to 452 is any amino acid
  Variant (454)..(454): Xaa in position 454 is any amino acid
  Variant (456)..(459): Xaa in position 456 to 459 is any amino acid
  Variant (461)..(462): Xaa in position 461 to 462 is any amino acid
  Variant (492)..(493): Xaa in position 492 to 493 is any amino acid
  Variant (506)..(506): Xaa in position 506 is any amino acid
  Variant (513)..(513): Xaa in position 513 is any amino acid
  Variant (515)..(518): Xaa in position 515 to 518 is any amino acid
AXXXNFLGXXPXWYKXXIXXFLXXNPXXXXXXXPFXAGWXLVXEFIFTLAMALKCYPLXPGGLLAIEAXXXGMTXXXXXXXXXXXXXXXXXXXXXXXXXVXXEXXXNXEVXLLLXFMVAGIYFMKXLLLXXFTXXLXXXRSKXXLSLXFCXXXAFLSAFLDALTVXAVXISVXXGFYXXYHXVASXXXXXXXXXDXXXXXXXDXXXXXXXXXXXLEXFRXFLRSLXMHXXVGTALGGVXTXVGEPQNLXIAXXAXXXXXXXWXFXXFXXXMXPVTXPVXXXGLXTCXLXEKXXXFGYGXXLPXXVXXXLXXXXXXXXXXXXXXXXXXLXXQXXXXXXLXXXLAXHXAXVGLIGLXXIXXXTXFXGXTXEHXXGXAFXEXLPFTALLXVFFXXVAVIXXQXLFXPXIXXVLXXXXXXXQXXXFYXXNGLLSXXSDNVFVXTXYINEXXXAXXXGXIXXXXFXXLAVAINTGTNLPSVATPNGQAAFLFLLTSXXAPLIRLSYGRMVXMALPYTXVXXXXG

SEQ ID NO: 37473 - protein, 53 aa, Artificial sequence
  protein pattern
  Variant (2)..(2): Xaa in position 2 is Ala or Ser
  Variant (26)..(26): Xaa in position 26 is any or no amino acid
  Variant (28)..(28): Xaa in position 28 is any or no amino acid
  Variant (31)..(31): Xaa in position 31 is Ala, Ser or Thr
  Variant (32)..(32): Xaa in position 32 is Ile, Leu or Val
  Variant (33)..(33): Xaa in position 33 is Ala or Ser
  Variant (36)..(36): Xaa in position 36 is Ile or Val
  Variant (42)..(42): Xaa in position 42 is Lys or Arg
  Variant (45)..(45): Xaa in position 45 is any amino acid
  Variant (52)..(52): Xaa in position 52 is Ile, Leu or Val
LXVAINTGTNLPSVATPNGQAAFLFXLXTSXXXPLXRLSYGXMVXMALPYTXV

SEQ ID NO: 37474 - protein, 40 aa, Artificial sequence
  protein pattern
  Variant (2)..(2): Xaa in position 2 is any amino acid
  Variant (3)..(3): Xaa in position 3 is Phe or Tyr
  Variant (5)..(5): Xaa in position 5 is Ala, Gly or Ser
  Variant (9)..(9): Xaa in position 9 is Asn or Ser
  Variant (11)..(11): Xaa in position 11 is Leu, Met or Val
  Variant (14)..(14): Xaa in position 14 is Ala, Gly or Ser
  Variant (15)..(15): Xaa in position 15 is Ala, Cys, Gly or Val
  Variant (24)..(24): Xaa in position 24 is any amino acid
  Variant (26)..(26): Xaa in position 26 is Ile, Leu, Met or Val
  Variant (34)..(34): Xaa in position 34 is any or no amino acid
  Variant (36)..(36): Xaa in position 36 is Ala, Gly or Ile
  Variant (37)..(39): Xaa in position 37 to 39 is any amino acid
  Variant (40)..(40): Xaa in position 40 is Ala, Gly or Asn
EXXRXFLRXLXMHXXVGTALGGVXTXVGEPQNLXIXXXXX

SEQ ID NO: 37475 - protein, 42 aa, Artificial sequence
  protein pattern
  Variant (2)..(3): Xaa in position 2 to 3 is any amino acid
  Variant (4)..(4): Xaa in position 4 is Ala or Thr
  Variant (7)..(7): Xaa in position 7 is any or no amino acid
  Variant (9)..(9): Xaa in position 9 is any or no amino acid
  Variant (11)..(11): Xaa in position 11 is Ala, Ile, Leu or Val
  Variant (18)..(18): Xaa in position 18 is Ala, Gly or Ser
  Variant (27)..(27): Xaa in position 27 is any amino acid
  Variant (33)..(33): Xaa in position 33 is Ala or Leu
  Variant (34)..(34): Xaa in position 34 is Phe, Ile, Leu or Val
  Variant (35)..(35): Xaa in position 35 is Glu or Gln
  Variant (37)..(37): Xaa in position 37 is Ile, Leu or Val
  Variant (38)..(38): Xaa in position 38 is any amino acid
  Variant (39)..(39): Xaa in position 39 is Ile, Leu or Met
  Variant (40)..(40): Xaa in position 40 is Gly or Gln
PXXXGWXLXVXEFIFTLXMALKCYPLXPGGLLXXXAXXXXMT

SEQ ID NO: 37476 - protein, 59 aa, Artificial sequence
  protein pattern
  Variant (2)..(4): Xaa in position 2 to 4 is any or no amino acid
  Variant (10)..(10): Xaa in position 10 is any amino acid
  Variant (11)..(11): Xaa in position 11 is Ile or Val
  Variant (13)..(13): Xaa in position 13 is Ile or Val
  Variant (14)..(14): Xaa in position 14 is Phe, Leu or Met
  Variant (15)..(15): Xaa in position 15 is any amino acid
  Variant (17)..(17): Xaa in position 17 is Ala, Ser or Thr
  Variant (18)..(18): Xaa in position 18 is any amino acid
  Variant (19)..(19): Xaa in position 19 is Ala, Cys, Asn or Thr
  Variant (21)..(21): Xaa in position 21 is Ile or Val
  Variant (22)..(22): Xaa in position 22 is any amino acid
  Variant (23)..(23): Xaa in position 23 is Asp or Glu
  Variant (26)..(26): Xaa in position 26 is any amino acid
  Variant (27)..(27): Xaa in position 27 is Ile, Leu or Met
  Variant (29)..(29): Xaa in position 29 is any amino acid
  Variant (32)..(32): Xaa in position 32 is any amino acid
  Variant (33)..(33): Xaa in position 33 is Asp or Glu
  Variant (34)..(34): Xaa in position 34 is any amino acid
  Variant (35)..(35): Xaa in position 35 is Leu or Met
  Variant (39)..(39): Xaa in position 39 is Ala or Ser
  Variant (42)..(42): Xaa in position 42 is Ala, Cys, Thr or Val
  Variant (46)..(46): Xaa in position 46 is Ala or Ser
  Variant (47)..(47): Xaa in position 47 is Ile or Val
  Variant (52)..(52): Xaa in position 52 is any amino acid
  Variant (53)..(53): Xaa in position 53 is Asp, Glu or Gln
  Variant (55)..(55): Xaa in position 55 is any amino acid
  Variant (58)..(58): Xaa in position 58 is any amino acid
VXXXGLIGLXXIXXXTXXXGXXXEHXXGXAFXXXXPFTXLLXVFFXXVAVIXXQXLFXP

SEQ ID NO: 37477 - protein, 60 aa, Artificial sequence
  protein pattern
  Variant (4)..(4): Xaa in position 4 is any amino acid
  Variant (8)..(9): Xaa in position 8 to 9 is any or no amino acid
  Variant (11)..(12): Xaa in position 11 to 12 is any or no amino acid
  Variant (14)..(14): Xaa in position 14 is Lys or Arg
  Variant (15)..(15): Xaa in position 15 is Ile, Leu or Met
  Variant (16)..(16): Xaa in position 16 is Ile, Leu or Val
  Variant (17)..(18): Xaa in position 17 to 18 is any amino acid
  Variant (19)..(19): Xaa in position 19 is Ile, Leu or Val
  Variant (20)..(20): Xaa in position 20 is His, Lys or Arg
  Variant (23)..(24): Xaa in position 23 to 24 is any amino acid
  Variant (25)..(25): Xaa in position 25 is Leu or Val
  Variant (26)..(26): Xaa in position 26 is Ala or Ser
  Variant (27)..(27): Xaa in position 27 is Ile or Leu
  Variant (28)..(28): Xaa in position 28 is any amino acid
  Variant (30)..(30): Xaa in position 30 is Ala, Cys, Ser or Thr
  Variant (31)..(31): Xaa in position 31 is Phe, Leu, Met or Val
  Variant (32)..(32): Xaa in position 32 is any amino acid
  Variant (33)..(33): Xaa in position 33 is Ala or Ser
  Variant (35)..(35): Xaa in position 35 is Phe or Val
  Variant (46)..(46): Xaa in position 46 is any amino acid
  Variant (49)..(49): Xaa in position 49 is Ile, Leu or Val
  Variant (51)..(51): Xaa in position 51 is Ser or Thr
  Variant (53)..(53): Xaa in position 53 is Ala, Gly, Ser, Thr or Val
  Variant (54)..(54): Xaa in position 54 is any amino acid
  Variant (58)..(58): Xaa in position 58 is Ala, Gly, Ser or Thr
  Variant (59)..(59): Xaa in position 59 is Ile or Val
FMKXLLLXXFXXTXXXXXXXSKXXXXXXFXXXXAXLSAFLDALTVXAVXIXVXXGFYXXY

SEQ ID NO: 37478 - protein, 47 aa, Artificial sequence
  protein pattern
  Variant (2)..(3): Xaa in position 2 to 3 is any amino acid
  Variant (4)..(4): Xaa in position 4 is any or no amino acid
  Variant (6)..(7): Xaa in position 6 to 7 is any amino acid
  Variant (8)..(8): Xaa in position 8 is any or no amino acid
  Variant (10)..(10): Xaa in position 10 is any amino acid
  Variant (12)..(12): Xaa in position 12 is Ile or Val
  Variant (14)..(14): Xaa in position 14 is Ile, Leu, Met or Val
  Variant (17)..(17): Xaa in position 17 is Phe, Leu or Val
  Variant (18)..(19): Xaa in position 18 to 19 is any amino acid
  Variant (21)..(21): Xaa in position 21 is Ile or Leu
  Variant (22)..(22): Xaa in position 22 is Ala, Ile, Leu or Val
  Variant (23)..(23): Xaa in position 23 is Thr or Val
  Variant (24)..(24): Xaa in position 24 is Cys or Thr
  Variant (25)..(26): Xaa in position 25 to 26 is any amino acid
  Variant (27)..(27): Xaa in position 27 is Ile, Leu or Val
  Variant (29)..(33): Xaa in position 29 to 33 is any amino acid
  Variant (35)..(35): Xaa in position 35 is Phe or Tyr
  Variant (37)..(38): Xaa in position 37 to 38 is any amino acid
  Variant (39)..(39): Xaa in position 39 is Leu or Met
  Variant (41)..(42): Xaa in position 41 to 42 is any amino acid
  Variant (44)..(45): Xaa in position 44 to 45 is any amino acid
  Variant (46)..(46): Xaa in position 46 is Ile or Val
  Variant (47)..(47): Xaa in position 47 is Ile or Leu
FXXXFXXXMXPXTXPVXXXGXXXXXXXEXXXXXGXGXXXPXXVXXXX

SEQ ID NO: 37479 - protein, 29 aa, Artificial sequence
  protein pattern
  Variant (2)..(2): Xaa in position 2 is Phe or Tyr
  Variant (3)..(4): Xaa in position 3 to 4 is any amino acid
  Variant (7)..(7): Xaa in position 7 is any or no amino acid
  Variant (9)..(9): Xaa in position 9 is any or no amino acid
  Variant (11)..(11): Xaa in position 11 is any amino acid
  Variant (12)..(12): Xaa in position 12 is Ile or Val
  Variant (19)..(19): Xaa in position 19 is Ala or Gly
  Variant (21)..(21): Xaa in position 21 is Ile or Val
  Variant (26)..(27): Xaa in position 26 to 27 is any amino acid
  Variant (28)..(28): Xaa in position 28 is Ala, Asn, Ser or Thr
FXXXNGXLXSXXSDNVFVXTXYINEXXXA

SEQ ID NO: 37480 - protein, 23 aa, Artificial sequence
  protein pattern
  Variant (3)..(3): Xaa in position 3 is any amino acid
  Variant (4)..(4): Xaa in position 4 is Ala or Ser
  Variant (6)..(6): Xaa in position 6 is any amino acid
  Variant (10)..(11): Xaa in position 10 to 11 is any amino acid
  Variant (12)..(12): Xaa in position 12 is any or no amino acid
  Variant (14)..(14): Xaa in position 14 is any amino acid
  Variant (15)..(15): Xaa in position 15 is any or no amino acid
  Variant (18)..(19): Xaa in position 18 to 19 is Ile, Leu or Val
  Variant (22)..(22): Xaa in position 22 is Ile, Leu or Pro
  Variant (23)..(23): Xaa in position 23 is Ile, Leu or Val
LGXXPXWYKXXXIXXFLXXNPXX

SEQ ID NO: 37481 - protein, 19 aa, Artificial sequence
  protein pattern
  Variant (2)..(3): Xaa in position 2 to 3 is any or no amino acid
  Variant (5)..(5): Xaa in position 5 is any amino acid
  Variant (6)..(6): Xaa in position 6 is Ile, Met or Val
  Variant (8)..(8): Xaa in position 8 is Ala or Gly
  Variant (9)..(10): Xaa in position 9 to 10 is any amino acid
  Variant (11)..(11): Xaa in position 11 is Ala or Gly
  Variant (12)..(12): Xaa in position 12 is Ile, Leu or Val
  Variant (13)..(13): Xaa in position 13 is any amino acid
  Variant (15)..(15): Xaa in position 15 is Ile or Val
  Variant (16)..(16): Xaa in position 16 is any amino acid
  Variant (17)..(17): Xaa in position 17 is Ala or Gly
KXXLXXQXXXXXXLXXXLA

SEQ ID NO: 37482 - protein, 19 aa, Artificial sequence
  protein pattern
  Variant (2)..(2): Xaa in position 2 is Ile, Leu or Val
  Variant (3)..(4): Xaa in position 3 to 4 is any amino acid
  Variant (6)..(6): Xaa in position 6 is Phe, Ile or Leu
  Variant (7)..(7): Xaa in position 7 is Glu or Pro
  Variant (9)..(9): Xaa in position 9 is Ile or Leu
  Variant (10)..(10): Xaa in position 10 is Leu or Met
  Variant (13)..(13): Xaa in position 13 is Ile, Met or Val
EXXXNXXVXXLLXFMVAGI

SEQ ID NO: 37483 - DNA, 744 bp, Escherichia coli
  CDS (1)..(744): transl_table=11
atgtctatcacggcgcagtccgtataccgtgacaccggaaatttcttccgtaatcaatttatgaccattctgttggtatcgttgctatgtgcgtttatcacagtggtgttagggcatgttttctcacccagtgatgcacagcttgcgcagctcaatgacggcgtgcccgttagcggcagtagtgggttgttcgacctggttcagaatatgtcaccggaacagcaacaaattttgctgcaggcttcagcggcgtccactttttcaggattaatcggtaacgccattctcgccggaggcgtaatattaattatccagctggtgtctgcgggtcagagagtcagtgcgctgcgagctattggtgccagtgcgccgatattgccaaagttatttattctgatttttctgactacccttttagtacagattggcatcatgctggtggtcgttccgggaattatcatggccattttactggccctggcaccggtgatgttggtacaggacaaaatgggcgtttttgcctcgatgcgtagcagtatgcggctgacttgggcgaatatgcgtctggtggcacccgcagtactgagctggttgctggcaaaaacactgttgctgctttttgcctcttcttttgccgcattaaccccggaaattggtgccgtactggcgaacaccttgagcaacctgatttcagccatattgctcatctatctgttccgcctgtatatgttgattcgccaataa

SEQ ID NO: 37484 - protein, 247 aa, Escherichia coli
MSITAQSVYRDTGNFFRNQFMTILLVSLLCAFITVVLGHVFSPSDAQLAQLNDGVPVSGSSGLFDLVQNMSPEQQQILLQASAASTFSGLIGNAILAGGVILIIQLVSAGQRVSALRAIGASAPILPKLFILIFLTTLLVQIGIMLVVVPGIIMAILLALAPVMLVQDKMGVFASMRSSMRLTWANMRLVAPAVLSWLLAKTLLLLFASSFAALTPEIGAVLANTLSNLISAILLIYLFRLYMLIRQ

SEQ ID NO: 37485 - DNA, 753 bp, Erwinia carotovora subsp. atroseptica SCRI1043
  CDS (1)..(753): transl_table=11
atgcctatcacggctaacacgttgtaccgtgacacaatgaattttacccgtaaccagctcatcagcatcttaatgatgtcgctgttgacggcattcattactgtcatactgaatcatgcgttatcgccttctggagacgagttacagattctgagcagttccagcagcgatctgtcatcttctgtcgaatctggcctaatggatttgattcagcaaatgacgccggaacaacaaaccgtgttgctgaaaatgtcggcggcaggcacttttgctgcgttagtgggcaacgtgctgctaacgggcggggttctgatgctgatccagttggtttctgacggacaacgcaccagtgccctgcgagccattggcgcatccgcaccgtttttactgcgtctgcttttcttgattctgctgtgcaccctgctcatccagcttggcatgatgcttttggtcattcctggcgtgttgttagctattgcgctgagtttgtcccctgtgattgtcgtcactgaaaaaagcggaattttcagtgccattaaaacgagcaccaaactggcctatagcaacttacgtgcaaccgcacctgccatcgtgatgtggctgctggctaaaatcgctattttgctgatcgtgtcaaagttaccgatttcctcacccacggtactgagcgtggttctgaacgggttaagcaatctgatctccgctatcctgcttatttatctgttccgcctttatatgctgctacgtgcttaa

SEQ ID NO: 37486 - protein, 250 aa, Erwinia carotovora subsp. atroseptica SCRI1043
MPITANTLYRDTMNFTRNQLISILMMSLLTAFITVILNHALSPSGDELQILSSSSSDLSSSVESGLMDLIQQMTPEQQTVLLKMSAAGTFAALVGNVLLTGGVLMLIQLVSDGQRTSALRAIGASAPFLLRLLFLILLCTLLIQLGMMLLVIPGVLLAIALSLSPVIVVTEKSGIFSAIKTSTKLAYSNLRATAPAIVMWLLAKIAILLIVSKLPISSPTVLSVVLNGLSNLISAILLIYLFRLYMLLRA

SEQ ID NO: 37487 - DNA, 771 bp, Yersinia pestis
  CDS (1)..(771): transl_table=11
atgcctatcacggctaacactttataccgtgacagttttaactttttacgtaatcagatagcagcgatcctgctgttggccctactgactgcgtttattaccgtcatgctgaatcagacatttatgcccgcttcagaacaactgagtattttaagtattccggagaatgatattacgtcatcgggaaatcttagcatcagtgagatagtgtcacagatgacacctgagcagcagatggtgctattgcgggtctctgcggtggccacgttctcagcattggtgggtaatgtattattagtcggtgggttgttaactctgattgcaatggtttctcagggccgcagggtcagtgcgttacaggcgataggtctctctctgcccatcttaccccgcttactggtattgatgtttatcagtaccttggtcattcaactcgggttaacattcttcatcgtgccaggcgtagccatcgcgatcgcactttcattgtcacccattatcgtcaccaatgagagaatgggaatttttgctgcaatgaaagccagtgctcagttggcatttgccaatgtgcggttgattgtgccagccatgatgttatggatagccgttaaacttcttctattattcttaattagccgctttactgtactcccccctacgatagctaccatcgttttaagtacgttaagtaatttggcttctgcattgctgctggtctatttattccgcctgtatatgctgttacgcccagtttcactggataaacagtaa

SEQ ID NO: 37488 - protein, 256 aa, Yersinia pestis
MPITANTLYRDSFNFLRNQIAAILLLALLTAFITVMLNQTFMPASEQLSILSIPENDITSSGNLSISEIVSQMTPEQQMVLLRVSAVATFSALVGNVLLVGGLLTLIAMVSQGRRVSALQAIGLSLPILPRLLVLMFISTLVIQLGLTFFIVPGVAIAIALSLSPIIVTNERMGIFAAMKASAQLAFANVRLIVPAMMLWIAVKLLLLFLISRFTVLPPTIATIVLSTLSNLASALLLVYLFRLYMLLRPVSLDKQ

SEQ ID NO: 37489 - DNA, 744 bp, Escherichia coli O6
  CDS (1)..(744): transl_table=11
atgtctatcacggcgcagtccgtataccgtgacaccggaaatttcttccgtaatcaatttatgaccattctgttgatatcgttgctatgtgcgtttatcacagtggtgttagggcatgttttctcacccagtgatgcacagcttgcgcagctcaatgacggcgtacccgttagcggcagtagtgggttgttcgacctggttcagaatatgtcaccggaacagcaacaaattttgctgcaggcttcagcggcgtccactttttcaggattaatcggtaacgccattctcgccgggggcgtaatattaattatccagctggtgtctgcgggtcagagagtcagtgcgctgcgagctattggtgccagtgcgccgatattgccaaagttatttattctgatttttctgactacccttttagtacagattggcatcatgctggtggtcgttccgggaattatcatggccattttactggctctggcaccggtgatgctggtacaggacaaaatgggcgtttttgcctcgatgcgtagcagtatgcggctgacatgggcgaatatgcgtctggtggcacccgcagtactgagctggttgctggcaaaaacactgttgctgctttttgcctcttcttttgccgcattaaccccggaaattggtgccgtactggcgaacaccttgagcaacctgatttcagccgtattgctcatctatctgttccgcctgtatatgttgattcgccaataa

SEQ ID NO: 37490 - protein, 247 aa, Escherichia coli O6
MSITAQSVYRDTGNFFRNQFMTILLISLLCAFITVVLGHVFSPSDAQLAQLNDGVPVSGSSGLFDLVQNMSPEQQQILLQASAASTFSGLIGNAILAGGVILIIQLVSAGQRVSALRAIGASAPILPKLFILIFLTTLLVQIGIMLVVVPGIIMAILLALAPVMLVQDKMGVFASMRSSMRLTWANMRLVAPAVLSWLLAKTLLLLFASSFAALTPEIGAVLANTLSNLISAVLLIYLFRLYMLIRQ

SEQ ID NO: 37491 - DNA, 744 bp, Salmonella typhimurium
  CDS (1)..(744): transl_table=11
atgtctatcacggcgaagtccgtttaccgtgacgccggaaattttttccgaaatcaatttattactatcttgctggtttcgttgctgtgcgcatttatcacggtggtcttaggtcatgccttttcacccagcgatgcgcaaatcgcgcaactcagtgaaggagaacatctggcaggcagcgctggcctgtttgagctggtacaaaatatgacgccggagcagcaacagatcctgttgcgcgcctctgccgcctcgacgttttccgggcttatcggcaacgctattctggccggcggtatcatcctgatgattcagttagtttcagcgggacatcgggttagcgcgctgcgcgctatcggcgccagcgcccctgcattgcctaaactgtttattcttatttttctgactaccctgttagtgcaaatcggtataatgctgattgtcgttccggggattattatggccattgtgctggcgcttgcgccagtgatgttggttgaagagaaaatgggcgtgtttgccgcaatgcgcagcagtatgcgtttagcctgggctaacatgagactggtcgcgcccgcggtgataggctggttactggctaaaacattgctattgctgttcgcgcccagcttcgctgtactgaccccaaatgtaggcgctgtactggcgaatacgttgagcaatctgatttccgcagtattgcttatctacttattccgcctgtatatgttgattcgccaataa

SEQ ID NO: 37492 - protein, 247 aa, Salmonella typhimurium
MSITAKSVYRDAGNFFRNQFITILLVSLLCAFITVVLGHAFSPSDAQIAQLSEGEHLAGSAGLFELVQNMTPEQQQILLRASAASTFSGLIGNAILAGGIILMIQLVSAGHRVSALRAIGASAPALPKLFILIFLTTLLVQIGIMLIVVPGIIMAIVLALAPVMLVEEKMGVFAAMRSSMRLAWANMRLVAPAVIGWLLAKTLLLLFAPSFAVLTPNVGAVLANTLSNLISAVLLIYLFRLYMLIRQ

SEQ ID NO: 37493 - DNA, 744 bp, Shigella flexneri
  CDS (1)..(744): transl_table=11
atgtctatcacggcgcagtccgtataccgtgacaccggaaatttcttccgtaatcaatttatgaccattctgttggtatcgttgctatgtgcgtttatcacagtggtgttagggcatgttttctcacccagtgatgcacagcttgcgcagctcaatgacggcgtgcccgttagcggcagtagtgggttgttcgacctggttcagaatatgtcaccggaacagcaacaaattttgctgcaggcttcagcggcgtccactttttcagaattaatcggtaacgccattctcgccggaggcgtaatattaattatccagctggtgtctgcgggtcagagagtcagtgcgctgcgagctattggtgccagtgcgccgatattgcccaagttatttattctgatttttctgactacccttttagtacagattggcatcatgctggtggtcgttccgggaattatcatggccattttactggccctggcaccggtgatgctggtacaggacaaaatgggcatttttgcctcgatgcgtagcagtatgcggctgacttgggcgaatatgcgtctggtggcacccgcagtactgagctggttgctggcaaaaacactgttgctgctttttgcctcttcttttgccgcattaaccccggaaattggtgccgtactggcgaacaccttgagcaacctgatttctgccatattgctcatctatctgttccgcctgtatatgttgattcgccaataa

SEQ ID NO: 37494 - protein, 247 aa, Shigella flexneri
MSITAQSVYRDTGNFFRNQFMTILLVSLLCAFITVVLGHVFSPSDAQLAQLNDGVPVSGSSGLFDLVQNMSPEQQQILLQASAASTFSELIGNAILAGGVILIIQLVSAGQRVSALRAIGASAPILPKLFILIFLTTLLVQIGIMLVVVPGIIMAILLALAPVMLVQDKMGIFASMRSSMRLTWANMRLVAPAVLSWLLAKTLLLLFASSFAALTPEIGAVLANTLSNLISAILLIYLFRLYMLIRQ

SEQ ID NO: 37495 - DNA, 21 bp, Artificial sequence
  primer
atgtctatcacggcgcagtcc

SEQ ID NO: 37496 - DNA, 24 bp, Artificial sequence
  primer
ttattggcgaatcaacatatacag

SEQ ID NO: 37497 - protein, 249 aa, Artificial sequence
  consensus sequence
  Variant (2)..(2): Xaa in position 2 is any amino acid
  Variant (6)..(8): Xaa in position 6 to 8 is any amino acid
  Variant (12)..(13): Xaa in position 12 to 13 is any amino acid
  Variant (16)..(16): Xaa in position 16 is any amino acid
  Variant (20)..(22): Xaa in position 20 to 22 is any amino acid
  Variant (26)..(26): Xaa in position 26 is any amino acid
  Variant (30)..(30): Xaa in position 30 is any amino acid
  Variant (36)..(36): Xaa in position 36 is any amino acid
  Variant (38)..(38): Xaa in position 38 is any amino acid
  Variant (40)..(40): Xaa in position 40 is any amino acid
  Variant (45)..(46): Xaa in position 45 to 46 is any amino acid
  Variant (49)..(50): Xaa in position 49 to 50 is any amino acid
  Variant (52)..(57): Xaa in position 52 to 57 is any amino acid
  Variant (58)..(60): Xaa in position 58 to 60 is any or no amino acid
  Variant (63)..(64): Xaa in position 63 to 64 is any amino acid
  Variant (67)..(68): Xaa in position 67 to 68 is any amino acid
  Variant (72)..(72): Xaa in position 72 is any amino acid
  Variant (74)..(74): Xaa in position 74 is any amino acid
  Variant (79)..(80): Xaa in position 79 to 80 is any amino acid
  Variant (83)..(84): Xaa in position 83 to 84 is any amino acid
  Variant (88)..(88): Xaa in position 88 is any amino acid
  Variant (92)..(92): Xaa in position 92 is any amino acid
  Variant (94)..(94): Xaa in position 94 is any amino acid
  Variant (97)..(98): Xaa in position 97 to 98 is any amino acid
  Variant (100)..(100): Xaa in position 100 is any amino acid
  Variant (103)..(106): Xaa in position 103 to 106 is any amino acid
  Variant (112)..(112): Xaa in position 112 is any amino acid
  Variant (114)..(114): Xaa in position 114 is any amino acid
  Variant (128)..(128): Xaa in position 128 is any amino acid
  Variant (131)..(131): Xaa in position 131 is any amino acid
  Variant (133)..(134): Xaa in position 133 to 134 is any amino acid
  Variant (139)..(139): Xaa in position 139 is any amino acid
  Variant (143)..(143): Xaa in position 143 is any amino acid
  Variant (145)..(145): Xaa in position 145 is any amino acid
  Variant (147)..(147): Xaa in position 147 is any amino acid
  Variant (150)..(150): Xaa in position 150 is any amino acid
  Variant (155)..(157): Xaa in position 155 to 157 is any amino acid
  Variant (160)..(160): Xaa in position 160 is any amino acid
  Variant (162)..(162): Xaa in position 162 is any amino acid
  Variant (164)..(164): Xaa in position 164 is any amino acid
  Variant (167)..(168): Xaa in position 167 to 168 is any amino acid
  Variant (170)..(171): Xaa in position 170 to 171 is any amino acid
  Variant (175)..(175): Xaa in position 175 is any amino acid
  Variant (178)..(178): Xaa in position 178 is any amino acid
  Variant (180)..(181): Xaa in position 180 to 181 is any amino acid
  Variant (183)..(184): Xaa in position 183 to 184 is any amino acid
  Variant (186)..(187): Xaa in position 186 to 187 is any amino acid
  Variant (190)..(190): Xaa in position 190 is any amino acid
  Variant (193)..(193): Xaa in position 193 is any amino acid
  Variant (197)..(199): Xaa in position 197 to 199 is any amino acid
  Variant (205)..(205): Xaa in position 205 is any amino acid
  Variant (210)..(211): Xaa in position 210 to 211 is any amino acid
  Variant (213)..(213): Xaa in position 213 is any amino acid
  Variant (215)..(216): Xaa in position 215 to 216 is any amino acid
  Variant (218)..(218): Xaa in position 218 is any amino acid
  Variant (220)..(223): Xaa in position 220 to 223 is any amino acid
  Variant (225)..(226): Xaa in position 225 to 226 is any amino acid
  Variant (236)..(236): Xaa in position 236 is any amino acid
  Variant (248)..(248): Xaa in position 248 is any amino acid
MXITAXXXYRDXXNFXRNQXXXILLXSLLXAFITVXLXHXFSPSXXQLXXLXXXXXXXXXSGXXGLXXLVQXMXPEQQXXLLXXSAAXTFSXLXGNXXLXGGXXXXIQLVSXGXRVSALRAIGASAPXLPXLXXLIFLXTLLXQXGXMLXVVPGXXXAIXLXLXPVXXVXXKMGXFAXMXXSXXLXXANXRLXAPAXXXWLLAKXLLLLXXSXFXXLXPXXXXVXXNTLSNLISAXLLIYLFRLYMLXR

SEQ ID NO: 37498 - protein, 56 aa, Artificial sequence
  protein pattern
  Variant (2)..(4): Xaa in position 2 to 4 is any amino acid
  Variant (8)..(8): Xaa in position 8 is Ala, Ser or Thr
  Variant (9)..(9): Xaa in position 9 is any amino acid
  Variant (12)..(12): Xaa in position 12 is Phe or Leu
  Variant (16)..(16): Xaa in position 16 is Phe or Ile
  Variant (17)..(17): Xaa in position 17 is any amino acid
  Variant (18)..(18): Xaa in position 18 is Ala or Thr
  Variant (22)..(22): Xaa in position 22 is Ile, Leu or Val
  Variant (23)..(23): Xaa in position 23 is Ala or Ser
  Variant (26)..(26): Xaa in position 26 is Cys or Thr
  Variant (32)..(32): Xaa in position 32 is Met or Val
  Variant (34)..(34): Xaa in position 34 is Gly or Asn
  Variant (35)..(35): Xaa in position 35 is any amino acid
  Variant (36)..(36): Xaa in position 36 is Ala, Thr or Val
  Variant (38)..(38): Xaa in position 38 is any amino acid
  Variant (40)..(40): Xaa in position 40 is Ala or Ser
  Variant (41)..(41): Xaa in position 41 is Asp or Ser
  Variant (42)..(42): Xaa in position 42 is Ala or Glu
  Variant (44)..(44): Xaa in position 44 is Ile or Leu
  Variant (45)..(45): Xaa in position 45 is Ala or Ser
  Variant (46)..(46): Xaa in position 46 is any amino acid
  Variant (48)..(48): Xaa in position 48 is Asn or Ser
  Variant (49)..(49): Xaa in position 49 is any amino acid
  Variant (50)..(50): Xaa in position 50 is Gly or Pro
  Variant (51)..(54): Xaa in position 51 to 54 is any amino acid
  Variant (55)..(55): Xaa in position 55 is Gly or Thr
AXXXYRDXXNFXRNQXXXILLXXLLXAFITVXLXXXFXPXXXQXXXLXXXXXXXXS

SEQ ID NO: 37499 - protein, 57 aa, Artificial sequence
  protein pattern
  Variant (2)..(2): Xaa in position 2 is any amino acid
  Variant (4)..(4): Xaa in position 4 is Ser or Thr
  Variant (9)..(9): Xaa in position 9 is Gln or Thr
  Variant (10)..(10): Xaa in position 10 is Ile or Val
  Variant (13)..(14): Xaa in position 13 to 14 is any amino acid
  Variant (18)..(18): Xaa in position 18 is Gly or Ser
  Variant (21)..(21): Xaa in position 21 is Ala or Ser
  Variant (22)..(22): Xaa in position 22 is Ala, Glu or Gly
  Variant (24)..(24): Xaa in position 24 is Ile or Val
  Variant (27)..(27): Xaa in position 27 is Ala or Val
  Variant (28)..(28): Xaa in position 28 is Ile or Leu
  Variant (30)..(30): Xaa in position 30 is Ala or Thr
  Variant (33)..(33): Xaa in position 33 is Ile or Val
  Variant (34)..(34): Xaa in position 34 is Ile or Leu
  Variant (35)..(35): Xaa in position 35 is Leu or Met
  Variant (36)..(36): Xaa in position 36 is Ile, Leu or Met
  Variant (42)..(42): Xaa in position 42 is Ala or Asp
  Variant (44)..(44): Xaa in position 44 is any amino acid
  Variant (46)..(46): Xaa in position 46 is Thr or Val
QXMXPEQQXXLLXXSAAXTFXXLXGNXXLXGGXXXXIQLVSXGXRXSALRAIGASAP

SEQ ID NO: 37500 - protein, 60 aa, Artificial sequence
  protein pattern
  Variant (2)..(2): Xaa in position 2 is any amino acid
  Variant (5)..(5): Xaa in position 5 is any or no amino acid
  Variant (7)..(7): Xaa in position 7 is any amino acid
  Variant (8)..(8): Xaa in position 8 is any or no amino acid
  Variant (11)..(11): Xaa in position 11 is Ile or Val
  Variant (12)..(12): Xaa in position 12 is Ile or Leu
  Variant (13)..(13): Xaa in position 13 is Leu or Met
  Variant (16)..(16): Xaa in position 16 is Ala, Leu or Val
  Variant (18)..(18): Xaa in position 18 is Ala or Ser
  Variant (20)..(20): Xaa in position 20 is Ala or Ser
  Variant (23)..(23): Xaa in position 23 is Ile or Met
  Variant (24)..(24): Xaa in position 24 is Leu or Val
  Variant (26)..(26): Xaa in position 26 is Glu, Gln or Thr
  Variant (27)..(27): Xaa in position 27 is Asp or Glu
  Variant (29)..(29): Xaa in position 29 is any amino acid
  Variant (31)..(31): Xaa in position 31 is Ile or Val
  Variant (33)..(34): Xaa in position 33 to 34 is Ala or Ser
  Variant (35)..(35): Xaa in position 35 is Ile or Met
  Variant (36)..(36): Xaa in position 36 is Lys or Arg
  Variant (37)..(37): Xaa in position 37 is Ser or Thr
  Variant (39)..(39): Xaa in position 39 is any amino acid
  Variant (40)..(40): Xaa in position 40 is Lys or Arg
  Variant (42)..(42): Xaa in position 42 is Ala or Thr
  Variant (43)..(43): Xaa in position 43 is Trp or Tyr
  Variant (44)..(44): Xaa in position 44 is Ala or Ser
  Variant (46)..(46): Xaa in position 46 is Leu or Met
  Variant (48)..(48): Xaa in position 48 is Ala or Leu
  Variant (49)..(49): Xaa in position 49 is Thr or Val
  Variant (53)..(53): Xaa in position 53 is Ile or Val
  Variant (54)..(54): Xaa in position 54 is Ile, Leu or Val
  Variant (55)..(55): Xaa in position 55 is any amino acid
GXMLXVXXPGXXXAIXLXLXPVXXVXXKXGXFXXXXXSXXLXXXNXRXXAPAXXXWLLAK

SEQ ID NO: 37501 - protein, 37 aa, Artificial sequence
  protein pattern
  Variant (2)..(2): Xaa in position 2 is Ala or Thr
  Variant (3)..(3): Xaa in position 3 is Ala or Val
  Variant (5)..(5): Xaa in position 5 is Pro or Thr
  Variant (7)..(7): Xaa in position 7 is Glu, Asn or Thr
  Variant (8)..(8): Xaa in position 8 is Ile or Val
  Variant (9)..(9): Xaa in position 9 is Ala or Gly
  Variant (10)..(10): Xaa in position 10 is Ala or Thr
  Variant (11)..(11): Xaa in position 11 is Ile or Val
  Variant (12)..(12): Xaa in position 12 is Leu or Val
  Variant (13)..(13): Xaa in position 13 is Ala or Leu
  Variant (14)..(14): Xaa in position 14 is Asn or Ser
  Variant (20)..(20): Xaa in position 20 is Ala or Ile
  Variant (23)..(23): Xaa in position 23 is Ile, Leu or Val
  Variant (26)..(26): Xaa in position 26 is Ile or Val
  Variant (35)..(35): Xaa in position 35 is Ile or Leu
  Variant (37)..(37): Xaa in position 37 is Pro or Gln
FXXLXPXXXXXXXXTLSNLXSAXLLXYLFRLYMLXRX

SEQ ID NO: 37502 - protein, 16 aa, Artificial sequence
  protein pattern
  Variant (2)..(2): Xaa in position 2 is Lys or Arg
  Variant (4)..(4): Xaa in position 4 is Phe or Leu
  Variant (5)..(5): Xaa in position 5 is Ile or Val
  Variant (7)..(7): Xaa in position 7 is Ile or Met
  Variant (9)..(9): Xaa in position 9 is Ile or Leu
  Variant (10)..(10): Xaa in position 10 is Ser or Thr
  Variant (13)..(13): Xaa in position 13 is any or no amino acid
  Variant (15)..(15): Xaa in position 15 is any or no amino acid
PXLXXLXFXXTLXVXQ

SEQ ID NO: 37503 - DNA, 237 bp, Escherichia coli
  CDS (1)..(237): transl_table=11
atgtcgacacacaacactcatattaatgaaacaatgcaacgcaacgggagaaataacatggccgaacatcgtggtggttcaggaaatttcgccgaagaccgtgagaaggcatccgacgcaggccgtaaaggcggtcagcatagcggcggtaattttaaaaatgatccgcaacgcgcatctgaagcgggtaaaaaaggcggtcaacaaagcggtggtaataaatcaggcaaatcctaa

SEQ ID NO: 37504 - protein, 78 aa, Escherichia coli
MSTHNTHINETMQRNGRNNMAEHRGGSGNFAEDREKASDAGRKGGQHSGGNFKNDPQRASEAGKKGGQQSGGNKSGKS

SEQ ID NO: 37505 - DNA, 183 bp, Escherichia coli; 0157:H7
  CDS (1)..(183)
atgaccgaacatcgtggcggtgcaggtaatttcgctgaagatcgacaaaaagcttctgacgctggtcgtaaaggcggccaacatagtggcggtaattttaaaaacgatccacaaagagcatcagaagcagggaaaaaaggtggtcagaatagccatggtggcggccgtaaatctgactcttaa

SEQ ID NO: 37506 - protein, 60 aa, Escherichia coli; 0157:H7
MTEHRGGAGNFAEDRQKASDAGRKGGQHSGGNFKNDPQRASEAGKKGGQNSHGGGRKSDS

SEQ ID NO: 37507 - DNA, 345 bp, Pseudomonas aeruginosa PAO1
  CDS (1)..(345): transl_table=11
atgaccgacaaacgacaaggcatgagcaccagcgaagccgggcagaaaggcggcgcagctacctccaggagccacggcaaggagttctaccaggagatcggccacaagggtggccaggccagcggcggcaacttcgccaatgacccgcagcgcgccgccgaagccgggcgcaagggtggccagcagagcggaggcaatttcgccaatgacccggaaagagccgccgaggcgggccgcaagggcggccagcagagcggcgggaacttcgccaacgatcgggaaaaggcctccgaggcaggacgcaagggtggccagcacagccacggcggcggacgctcgtcctga

SEQ ID NO: 37508 - protein, 114 aa, Pseudomonas aeruginosa PAO1
MTDKRQGMSTSEAGQKGGAATSRSHGKEFYQEIGHKGGQASGGNFANDPQRAAEAGRKGGQQSGGNFANDPERAAEAGRKGGQQSGGNFANDREKASEAGRKGGQHSHGGGRSS

SEQ ID NO: 37509 - DNA, 204 bp, Escherichia coli O157:H7 EDL933
  CDS (1)..(204): transl_table=11
atgcaacgcaacgggagaaataacatggccgaacatcgtggtggttcaggaaatttcgccgaagaccgtgagaaggcatccgacgcaggccgtaaaggcggtcagcatagcggcggtaattttaaaaatgatccgcaacgcgcatctgaagcgggtaaaaaaggcggtcaacaaagcggtggtaataaatcaggaaaatcctga

SEQ ID NO: 37510 - protein, 67 aa, Escherichia coli O157:H7 EDL933
MQRNGRNNMAEHRGGSGNFAEDREKASDAGRKGGQHSGGNFKNDPQRASEAGKKGGQQSGGNKSGKS

SEQ ID NO: 37511 - DNA, 183 bp, Salmonella typhimurium LT2
  CDS (1)..(183): transl_table=11
atggcagaacatcgcggcggttccggtaattttgcagaagataaagagaaagcctcagaagcaggtcgtaaaggcggccagcatagcggtgggaactttaaaaacgacccacaacgtgcatctgaagcgggtaaaaaaggtggccaaaatagccacagtggtggacggaaatccggcaattaa

SEQ ID NO: 37512 - protein, 60 aa, Salmonella typhimurium LT2
MAEHRGGSGNFAEDKEKASEAGRKGGQHSGGNFKNDPQRASEAGKKGGQNSHSGGRKSGN

SEQ ID NO: 37513 - DNA, 264 bp, Xanthomonas axonopodis pv. citri str. 306
  CDS (1)..(264): transl_table=11
atgctggcctcgcaccacggcgtccagtggtgcattccccaactgacgaaacgagaatccgcaatggcaaatcagaacgacaacaagggtggcaccagcaaccgcggctttgcttcgatggacgaagacaagcagcgcgaaatcgcatccaagggcggcaaggcggcccatgaaagtggcaatgcccacgagttcacctcgcaagaagcgcgcgaagccggcaagaagggcggccaggcgagcggtggcggcaacaaccgctga

SEQ ID NO: 37514 - protein, 87 aa, Xanthomonas axonopodis pv. citri str. 306
MLASHHGVQWCIPQLTKRESAMANQNDNKGGTSNRGFASMDEDKQREIASKGGKAAHESGNAHEFTSQEAREAGKKGGQASGGGNNR

SEQ ID NO: 37515 - DNA, 237 bp, Shigella flexneri 2a str. 301
  CDS (1)..(237): transl_table=11
gtgtcgacacacaacactcatattaatgaaacaatgcaacgcaacgggagaaataacatggccgaacatcgtggtagttcaggaaatttcgccgaagaccgtgagaaggcatccgacgcaggccgtaaaggcggtcagcatagcggcggtaattttaaaaatgatccgcaacgcgcatctgaagcgggtaaaaaaggcggtcaacaaagcggtggtaataaatcaggcaaatcctga

SEQ ID NO: 37516 - protein, 78 aa, Shigella flexneri 2a str. 301
MSTHNTHINETMQRNGRNNMAEHRGSSGNFAEDREKASDAGRKGGQHSGGNFKNDPQRASEAGKKGGQQSGGNKSGKS

SEQ ID NO: 37517 - DNA, 258 bp, Pseudomonas putida KT2440
  CDS (1)..(258): transl_table=11
atggcatcgattcatgcgatcagccaatccatcgcaaggagaaacgacatggcgcaggaccaagagcgaacccgccagcgcggcggcaccaaggaaaccaactcaggtaactttgccaatgaccgcgagagggcatcgcgcgctggccacaagggtggccaggcatctggcggcaactttgccaacgaccgccaacgggcatcggaagccggtcgcaagggagggcgcaatagccacggcgcaggccgcaaccagtga

SEQ ID NO: 37518 - protein, 85 aa, Pseudomonas putida KT2440
MASIHAISQSIARRNDMAQDQERTRQRGGTKETNSGNFANDRERASRAGHKGGQASGGNFANDRQRASEAGRKGGRNSHGAGRNQ

SEQ ID NO: 37519 - DNA, 168 bp, Salmonella enterica subsp. enterica serovar Typhi Ty2
  CDS (1)..(168): transl_table=11
atggcaaaccatcgtggcggttccggtaattttgcggaagaccgcgaaagagcatcagaagcaggtcgtaaaagtggtcagcacagcgggggcaattttaagaatgacccgcagcgtgcatccgaagcaggcaaaaaagggggcaaaagcagtaaccgtaatcgctag

SEQ ID NO: 37520 - protein, 55 aa, Salmonella enterica subsp. enterica serovar Typhi Ty2
MANHRGGSGNFAEDRERASEAGRKSGQHSGGNFKNDPQRASEAGKKGGKSSNRNR

SEQ ID NO: 37521 - DNA, 249 bp, Aspergillus nidulans FGSC A4
  CDS (1)..(249)
atggccgacaaccagaaccccggtaacttcgccaaccgcccccacgaggaggtcgagaacatcgcccgcaagggcggccagtccagccacagcggcggctttgccagtatggactctgagaagcagcgcaacatcgcttcccaaggtggtcacgcctccagtggtagcttccagcctggcgatgagcgtgcccgtgaggcaggacgcaagggcggcaaggctactggtcaccacgagcctgaggaataa

SEQ ID NO: 37522 - protein, 82 aa, Aspergillus nidulans FGSC A4
MADNQNPGNFANRPHEEVENIARKGGQSSHSGGFASMDSEKQRNIASQGGHASSGSFQPGDERAREAGRKGGKATGHHEPEE

SEQ ID NO: 37523 - DNA, 351 bp, Rhodospirillum rubrum ATCC 11170
  CDS (1)..(351): transl_table=11
atgagcgacaaccgtaacacctccggccgtggcttcgcttcgatggacgaagacaagcagcgcgacatcgccagcaagggtgggcagagcgttcccaatgagaagcgcagcttctccaaagaccacgaattggcggcggaagccggccgcaaggggggacagaacgttcccgacgaaaagcgcagcttctccaaggatcacgagttggcgtcccaggccggtcaaaagggtggccagaactcgggcggcaatttcgccaatgatccggaacgggcggccgaagcgggccgcaagggcggcgaggcttctcatggctcgtcaagcgggcagtcgtcgtcggaccatcgctag

SEQ ID NO: 37524 - protein, 116 aa, Rhodospirillum rubrum ATCC 11170
MSDNRNTSGRGFASMDEDKQRDIASKGGQSVPNEKRSFSKDHELAAEAGRKGGQNVPDEKRSFSKDHELASQAGQKGGQNSGGNFANDPERAAEAGRKGGEASHGSSSGQSSSDHR

SEQ ID NO: 37525 - DNA, 168 bp, Pseudomonas aeruginosa UCBPP-PA14
  CDS (1)..(168): transl_table=11
atggcacagcatcaaggtggtaaaggcaacttcgcggaagacccgaaacgtgcttcggaggccggcaagaagggcggccaggccagcggcggcaacttcaagaacgatccgcagcgggcctccgaggctggcaagaaaggtggccagcgcagccacggcgggaactga

SEQ ID NO: 37526 - protein, 55 aa, Pseudomonas aeruginosa UCBPP-PA14
MAQHQGGKGNFAEDPKRASEAGKKGGQASGGNFKNDPQRASEAGKKGGQRSHGGN

SEQ ID NO: 37527 - DNA, 315 bp, Aspergillus niger
  CDS (1)..(315)
atggcctccaaccccaaccccggcaacttcgccaaccgcccccaggaagaagtcgaagacatcgcccgcaagggtggccagtccagccactcgggcggattcgcctccatggacgaggataagcagcgcaacatcgcctccatgggcggccaagcctccagtggtagcttccagcccggcgaagaacgggcccgggaagccggccacaagggtggaatggcatctggagggagcttcgagcctggagatccccgggctagagaggctggtcggaagggaggatccaggactgcggaggatatgccggaggagtaa

SEQ ID NO: 37528 - protein, 104 aa, Aspergillus niger
MASNPNPGNFANRPQEEVEDIARKGGQSSHSGGFASMDEDKQRNIASMGGQASSGSFQPGEERAREAGHKGGMASGGSFEPGDPRAREAGRKGGSRTAEDMPEE

SEQ ID NO: 37529 - DNA, 309 bp, Aspergillus oryzae
  CDS (1)..(309)
atggcccacaacccgaaccccggaaacttcgccaaccgcccccatgacgaggtcgaagacatcgcccgcaagggaggccaatcgagccaccaaggtggtttcgccagcacggacgaggataagcagagagacatcgcctcgaagggcggtcacgcttcgtcaggcagcttccgtcctggagaccctcgggctagggaggctggtcacaagggtggacttgcctctggtggaagcttcgagcctggggatgagagagctagggaggctggccacaagggtggaaaggctactggacacccggaggagtaa

SEQ ID NO: 37530 - protein, 102 aa, Aspergillus oryzae
MAHNPNPGNFANRPHDEVEDIARKGGQSSHQGGFASTDEDKQRDIASKGGHASSGSFRPGDPRAREAGHKGGLASGGSFEPGDERAREAGHKGGKATGHPEE

SEQ ID NO: 37531 - DNA, 180 bp, Escherichia coli
  CDS (1)..(180): transl_table=11
atggccgaacatcgtggtggttcaggaaatttcgccgaagaccgtgagaaggcatccgacgcaggccgtaaaggcggtcagcatagcggcggtaattttaaaaatgatccgcaacgcgcatctgaagcgggtaaaaaaggcggtcaacaaagcggtggtaataaatcaggcaaatcctga

SEQ ID NO: 37532 - protein, 59 aa, Escherichia coli
MAEHRGGSGNFAEDREKASDAGRKGGQHSGGNFKNDPQRASEAGKKGGQQSGGNKSGKS

SEQ ID NO: 37533 - DNA, 174 bp, Escherichia coli
  CDS (1)..(174): transl_table=11
atggcaaaccatcgaggcggttccggcaattttgcagaagaccgcgaaagagcatcagaagcaggtaaaaaaggtggacagcacagcgggggtaatttcaagaatgacccgcagcgcgcatctgaagcaggtaaaaaaggtggcaagagcagtcacggcaaaagcgacaactag

SEQ ID NO: 37534 - protein, 57 aa, Escherichia coli
MANHRGGSGNFAEDRERASEAGKKGGQHSGGNFKNDPQRASEAGKKGGKSSHGKSDN

SEQ ID NO: 37535 - DNA, 26 bp, Artificial sequence
  primer
atgtcgacacacaacactcatattaa

SEQ ID NO: 37536 - DNA, 27 bp, Artificial sequence
  primer
ttaggatttgcctgatttattaccacc

SEQ ID NO: 37537 - protein, 79 aa, Artificial sequence
  consensus sequence
  Variant (3)..(3): Xaa in position 3 is any amino acid
  Variant (4)..(28): Xaa in position 4 to 28 is any or no amino acid
  Variant (30)..(30): Xaa in position 30 is any amino acid
  Variant (33)..(33): Xaa in position 33 is any amino acid
  Variant (34)..(34): Xaa in position 34 is any or no amino acid
  Variant (36)..(44): Xaa in position 36 to 44 is any amino acid
  Variant (48)..(50): Xaa in position 48 to 50 is any amino acid
  Variant (52)..(52): Xaa in position 52 is any amino acid
  Variant (56)..(56): Xaa in position 56 is any amino acid
  Variant (58)..(62): Xaa in position 58 to 62 is any amino acid
  Variant (65)..(65): Xaa in position 65 is any amino acid
  Variant (69)..(69): Xaa in position 69 is any amino acid
  Variant (73)..(75): Xaa in position 73 to 75 is any amino acid
  Variant (76)..(78): Xaa in position 76 to 78 is any or no amino acid
GGXXXXXXXXXXXXXXXXXXXXXXXXXXGXFAXXDXXXXXXXXXKGGXXXQXSGGXFXXXXXRAXEAGXKGGXXXXXXG

SEQ ID NO: 37538 - protein, 28 aa, Artificial sequence
  protein pattern
  Variant (3)..(3): Xaa in position 3 is any or no amino acid
  Variant (7)..(9): Xaa in position 7 to 9 is any or no amino acid
  Variant (12)..(12): Xaa in position 12 is Asn or Ser
  Variant (14)..(14): Xaa in position 14 is any amino acid
  Variant (15)..(15): Xaa in position 15 is Asn or Pro
  Variant (16)..(16): Xaa in position 16 is Asp or Gly
  Variant (17)..(17): Xaa in position 17 is any amino acid
  Variant (18)..(18): Xaa in position 18 is Glu, Pro or Gln
  Variant (21)..(21): Xaa in position 21 is any amino acid
  Variant (25)..(25): Xaa in position 25 is His, Lys or Arg
AGXKGGXXXGGXFXXXXXRAXEAGXKGG

SEQ ID NO: 37539 - DNA, 1596 bp, Escherichia coli
  CDS (1)..(1596): transl_table=11
atggctgacattctgctgctcgataatatcgactcttttacgtacaacctggcagatcagttgcgcagcaatgggcataacgtggtgatttaccgcaaccatattccggcgcaaaccttaattgaacgcctggcgaccatgagcaatccggtgctgatgctttctcctggccccggtgtgccgagcgaagccggttgtatgccggaactcctcacccgcttgcgtggcaagctgcccattattggcatttgcctcggacatcaggcgattgtcgaagcttacgggggctatgtcggtcaggcgggcgaaattctccacggtaaagcctccagcattgaacatgacggtcaggcgatgtttgccggattaacaaacccgctgccggtggcgcgttatcactcgctggttggcagtaacattccggccggtttaaccatcaacgcccattttaatggcatggtgatggcagtacgtcacgatgcggatcgcgtttgtggattccagttccatccggaatccattctcaccacccagggcgctcgcctgctggaacaaacgctggcctgggcgcagcagaaactagagccagccaacacgctgcaaccgattctggaaaaactgtatcaggcgcagacgcttagccaacaagaaagccaccagctgttttcagcggtggtgcgtggcgagctgaagccggaacaactggcggcggcgctggtgagcatgaaaattcgcggtgagcacccgaacgagatcgccggggcagcaaccgcgctactggaaaacgcagcgccgttcccgcgcccggattatctgtttgctgatatcgtcggtactggcggtgacggcagcaacagtatcaatatttctaccgccagtgcgtttgtcgccgcggcctgtgggctgaaagtggcgaaacacggcaaccgtagcgtctccagtaaatctggttcgtccgatctgctggcggcgttcggtattaatcttgatatgaacgccgataaatcgcgccaggcgctggatgagttaggtgtatgtttcctctttgcgccgaagtatcacaccggattccgccacgcgatgccggttcgccagcaactgaaaacccgcaccctgttcaatgtgctggggccattgattaacccggcgcatccgccgctggcgttaattggtgtttatagtccggaactggtgctgccgattgccgaaaccttgcgcgtgctggggtatcaacgcgcggcggtggtgcacagcggcgggatggatgaagtttcattacacgcgccgacaatcgttgccgaactgcatgacggcgaaattaaaagctatcagctcaccgcagaagactttggcctgacaccctaccaccaggagcaactggcaggcggaacaccggaagaaaaccgtgacattttaacacgtttgttacaaggtaaaggcgacgccgcccatgaagcagccgtcgctgcgaacgtcgccatgttaatgcgcctgcatggccatgaagatctgcaagccaatgcgcaaaccgttcttgaggtactgcgcagtggttccgcttacgacagagtcaccgcactggcggcacgagggtaa

SEQ ID NO: 37540 - protein, 531 aa, Escherichia coli
MADILLLDNIDSFTYNLADQLRSNGHNVVIYRNHIPAQTLIERLATMSNPVLMLSPGPGVPSEAGCMPELLTRLRGKLPIIGICLGHQAIVEAYGGYVGQAGEILHGKASSIEHDGQAMFAGLTNPLPVARYHSLVGSNIPAGLTINAHFNGMVMAVRHDADRVCGFQFHPESILTTQGARLLEQTLAWAQQKLEPANTLQPILEKLYQAQTLSQQESHQLFSAVVRGELKPEQLAAALVSMKIRGEHPNEIAGAATALLENAAPFPRPDYLFADIVGTGGDGSNSINISTASAFVAAACGLKVAKHGNRSVSSKSGSSDLLAAFGINLDMNADKSRQALDELGVCFLFAPKYHTGFRHAMPVRQQLKTRTLFNVLGPLINPAHPPLALIGVYSPELVLPIAETLRVLGYQRAAVVHSGGMDEVSLHAPTIVAELHDGEIKSYQLTAEDFGLTPYHQEQLAGGTPEENRDILTRLLQGKGDAAHEAAVAANVAMLMRLHGHEDLQANAQTVLEVLRSGSAYDRVTALAARG

SEQ ID NO: 37541 - DNA, 1602 bp, Campylobacter jejuni subsp. jejuni NCTC 11168
  CDS (1)..(1602): transl_table=11
atgatacttttaattgataattatgattcttttgtttttaatgttaaaagcatgttagagcaactcagcaatgatgaaattttagtaagaagaaatgatgcaatttctctgagtgaaattaaaaatttaaatcctactcatattattttaagtcctggtccaaagcatccaagtcaaagtgggatttgtcttgaaatttttaaagcaaggcttaatatccctgttttgggcatttgcttaggacatcaagctttagctttagcttttgattctttagtggttaagatgcaagagcctatgcatgcaaaaaattctttgataaaacagtgcagggaaaatgaattattttctaatttgccttcaaattttagtgtaatgcgttatcattctttagaggttaaacagcttagtgatgagcttgaaattttagcccttgatgaaaagggtgtgattatggctttgggacataaaaatttaccttattatggtgtgcaatttcatcctgaaagctattttagtgaatatggcttgcaacttttttctaattttttaaaacaagatataaaaaaaccacaaaaacaagaaaatcctttaagtttttatttgcaaaaaatgagtgaaaatcattttttacaaagcgatgattttgagcaaatttgtaagattattatgtctaaagattatgaaattttacaagtagtggctttgttgattttaatcactgaaaagtccttaaatgaaaaatctttaagtgcttttgtaagacaaattttaagatattctcaaacttttagtgatgagagtgagatgattgatatttgtggaacaggtggagatggttttaaaagtatcaatgtttctacgactagtgcttttattttagcagctttaggagtaaaagtagccaaacacggaaatcgtgccatttcaagttctagcggaagtacagatgtgttagaagctttaaatataactactccaaacactttagaatcagttttaaaacaactaaataatcaagggcttagttttttacatgctccattttttcatcctttagtaggagaacttaaagagatcagatcaagacttggagtaagaacggtttttaatgttttaggtcctttattgcaccctaatttaaagttaaaatatcaacttatgggaaattatcacgcacctgtgcataggcttttgatagaggttttaaaaaatttaggacgcaaaaaagctttagtggtaagaggaaatgatggtatggatgagcttagtatttgcgatgaaagtaaaatttatgagctttgtgaaggagaaattttagagtattctatctgtcctgaacaatttggttttaaaagagcttttcatagtgaaatcataggatctagtgcatatgacaacgctaaagatttaaaagatattttaagcggtagaatgcaaggggcaaaatttgatttggtagttttaaatgctatgtttgcactttatacagccaataaagcaagttcgcctttagtggctaaagatatgattttagaagccatttattcaggtaaggttatagaatattttaaggagtatcaagcttatgctaaagcttaa

SEQ ID NO: 37542 - protein, 533 aa, Campylobacter jejuni subsp. jejuni NCTC 11168
MILLIDNYDSFVFNVKSMLEQLSNDEILVRRNDAISLSEIKNLNPTHIILSPGPKHPSQSGICLEIFKARLNIPVLGICLGHQALALAFDSLVVKMQEPMHAKNSLIKQCRENELFSNLPSNFSVMRYHSLEVKQLSDELEILALDEKGVIMALGHKNLPYYGVQFHPESYFSEYGLQLFSNFLKQDIKKPQKQENPLSFYLQKMSENHFLQSDDFEQICKIIMSKDYEILQVVALLILITEKSLNEKSLSAFVRQILRYSQTFSDESEMIDICGTGGDGFKSINVSTTSAFILAALGVKVAKHGNRAISSSSGSTDVLEALNITTPNTLESVLKQLNNQGLSFLHAPFFHPLVGELKEIRSRLGVRTVFNVLGPLLHPNLKLKYQLMGNYHAPVHRLLIEVLKNLGRKKALVVRGNDGMDELSICDESKIYELCEGEILEYSICPEQFGFKRAFHSEIIGSSAYDNAKDLKDILSGRMQGAKFDLVVLNAMFALYTANKASSPLVAKDMILEAIYSGKVIEYFKEYQAYAKA

SEQ ID NO: 37543 - DNA, 1596 bp, Escherichia coli O157:H7 EDL933
  CDS (1)..(1596): transl_table=11
  misc_feature (1358)..(1358): y is t or c
atggctgacattctgctgctcgataatatcgactcttttacttacaacctggcagatcagttgcgcagcaatggtcataacgtggtgatttaccgcaaccatattccggcgcagaccttaattgaacgccttgcgacgatgagcaatccggtgctgatgctttctcctggacccggtgtgccgagcgaagctggttgtatgcctgaactgcttacccgcctgcgcggtaagctgcctattattggcatttgccttggtcatcaggcgattgtcgaagcttacgggggctatgtcggtcaggcgggcgaaattcttcacggtaaagcgtcgagcattgaacatgacggtcaggcgatgtttgccggattaacaaacccgctgccggtggcgcgttatcactcgctggttggcagtaatattccggccggtttaaccatcaacgcccattttaatggcatggtgatggcggtgcgtcacgatgcagatcgcgtttgcggattccagttccacccggaatccattctcaccacccagggcgctcgcctgctggaacaaacgctggcctgggcgcagcagaaactagagccaaccaacacgctgcaaccgattctggaaaaactgtatcaggcgcagacccttagccagcaggaaagtcatcagctattttcagcggtggtacgtggtgaactgaaaccggaacacctggcggcggcgctggtgagcatgaaaattcgcggcgagcacccgaacgagatcgccggagcagcaaccgcgctactggaaaacgccgcgccgttcccgcgtccggattatctgtttgccgatatcgtcggcaccggcggtgacggcagcaacagcatcaatatttccaccgccagtgcgtttgtcgccgcggcctgtgggctgaaagtggcgaaacacggcaaccgtagcgtctccagtaaatctggctcgtcggatctgctggcggcgttcggtattaatcttgatatgaacgccgataaatcgcgccaggcgctggatgagttaggtgtatgtttcctctttgcaccgaaatatcacaccggatttcgccatgcaatgccggttcgccagcaactaaaaacccgcaccctgttcaatgtgctggggccattgattaacccggcgcatccgccgctggcgttaattggtgtttatagtccggaactggtgctgccgattgccgaaaccttacgcgtgctggggtatcaacgcgcggcggtggtgcacagcggcgggatggatgaagtttcattacacgcgccgacaatcgttgccgagctgcatgacggcgaaattaagagctatcaattgaccgctgaagattttggcctgaytccctaccaccaggagcaactggcaggcggaacaccggaagaaaaccgtgacattttaacacgcttgttacaaggtaaaggcgacgccgcccatgaagcagccgtcgcggcgaatgtcgccatgttaatgcgcctgcatggccatgaagatctgcaagccaatgcgcaaaccgttcttgaggtactgcgcagtggttccgcttacgacagagtcaccgcactggcggcacgagggtaa

SEQ ID NO: 37544 - protein, 531 aa, Escherichia coli O157:H7 EDL933
  misc_feature (453)..(453): The Xaa at location 453 stands for Ile, or Thr.
MADILLLDNIDSFTYNLADQLRSNGHNVVIYRNHIPAQTLIERLATMSNPVLMLSPGPGVPSEAGCMPELLTRLRGKLPIIGICLGHQAIVEAYGGYVGQAGEILHGKASSIEHDGQAMFAGLTNPLPVARYHSLVGSNIPAGLTINAHFNGMVMAVRHDADRVCGFQFHPESILTTQGARLLEQTLAWAQQKLEPTNTLQPILEKLYQAQTLSQQESHQLFSAVVRGELKPEHLAAALVSMKIRGEHPNEIAGAATALLENAAPFPRPDYLFADIVGTGGDGSNSINISTASAFVAAACGLKVAKHGNRSVSSKSGSSDLLAAFGINLDMNADKSRQALDELGVCFLFAPKYHTGFRHAMPVRQQLKTRTLFNVLGPLINPAHPPLALIGVYSPELVLPIAETLRVLGYQRAAVVHSGGMDEVSLHAPTIVAELHDGEIKSYQLTAEDFGLXPYHQEQLAGGTPEENRDILTRLLQGKGDAAHEAAVAANVAMLMRLHGHEDLQANAQTVLEVLRSGSAYDRVTALAARG

SEQ ID NO: 37545 - DNA, 1596 bp, Shigella flexneri 2a str. 301
  CDS (1)..(1596): transl_table=11
atggctgacattctgctgctcgataatatcgactcttttacgtacaacctggcagatcagttgcgcagcaatggtcataacgtggtgatttaccgcaaccatattccggcgcagaccttaattgaacgcctggcgacgatgagcaatccggtactgatgctttctcctggccccggtgtgccgagcgaagccggttgtatgccggaactcctcacccgcttgcgtggcaagctgcccattattggcatttgcctcggacatcaggcaattgtcgaagcttacgggggctatgtcggtcaggcgggcgaaattcttcacggtaaagcgtcgagcattgaacatgacggtcaggcgatgtttgccggattaacaaacccgctgccggtggcgcgttatcactcgctggttggcagtaacattccggccggtttaaccatcaacgcccattttaatggcatggtgatggcagtacgtcacgatgcggatcgcgtttgtggattccagttccatccggaatccattctcaccacccagggcgctcgcctgctggaacaaacgctggcctgggcgcagcagaaactagagccagccaacacgctgcaaccgattctggaaaaactgtatcaggcgcagacgcttagccaacaagaaagccaccagctgttttcagcggtggtgcgtggcgagctgaagccggaacaactggcggcggcgctggtgagcatgaaaattcgcggtgagcacccgaacgagatcgccggggcagcaaccgcgctactggaaaacgcagcgccgttcccgcgcccggattatctgtttgctgatatcgtcggtactggcggtgacggcagcaacagtatcaatatttctaccgccagtgcgtttgtcgccgcggcctgtgggctgaaagtggcgaaacacggtaaccgcagcgtctccagtaaatccggctcgtcggatctgctggcggcattcggtattaatcttgatatgaacgccaataaatcgcgccaggcgctggacgagttaggcgtatgtttcctctttgcgccgaaatatcacaccggattccgccacgcgatgccggttcgccagcaactgaaaacccgcaccctgttcaatgtgctggggccattgattaacccggcgcatccgccgctggcgttaattggtgtttatagtccggaactggtgctgccgattgccgaaaccttgcgcgtgctggggtatcaacgcgcggcggtggtgcacagcggcgggatggatgaagtttcattacacgcgccgacaatcgttgccgagctgcatgacggcaaaattaagagctatcaattgaccgctgaagattttggcctgactccctaccaccaggagcaactggcaggcggaacacctgaagaaaaccgtgacattttaacacgcttgttacaaggtaaaggcgacgccgcccatgaagcagccgtcgctgcgaacgtcgccatgttaatgcgcctgcatggccatgaagatctgcaagccaatgcgcaaaccgttcttgaggtactgcgcagtggttccgcttacgacagagttaccgcgctggcggcacgagggtaa

SEQ ID NO: 37546 - protein, 531 aa, Shigella flexneri 2a str. 301
MADILLLDNIDSFTYNLADQLRSNGHNVVIYRNHIPAQTLIERLATMSNPVLMLSPGPGVPSEAGCMPELLTRLRGKLPIIGICLGHQAIVEAYGGYVGQAGEILHGKASSIEHDGQAMFAGLTNPLPVARYHSLVGSNIPAGLTINAHFNGMVMAVRHDADRVCGFQFHPESILTTQGARLLEQTLAWAQQKLEPANTLQPILEKLYQAQTLSQQESHQLFSAVVRGELKPEQLAAALVSMKIRGEHPNEIAGAATALLENAAPFPRPDYLFADIVGTGGDGSNSINISTASAFVAAACGLKVAKHGNRSVSSKSGSSDLLAAFGINLDMNANKSRQALDELGVCFLFAPKYHTGFRHAMPVRQQLKTRTLFNVLGPLINPAHPPLALIGVYSPELVLPIAETLRVLGYQRAAVVHSGGMDEVSLHAPTIVAELHDGKIKSYQLTAEDFGLTPYHQEQLAGGTPEENRDILTRLLQGKGDAAHEAAVAANVAMLMRLHGHEDLQANAQTVLEVLRSGSAYDRVTALAARG

SEQ ID NO: 37547 - DNA, 1596 bp, Escherichia coli CFT073
  CDS (1)..(1596): transl_table=11
atggctgacattctgctgctcgataatatcgactcttttacgtacaacctggcagatcagttgcgcagcaatggtcataacgtggtgatttaccgcaaccatattccggcgcagaccttaattgaacgcctggcgacgatgagcaatccggtgctgatgctttctcctggccccggtgtgccgagcgaagccggttgtatgccggaactcctcacccgcttgcgtggcaagctgccaattattggcatttgcctcggacatcaggcgattgtcgaagcttacgggggctatgtcggtcaggcgggcgaaattcttcacggtaaagcgtcgagcattgaacatgacggtcaggcgatgtttgccggattaacaaacccgctgccagtggcgcgttatcactcgctggttggcagtaacattccggccggtttaaccatcaacgcccattttaatggcatggtgatggcggtgcgtcacgatgcagatcgcgtttgtggattccagttccatccggaatccattcttactacccagggcgctcgcctgctggaacaaacgctggcctgggcgcagcagaaactagagccaaccaacacgctgcaaccgattctggaaaaactgtatcaggcacagacgcttagccaacaagaaagccaccagctgttttcagcggtggtacgtggcgagctgaagccggaacaactggcggcggcgctggtgagcatgaaaattcgcggtgaacacccgaacgagatcgccggggcagcaaccgcgctactggaaaacgccgcgccattcccgcgcccggattatctgtttgccgatatcgtcggtactggcggtgacggcagcaacagcatcaatatttctaccgccagtgcgtttgtcgccgcggcctgcgggctgaaagtggcgaaacacggcaaccgtagcgtctccagtaaatccggctcgtcggatctgctggcggcgttcggtattaatcttgatatgaacgccgataaatcgcgccaggcgctggatgagttaggcgtctgtttcctctttgcgccgaagtatcacaccggattccgccatgcgatgccggttcgccagcaactgaaaacccgcactctgttcaacgtgctgggaccattgattaacccggcgcatccgccgctggcgctaattggtgtttatagtccggaactggtgctgccgattgccgaaaccttgcgcgtgctggggtatcaacgcgcggcagtggtgcacagcggcgggatggatgaagtttcattacacgcgccgacaatcgttgccgaactacatgacggcgaaattaagagctatcaattgaccgctgaagattttggcctgacaccctaccaccaggagcaattggcaggcggaacaccggaagaaaaccgtgacattttaacacgcttgttacaaggtaaaggcgacgccgcccatgaagcagccgtcgcggcgaatgtcgccatgttaatgcgcctgcatggccatgaagatctgcaagccaatgcgcaaaccgttcttgaggtactgcgcagtggttccgcttacgacagagtcaccgcactggcggcacgagggtaa

SEQ ID NO: 37548 - protein, 531 aa, Escherichia coli CFT073
MADILLLDNIDSFTYNLADQLRSNGHNVVIYRNHIPAQTLIERLATMSNPVLMLSPGPGVPSEAGCMPELLTRLRGKLPIIGICLGHQAIVEAYGGYVGQAGEILHGKASSIEHDGQAMFAGLTNPLPVARYHSLVGSNIPAGLTINAHFNGMVMAVRHDADRVCGFQFHPESILTTQGARLLEQTLAWAQQKLEPTNTLQPILEKLYQAQTLSQQESHQLFSAVVRGELKPEQLAAALVSMKIRGEHPNEIAGAATALLENAAPFPRPDYLFADIVGTGGDGSNSINISTASAFVAAACGLKVAKHGNRSVSSKSGSSDLLAAFGINLDMNADKSRQALDELGVCFLFAPKYHTGFRHAMPVRQQLKTRTLFNVLGPLINPAHPPLALIGVYSPELVLPIAETLRVLGYQRAAVVHSGGMDEVSLHAPTIVAELHDGEIKSYQLTAEDFGLTPYHQEQLAGGTPEENRDILTRLLQGKGDAAHEAAVAANVAMLMRLHGHEDLQANAQTVLEVLRSGSAYDRVTALAARG

SEQ ID NO: 37549 - DNA, 1596 bp, Salmonella enterica subsp. enterica serovar Typhi Ty2
  CDS (1)..(1596): transl_table=11
atggctgatattctgctgctcgataacatcgactcgtttacctggaacctggcagatcagctacggaccaacggtcataacgtggtgatttaccgtaaccatattccggcgcagacgcttatcgatcgcctggcgacaatgaaaaatccggtgctaatgctctcccccggtccgggcattcccagcgaggcaggctgtatgccggagctgctgacccgactacgcggcaagttaccgatcatcggcatttgtctggggcatcaggcgattgtcgaagcttacggcggttatgtcggtcaggcgggagaaatcctgcatggcaaagcctccagcattgaacatgacggtcaggcgatgttcgccggtctggcgaatccgctaccggtcgcgcgttatcattcgctggtcggcagtaatgttcctgccgggctaaccattaacgcccatttcaacggcatggtgatggcggtacgtcatgatgcggatcgcgtttgcggttttcaatttcatcctgagtccatcctgacgacacagggcgcgcgtctactggagcaaacattagcctgggcgcagcaaaagctggaaccgaccaacaccctacagccaattctggagaaactctatcaggcgcaaactctgacgcaacaagagagccatcagttgttttcggcggtcgtccgcggcgaacttaagcctgaacagctcgccgccgcgctggtgagcatgaaaattcgcggcgagcatcccaatgaaattgccggcgccgccactgcgttgctggaaaatgccgccccgttcccgcgcccggactatctgtttgcggatatcgttggtaccggcggcgatggcagtaacagtatcaatatctctaccgccagcgcctttgtcgcggcggcctgtggactgaaagtggcgaaacacggcaaccgcagcgtatccagcaaatcggggtcatccgatctgttggcggcgttcggtattaatctggatatgaacgccgataaatcacgtcaggcgttagatgaactgggcgtctgtttcctgttcgcgccgaaatatcacaccggattccgtcacgcgatgccggttcgccaacagttaaaaacgcgaaccctgttcaacgtactcggcccgctgatcaacccagcgcatccgccgctggcattgattggcgtctatagcccggaactggtgctgccgattgcggaaaccttacgggtactgggctatcagcgcgcggcggtggtacatagcggcggcatggatgaggtttcgctccatgcgccgacgattgtcgcggagctgcatgacggcgaaattaaaagctatcaacttacggcggaggattttggcctgacgccttaccatcaggatcagttggctggcggcacgccggaagaaaaccgtgacattctgacgcggttattacaaggtaaaggcgatgccgcgcatgaggccgccgtcgccgccaacgtggcgatgctgatgcgtctgcatggtcaggaagatctcaaggccaacgcgcaaaccgtgcttgatgttctgcgcaacggcaccgcatatgacagagtcaccgcactggcggcaagagggtaa

SEQ ID NO: 37550 - protein, 531 aa, Salmonella enterica subsp. enterica serovar Typhi Ty2
MADILLLDNIDSFTWNLADQLRTNGHNVVIYRNHIPAQTLIDRLATMKNPVLMLSPGPGIPSEAGCMPELLTRLRGKLPIIGICLGHQAIVEAYGGYVGQAGEILHGKASSIEHDGQAMFAGLANPLPVARYHSLVGSNVPAGLTINAHFNGMVMAVRHDADRVCGFQFHPESILTTQGARLLEQTLAWAQQKLEPTNTLQPILEKLYQAQTLTQQESHQLFSAVVRGELKPEQLAAALVSMKIRGEHPNEIAGAATALLENAAPFPRPDYLFADIVGTGGDGSNSINISTASAFVAAACGLKVAKHGNRSVSSKSGSSDLLAAFGINLDMNADKSRQALDELGVCFLFAPKYHTGFRHAMPVRQQLKTRTLFNVLGPLINPAHPPLALIGVYSPELVLPIAETLRVLGYQRAAVVHSGGMDEVSLHAPTIVAELHDGEIKSYQLTAEDFGLTPYHQDQLAGGTPEENRDILTRLLQGKGDAAHEAAVAANVAMLMRLHGQEDLKANAQTVLDVLRNGTAYDRVTALAARG

SEQ ID NO: 37551 - DNA, 1605 bp, Helicobacter hepaticus ATCC 51449
  CDS (1)..(1605): transl_table=11
atgattttgctcattgataattatgattcttttacttataatatttatcaagcattttatcgctttggctttcctataaaggtagtgcgcagtgataagataagtatcgaagagataagagagctaaatcctcaatatatcattattggtcctggtccaaaaacaccaaaagaagcagggatttctatccaaatcgtgcaggagtttcaaggtgtgtatcccattttaggaatttgtctaggacatcaagcgattatggcagcttttggtatggatattgtcaatgccaaaaatattgcacacggcaaagttgagcctcttcatcataaccaaaaagggctttttaggcatatcacaccgcttacacctattgtgcgttatcattcacttgtaggcaaggcaaatgagttacctgattgctttgaagtgagtgcgtggagtgaagatggagaaattatggcgattgaacataagattcatcatcttgtgggcgtgcaattccaccctgaatctattggcacaacagagggtgagaaaatgcttttaaatttcttgcactatacgcgtgagattattcctatcaagcaatatctcaaaagcactctaaagggtgaaaatcttagctttaaacaagcctatgatgtaatggacgaaattacagaaggcaatatgagtgatgcgcaaattggcagtattttgacaagccttgagattaaaggcgtgaatgcggaggagttagcgggatttgcaagtgtattgaagaaaaaagccattgcctttcctttaccactaagcaatgaggtgcgtcttgatatggtaggcacaggaggctctcctcataaaacctttaatgtatctaccacaagtgcattgcttctcgcagctgctggagtaaagattatcaaacacggcaacagggcgattacttcaaagtctggttcggcagatttgctaagcgcacttggcgtaaatatcaatatggaggtgcaaacttgtattgatgtttataaaaatattggtattacatttttgtttgctcaaaagtttcacgctgctatgcgatttgctgctcctgcaagggcaacactaggctttaagacagcttttaatcttatcggtcctctagcaaatcctgcaaatgttacacatcaatttattggtgtatttgataaggcatataccgagattatggcgcgcgcacttgatattttgggtataaaaagggcaatggttgtaagcggatttgattattatgatgaaatttcgctttgcgcacccacacaaattacagagctcaataatggtgtgattaaaagctatgtatttaatccaagtgagatagggcttgattttgtcccttatacagagctttgtggaggagatgtgcaggaaaataagcgcattagccttgatattttttctgcttcaccccagtcattacgctctcctaaaacgcagcttgttgcacttaataccggtgcagcgttataccttgcagataaagcgcagagtatcaaagagggatattttttagcaagagacattatagaatctaaacgcgtttttgctatactagaggaatttgtgagattatcaaatcaatag

SEQ ID NO: 37552 - protein, 534 aa, Helicobacter hepaticus ATCC 51449
MILLIDNYDSFTYNIYQAFYRFGFPIKVVRSDKISIEEIRELNPQYIIIGPGPKTPKEAGISIQIVQEFQGVYPILGICLGHQAIMAAFGMDIVNAKNIAHGKVEPLHHNQKGLFRHITPLTPIVRYHSLVGKANELPDCFEVSAWSEDGEIMAIEHKIHHLVGVQFHPESIGTTEGEKMLLNFLHYTREIIPIKQYLKSTLKGENLSFKQAYDVMDEITEGNMSDAQIGSILTSLEIKGVNAEELAGFASVLKKKAIAFPLPLSNEVRLDMVGTGGSPHKTFNVSTTSALLLAAAGVKIIKHGNRAITSKSGSADLLSALGVNINMEVQTCIDVYKNIGITFLFAQKFHAAMRFAAPARATLGFKTAFNLIGPLANPANVTHQFIGVFDKAYTEIMARALDILGIKRAMVVSGFDYYDEISLCAPTQITELNNGVIKSYVFNPSEIGLDFVPYTELCGGDVQENKRISLDIFSASPQSLRSPKTQLVALNTGAALYLADKAQSIKEGYFLARDIIESKRVFAILEEFVRLSNQ

SEQ ID NO: 37553 - DNA, 1602 bp, Campylobacter jejuni RM1221
  CDS (1)..(1602): transl_table=11
atgatacttttaattgataattatgattcttttgtttttaatgttaaaagcatgttagagcaactcagcaatgatgaaattttagtaagaagaaatgatgcaatttctctgagtgaaattaaaaatttaaatcctactcatattattttaagtcctggtccaaagcatccaagtcaaagtgggatttgtcttgaaatttttaaagcaaggcttaatatccctgttttgggcatttgcttaggacatcaagctttagctttagcttttgattctttagtggttaagatgcaagagcctatgcatgcaaaaaattctttgataaaacagtgcagggaaaatgaattattttctaatttgccttcaaattttagtgtaatgcgttatcattctttagaggttaaacagcttagtgatgagcttgaaattttagcccttgatgaaaagggtgtgattatggctttgggacataaaaatttaccttattatggtgtgcaatttcatcctgaaagctattttagtgaatatggcttacaacttttttctaattttttaaaacaagatataaaaaaaccacaaaaacaagaaaatcctttaagtttttatttgcaaaaaatgagtgaaaatcattttttacaaagcgatgattttgagcaaatttgtaagattattatgtctaaagattatgaaattttacaagtagcggctttgttgattttaatcactgaaaagtctttaaacgaaaaatctttaagtgcttttgtaagacaaattttaagatattctcaaacttttagtgatgagagtgagatgattgatatttgtggaacaggtggagatggttttaaaagtatcaatgtttctacgactagtgcttttattttagcagctttaggagtaaaagtagccaaacacggaaatcgtgccatttcaagttctagcggaagtacagatgtgttagaagctttaaatataactactccaaacactttagaatcagttttaaaacaactaaataatcaagggcttagttttttacatgctccattttttcatcctttggtaggagaacttaaagaggtcagatcaagacttggagtaagaacggtttttaatgttttaggtcctttattgcaccctaatttaaagttaaaatatcaacttatgggaaattatcacgcacctgtgcataggcttttgatagaggttttaaaaaatttaggacgcaaaaaagctttagtggtaagaggaaatgatggtatggatgagcttagtatttgcgatgaaagtaaaatttatgagctttgtgaaggagaaattttagagtattctatctgtcctgaacaatttggttttaaaagagcttttcatagtgaaatcataggatctagtgcatatgacaacgctaaagatttaaaagatattttaagcggtagaatgcaaggggcaaaatttgatttggtagttttaaatgctatgtttgcactttatacagccaataaagcaagttcgcctttagtggctaaagatatgattttagaagccatttattcaggtaaggttatagaatattttaaggagtatcaagcttatgctaaagcttaa

SEQ ID NO: 37554 - protein, 533 aa, Campylobacter jejuni RM1221
MILLIDNYDSFVFNVKSMLEQLSNDEILVRRNDAISLSEIKNLNPTHIILSPGPKHPSQSGICLEIFKARLNIPVLGICLGHQALALAFDSLVVKMQEPMHAKNSLIKQCRENELFSNLPSNFSVMRYHSLEVKQLSDELEILALDEKGVIMALGHKNLPYYGVQFHPESYFSEYGLQLFSNFLKQDIKKPQKQENPLSFYLQKMSENHFLQSDDFEQICKIIMSKDYEILQVAALLILITEKSLNEKSLSAFVRQILRYSQTFSDESEMIDICGTGGDGFKSINVSTTSAFILAALGVKVAKHGNRAISSSSGSTDVLEALNITTPNTLESVLKQLNNQGLSFLHAPFFHPLVGELKEVRSRLGVRTVFNVLGPLLHPNLKLKYQLMGNYHAPVHRLLIEVLKNLGRKKALVVRGNDGMDELSICDESKIYELCEGEILEYSICPEQFGFKRAFHSEIIGSSAYDNAKDLKDILSGRMQGAKFDLVVLNAMFALYTANKASSPLVAKDMILEAIYSGKVIEYFKEYQAYAKA

SEQ ID NO: 37555 - DNA, 1596 bp, Salmonella typhimurium
  CDS (1)..(1596): transl_table=11
atggctgatattctgctgctcgataacatcgactcgtttacctggaacctggcagatcagctacggaccaacggtcataacgtggtgatttaccgtaaccatattccggcgcagacgcttatcgatcgcctggcgacaatgaaaaatccggtgctaatgctctcccccggtccgggcgttcccagcgaggcaggctgtatgccggagctgctgacccgactacgcggcaagttaccgatcatcggcatttgtctggggcatcaggcgattgtcgaagcttacggcggttatgtcggtcaggcgggagaaatcctgcatggcaaagcctccagcattgagcatgacggtcaggcgatgttcgccgggctggcgaatccgctaccggtcgcgcgttatcattcgctggtcggcagtaatgttcctgccgggctgaccattaacgcccatttcaacggcatggtgatggcggtacgtcatgatgcggatcgcgtttgcggttttcaatttcatcctgagtccatcctgacgacacagggcgcgcgtctactggagcaaacattagcctgggcgcagcaaaagctggaaccgaccaacaccctacagccgattctggagaaactctatcaggcgcaaacactgacgcaacaagagagccatcagttgttttcggcggtcgtccgcggcgaacttaagcctgaacagctcgccgccgcgctggtgagcatgaaaattcgcggcgagcatcccaatgaaattgccggcgccgccactgcgttactggaaaatgccgccccgttcccgcgcccggagtatctgtttgcggatatcgttggtaccggcggcgatggcagtaacagtatcaatatctctaccgccagcgcctttgtcgcggcggcctgtggactgaaagtggcgaaacacggcaaccgtagcgtgtccagcaaatcggggtcatccgatctgctggcggcgttcggtattaatctggatatgaacgccgataaatcacgtcaggcgttagatgaactgggcgtctgtttcctgtttgcgccgaaatatcacaccggactccgtcacgcgatgccggttcgccaacagttaaaaacgcgaaccctgttcaacgtactcggcccgctgatcaacccggcgcatccgccgctggcgttgattggcgtctatagcccggaactggtgctgccgattgcggaaaccttacgggtactgggctatcagcgcgcggcggtggtacatagcggcggcatggatgaggtttcgctccatgcgccgacgattgtcgcggagctgcatgatggcgaaattaaaagctatcaacttacggcggaggattttggcctgacgccttaccatcaggatcagttggctggcggcacgccggaagaaaaccgtgacattctgacgcggttattacaaggtaaaggcgatgccgcgcatgaggccgccgtcgccgccaacgtggcgatgctgatgcgtctgcatggtcaggaagatctcaaggccaacgcgcaaaccgtgcttgatgttctgcgcaacggcaccgcatatgacagagtcaccgcactggcggcaagagggtaa

SEQ ID NO: 37556 - protein, 531 aa, Salmonella typhimurium
MADILLLDNIDSFTWNLADQLRTNGHNVVIYRNHIPAQTLIDRLATMKNPVLMLSPGPGVPSEAGCMPELLTRLRGKLPIIGICLGHQAIVEAYGGYVGQAGEILHGKASSIEHDGQAMFAGLANPLPVARYHSLVGSNVPAGLTINAHFNGMVMAVRHDADRVCGFQFHPESILTTQGARLLEQTLAWAQQKLEPTNTLQPILEKLYQAQTLTQQESHQLFSAVVRGELKPEQLAAALVSMKIRGEHPNEIAGAATALLENAAPFPRPEYLFADIVGTGGDGSNSINISTASAFVAAACGLKVAKHGNRSVSSKSGSSDLLAAFGINLDMNADKSRQALDELGVCFLFAPKYHTGLRHAMPVRQQLKTRTLFNVLGPLINPAHPPLALIGVYSPELVLPIAETLRVLGYQRAAVVHSGGMDEVSLHAPTIVAELHDGEIKSYQLTAEDFGLTPYHQDQLAGGTPEENRDILTRLLQGKGDAAHEAAVAANVAMLMRLHGQEDLKANAQTVLDVLRNGTAYDRVTALAARG

SEQ ID NO: 37557 - DNA, 1770 bp, Thermotoga maritima
  CDS (1)..(1770): transl_table=11
atggctccaggcaggagcgggtatcgtttacgattccgttccggagcgcgaatatcaggagactctgaacaaactcagggctttgttcaggagcctggaagttgcgcagaagatccaggggggattgttttgaaaagagtgatcgttatagacaactacgattcgttcgtttacaacatcgttcagtacatcggtgaggtagaaccagactgtgaaatcgaagtcttcagaaacgacgagataacgatcgaagagatagagagaaaaaatcccactcacatagttatatctcctggccccggaagacccgaagaagcgggtatctccgttgatgttgtgaggcacttcagcgggaaggttccaatactcggtgtgtgtcttggacaccaggtgatcggctacgcttttggtggaaagatcgtgcatgcaaagaggattcttcatggaaagacatcgaagatcgtacacaacggaaagggtgtattctctggtgtgaaaaatccactcgttgctacgcggtaccattcactcgttgttgaagaggcatcccttcctgaagttctggaaatcaccgccaaaagtgacgatggagagatcatgggactccagcacaaagaacacccaacctttggagttcagtttcatccagaatccgtgctgaccgaagaaggaaagagaatcataaagaacttcctgaacatccaggatattcaggtaaagaaagtttccgaagaaacggaaattgacatcgtttccgctctcaagaaactcgtagaatttgaagatctcacttttgaagagagccgtcaggtgatgaacttcatcatgtccgggaatgccacggacgctcaaattgcaggtttccttgtggcactcaggatgaaagaggaaacgggagacgaactcggtggaatggccagcgtcatgcgagaaaaatcgattcatataaaagcaccttctccaagaacggtcgacacctgcggaaccggtggagacggttttggcacgttcaacatttcaacgacaacggcctttgtcgttgctgcggctggtattcccgttgcaaaacacggtaaccgatctgtctcaagcaaggtggggagtgccgacgttctcgaagccggtgggtacaaacttgaaaagacaccggaggagatggaaagagagctcaaagaaaccggtttttctttccttttcgcaccgcttcttcatccagcgatgaagcacgtgatgcccgcgagaagacagctgaagataaggacggctttcaaccttcttggtcccataacgaaccctgccagggtgaagtaccaggtggtgggggtcttcgatctttctttcgcttccaaactcgcaacggcccttcaacgtcttggtacggaacgctcggcagtggtcaacggaggtttcacagacgaactcaccacgtgtggtaagaacaacctactcctcgttactcaggaagagatcgtccccatggtgctggatcccgaagaactcggattgaagagtggagaccccgaggagctgaaaggtccttccgatcccaaagaggcgtaccggatgatggaaagtgttctgaaaggagaagccagcagaacacaggtggagacggtggctctgaacgcaggggttgttttctggctggtgggtgaatgtgacaccataaaggacggtgtcgggaaggctctcgatctcatcagaacgggtgaggcctacaaaaaattgagggaggtaatggactatcagaagactctgggaaatagttga

SEQ ID NO: 37558 - protein, 589 aa, Thermotoga maritima
MAPGRSGYRLRFRSGARISGDSEQTQGFVQEPGSCAEDPGGIVLKRVIVIDNYDSFVYNIVQYIGEVEPDCEIEVFRNDEITIEEIERKNPTHIVISPGPGRPEEAGISVDVVRHFSGKVPILGVCLGHQVIGYAFGGKIVHAKRILHGKTSKIVHNGKGVFSGVKNPLVATRYHSLVVEEASLPEVLEITAKSDDGEIMGLQHKEHPTFGVQFHPESVLTEEGKRIIKNFLNIQDIQVKKVSEETEIDIVSALKKLVEFEDLTFEESRQVMNFIMSGNATDAQIAGFLVALRMKEETGDELGGMASVMREKSIHIKAPSPRTVDTCGTGGDGFGTFNISTTTAFVVAAAGIPVAKHGNRSVSSKVGSADVLEAGGYKLEKTPEEMERELKETGFSFLFAPLLHPAMKHVMPARRQLKIRTAFNLLGPITNPARVKYQVVGVFDLSFASKLATALQRLGTERSAVVNGGFTDELTTCGKNNLLLVTQEEIVPMVLDPEELGLKSGDPEELKGPSDPKEAYRMMESVLKGEASRTQVETVALNAGVVFWLVGECDTIKDGVGKALDLIRTGEAYKKLREVMDYQKTLGNS

SEQ ID NO: 37559 - DNA, 22 bp, Artificial sequence
  primer
atggctgacattctgctgctcg

SEQ ID NO: 37560 - DNA, 21 bp, Artificial sequence
  primer
ttaccctcgtgccgccagtgc

SEQ ID NO: 37561 - protein, 544 aa, Artificial sequence
  consensus sequence
  Variant (4)..(4): Xaa in position 4 is any amino acid
  Variant (7)..(7): Xaa in position 7 is any amino acid
  Variant (11)..(12): Xaa in position 11 to 12 is any amino acid
  Variant (14)..(17): Xaa in position 14 to 17 is any amino acid
  Variant (19)..(22): Xaa in position 19 to 22 is any amino acid
  Variant (23)..(23): Xaa in position 23 is any or no amino acid
  Variant (25)..(26): Xaa in position 25 to 26 is any amino acid
  Variant (28)..(36): Xaa in position 28 to 36 is any amino acid
  Variant (37)..(37): Xaa in position 37 is any or no amino acid
  Variant (39)..(50): Xaa in position 39 to 50 is any amino acid
  Variant (56)..(57): Xaa in position 56 to 57 is any amino acid
  Variant (63)..(65): Xaa in position 63 to 65 is any amino acid
  Variant (67)..(72): Xaa in position 67 to 72 is any amino acid
  Variant (74)..(74): Xaa in position 74 is any amino acid
  Variant (75)..(75): Xaa in position 75 is any or no amino acid
  Variant (78)..(78): Xaa in position 78 is any amino acid
  Variant (88)..(89): Xaa in position 88 to 89 is any amino acid
  Variant (91)..(91): Xaa in position 91 is any amino acid
  Variant (93)..(94): Xaa in position 93 to 94 is any amino acid
  Variant (96)..(97): Xaa in position 96 to 97 is any amino acid
  Variant (99)..(99): Xaa in position 99 is any amino acid
  Variant (102)..(102): Xaa in position 102 is any amino acid
  Variant (106)..(106): Xaa in position 106 is any amino acid
  Variant (108)..(108): Xaa in position 108 is any amino acid
  Variant (110)..(110): Xaa in position 110 is any amino acid
  Variant (112)..(116): Xaa in position 112 to 116 is any amino acid
  Variant (117)..(117): Xaa in position 117 is any or no amino acid
  Variant (119)..(120): Xaa in position 119 to 120 is any amino acid
  Variant (122)..(126): Xaa in position 122 to 126 is any amino acid
  Variant (128)..(128): Xaa in position 128 is any amino acid
  Variant (135)..(138): Xaa in position 135 to 138 is any amino acid
  Variant (139)..(140): Xaa in position 139 to 140 is any or no amino acid
  Variant (142)..(143): Xaa in position 142 to 143 is any amino acid
  Variant (145)..(145): Xaa in position 145 is any amino acid
  Variant (147)..(147): Xaa in position 147 is any amino acid
  Variant (149)..(151): Xaa in position 149 to 151 is any amino acid
  Variant (152)..(152): Xaa in position 152 is any or no amino acid
  Variant (154)..(155): Xaa in position 154 to 155 is any amino acid
  Variant (158)..(159): Xaa in position 158 to 159 is any amino acid
  Variant (161)..(166): Xaa in position 161 to 166 is any amino acid
  Variant (168)..(168): Xaa in position 168 is any amino acid
  Variant (175)..(176): Xaa in position 175 to 176 is any amino acid
  Variant (178)..(179): Xaa in position 178 to 179 is any amino acid
  Variant (181)..(182): Xaa in position 181 to 182 is any amino acid
  Variant (184)..(187): Xaa in position 184 to 187 is any amino acid
  Variant (189)..(194): Xaa in position 189 to 194 is any amino acid
  Variant (195)..(203): Xaa in position 195 to 203 is any or no amino acid
  Variant (205)..(205): Xaa in position 205 is any amino acid
  Variant (207)..(209): Xaa in position 207 to 209 is any amino acid
  Variant (211)..(211): Xaa in position 211 is any amino acid
  Variant (213)..(218): Xaa in position 213 to 218 is any amino acid
  Variant (220)..(225): Xaa in position 220 to 225 is any amino acid
  Variant (227)..(233): Xaa in position 227 to 233 is any amino acid
  Variant (235)..(239): Xaa in position 235 to 239 is any amino acid
  Variant (241)..(241): Xaa in position 241 is any amino acid
  Variant (244)..(244): Xaa in position 244 is any amino acid
  Variant (246)..(256): Xaa in position 246 to 256 is any amino acid
  Variant (258)..(259): Xaa in position 258 to 259 is any amino acid
  Variant (261)..(261): Xaa in position 261 is any amino acid
  Variant (263)..(265): Xaa in position 263 to 265 is any amino acid
  Variant (267)..(271): Xaa in position 267 to 271 is any amino acid
  Variant (273)..(274): Xaa in position 273 to 274 is any amino acid
  Variant (276)..(280): Xaa in position 276 to 280 is any amino acid
  Variant (281)..(282): Xaa in position 281 to 282 is any or no amino acid
  Variant (285)..(285): Xaa in position 285 is any amino acid
  Variant (292)..(293): Xaa in position 292 to 293 is any amino acid
  Variant (297)..(297): Xaa in position 297 is any amino acid
  Variant (300)..(300): Xaa in position 300 is any amino acid
  Variant (304)..(305): Xaa in position 304 to 305 is any amino acid
  Variant (308)..(308): Xaa in position 308 is any amino acid
  Variant (310)..(310): Xaa in position 310 is any amino acid
  Variant (319)..(320): Xaa in position 319 to 320 is any amino acid
  Variant (327)..(327): Xaa in position 327 is any amino acid
  Variant (329)..(329): Xaa in position 329 is any amino acid
  Variant (331)..(331): Xaa in position 331 is any amino acid
  Variant (333)..(333): Xaa in position 333 is any amino acid
  Variant (336)..(347): Xaa in position 336 to 347 is any amino acid
  Variant (349)..(351): Xaa in position 349 to 351 is any amino acid
  Variant (353)..(354): Xaa in position 353 to 354 is any amino acid
  Variant (360)..(361): Xaa in position 360 to 361 is any amino acid
  Variant (363)..(369): Xaa in position 363 to 369 is any amino acid
  Variant (371)..(371): Xaa in position 371 is any amino acid
  Variant (373)..(374): Xaa in position 373 to 374 is any amino acid
  Variant (376)..(377): Xaa in position 376 to 377 is any amino acid
  Variant (380)..(380): Xaa in position 380 is any amino acid
  Variant (388)..(388): Xaa in position 388 is any amino acid
  Variant (391)..(391): Xaa in position 391 is any amino acid
  Variant (393)..(397): Xaa in position 393 to 397 is any amino acid
  Variant (399)..(399): Xaa in position 399 is any amino acid
  Variant (403)..(410): Xaa in position 403 to 410 is any amino acid
  Variant (413)..(413): Xaa in position 413 is any amino acid
  Variant (415)..(416): Xaa in position 415 to 416 is any amino acid
  Variant (419)..(420): Xaa in position 419 to 420 is any amino acid
  Variant (423)..(423): Xaa in position 423 is any amino acid
  Variant (426)..(428): Xaa in position 426 to 428 is any amino acid
  Variant (429)..(429): Xaa in position 429 is any or no amino acid
  Variant (434)..(434): Xaa in position 434 is any amino acid
  Variant (436)..(443): Xaa in position 436 to 443 is any amino acid
  Variant (446)..(447): Xaa in position 446 to 447 is any amino acid
  Variant (451)..(452): Xaa in position 451 to 452 is any amino acid
  Variant (454)..(457): Xaa in position 454 to 457 is any amino acid
  Variant (459)..(459): Xaa in position 459 is any amino acid
  Variant (463)..(469): Xaa in position 463 to 469 is any amino acid
  Variant (471)..(471): Xaa in position 471 is any amino acid
  Variant (473)..(476): Xaa in position 473 to 476 is any amino acid
  Variant (477)..(477): Xaa in position 477 is any or no amino acid
  Variant (480)..(482): Xaa in position 480 to 482 is any amino acid
  Variant (484)..(486): Xaa in position 484 to 486 is any amino acid
  Variant (488)..(488): Xaa in position 488 is any amino acid
  Variant (490)..(493): Xaa in position 490 to 493 is any amino acid
  Variant (494)..(496): Xaa in position 494 to 496 is any or no amino acid
  Variant (498)..(501): Xaa in position 498 to 501 is any amino acid
  Variant (504)..(504): Xaa in position 504 is any amino acid
  Variant (506)..(511): Xaa in position 506 to 511 is any amino acid
  Variant (513)..(525): Xaa in position 513 to 525 is any amino acid
  Variant (526)..(526): Xaa in position 526 is any or no amino acid
  Variant (528)..(532): Xaa in position 528 to 532 is any amino acid
  Variant (534)..(543): Xaa in position 534 to 543 is any amino acid
ILLXDNXDSFXXNXXXXLXXXXXNXXIXXXXXXXXXXIXXXXXXXXXXXXLSPGPXXPSEAGXXXEXXXXXXGXXPIXGICLGHQAIXXAXGXXVXXAXEIXHGKXSXIXHXXXXXXFXXLXXXXXVXRYHSLVXXXXXXPXXLXIXAXXXXGXXMAXXHXXXXXXGXQFHPESXXTXXGXXLXXXXLXXXXXXXXXXXXXXXNXLXXXLXKXXXXXXLXXXXXXQXXXXXXXGXXXXXQXAAXLXXXXXXXXXXXEXXGXAXXXLXXXXXFXXPXXXXXXXDIXGTGGDGXXSINXSTXSAFXXAAXGXKVAKHGNRXXSSKSGSXDXLXAXGIXXXXXXXXXXXXLXXXGXXFLFAPXXHXXXXXXXPXRXXLXXRTXFNVLGPLXNPXAXXXXXLXGVYXXXXXXXXAEXLXXLGXXRAXVVXXXXGMDEXSXXXXXXXXELXXGEIXXYXXXXEXFGLXXXXXXXLXGXXXXXENXXXLXXXLXGXXXXXXXAXXXXVAXNXXXXXXLXXXXXXXXXXXXXXLXXXXXGXXXXXXXXXXA

SEQ ID NO: 37562 - protein, 55 aa, Artificial sequence
  protein pattern
  Variant (7)..(8): Xaa in position 7 to 8 is any amino acid
  Variant (12)..(12): Xaa in position 12 is Ile or Val
  Variant (15)..(15): Xaa in position 15 is Ala or Thr
  Variant (19)..(19): Xaa in position 19 is Ile or Val
  Variant (20)..(20): Xaa in position 20 is Ala or Leu
  Variant (23)..(23): Xaa in position 23 is any amino acid
  Variant (25)..(25): Xaa in position 25 is Leu or Val
  Variant (34)..(34): Xaa in position 34 is Ala or Ser
  Variant (35)..(35): Xaa in position 35 is Ile or Val
  Variant (38)..(38): Xaa in position 38 is any amino acid
  Variant (42)..(42): Xaa in position 42 is Ser or Thr
  Variant (44)..(44): Xaa in position 44 is Leu or Val
  Variant (46)..(46): Xaa in position 46 is Ala or Glu
  Variant (48)..(48): Xaa in position 48 is Phe or Leu
  Variant (49)..(49): Xaa in position 49 is Gly or Asn
  Variant (51)..(51): Xaa in position 51 is Asn or Thr
  Variant (52)..(52): Xaa in position 52 is any amino acid
  Variant (53)..(53): Xaa in position 53 is Asp or Pro
  Variant (54)..(54): Xaa in position 54 is any amino acid
  Variant (55)..(55): Xaa in position 55 is Asn or Thr
GTGGDGXXSINXSTXSAFXXAAXGXKVAKHGNRXXSSXSGSXDXLXAXXIXXXXX

SEQ ID NO: 37563 - protein, 44 aa, Artificial sequence
  protein pattern
  Variant (2)..(4): Xaa in position 2 to 4 is any amino acid
  Variant (6)..(6): Xaa in position 6 is Leu or Val
  Variant (7)..(7): Xaa in position 7 is Cys or Ser
  Variant (10)..(10): Xaa in position 10 is Phe or His
  Variant (13)..(13): Xaa in position 13 is any amino acid
  Variant (14)..(14): Xaa in position 14 is Phe or Tyr
  Variant (16)..(16): Xaa in position 16 is Pro or Thr
  Variant (17)..(17): Xaa in position 17 is Gly or Leu
  Variant (18)..(18): Xaa in position 18 is Phe, Leu or Val
  Variant (19)..(19): Xaa in position 19 is any amino acid
  Variant (20)..(20): Xaa in position 20 is Glu or His
  Variant (21)..(21): Xaa in position 21 is Ala or Leu
  Variant (22)..(22): Xaa in position 22 is any amino acid
  Variant (23)..(23): Xaa in position 23 is Glu or Pro
  Variant (24)..(24): Xaa in position 24 is Ile or Val
  Variant (26)..(26): Xaa in position 26 is Gln or Ser
  Variant (27)..(27): Xaa in position 27 is Gln or Arg
  Variant (29)..(29): Xaa in position 29 is any amino acid
  Variant (30)..(30): Xaa in position 30 is Thr or Val
  Variant (33)..(33): Xaa in position 33 is Leu or Val
  Variant (41)..(41): Xaa in position 41 is Ile or Leu
  Variant (42)..(42): Xaa in position 42 is any amino acid
  Variant (44)..(44): Xaa in position 44 is Ala or Asn
LXXXGXXFLXAPXXHXXXXXXXXXRXXLXXRTXFNVLGPLXXPX

SEQ ID NO: 37564 - protein, 37 aa, Artificial sequence
  protein pattern
  Variant (2)..(2): Xaa in position 2 is any or no amino acid
  Variant (4)..(4): Xaa in position 4 is any or no amino acid
  Variant (7)..(7): Xaa in position 7 is Leu or Val
  Variant (8)..(8): Xaa in position 8 is any amino acid
  Variant (10)..(10): Xaa in position 10 is Asp or Lys
  Variant (11)..(11): Xaa in position 11 is Ala or Asn
  Variant (12)..(15): Xaa in position 12 to 15 is any amino acid
  Variant (17)..(17): Xaa in position 17 is Phe or Val
  Variant (24)..(24): Xaa in position 24 is any amino acid
  Variant (25)..(25): Xaa in position 25 is Phe or Leu
  Variant (26)..(26): Xaa in position 26 is Ser or Thr
  Variant (27)..(27): Xaa in position 27 is Glu or Thr
  Variant (28)..(28): Xaa in position 28 is any amino acid
  Variant (30)..(30): Xaa in position 30 is Ala or Leu
  Variant (31)..(31): Xaa in position 31 is Gln or Arg
  Variant (33)..(33): Xaa in position 33 is Phe or Leu
  Variant (34)..(34): Xaa in position 34 is Glu or Ser
  Variant (35)..(35): Xaa in position 35 is Asn or Gln
  Variant (36)..(36): Xaa in position 36 is any amino acid
GXVXMAXXHXXXXXXGXQFHPESXXXXXGXXLXXXXL

SEQ ID NO: 37565 - protein, 43 aa, Artificial sequence
  protein pattern
  Variant (2)..(3): Xaa in position 2 to 3 is any or no amino acid
  Variant (5)..(6): Xaa in position 5 to 6 is any or no amino acid
  Variant (8)..(8): Xaa in position 8 is Ile or Val
  Variant (9)..(9): Xaa in position 9 is Ile or Leu
  Variant (18)..(18): Xaa in position 18 is Ile or Leu
  Variant (19)..(19): Xaa in position 19 is Ala or Val
  Variant (20)..(20): Xaa in position 20 is any amino acid
  Variant (22)..(22): Xaa in position 22 is Phe or Tyr
  Variant (23)..(23): Xaa in position 23 is Asp or Gly
  Variant (24)..(24): Xaa in position 24 is Gly or Ser
  Variant (25)..(25): Xaa in position 25 is any amino acid
  Variant (27)..(27): Xaa in position 27 is Gly or Val
  Variant (28)..(29): Xaa in position 28 to 29 is any amino acid
  Variant (30)..(30): Xaa in position 30 is Gly or Gln
  Variant (32)..(32): Xaa in position 32 is Ile or Pro
  Variant (33)..(33): Xaa in position 33 is Leu or Met
  Variant (35)..(35): Xaa in position 35 is Ala or Gly
  Variant (37)..(37): Xaa in position 37 is Ala or Asn
  Variant (39)..(39): Xaa in position 39 is any amino acid
  Variant (41)..(41): Xaa in position 41 is Glu or Lys
  Variant (42)..(42): Xaa in position 42 is any amino acid
  Variant (43)..(43): Xaa in position 43 is Cys or Asp
RXXLXXPXXGICLGHQAXXXAXXXXVXXXXEXXHXKXSXIXXX

SEQ ID NO: 37566 - protein, 39 aa, Artificial sequence
  protein pattern
  Variant (2)..(2): Xaa in position 2 is any amino acid
  Variant (3)..(3): Xaa in position 3 is any or no amino acid
  Variant (5)..(6): Xaa in position 5 to 6 is any or no amino acid
  Variant (11)..(11): Xaa in position 11 is Leu or Val
  Variant (13)..(13): Xaa in position 13 is Ile or Leu
  Variant (14)..(14): Xaa in position 14 is any amino acid
  Variant (15)..(15): Xaa in position 15 is Ala or Asp
  Variant (16)..(16): Xaa in position 16 is Glu or Pro
  Variant (17)..(17): Xaa in position 17 is Ser or Thr
  Variant (18)..(18): Xaa in position 18 is any amino acid
  Variant (19)..(19): Xaa in position 19 is Ile or Val
  Variant (20)..(20): Xaa in position 20 is any amino acid
  Variant (23)..(23): Xaa in position 23 is any amino acid
  Variant (24)..(24): Xaa in position 24 is Asp or Glu
  Variant (26)..(26): Xaa in position 26 is Glu or Lys
  Variant (28)..(28): Xaa in position 28 is any amino acid
  Variant (29)..(29): Xaa in position 29 is Glu or Ser
  Variant (31)..(31): Xaa in position 31 is Gln or Ser
  Variant (32)..(32): Xaa in position 32 is Ile or Leu
  Variant (33)..(33): Xaa in position 33 is Cys or Thr
  Variant (34)..(34): Xaa in position 34 is Ala or Pro
  Variant (36)..(36): Xaa in position 36 is Asp or Gln
  Variant (39)..(39): Xaa in position 39 is Phe or Leu
VXXGXXGMDEXSXXXXXXXXELXXGXIXXYXXXXEXFGX

SEQ ID NO: 37567 - protein, 29 aa, Artificial sequence
  protein pattern
  Variant (4)..(4): Xaa in position 4 is Ile or Leu
  Variant (7)..(7): Xaa in position 7 is any amino acid
  Variant (11)..(11): Xaa in position 11 is Thr or Val
  Variant (12)..(12): Xaa in position 12 is Phe, Trp or Tyr
  Variant (14)..(17): Xaa in position 14 to 17 is any or no amino acid
  Variant (19)..(19): Xaa in position 19 is any amino acid
  Variant (20)..(20): Xaa in position 20 is any or no amino acid
  Variant (23)..(23): Xaa in position 23 is Arg or Ser
  Variant (24)..(24): Xaa in position 24 is Asn, Ser or Thr
  Variant (25)..(25): Xaa in position 25 is Asp or Asn
  Variant (26)..(26): Xaa in position 26 is Glu or Gly
  Variant (27)..(28): Xaa in position 27 to 28 is any amino acid
ILLXDNXDSFXXNXXXXLXXQLXXXXXXV

SEQ ID NO: 37568 - protein, 29 aa, Artificial sequence
  protein pattern
  Variant (2)..(2): Xaa in position 2 is Ala or Ser
  Variant (3)..(3): Xaa in position 3 is Glu or Thr
  Variant (4)..(4): Xaa in position 4 is Ile or Met
  Variant (5)..(5): Xaa in position 5 is any amino acid
  Variant (7)..(8): Xaa in position 7 to 8 is any or no amino acid
  Variant (10)..(12): Xaa in position 10 to 12 is any amino acid
  Variant (13)..(13): Xaa in position 13 is any or no amino acid
  Variant (19)..(20): Xaa in position 19 to 20 is any amino acid
  Variant (23)..(23): Xaa in position 23 is Glu or Gln
  Variant (24)..(24): Xaa in position 24 is Ala or Ser
  Variant (26)..(27): Xaa in position 26 to 27 is any amino acid
  Variant (28)..(28): Xaa in position 28 is Leu or Pro
LXXXXNXXPXXXXLSPGPXXPSXXGXXXE

SEQ ID NO: 37569 - protein, 35 aa, Artificial sequence
  protein pattern
  Variant (2)..(2): Xaa in position 2 is any amino acid
  Variant (3)..(3): Xaa in position 3 is any or no amino acid
  Variant (5)..(7): Xaa in position 5 to 7 is any or no amino acid
  Variant (10)..(10): Xaa in position 10 is Ser or Thr
  Variant (11)..(12): Xaa in position 11 to 12 is any amino acid
  Variant (13)..(13): Xaa in position 13 is Leu or Met
  Variant (16)..(18): Xaa in position 16 to 18 is any amino acid
  Variant (19)..(19): Xaa in position 19 is Ala or Asp
  Variant (20)..(20): Xaa in position 20 is Ala or Leu
  Variant (21)..(22): Xaa in position 21 to 22 is any amino acid
  Variant (23)..(23): Xaa in position 23 is Ala or Leu
  Variant (24)..(24): Xaa in position 24 is Ala or Asn
  Variant (25)..(25): Xaa in position 25 is Ala or Val
  Variant (26)..(27): Xaa in position 26 to 27 is any amino acid
  Variant (28)..(28): Xaa in position 28 is Ala or Asn
  Variant (29)..(29): Xaa in position 29 is Leu or Val
  Variant (30)..(31): Xaa in position 30 to 31 is any amino acid
  Variant (32)..(32): Xaa in position 32 is Ala or Leu
  Variant (33)..(33): Xaa in position 33 is any amino acid
  Variant (34)..(34): Xaa in position 34 is Lys or Arg
  Variant (35)..(35): Xaa in position 35 is Ala or Leu
NXXDXXXILXXXXQGXXXXXXXXXXXXXXXXXXXX

SEQ ID NO: 37570 - protein, 14 aa, Artificial sequence
  protein pattern
  Variant (2)..(2): Xaa in position 2 is any or no amino acid
  Variant (4)..(5): Xaa in position 4 to 5 is any or no amino acid
  Variant (12)..(12): Xaa in position 12 is Gly or Val
  Variant (13)..(13): Xaa in position 13 is any amino acid
  Variant (14)..(14): Xaa in position 14 is Ala, Glu or Asn
PXVXXRYHSLVXXX

SEQ ID NO: 37571 - protein, 25 aa, Artificial sequence
  protein pattern
  Variant (2)..(2): Xaa in position 2 is any amino acid
  Variant (4)..(4): Xaa in position 4 is Asn or Val
  Variant (6)..(6): Xaa in position 6 is any amino acid
  Variant (7)..(7): Xaa in position 7 is any or no amino acid
  Variant (9)..(11): Xaa in position 9 to 11 is any amino acid
  Variant (13)..(13): Xaa in position 13 is Leu or Pro
  Variant (15)..(15): Xaa in position 15 is any or no amino acid
  Variant (17)..(17): Xaa in position 17 is Thr or Val
  Variant (19)..(19): Xaa in position 19 is Lys or Arg
  Variant (20)..(20): Xaa in position 20 is Asn or Val
  Variant (23)..(24): Xaa in position 23 to 24 is any amino acid
  Variant (25)..(25): Xaa in position 25 is Lys or Arg
LXGXYXXPXXXLXIXEXLXXLGXXX

SEQ ID NO: 37572 - protein, 11 aa, Artificial sequence
  protein pattern
  Variant (2)..(2): Xaa in position 2 is Ile or Leu
  Variant (3)..(3): Xaa in position 3 is Asp or Glu
  Variant (4)..(4): Xaa in position 4 is any amino acid
  Variant (5)..(5): Xaa in position 5 is Phe or Leu
  Variant (6)..(6): Xaa in position 6 is Lys or Arg
  Variant (7)..(7): Xaa in position 7 is Glu, Asn or Ser
  Variant (8)..(8): Xaa in position 8 is any amino acid
  Variant (9)..(9): Xaa in position 9 is Gln, Ser or Thr
VXXXXXXXXAY

SEQ ID NO: 37573 - DNA, 1170 bp, Escherichia coli
  CDS (1)..(1170): transl_table=11
atgctggagttgttgtttctgcttttgcctgtagccgctgcctatggctggtatatgggccgcagaagtgcgcaacaaaacaagcaagatgaagccaaccgcttgtcgcgtgattacgtagcgggggttaacttcctgcttagtaatcaacaggataaagcggtagacctgtttctcgatatgcttaaagaggatacaggcaccgttgaagcccaccttacgctcggaaacctgttccgttcgcgtggcgaagttgatcgcgctattcgcatccatcagaccctaatggaaagcgcctcgctgacctatgaacagcgtctgttggcgattcaacaactggggcgtgattacatggccgccgggttatatgaccgcgcggaagacatgttcaatcagctgaccgatgaaactgacttccgcattggcgcgctgcaacagttgctacaaatctaccaggctaccagtgagtggcagaaagcaattgatgttgccgaacgcctggtgaagctgggtaaagataaacagcgcgtcgaaattgcccatttctactgtgagttagccctgcagcatatggccagcgacgatctcgatcgtgccatgaccttgctaaaaaaaggggcggcggcagataaaaacagcgcccgcgtatccataatgatgggacgcgtgtttatggcgaaaggagaatacgccaaagccgtcgaaagtctgcaacgcgtgatatcccaggacagagaactggtcagcgaaacgctggaaatgttgcaaacctgctatcagcagttgggtaaaactgccgaatgggcagaattcctgcagcgtgcggtggaagagaacaccggtgccgatgctgaattgatgcttgctgatatcatcgaagcgcgcgacggtagtgaggccgcacaggtctatattacgcgccagcttcagcgtcatccgaccatgcgtgtgttccataagttaatggattaccacttaaatgaagcggaagaagggcgtgccaaagagagcctgatggtgctgcgtgacatggttggcgagaaggtacgtagtaagcctcgttatcgttgccagaaatgtggttttaccgcatacaccctctactggcattgtccgtcttgtcgggcctggtcaaccattaaaccgattcgcggtcttgatggcctgtaa

SEQ ID NO: 37574 - protein, 389 aa, Escherichia coli
MLELLFLLLPVAAAYGWYMGRRSAQQNKQDEANRLSRDYVAGVNFLLSNQQDKAVDLFLDMLKEDTGTVEAHLTLGNLFRSRGEVDRAIRIHQTLMESASLTYEQRLLAIQQLGRDYMAAGLYDRAEDMFNQLTDETDFRIGALQQLLQIYQATSEWQKAIDVAERLVKLGKDKQRVEIAHFYCELALQHMASDDLDRAMTLLKKGAAADKNSARVSIMMGRVFMAKGEYAKAVESLQRVISQDRELVSETLEMLQTCYQQLGKTAEWAEFLQRAVEENTGADAELMLADIIEARDGSEAAQVYITRQLQRHPTMRVFHKLMDYHLNEAEEGRAKESLMVLRDMVGEKVRSKPRYRCQKCGFTAYTLYWHCPSCRAWSTIKPIRGLDGL

SEQ ID NO: 37575 - DNA, 1170 bp, Proteus mirabilis
  CDS (1)..(1170): transl_table=11
atgcttgagttgctgtttctgttattaccggtcgctgcggcttatggctggtatatggggcgtcgtggtgcgcaacaggataaacagcaaaatgccgatcgcctgtcacgtgaatatgtggcaggggttaactttttactttctgatcaacaagacaaagcggttgatctgttccttgaaatgcttaaagaggatagctcagcctttgaagcacatcttactttaggtaatctatttcgctctcgtggtgaagttgaacgtgcgattcgtattcaccaatcgttaatggagagcgcggcactctcttttgaacaacgtcttctcgctattcagcaacttggccgtgattatgtcgcagcaggggtttatgatcgcgctgaacatatgtttttacagctgattgatgagcaggattttcgtcaaagtgcattacaatccctcctagccatttatcaacttaccagtgactggggtaaggcgatagaaaccgcagagaaattggtaaaactgggtcaacatgaacttaaagagcaaattgcccatttctattgtgaactcgcattgcaagaaatgagcagtgataatcttgataatgcgctaagttttctacaaaaagccgggcaaatggatccactttgtgcccgtgtttccattatgtatggtcgtatctatatcgcgcgcgatgaaaaaaataaagccattgatgtattaatgaaagtaattgagcaagataaagagatggtcagtgaaaccttgccaatgctttttgaatgcttccaatctcaaggtgatcccgcacgttgggaatcctatctacgtcaatgtgtcgagagtaattgtggtgccattgcagagctttatcttgccgatattattgaagaaaaagagggcattgaagctgcacagttatatattaatcgccaactagaacgtcatcccaccatgcgacttttctatcgtttaatgcgctatcatttagctgaagcagaagaaggacgcgcaaaagagagtctgatcttattacgttatatggtcggtgagcagatccgcacaaaacctgattaccgttgccataaatgtggttttacctcccatgcattatattggcattgtccatcctgtcgctcttgggataccgttaagccgatacgtggcttagatggtcagtga

SEQ ID NO: 37576 - protein, 389 aa, Proteus mirabilis
MLELLFLLLPVAAAYGWYMGRRGAQQDKQQNADRLSREYVAGVNFLLSDQQDKAVDLFLEMLKEDSSAFEAHLTLGNLFRSRGEVERAIRIHQSLMESAALSFEQRLLAIQQLGRDYVAAGVYDRAEHMFLQLIDEQDFRQSALQSLLAIYQLTSDWGKAIETAEKLVKLGQHELKEQIAHFYCELALQEMSSDNLDNALSFLQKAGQMDPLCARVSIMYGRIYIARDEKNKAIDVLMKVIEQDKEMVSETLPMLFECFQSQGDPARWESYLRQCVESNCGAIAELYLADIIEEKEGIEAAQLYINRQLERHPTMRLFYRLMRYHLAEAEEGRAKESLILLRYMVGEQIRTKPDYRCHKCGFTSHALYWHCPSCRSWDTVKPIRGLDGQ

SEQ ID NO: 37577 - DNA, 1170 bp, Vibrio cholerae O1 biovar eltor str. N16961
  CDS (1)..(1170): transl_table=11
atgttagaaatactgttcctgttattgcccatcgctgccgcctacggctggtacatggggcatcgtagcgcccagcaagataaacagaaacaatcacaccaaatttcgcgtcaatacgtgaccggtttgaacctcttactctccgatcaatcggataaagcggttgatcactttatcgaattactgcaagtcgataatgaaaccattgatacccatctagcactcggtaaccttttccggtctcgtggcgaagtggatcgcgctattcgtattcaccaaaaccttatctctcgctctgggttgaccatagaccagaaaaacttggcgctgcagcagttagctaaggactatatggtgtccggttttcttgatcgtgctgagaaaatatttgaacaactgattgatgagcctgagcatcgtgaatctgctctccagcagctcacggcaatttatcaacagactcgtgagtggcacaaagcgattgagtgtgccaccgctttggttaagcttgggcgcaaacgtatgaaggtgaacattgcgcatttctactgcgagctggccatgcttgaaaaggcggacagtaacgataacaaagccattcaactgtttaaaaaagcattacaagaagatccgaaatgtgtacgtgcaaccatttcactcggtaaactctacctacaaaacgaagactatcagaagactattgaccatctagagatggttcttgagcaagatatcgattttatcggtgaagtgctcaatacgttggctgagtgttaccaccatttggggcgagagcaagatttgatcaccttcttacgtcgctgtatcgccaataaagcgggggtatcggccgaattaatgctcgctcagctggttgcacagcatgaaggtattgccgctgcacaagagattttaactcgtcagttggttaaaaatcctactatgaaaggcttttaccggttgattgattaccatattgccgaagcggaagagggcagagccaaagccagtctctctacgttacaacgcttagtgggtgaacagcttaaagtaaaaccccattaccgttgccgtaaatgtggcttttcgacccattcactttattggcattgcccatcatgtaaaaactggggttcaatcaagccaatcagaggcttagatggtgagtaa

SEQ ID NO: 37578 - protein, 389 aa, Vibrio cholerae O1 biovar eltor str. N16961
MLEILFLLLPIAAAYGWYMGHRSAQQDKQKQSHQISRQYVTGLNLLLSDQSDKAVDHFIELLQVDNETIDTHLALGNLFRSRGEVDRAIRIHQNLISRSGLTIDQKNLALQQLAKDYMVSGFLDRAEKIFEQLIDEPEHRESALQQLTAIYQQTREWHKAIECATALVKLGRKRMKVNIAHFYCELAMLEKADSNDNKAIQLFKKALQEDPKCVRATISLGKLYLQNEDYQKTIDHLEMVLEQDIDFIGEVLNTLAECYHHLGREQDLITFLRRCIANKAGVSAELMLAQLVAQHEGIAAAQEILTRQLVKNPTMKGFYRLIDYHIAEAEEGRAKASLSTLQRLVGEQLKVKPHYRCRKCGFSTHSLYWHCPSCKNWGSIKPIRGLDGE

SEQ ID NO: 37579 - DNA, 1188 bp, Pasteurella multocida subsp. multocida str. Pm70
  CDS (1)..(1188): transl_table=11
atgctcgagttactcttcctgcttttacctattgctgcagcttatggttggtatatggggcaccgtagtgcgaaaaaagatcaggaagacatgacaaacaaactctcccgtgattatgtcactggcgtgaatttccttttatcaaatcaaccagaaaaagcagttgatttgtttctcgatattctgcaaaagcaagaaacagaaaatgaaatcgatagcacttcacagtttgaagctgaactgacactaggcaatctttatcgctctcgaggtgaagttgatcgcgctttacgtattcatcaagcgttagatcgtagccctgattatacctttgaacaaaaactgctggctaagcaacaattagcaaaagatttcatggccgtaggattttatgatcgtgctgaaatgctttatattttgttagttgatgagccagagtttgctgaaaatgcattacaacaactggcagtgttgtatcaaaaaacgaaagaatgggaaaaagcgattaatgttgcagaaaaattagcgaaaatttcaccacaagaaaataatattgagcttgcacaatattactgtgaattggctcaaagtttatcgttagaagagaagacacaacaagagcgtcagaaaggattattagtgtcagcattaaaagtggcaccaaattgtgtgagagcctcaattttacttggtcaacttttaatccaagaaaaacgttaccagcaggctgtaatgacgttagagaatgtccttgaacaaaacgctgattatgtgggagaagtcttagatttactgaaagcctgttatcacaagctcaaccaattagagagctttgaattatttttgattaaagccagccgtgtcaccaaaaatagtgccgtagaattagcactttctgatttaattgaagaaatcgacggtaaaacagccgcacaagcgaagttgtatcagcaattaaaccaacatccgacaacctttttatttcaccgctttattcaatatcaaattaatgatgctgaagaagggagaggaaaagaaagtcttgtgttgttgcataaaatggtgggggaacgcattaagcagaattttgactaccgttgcacaaattgtggttatcaaacacacaaactaacctggtgttgtccatcttgccgacattgggaaacaatcaaaccgatagaagattaa

SEQ ID NO: 37580 - protein, 395 aa, Pasteurella multocida subsp. multocida str. Pm70
MLELLFLLLPIAAAYGWYMGHRSAKKDQEDMTNKLSRDYVTGVNFLLSNQPEKAVDLFLDILQKQETENEIDSTSQFEAELTLGNLYRSRGEVDRALRIHQALDRSPDYTFEQKLLAKQQLAKDFMAVGFYDRAEMLYILLVDEPEFAENALQQLAVLYQKTKEWEKAINVAEKLAKISPQENNIELAQYYCELAQSLSLEEKTQQERQKGLLVSALKVAPNCVRASILLGQLLIQEKRYQQAVMTLENVLEQNADYVGEVLDLLKACYHKLNQLESFELFLIKASRVTKNSAVELALSDLIEEIDGKTAAQAKLYQQLNQHPTTFLFHRFIQYQINDAEEGRGKESLVLLHKMVGERIKQNFDYRCTNCGYQTHKLTWCCPSCRHWETIKPIED

SEQ ID NO: 37581 - DNA, 1197 bp, Xylella fastidiosa 9a5c
  CDS (1)..(1197): transl_table=11
atggattgcattgattctatggaattcctggatgaatggttctggtttttcttatttctgcctctggctgctttgagcggctgggtcattggccgacggggagggcaacgacatgggcatgcccaggttagccgattgtccagtacttattttcgcggactgaattacttactcagtgaacaacccgataaagcaatcgagttgtttcagcatattgcggagctggataaggaaacgtttgagacacaagttgcgcttggtcatttgttccgccgtcgcggcgagattgatcgtgcgatccgattgcatcaaggattgcttaagcggcctgatttgaccgaccatcaaaaggtgtttgccttacttgcgttgggcgaggattacatgaagtctggattgctggatcgtgcagagacagtcttcacagaacttgcgcagattgatcaacgtgcaccgcaagcgctacgccacttaatcagcatctaccaagcggagcgtgattgggagaaagcgatcgataatgcgattcgctatgaagtggcgactggagagcccatgggcaagcttattgctcaatttgaatgcgagttggcagatcgttaccgtgcttctaaccagcatgatagggcgctggaagcggtcagccgtgcttaccaagccgatgcgacttcggtacgtgccggtatcattgaaggtcgcattgaggctgatttgggtcaccacgaggctgcggtccgtgcttgggagcgtgctgcgcgccatgatcccgaatatcttccggagatcattccggcgttgctgatcgcctatcgtcaagtgggtgatattgctggggcccgtaatttcctttccgagatgacagagcactatcgtggtattgcccctgttttggcaatgacccaactgattgaatcgcaggaaggaccagcacaagcgcgtggttatctcggtagccagctcaaagcgaagccctcggtacgtggtcaatcggcgctgattgatctgactcttgctgacggaagtgatccggtcgcgtctttgtatgatctaaagcatattaccgatcaactgttggtccgcaatccgagttaccgttgcacgcgctgtggttttggcgctaagacgcatcattggcaatgtccaagttgtaaagagtggggaacagtcaaaccattgctgaactatgcggtggtctaa

SEQ ID NO: 37582 - protein, 398 aa, Xylella fastidiosa 9a5c
MDCIDSMEFLDEWFWFFLFLPLAALSGWVIGRRGGQRHGHAQVSRLSSTYFRGLNYLLSEQPDKAIELFQHIAELDKETFETQVALGHLFRRRGEIDRAIRLHQGLLKRPDLTDHQKVFALLALGEDYMKSGLLDRAETVFTELAQIDQRAPQALRHLISIYQAERDWEKAIDNAIRYEVATGEPMGKLIAQFECELADRYRASNQHDRALEAVSRAYQADATSVRAGIIEGRIEADLGHHEAAVRAWERAARHDPEYLPEIIPALLIAYRQVGDIAGARNFLSEMTEHYRGIAPVLAMTQLIESQEGPAQARGYLGSQLKAKPSVRGQSALIDLTLADGSDPVASLYDLKHITDQLLVRNPSYRCTRCGFGAKTHHWQCPSCKEWGTVKPLLNYAVV

SEQ ID NO: 37583 - DNA, 1278 bp, Ralstonia solanacearum GMI1000
  CDS (1)..(1278): transl_table=11
atggattttgatctctggtggctgctggccatccccctggtgttcggcttgggctgggtggcggcccggctggatgcccgacaactgctgaccgaacaggcgtcgctgccgcgctcctatttcaaggggctgaatttcctcctcaacgagcagccggacaaggcgatcgacgccttcatcgaagtcgcgcgcctggaccccgaaaccaccgagctgcacttcgcgctgggcagcctgttccgccgccgcggcgaaaccgagcgcgccatccgcgtgcaccagaacctggtcaaccggccggacttgccggccaacgagcgcgaccacgcgctgtatgagctgggccaggatttcctgcgtgccggcctgctggaccgtgccgaagaatcgctgcgcatgctgatggaaggcgtgtttgccgagccggccaagcgcgtgctgctggagctgtacgaggtcgagaaagagtggcgcaaggcgatcgatgccgcgcgcgaactgcagacgctgcagggccaggattattcggtgcagatcgcccagttctgctgcgagctggcgcaggaatcgctgcagcgcaaggacgtgtcggctgccgtcgaatggcttgagcgcgccctgcaggagaacccgaagaacgttcgcgccaccatccagctgggcgacgtggcgctgggcaagggcgataccgaaggcgcgatcaagcgctggcgcagcatcgagcagcagaacccggccttcctgccgctggtggccgagcgcctgatgaaagcctacgcgcagctcggccgtgccgccgagggcctggcctggctgcgctccaagatggacgcgcgccttggccccgagctgctggacgtcgtctaccgctatgagctggacgtgcacggcatcgacgatgccgtcgcgctgatgcgcgagcagatccgccgccagccttcgctgatggcgctcacgcgcctggtcgaagccgaggcgacgcgcgcctccgaagccgtgagccacgaggccgcggcggttgccgcgcccatcagtgacagtgcgctggccgatccggtggaggccggcagcaacgccgacatccagcgcgcgcaagacctcggcgccatccgcgacctgctgcagagccgcacccgcaacctggcccgctacacctgccaggagtgcggcttccgcgcgcgcctgttctattggcaatgtccgggctgcaaccgctgggaaacctacgcgccgcgccgtaccgaagcgctcggcggcagcggtggcgccagcatgtaa

SEQ ID NO: 37584 - protein, 425 aa, Ralstonia solanacearum GMI1000
MDFDLWWLLAIPLVFGLGWVAARLDARQLLTEQASLPRSYFKGLNFLLNEQPDKAIDAFIEVARLDPETTELHFALGSLFRRRGETERAIRVHQNLVNRPDLPANERDHALYELGQDFLRAGLLDRAEESLRMLMEGVFAEPAKRVLLELYEVEKEWRKAIDAARELQTLQGQDYSVQIAQFCCELAQESLQRKDVSAAVEWLERALQENPKNVRATIQLGDVALGKGDTEGAIKRWRSIEQQNPAFLPLVAERLMKAYAQLGRAAEGLAWLRSKMDARLGPELLDVVYRYELDVHGIDDAVALMREQIRRQPSLMALTRLVEAEATRASEAVSHEAAAVAAPISDSALADPVEAGSNADIQRAQDLGAIRDLLQSRTRNLARYTCQECGFRARLFYWQCPGCNRWETYAPRRTEALGGSGGASM

SEQ ID NO: 37585 - DNA, 1179 bp, Xanthomonas campestris pv. campestris str. ATCC 33913
  CDS (1)..(1179): transl_table=11
atggacttcctgaccgaatggttctggttcttcctgtttctgccgatcgccgcgcttggcggctggatcgttggccggcgcggtggccagcgccacggcgacacccaggtcagccgtctgtccagcacctacttccgtggtctgaactatctgctcaacgagcagccggacaaggccatcgagctgtttctgcatatcgccgaactggacaaggaaaccttcgagacccaggtcgcgttggggcatctgttccgccgccgcggtgaagtggaccgcgccatccgccttcaccaaggactggtgcagcgcgccgatctgaccgatcagcagcgtgtccaggccttgctggcactgggcgaggactacatgaagtccggcctgctggatcgcgccgaaaccgtgttcaccgagctggcgcagctggaccagcgcgcgccgcaggcgttgcgccatctgatcggcatctaccaggccgagcgtgactgggaaaaggcgatcgacaacgccactcgctacgaagaagtcaccggcgagccgatgggcaagctgatctcgcagttcgaatgtgagctggccgatcgctaccgtggcctgagcaaaccggacgacgcgctgcaggccatcgcacgcgcctatcaggccgacggcacctcggtgcgcgccggcattctggaaggccggatcgaggccgagcgcggtcacgacgaggcggcggtccgcgcgttcgagcgtgccgcgcggcacgatccagaatacctgccggaaatcattcccgcactgatggcggcctaccgccgggtgggcgacatcgccggcgcgcgcaatttcctgtcggagatgaccgagcactatcgcggcatcgcgccggtgctggccctgacccagttgatggaggcgcaggacggcgtagcgccggccctggcctatctgggtcgtcagctcaaggatcgcccctcggtacgcggcgagtctgccttgatcgatctgacgctcgccgaaggcagcgacccggtcggcacgttgcaggatctcaagcacatcaccgaccaattgctggtgcgcaatcccagctatcgctgcacccgctgcgggttcggcgcaaagacccatcactggcaatgtcccagctgcaaggaatggggaaccgtcaagccgctgctgaactacgcggtggtctag

SEQ ID NO: 37586 - protein, 392 aa, Xanthomonas campestris pv. campestris str. ATCC 33913
MDFLTEWFWFFLFLPIAALGGWIVGRRGGQRHGDTQVSRLSSTYFRGLNYLLNEQPDKAIELFLHIAELDKETFETQVALGHLFRRRGEVDRAIRLHQGLVQRADLTDQQRVQALLALGEDYMKSGLLDRAETVFTELAQLDQRAPQALRHLIGIYQAERDWEKAIDNATRYEEVTGEPMGKLISQFECELADRYRGLSKPDDALQAIARAYQADGTSVRAGILEGRIEAERGHDEAAVRAFERAARHDPEYLPEIIPALMAAYRRVGDIAGARNFLSEMTEHYRGIAPVLALTQLMEAQDGVAPALAYLGRQLKDRPSVRGESALIDLTLAEGSDPVGTLQDLKHITDQLLVRNPSYRCTRCGFGAKTHHWQCPSCKEWGTVKPLLNYAVV

SEQ ID NO: 37587 - DNA, 1170 bp, Shigella flexneri 2a str. 301
  CDS (1)..(1170): transl_table=11
atgctggagttgttgtttctgcttttgcctgtagccgctgcctatggctggtatatgggccgcagaagtgcgcaacaaaacaagcaagatgaagccaaccgcttgtcgcgtgattacgtagcgggggttaacttcctgcttagtaatcaacaggataaagcggtagacctgtttctcgatatgcttaaagaggatacaggcaccgttgaagcccaccttacgctcggaaacctgttccgttcgcgtggcgaagttgatcgcgctattcgcatccatcagaccctaatggaaagcgcctcgctgacctatgaacagcgtctgttggcgattcaacaactggggcgtgattacatggccgccgggttatacgaccgcgcggaagacatgttcaatcagctgaccgatgaaactgacttccgcattggcgcgctgcaacagttgctacaaatctaccaggctaccagtgagtggcagaaagcaattgatgttgccgaacgcctggtgaagctgggtaaagataaacagcgcgtcgaaattgcccatttctactgtgagttagccctgcagcatatggccagcgacgatctcgatcgtgccatgaccttgctaaaaaaaggggcggcggcagataaaaacagcgcccgcgtatccatcatgatgggacgcgtgtttatggcgaaaggagaatacgccaaagccgtcgaaagtttgcaacgcgtcatatcccaggacagagaactggtcagcgaaacgctggaaatgttgcaaacctgctatcagcagttgggtaaaactgccgaatgggcagaattcctgcaacgcgcggtggaagagaacaccggtgccgatgctgaattgatgcttgctgatatcatcgaagcgcgcgacggtagtgaggctgcacaggtctatattacacgccagcttcagcgtcatccgaccatgcgtgtattccataagctaatggattaccacttaaatgaagcggaagaagggcgcgccaaagagagtctgatggtgctgcgtgacatggttggcgagaaggtgcgtagtaagcctcgttatagctgccataaatgtggttttaccgcatacaccctctactggcattgtccgtcttgtcgtgcctggtcaactattaaaccgattcgcggtcttgatggcctgtaa

SEQ ID NO: 37588 - protein, 389 aa, Shigella flexneri 2a str. 301
MLELLFLLLPVAAAYGWYMGRRSAQQNKQDEANRLSRDYVAGVNFLLSNQQDKAVDLFLDMLKEDTGTVEAHLTLGNLFRSRGEVDRAIRIHQTLMESASLTYEQRLLAIQQLGRDYMAAGLYDRAEDMFNQLTDETDFRIGALQQLLQIYQATSEWQKAIDVAERLVKLGKDKQRVEIAHFYCELALQHMASDDLDRAMTLLKKGAAADKNSARVSIMMGRVFMAKGEYAKAVESLQRVISQDRELVSETLEMLQTCYQQLGKTAEWAEFLQRAVEENTGADAELMLADIIEARDGSEAAQVYITRQLQRHPTMRVFHKLMDYHLNEAEEGRAKESLMVLRDMVGEKVRSKPRYSCHKCGFTAYTLYWHCPSCRAWSTIKPIRGLDGL

SEQ ID NO: 37589 - DNA, 1161 bp, Shewanella oneidensis MR-1
  CDS (1)..(1161): transl_table=11
atgcttgagatcctcttcctgttgctcccaatagctgccggttacggttggtatatgggacggcggagtataaggcaaaatcagagtaatcagcgtaaacaattaagtcgtgattatttcactggcttgaatttcctgttgtctaacgagtcggacaaagcggtcgacttgtttatcagtatgctcgatgtggacgatgaaaccatcgatacccatctgtccctcggttctttattccgtaagcgcggtgaagttgaccgctcgattcgtattcaccaaaacttaattgcccgcccaacattgaccaatgaacagcgcgatatcgccatgatggagctgggcaaagactatcttgcagcgggattttatgatcgcgccgaggaaatttttctaaatttagtcagtcaagatgaccatagcgaagagtcagagacacaattaattgcgatttaccaagtgattaaggaatggcaaaaggctatcgatatcaccaaacgtttaagccgtaaacggcagcaggtgctcaaaccgattacagcacatttttattgtcagcttgccgatgaaaccagcgatgatgcagagaagatcaagttactgcagcaagccctaaaacaagatcccaaatgtggccgcgccttattgacccttgccaagaaattcctcgatgcgaaggattacagccagtgtaaatccatgcttatagccttaaaaaaggctgatattgagctttttgccgatgcattaccgacggcgaaacaagtgtatcgcgatacccaagataaagagggctatcaagagttattggcaggcgctatggctgaaggcgctggtgtatccgtggtggttgcgcttgcccaacatatgataagccttgatgagataaaagccgccgaaaacatggtgctggatgcgctgtatcgccatcctaccatgaagggctttcagcacttaatgcagatgcatttacgccaagcagaagaagggcaagccaaacaaagtttgactatgcttgagcaacttgttgaacaacaaattaaattccgtccaagctatcgctgtaaagaatgtggttttccatcccatacgctgtattggcattgtccttcttgcaaaaaatggggcaccattaaacggatacgaggattggacggtgaataa

SEQ ID NO: 37590 - protein, 386 aa, Shewanella oneidensis MR-1
MLEILFLLLPIAAGYGWYMGRRSIRQNQSNQRKQLSRDYFTGLNFLLSNESDKAVDLFISMLDVDDETIDTHLSLGSLFRKRGEVDRSIRIHQNLIARPTLTNEQRDIAMMELGKDYLAAGFYDRAEEIFLNLVSQDDHSEESETQLIAIYQVIKEWQKAIDITKRLSRKRQQVLKPITAHFYCQLADETSDDAEKIKLLQQALKQDPKCGRALLTLAKKFLDAKDYSQCKSMLIALKKADIELFADALPTAKQVYRDTQDKEGYQELLAGAMAEGAGVSVVVALAQHMISLDEIKAAENMVLDALYRHPTMKGFQHLMQMHLRQAEEGQAKQSLTMLEQLVEQQIKFRPSYRCKECGFPSHTLYWHCPSCKKWGTIKRIRGLDGE

SEQ ID NO: 37591 - DNA, 1179 bp, Xylella fastidiosa Temecula1
  CDS (1)..(1179): transl_table=11
atggaattcctggatgaatggttctggtttttcttatttctgcctctggctgctttgagcggctgggtcattggccgacggggagggcaacgacatgggcatgcccaggttagccgattgtccagtacttattttcgcggactgaattacttactcagtgaacaacccgataaagcaatcgagttgtttcagcatattgcggagctggataaggaaacgtttgagacacaagttgcacttggtcatttgttccgccgtcgcggcgagattgatcgtgcgatccgattgcatcaaggattgtttaagcggcctgatttgaccgaccatcaaaaggtgtttgccttacttgcgttgggcgaggattacatgaagtctggattactggatcgtgcagagacagtcttcacagaacttgcgcagattgatcaacgtgcaccgcaagcgctacgccacttaatcagcatctaccaagcggagcgtgattgggagaaagcgatcgataatgcgattcgctatgaagtggtgactggagagccgatgggcaagcttattgctcaatttgaatgcgagttggcagatcgttaccgtgcttccaaccagcatgatagggcgctggaagcggtcagccgtgcttaccaagccgatgcgacttcggtacgttccggtatcattgaaggtcgcattgaggctgatttgggtcatcatgaggctgcggtccgcgcttgggagcgtgctgcgcgccatgatcccgaatatcttccggagatcattccgtcgttgctgattgcctatcgtcaagtgggtgatattgctggggcccgtaatttcctttccgagatgacagagcactatcgtggtattgcacccgttttggcaatgacccaactgattgaatcgcaggaaggaccagcacaagcgcgtgtttatcttggtagccagctcaaagcgaagccctcggtgcgtggtcaatcggcgttgattgatctgactctggctgacggaagtgatccggtcgcatctttgtatgatctaaagcatattaccgatcaactgttggtacgcaatccgagttaccgttgtacgcgttgtggttttggcgctaagacgcatcattggcaatgtccaagttgtaaagagtggggaacagtcaaaccattgctgaactatgcggtggtctaa

SEQ ID NO: 37592 - protein, 392 aa, Xylella fastidiosa Temecula1
MEFLDEWFWFFLFLPLAALSGWVIGRRGGQRHGHAQVSRLSSTYFRGLNYLLSEQPDKAIELFQHIAELDKETFETQVALGHLFRRRGEIDRAIRLHQGLFKRPDLTDHQKVFALLALGEDYMKSGLLDRAETVFTELAQIDQRAPQALRHLISIYQAERDWEKAIDNAIRYEVVTGEPMGKLIAQFECELADRYRASNQHDRALEAVSRAYQADATSVRSGIIEGRIEADLGHHEAAVRAWERAARHDPEYLPEIIPSLLIAYRQVGDIAGARNFLSEMTEHYRGIAPVLAMTQLIESQEGPAQARVYLGSQLKAKPSVRGQSALIDLTLADGSDPVASLYDLKHITDQLLVRNPSYRCTRCGFGAKTHHWQCPSCKEWGTVKPLLNYAVV

SEQ ID NO: 37593 - DNA, 1176 bp, Vibrio parahaemolyticus RIMD 2210633
  CDS (1)..(1176): transl_table=11
atgcttgaactactcttcttgttgttgccgatagcggctgcgtatggctggtacatggggcatcgcagcgctcagcaagacaagcagaagcaatctcatcaaatttcccgtcagtatatggcgggtctgaacttactgctctctgatcaatcagataaagccgtagaccactttattgaattgctccaagttgacaacgaaacgattgatactcacttagcgctgggtaatcttttccgttctcgtggtgaagtcgaccgtgctattcgtatccaccaaaatctcatttctcgttctggtttgactctagatcagaaaaacctagccctgcagcagttagcgaaagactatatggtgtcgggctttttagaccgagctgaaaaaatcttcgaacaactagttgaagagcctgattacaaagaggcggcgctccaacagttagtcactatttaccagcaaacgcgtgaatgggaaaaagcgattcattacgccaatcagctagctaaaatgggtaatcagcgtagtcgtatgcgtacaaatattgcgcatttttggtgtgaaattgccatgctagaccaagctgatggcaattcgaataaagctatccagcatttcaaaaaagcactttccgaagatccaaaatgtgttcgagcaagtatttcgctcggccggatttacttggaatcagaagactacaaacaaaccattaagtatctaacgggtgtattggagcaagacaaagactttgtgagcgacgttttgccgacaattgctgagtgctatcaccatctcgggcaagaagatgaactggtcgagtttttacgcgcctgtattgataaaaaggcaggggtgtcagcggagttgatgctggctcagttagtcgctcaccatgaaagcgtcggcgctgctcaagaattgctgacgaaacagctactgaaaaatccaaccatgaagggcttttatcgcctgattgactaccacattgcagaggctgaagacggtcgcgcaaaagacagtttatctacattacaagcgatggttggagaacaattaaaagtaaaaccgcactaccgatgcaggaagtgtggcttctctactcattccctttattggcattgcccttcctgtaaagggtgggggacgatcaagccaatccgcggattggatggtgaatag

SEQ ID NO: 37594 - protein, 391 aa, Vibrio parahaemolyticus RIMD 2210633
MLELLFLLLPIAAAYGWYMGHRSAQQDKQKQSHQISRQYMAGLNLLLSDQSDKAVDHFIELLQVDNETIDTHLALGNLFRSRGEVDRAIRIHQNLISRSGLTLDQKNLALQQLAKDYMVSGFLDRAEKIFEQLVEEPDYKEAALQQLVTIYQQTREWEKAIHYANQLAKMGNQRSRMRTNIAHFWCEIAMLDQADGNSNKAIQHFKKALSEDPKCVRASISLGRIYLESEDYKQTIKYLTGVLEQDKDFVSDVLPTIAECYHHLGQEDELVEFLRACIDKKAGVSAELMLAQLVAHHESVGAAQELLTKQLLKNPTMKGFYRLIDYHIAEAEDGRAKDSLSTLQAMVGEQLKVKPHYRCRKCGFSTHSLYWHCPSCKGWGTIKPIRGLDGE

SEQ ID NO: 37595 - DNA, 1167 bp, Coxiella burnetii RSA 493
  CDS (1)..(1167): transl_table=11
atgatagcgcaagcgttatttttgcttttgccaatggccgccgccggcggatggtttgcagcgcgacgcgtatcatttaaaaacgatcctaaattgttgcctactttacgccaagattattttaaaggtttgaattatttaattaacgaacagccggacaaagctgtcgatgtttttattaaattgcttgaagtcgacacagacacagtagaaacgcatttagcactgggtagtctctttcgtcggcggggcgaagtggaccgtgctattcgtgtccaccaaaacttaatagctcggccgcaattagccaaagaacatcgttttcacgctttatcggaattgggtcaggattatttacgcgccggcgtgcttgaccgcgctgaacggttgtttcttgagttagtagagatgggtgaggaaaatcaaggcagcttgcgctttttgttgcacatctatcagcaagaaaaagactggcaaaaggccattgaaacggcccaaaaattactcgcgtgtggcgaaccagttcacgctattattgcacaataccattgtgagctggctgagcaaatgattgatacagggcggacttcccaagcggtgcaatgtttaaaacgagcccaagccatcgattcgaattgtgtgcgtgcaagccttattcaagggcgcctagaaagcgaaaacgcgcactatcgagaggctattcgctgttataaacgagtcgttgagcaagatcctgattatatttcggaagccgtaggcccattagtcgattgttatcagcggctgggggaagaaaataaattagtggcttatctcgaagactgtctcatgcgttacccaagaatttcattggtattggccatttcggatcatttacaacatcgacacggagaaaaagcggctatagaatttatcgcgcaacaaattcagcgccagccatccttgcgcggtttaacgcatttagtaggattatatttacttaattccagcggcgatacgcgagataaattattaattttgcaaaatttcatgaaaaaattattgaaaaataaacccatctatcgttgttctcattgcggattttcgggaaaaatgttgtattggctctgtcccagttgccaacattggaataccgtaaggcccattcaaggtttagaaggtaattga

SEQ ID NO: 37596 - protein, 388 aa, Coxiella burnetii RSA 493
MIAQALFLLLPMAAAGGWFAARRVSFKNDPKLLPTLRQDYFKGLNYLINEQPDKAVDVFIKLLEVDTDTVETHLALGSLFRRRGEVDRAIRVHQNLIARPQLAKEHRFHALSELGQDYLRAGVLDRAERLFLELVEMGEENQGSLRFLLHIYQQEKDWQKAIETAQKLLACGEPVHAIIAQYHCELAEQMIDTGRTSQAVQCLKRAQAIDSNCVRASLIQGRLESENAHYREAIRCYKRVVEQDPDYISEAVGPLVDCYQRLGEENKLVAYLEDCLMRYPRISLVLAISDHLQHRHGEKAAIEFIAQQIQRQPSLRGLTHLVGLYLLNSSGDTRDKLLILQNFMKKLLKNKPIYRCSHCGFSGKMLYWLCPSCQHWNTVRPIQGLEGN

SEQ ID NO: 37597 - DNA, 1170 bp, Shigella flexneri 2a str. 2457T
  CDS (1)..(1170): transl_table=11
atgctggagttgttgtttctgcttttgcctgtagccgctgcctatggctggtatatgggccgcagaagtgcgcaacaaaacaagcaagatgaagccaaccgcttgtcgcgtgattacgtagcgggggttaacttcctgcttagtaatcaacaggataaagcggtagacctgtttctcgatatgcttaaagaggatacaggcaccgttgaagcccaccttacgctcggaaacctgttccgttcgcgtggcgaagttgatcgcgctattcgcatccatcagaccctaatggaaagcgcctcgctgacctatgaacagcgtctgttggcgattcaacaactggggcgtgattacatggccgccgggttatacgaccgcgcggaagacatgttcaatcagctgaccgatgaaactgacttccgcattggcgcgctgcaacagttgctacaaatctaccaggctaccagtgagtggcagaaagcaattgatgttgccgaacgcctggtgaagctgggtaaagataaacagcgcgtcgaaattgcccatttctactgtgagttagccctgcagcatatggccagcgacgatctcgatcgtgccatgaccttgctaaaaaaaggggcggcggcagataaaaacagcgcccgcgtatccatcatgatgggacgcgtgtttatggcgaaaggagaatacgccaaagccgtcgaaagtttgcaacgcgtcatatcccaggacagagaactggtcagcgaaacgctggaaatgttgcaaacctgctatcagcagttgggtaaaactgccgaatgggcagaattcctgcaacgcgcggtggaagagaacaccggtgccgatgctgaattgatgcttgctgatatcatcgaagcgcgcgacggtagtgaggctgcacaggtctatattacacgccagcttcagcgtcatccgaccatgcgtgtattccataagctaatggattaccacttaaatgaagcggaagaagggcgcgccaaagagagtctgatggtgctgcgtgacatggttggcgagaaggtgcgtagtaagcctcgttatagctgccagaaatgtggttttaccgcatacaccctctactggcattgtccgtcttgtcgtgcctggtcaactattaaaccgattcgcggtcttgatggcctgtaa

SEQ ID NO: 37598 - protein, 389 aa, Shigella flexneri 2a str. 2457T
MLELLFLLLPVAAAYGWYMGRRSAQQNKQDEANRLSRDYVAGVNFLLSNQQDKAVDLFLDMLKEDTGTVEAHLTLGNLFRSRGEVDRAIRIHQTLMESASLTYEQRLLAIQQLGRDYMAAGLYDRAEDMFNQLTDETDFRIGALQQLLQIYQATSEWQKAIDVAERLVKLGKDKQRVEIAHFYCELALQHMASDDLDRAMTLLKKGAAADKNSARVSIMMGRVFMAKGEYAKAVESLQRVISQDRELVSETLEMLQTCYQQLGKTAEWAEFLQRAVEENTGADAELMLADIIEARDGSEAAQVYITRQLQRHPTMRVFHKLMDYHLNEAEEGRAKESLMVLRDMVGEKVRSKPRYSCQKCGFTAYTLYWHCPSCRAWSTIKPIRGLDGL

SEQ ID NO: 37599 - DNA, 1191 bp, Haemophilus ducreyi 35000HP
  CDS (1)..(1191): transl_table=11
atgttcgaattattgttccttttattacctattgcagcgctttatggctggtatattggacgtcttagtgttaaaaaggagcaagaatctatcaataataaattttctcgtgattatgttacgggtttaaattttcttttgtctaatcagcaagaaaaagcggttgatctttttctatcaatgcttcaaaaacaggaatctgaaaatcagattgccacggaatcacaatttgaagcggaacttactttaggtaatctttttcgttctcgcggtgaagttgatcgcgcattacgtattcatcaagcgctagattcaagtctaaattattctattgaacaaaaactattagctaaacagcaacttgccaaggattttatggcggcaggtttttatgatcgcgcagaaaactattatattttgttgttagatgagccagaatttgcggtaaattcacttacacaattaatggttctttatcagaaaacaaatgagtggaagaaagcgattaatgttgcggaaaagcttttaaaaattgatcctaaaactgatcgtattcctttatcgcattattattgtgagtatgcacaagctataaaatcggaagatgaggatttatatttgaggcttttaggtaaagcattagaatattcaccattgtgtacgcgagcctctatgttattgggtgattattatttggcgcaaggacaattttcgcaagcattaacacattttgagcatattttagttcaagatcctgattatattagtgaagtgttgcataacattaaaacgtgtcatgcggcattacatgattttataaattacgaattatttctaattagatcaaatcaagttaaacataatagcagtgtggacatagcattagcggagttaattgaacaaaaagatggtttgattgcagcgcattctaagttatatcaacaattaagcaagtatcctagtatgttgatttttcatcgttttatttattatcaaataaatgaagcagaggaaggtagcgcaaaagagagtttagtattattgcataatatggtaggtgctaggattaaaaaaagttttcaatatcgttgtttaaattgtggttatcaaagttatcgtttgagttggtattgcccatcttgtcggcaatgggagcaaattaagccaataaatggtatcgattcatattaa

SEQ ID NO: 37600 - protein, 396 aa, Haemophilus ducreyi 35000HP
MFELLFLLLPIAALYGWYIGRLSVKKEQESINNKFSRDYVTGLNFLLSNQQEKAVDLFLSMLQKQESENQIATESQFEAELTLGNLFRSRGEVDRALRIHQALDSSLNYSIEQKLLAKQQLAKDFMAAGFYDRAENYYILLLDEPEFAVNSLTQLMVLYQKTNEWKKAINVAEKLLKIDPKTDRIPLSHYYCEYAQAIKSEDEDLYLRLLGKALEYSPLCTRASMLLGDYYLAQGQFSQALTHFEHILVQDPDYISEVLHNIKTCHAALHDFINYELFLIRSNQVKHNSSVDIALAELIEQKDGLIAAHSKLYQQLSKYPSMLIFHRFIYYQINEAEEGSAKESLVLLHNMVGARIKKSFQYRCLNCGYQSYRLSWYCPSCRQWEQIKPINGIDSY

SEQ ID NO: 37601 - DNA, 1224 bp, Bordetella bronchiseptica RB50
  CDS (1)..(1224): transl_table=11
gtggattttgaaccctggtggctgatattcgtgccggtgctgttcgcgctgggctggctggcggcgcgctttgacttccggcagatgctgcgcgagacgcgcacgctgcccgattcgtacttccgcggcctgaacttcctgctcaatgagcagcccgaccgggcgatcgacgcgttcgtcgaggtcgccaagctggatcccgaaaccaccgagctgcacttcgccctgggcagcctgtttcgccggcgcggcgaaatggagcgcgccatccgcgtgcaccagagcctgctgagccgctccgatctgccggtggccgagcgcgaacacgcgcagcacgaactggcgcaggatttcctgaaggccggcatgctggaccgcgccgaaggggcgttcgagcagctcaaggacacccgctacgcgctgcccgcgctgcgttcgctgatccgtatctacgaatccgagcacgactggccgcgcgccatcgaggcggtcaagaccttgcacgggctggtcgacgagcccgtgccgcagatcgtgcactactactgcgagcaggcgcaggccgcgctgacggccaagccggtggatttcgacgccgcccatgccgcgctggacgcggccgaccacgccgccggcatggtcgagcgcggcaacgcggcgccagccaaggcgtcgctggtgcgcaccgccatgctgcgcgcgcgcctggccgccctcgagagcgatcccaagcgcgagcgcctgtatctcgaatccattctcacccaggcgcccgaattcgccgggctggtggccgaggcgctgctgacgaactaccggcaggccgaccaggccgccgccgggttggcgatgctgcagcagcagtaccagcggcacgcctcgctggacctcttcaacgtggtgttccgcgagctgcgcgtgcagcagggctcggcgcccgcgtgggcgttcgcgcgcgaggcgctgcgccatcatccgtccctgctgggcctggaccgcctgctcgaggccgaattggcctcgcccggcgcacccgccgacgccgggcccgtgaccggggccgacctgaccctgctgcgcagcctcatccataaacatacccagcgcctggaccgctatgcctgccgcagttgcggcttccaggcgcgccgcttttactggcagtgccccggctgcaattcctgggaaacctacgcgccgcgccgcctggaagaactcgaatga

SEQ ID NO: 37602 - protein, 407 aa, Bordetella bronchiseptica RB50
MDFEPWWLIFVPVLFALGWLAARFDFRQMLRETRTLPDSYFRGLNFLLNEQPDRAIDAFVEVAKLDPETTELHFALGSLFRRRGEMERAIRVHQSLLSRSDLPVAEREHAQHELAQDFLKAGMLDRAEGAFEQLKDTRYALPALRSLIRIYESEHDWPRAIEAVKTLHGLVDEPVPQIVHYYCEQAQAALTAKPVDFDAAHAALDAADHAAGMVERGNAAPAKASLVRTAMLRARLAALESDPKRERLYLESILTQAPEFAGLVAEALLTNYRQADQAAAGLAMLQQQYQRHASLDLFNVVFRELRVQQGSAPAWAFAREALRHHPSLLGLDRLLEAELASPGAPADAGPVTGADLTLLRSLIHKHTQRLDRYACRSCGFQARRFYWQCPGCNSWETYAPRRLEELE

SEQ ID NO: 37603 - DNA, 1170 bp, Photorhabdus luminescens subsp. laumondii TTO1
  CDS (1)..(1170): transl_table=11
atgttagagctgttgtttctgttgcttcctgtggccgctgcttatggctggtatatggggcgcagaagtgctcaacaggataagcaacaaaatgctgatcgcttatcacgagaatatgttgccggggttaactttctcctttcaaaccagcaagataaagccgtggatctgtttcttgaaatgctcaaagaggacagttctgcttttgaagcacatttgactttggggaatctattccgttccagaggagaagtagagcgggctatccgcattcatcaatctctcatggaaagcgcttctctgacatttgatcagcgtttgcttgcgacgcaacaattgggccgcgattatatgtctgcgggtctgtatgatcgtgctgaaaatatgtttgctcaattggtgaatgaaaaagattttcaggaaaatgcgtttcagtcgctgctgactatttatcaatcaaccagtgattggaaaaaagccattgatattgctgagaaattagttaaatccggcaagcatgatttacgggaaaaaattgcgcatttttattgtgaactcgctttacaggagatgagcggtgatgatcttgatgaagctatcggttatctcaataaagcggttcaggcagataaaaactgcgccagagtttctatcatgttggggcgcttgtttatggcccggcaagagtacaataaagcggcggatgctttaaaatctgttcttgagcaggataaacagttggtgagtgaggtgctacctattctccaagagtgttaccagcatcaaaatcagattgatgaatgggaaaatttcctgaaacgttgtgtcgaggaagattgtggagccacggccgagcttttgctggctgatattatcgagcagcaaaaagggcatgaagtcgcgcaaacttacatcaatcatcgattagagcgtcatccgaccatgcgcctattttatcgcttgatggattaccacctggccgaagcagaagagggtcgggcgaaagaaagtattatcttgctacgggacatggttggtgagcaaattcgcaccaagcctaattatcgctgccataagtgcggctttacttctcattcgctttactggcactgtccatcatgccgttcgtgggattctattaaaccgatccgtggattagatggtcagtga

SEQ ID NO: 37604 - protein, 389 aa, Photorhabdus luminescens subsp. laumondii TTO1
MLELLFLLLPVAAAYGWYMGRRSAQQDKQQNADRLSREYVAGVNFLLSNQQDKAVDLFLEMLKEDSSAFEAHLTLGNLFRSRGEVERAIRIHQSLMESASLTFDQRLLATQQLGRDYMSAGLYDRAENMFAQLVNEKDFQENAFQSLLTIYQSTSDWKKAIDIAEKLVKSGKHDLREKIAHFYCELALQEMSGDDLDEAIGYLNKAVQADKNCARVSIMLGRLFMARQEYNKAADALKSVLEQDKQLVSEVLPILQECYQHQNQIDEWENFLKRCVEEDCGATAELLLADIIEQQKGHEVAQTYINHRLERHPTMRLFYRLMDYHLAEAEEGRAKESIILLRDMVGEQIRTKPNYRCHKCGFTSHSLYWHCPSCRSWDSIKPIRGLDGQ

SEQ ID NO: 37605 - DNA, 1170 bp, Vibrio vulnificus YJ016
  CDS (1)..(1170): transl_table=11
atgcttgaattactcttcttgttacttcctattgccgctgcgtatggttggtatatgggccatcgcagcgcacaggatgacaagcagaagcactccaatcagatctctcaacaatatgtgacggggctgaacttactgctgtctgatcaatcggacaaagcggtagatcactttattgagttgcttcaagtcgataacgacacgattgatactcatctggcgttaggaaatctcttccgttctagaggggaagttgatcgcgccattcgtatacatcaaaatttgatttctcgttccggcttgaccattgaacaaaaaaacatcgcgctacaacagttggcgaaagactatatggtgtcgggttttctggaccgcgcggaaaaaatattcgagcagttagttgaagagccggaacatcgtgatgccgctttacagcaattagtcttaatctaccagcagacacgagagtgggacaaagcgattcactatgcccaccttttagtgaagacggggaaaaaatcgattagaaaaaacatcgcccattattggtgtgagctagcgatgttagaacaagcggatggcaataaaaccaagtccatcagccatttcaaaaaagcactgcaagaagatcctaaatgtgttagagcatcgatttctcttggacgtatttacctcgagatggaagaatatcgcaagacgatcgagtatctggaacatgttctagaacaagatgcggatttcgttagtgaagcgttgcctattcttgctgagtgttaccaccatctaggccaagaagatcaacttgtcgaatttctgcgcgcgtgtattagtaaaaaagcaggtgtgtctgctgagctaatgctagcccaactggttgcacatcacgaaagtgttggtgctgcccaagagttgttaacaagacaattaattaaaaacccgactatgaaaggtttttatcgattgatggattatcatcttgcagaagcggaagatggaagggccaaagaaagcttgacgacgctgcaggcaatggtcggagaacaacttaaaattaagcctcattaccgatgtcgaaaatgtggcttttctacgcattccctttattggcattgtccttcctgtaaagggtgggggacgatcaagccaatccgaggattggatggcgaatag

SEQ ID NO: 37606 - protein, 389 aa, Vibrio vulnificus YJ016
MLELLFLLLPIAAAYGWYMGHRSAQDDKQKHSNQISQQYVTGLNLLLSDQSDKAVDHFIELLQVDNDTIDTHLALGNLFRSRGEVDRAIRIHQNLISRSGLTIEQKNIALQQLAKDYMVSGFLDRAEKIFEQLVEEPEHRDAALQQLVLIYQQTREWDKAIHYAHLLVKTGKKSIRKNIAHYWCELAMLEQADGNKTKSISHFKKALQEDPKCVRASISLGRIYLEMEEYRKTIEYLEHVLEQDADFVSEALPILAECYHHLGQEDQLVEFLRACISKKAGVSAELMLAQLVAHHESVGAAQELLTRQLIKNPTMKGFYRLMDYHLAEAEDGRAKESLTTLQAMVGEQLKIKPHYRCRKCGFSTHSLYWHCPSCKGWGTIKPIRGLDGE

SEQ ID NO: 37607 - DNA, 1170 bp, Erwinia carotovora subsp. atroseptica SCRI1043
  CDS (1)..(1170): transl_table=11
atgttagaactgctgtttctgttgctgcccgtggccgccgcgtacggttggtacatgggtcgcagaagtgcgcagcaggacaaagagcaggaatccaaccgcctgtcccgtgaatacgttaccggggttaacttcctgttgtctaaccagcaggataaggcggtggaactgttcctcgacatgctcaaggatgacagtaatacctttgaagcccacctcacgctcggtaacctgtttcgctcgcgcggcgaagttgaccgtgcgattcgcatccatcaggcactgaccgaaagcgcatcgttaacctttgaacagcgcttactggcggtgcagcagctgggccgtgactacatggctgctgggctgtatgaccgtgccgaagagattttcaaccaactggtggatgaagaagatttccggcgtagcgctttgcagcagctattgcagatccatcaggccaccagcgactggctgacggcgatagatgttgcggaaaaactggtcaaaatgggaaaagatgagcttcgtgtggacatcgctcatttttactgcgagttagcgctgctggcgatgggcagtgacgatctggataaagcgttaacgttcctgaagaaaggggcctcggcggacaaccagtgtgctcgtgcgtccattatgatggggcgtatttacatggcgcagcaggattattcacgtgcggtggaggccttgcggcaggttctcgatcaagataaagagctggtcagtgaaacattaccgatgttgcaggagtgctatcagcacttaggtaacaccttggattgggctcatttcctcaagcgctgcgtggaagaaaataccggagcgacggcggaattgatgctggccgacatcctcgaaagggaagagggtgcagaggttgcgcaggtctacatcaatcgtcagctgcaacgtcacccgactatgcgtgtgttccatcgcctgatggattttcacctgcatgaagctgaagacggacgagcaaaagaaagcctggtggtgctgcgcgacatggtgggtgagcagattcgtactaaaccccgctacagctgccgtaaatgcggtttcacgtcacaatcactctattggcaatgtccttcctgtcgtacttgggcaagcgtgaagccgatccgtggattagacggacaatag

SEQ ID NO: 37608 - protein, 389 aa, Erwinia carotovora subsp. atroseptica SCRI1043
MLELLFLLLPVAAAYGWYMGRRSAQQDKEQESNRLSREYVTGVNFLLSNQQDKAVELFLDMLKDDSNTFEAHLTLGNLFRSRGEVDRAIRIHQALTESASLTFEQRLLAVQQLGRDYMAAGLYDRAEEIFNQLVDEEDFRRSALQQLLQIHQATSDWLTAIDVAEKLVKMGKDELRVDIAHFYCELALLAMGSDDLDKALTFLKKGASADNQCARASIMMGRIYMAQQDYSRAVEALRQVLDQDKELVSETLPMLQECYQHLGNTLDWAHFLKRCVEENTGATAELMLADILEREEGAEVAQVYINRQLQRHPTMRVFHRLMDFHLHEAEDGRAKESLVVLRDMVGEQIRTKPRYSCRKCGFTSQSLYWQCPSCRTWASVKPIRGLDGQ

SEQ ID NO: 37609 - DNA, 1170 bp, Yersinia pseudotuberculosis IP 32953
  CDS (1)..(1170): transl_table=11
atgttagaaatgctgtttctgctgttgcccgttgctgccgcctatggttggtatatggggcgcagaagcgctcagcaggataagcaacaggatgctaaccgcttgtcacgtgaatacgtggctggggttaacttccttctctcgaaccagcaagataaagcagtcgatctcttcctcgaaatgttgaaagaagacagttctacggtcgaggctcatcttactctgggtaatctgttccgctcacgcggcgaagttgatcgcgccattcgcatccatcaagccttgatggagagtgcatccctgacatttgaacaacggctattggctgttcagcaactcggtcgggattacatggccgcaggtttatatgatcgggcagaagatatgttcaaccaattggttgaagagcaagattttcggctcggcgcattacaacaattactgataattcatcaggcaaccagtgattggcataatgctattgaagttgcggaaaaattggtcaagatgggcaaagataatcagcgtctggaaattgcgcacttctattgtgaacttgcgttgcaagcaatgggcagtgacgatctggataaggccatggggttactgaaaaaagcggcaacggcggataaacaatgtgcccgagtttctattatgcgtggccgtgtgcatctcgctaaaggtgagtatgccaaaggcgttgaagcgttggagcgagtactggagcaagataaagaagtcgtcagtgaagcattaccgatgctcagtgaatgctaccaacacctgcaacagccccaggcttgggctaatttccttaaacgttgtgtggaagataataccggtgcggcggctgaactgatgttggcggaggtccttgaacagcaggagggccatgatgtcgcgcaaacgtatattaaccgccaattacagcgccacccaacgatgcgcggtttttatcgtctaatggattaccacttagcagatgcagaagaagggcgtgcaaaagagagtttattgctattacgggacatggttggtgagcaaattcggaccaaaccacgttaccgttgtcataagtgtggtttcaccgcccactcactctattggcattgcccgtcttgccgtgcctgggcatcagttaagccgatcagaggattagatgggcagtag

SEQ ID NO: 37610 - protein, 389 aa, Yersinia pseudotuberculosis IP 32953
MLEMLFLLLPVAAAYGWYMGRRSAQQDKQQDANRLSREYVAGVNFLLSNQQDKAVDLFLEMLKEDSSTVEAHLTLGNLFRSRGEVDRAIRIHQALMESASLTFEQRLLAVQQLGRDYMAAGLYDRAEDMFNQLVEEQDFRLGALQQLLIIHQATSDWHNAIEVAEKLVKMGKDNQRLEIAHFYCELALQAMGSDDLDKAMGLLKKAATADKQCARVSIMRGRVHLAKGEYAKGVEALERVLEQDKEVVSEALPMLSECYQHLQQPQAWANFLKRCVEDNTGAAAELMLAEVLEQQEGHDVAQTYINRQLQRHPTMRGFYRLMDYHLADAEEGRAKESLLLLRDMVGEQIRTKPRYRCHKCGFTAHSLYWHCPSCRAWASVKPIRGLDGQ

SEQ ID NO: 37611 - DNA, 1197 bp, Mannheimia succiniciproducens MBEL55E
  CDS (1)..(1197): transl_table=11
atgcttgaattactctttctgcttttacccattgccgctgcttacggctggtatatgggacaccgaagcgcgaagaaagatcaggaagacgtcagtaataaattatcccgtgactatgtgacgggagtaaattttcttttatccaaccaaacggaaaaagcggtcgatttatttttacatatgttgcaaaagcaggaagaagaaaatgagatcgatagcaattcacaatttgaagcggagctcactttaggtaatctgtttcgttcccgtggtgaagtggacagagccttacgaattcatcaaaatttagaccgcagttcttattacactttcgaacaaaaattgttagccaagcagcaattggctaaggattttatgtccgtaggcttttttgaccgagccgaaacgctttatattatgttagtggacgagcccgaatttgccgaaggcgcattacaacaattagccgttatttatcaaaaaacaaaagattggaaaaaagcgattaatgtggcggaaaaattagccaaaatttctcctcaggaagataatatcgaattggcgcaatattattgtgaatatgcccgtacattgggggaggagagcaaagagcagcctaaagaaattcttcagcaggcattgactgtttcacctagttgcgtcagagcttctatgttattgggggattttttgatacaagaagagcagtatgcgaaagcagtccctgtgcttgagaatgtactgacgcaaaatgcaagttatgtgggtgaggttctccctcaacttaaagaatgctatcagcatttaaatcaattggataatttcgaattatttttaattagagccaatcaagaatataaacataatagctcggttgccctagcactggcggatttaattgccgaacaagacggccgtgcagcggcacagaataaggtttatcagcaattaacgcaaaatccgagcctgtttttatttcaccgtttcgttcaatatcaggtagatgatgccgaagagggacggggcaaagacagcctggttttattacaccgtattgttggcgaacgaattaaacaaagttttggttatcgttgtacaaactgcggttaccaaagtcataaattattatggtgttgcccgtcttgccgtcaatgggaaaaagtgaaaccgattcgcggtattgaaagccaaatttag

SEQ ID NO: 37612 - protein, 398 aa, Mannheimia succiniciproducens MBEL55E
MLELLFLLLPIAAAYGWYMGHRSAKKDQEDVSNKLSRDYVTGVNFLLSNQTEKAVDLFLHMLQKQEEENEIDSNSQFEAELTLGNLFRSRGEVDRALRIHQNLDRSSYYTFEQKLLAKQQLAKDFMSVGFFDRAETLYIMLVDEPEFAEGALQQLAVIYQKTKDWKKAINVAEKLAKISPQEDNIELAQYYCEYARTLGEESKEQPKEILQQALTVSPSCVRASMLLGDFLIQEEQYAKAVPVLENVLTQNASYVGEVLPQLKECYQHLNQLDNFELFLIRANQEYKHNSSVALALADLIAEQDGRAAAQNKVYQQLTQNPSLFLFHRFVQYQVDDAEEGRGKDSLVLLHRIVGERIKQSFGYRCTNCGYQSHKLLWCCPSCRQWEKVKPIRGIESQI

SEQ ID NO: 37613 - DNA, 1170 bp, Legionella pneumophila subsp. pneumophila str. Philadelphia 1
  CDS (1)..(1170): transl_table=11
atgattaatttatggccactgttgttacctgctgccgcatggtctggctggtggctggctaaccgcagtaattccaataaagatgctcatgtccacaatcgcttatcgcgagaatatgtagttggacttaattatttattaaatgaacaatctgataaagcggttgacgtatttatcaagcttctagaagttgatagcgatacagtagaaacccatcttgcactgggtagcttgttcaggcgtagaggggaagtagacagagctattcgtattcatcaaaatttaatcgccaggcctcaattaagtattcaacaacgaaaggaagccctaatggctttagggcaagattatatgagtgctggagtgtttgaccgagctgaacgtatattccttgaagttgttgagttgggcgggagtagagatacaagcagtcttcaaggattattagcaatttaccaacaagaaaaagcttgggaaaaagctttagatattattaagaaactggaaatttctaccggagccagtttccacaatcaagcagctcattattactgtgaaatggctagtcaagcgcttaaaatcaatgcaatggatagagcaatttattgtataaagcaagcaatgaatgttgatccggaatccgtaagagccagtttgatgaatgctacaattgaaataaaagaaggccgctataaacaggctattcgatctttaaaaagagtgccgcagcaggatgcagagtttttaaccgaaatcattgaaccattagttctttgtcataaagagctggactccatgccggattgtattcactatcttgagcaaactttggaaaaacatccgagagcctctgtaattttcgttatagctgattatttgcgacaaaataagggtatggatattgcaattgactttgtggctgataatttaagcaaacatccatcgataagaggtttgaatcgtttgatttattggcacttggagtctgctcatgggaaagtacgtgaaaaactgcaaatgctttatgatattactagcaagtttttagataataagcccatatatcgatgtgggcattgtggttttggtggtaaacatttacattggcattgcccaagttgtaaacagtggggtagaatgaagcctatccatggtttggaaggggattaa

SEQ ID NO: 37614 - protein, 389 aa, Legionella pneumophila subsp. pneumophila str. Philadelphia 1
MINLWPLLLPAAAWSGWWLANRSNSNKDAHVHNRLSREYVVGLNYLLNEQSDKAVDVFIKLLEVDSDTVETHLALGSLFRRRGEVDRAIRIHQNLIARPQLSIQQRKEALMALGQDYMSAGVFDRAERIFLEVVELGGSRDTSSLQGLLAIYQQEKAWEKALDIIKKLEISTGASFHNQAAHYYCEMASQALKINAMDRAIYCIKQAMNVDPESVRASLMNATIEIKEGRYKQAIRSLKRVPQQDAEFLTEIIEPLVLCHKELDSMPDCIHYLEQTLEKHPRASVIFVIADYLRQNKGMDIAIDFVADNLSKHPSIRGLNRLIYWHLESAHGKVREKLQMLYDITSKFLDNKPIYRCGHCGFGGKHLHWHCPSCKQWGRMKPIHGLEGD

SEQ ID NO: 37615 - DNA, 1176 bp, Azoarcus sp. EbN1
  CDS (1)..(1176): transl_table=11
atggaaatcgaattctggtggtttctggcgctaccgcttttttttgcgctgggctggctggcagcccgcatcgacatacgtcaggtggtgcatgaatcgcgcgcgctgccgcgttcgtacctgtcgggtctgaactttctgctgaatgaacagcaagacaaggcgatcgatgcattcatcgaagcagtgaagatcgatccgcaaacgatcgagctgcatttcgcgctgggaagcctgtttcgacgccgcggcgagaccgatcgcgccattcgcatgcaccagagccttgtcgaccgcgaggacctctccgacgagcaacgccttcaggcgctcgccgagcttggccaggatcatctgaaggccgggttgctggatcgcgccgaggcggtgttcctgaagcttcgggacacccgcctcaatgacattgcggcgcgtttcctgctcgagatctaccagcaggaaaaggactgggcaaaggcgatcgaggcggcaaaggccctgccggatcacgagagcgtcctgtggcgcaaggaagtcgcgaatttctattgcgaactggcgaccctcgcccttgccagctcgcggaacgaggaagcccggcgccatctcgaccaggcgttcgcgatcaaccggcagtgtgtccgcgcgagcatcgtcctcggcgatctcatggcggcggagaagcgctacgacgaggccatcgaagtgtggaagcgcgtcgagagccaggatccggtttaccttgcgctggtcgccgaacgcatcatggacgcccaccagcggctagaccgggtcgagcaggggcagacgctgctgcgctcatggctcgagcgtcattcctcgctcgatctcctcgacgaagtgttccactgggagctcgaaaaggaggggtcgcgcgcggcctatgaccttgtcagggaagagctgcgccgcaatccgacgctgctcgggctcgacaagttgctcgaagccgcattgctgaacgcgccggccgagcagcgcagtgacatcgaacttgtaaaacagttaatccacggtcacacccgccgggttgcgcgttatcgttgcgccgaatgcgggttcaaggcgcgccagttccagtggcgttgcccggcgtgtggcggctgggaaacatatcctccgcgccgcacggaagaatacgatctcgcgccgtaa

SEQ ID NO: 37616 - protein, 391 aa, Azoarcus sp. EbN1
MEIEFWWFLALPLFFALGWLAARIDIRQVVHESRALPRSYLSGLNFLLNEQQDKAIDAFIEAVKIDPQTIELHFALGSLFRRRGETDRAIRMHQSLVDREDLSDEQRLQALAELGQDHLKAGLLDRAEAVFLKLRDTRLNDIAARFLLEIYQQEKDWAKAIEAAKALPDHESVLWRKEVANFYCELATLALASSRNEEARRHLDQAFAINRQCVRASIVLGDLMAAEKRYDEAIEVWKRVESQDPVYLALVAERIMDAHQRLDRVEQGQTLLRSWLERHSSLDLLDEVFHWELEKEGSRAAYDLVREELRRNPTLLGLDKLLEAALLNAPAEQRSDIELVKQLIHGHTRRVARYRCAECGFKARQFQWRCPACGGWETYPPRRTEEYDLAP

SEQ ID NO: 37617 - DNA, 1191 bp, Haemophilus influenzae 86-028NP
  CDS (1)..(1191): transl_table=11
atgatagaattactctttctattattgcctattgctgctgcctatggctggtatatggggcggcgtagtgcgaagaaagatcaagatgacataagtaataaactctcccgagattatgttacgggagtgaattttttactttctaatcaaactgataaagctgtagatttgtttttagatatgttgcaaaagcaagaaatcgaaaatgaaatcgaaagccactcccaatttgaagccgagcttacacttggtaatctgtttcgttctcgaggcgaagttgatcgtgcattgcgtattcatcaagctttagatcttagtcctaattatacttttgaacaaaaattacttgcaaaacaacagcttgctcgagattttatggtggttggtttttttgaccgagctgagaatctttatattttactagtagatgaacctgaatttgcagaaaatgctttacagcaacttttagtgatttatcaaaaaacaaaagaatggaaaaaagcagtcaatattgctgaaaaactcgctaaaataaagccacaagagaataatattgaacttgcgcaatgttattgtgaatattcacaaagtttagaacctgaaagtgcggttgaaaaacgcagtgttttacaaaaggctttgtcggtttctccgacttgtgttcgcgcttctttattgcttgcaaatttagcaatgcttgatggtcaatatcaacaagcagtagaaattttagaaaatgttttggagcaaaatccagattatacgggtgaaattttgtcacctttaaaacattgttatgaagaattaaatcagttagataattttgagttatttttaattcgtgcaggtcaaattattaataatgatgaagtagaactagctctagtcaaattaattgaagaaaaagatggtaagtctgctgcgcaagctaagctttatcaacaacttacaaaaaatccaagtactttaattttccatcgttttatgcagtatcaaattgatgatgcagaagacgggcggggaaaagaaagcttaattttattacataaaatggttggcgaaaggattaagcaaacatcgccttatcgttgtacaaattgtggttatcaaattcataagctattgtggaattgcccatcttgccgtcaatgggaaagtattaaaccggtttcaaatcaagaacataattaa

SEQ ID NO: 37618 - protein, 396 aa, Haemophilus influenzae 86-028NP
MIELLFLLLPIAAAYGWYMGRRSAKKDQDDISNKLSRDYVTGVNFLLSNQTDKAVDLFLDMLQKQEIENEIESHSQFEAELTLGNLFRSRGEVDRALRIHQALDLSPNYTFEQKLLAKQQLARDFMVVGFFDRAENLYILLVDEPEFAENALQQLLVIYQKTKEWKKAVNIAEKLAKIKPQENNIELAQCYCEYSQSLEPESAVEKRSVLQKALSVSPTCVRASLLLANLAMLDGQYQQAVEILENVLEQNPDYTGEILSPLKHCYEELNQLDNFELFLIRAGQIINNDEVELALVKLIEEKDGKSAAQAKLYQQLTKNPSTLIFHRFMQYQIDDAEDGRGKESLILLHKMVGERIKQTSPYRCTNCGYQIHKLLWNCPSCRQWESIKPVSNQEHN

SEQ ID NO: 37619 - DNA, 1170 bp, Colwellia psychrerythraea 34H
  CDS (1)..(1170): transl_table=11
atgattgaattactctttttattattacccgttgccatggcctatggctggtttatgggccgtaatagcatcaaacaaaaccaacaaattgcaaaacaagatttatcgataaaatactcaacagggttgaattatttattatctaatcaacaagataaggctatcgattcactgcttgatgctttaaaagttgaggacgatagtgttgaagcccatttcgctatggccaatttattccgtaaacgtggcgaattagaccgtgcattaaaagttcatgaacatcttgttagacttaatcacttgcctactaaagataagcagcaagcggtctttgagttaggaaaagactttttaagcgcaggtttatatgaccgtgctgaaaccatgtttattaaattattaaagtcaaaggactacggtctaaaatctttaacctatttattaaaaatatttcaatccactaaagattggcagcagggcatagatagacaaaagttaattgttaaatataacgataaacgttcactgcatacgttagctaatttttattgtgaattagcaacaacggcttttgaaaaagatcaatttattgaggtgattgaattactagagcaagcacttttactcgatcccaattcatgccgcgctaattggttgatggcaaagatttatgaaaaccacgagcaatgtgagttagcggctaagtgttaccaagccatctatcatcaagataatgagttctttcctgatgttattgaccctatgttagcttgttatactcgattagatgcactggatgaattctatagttttattaaaaaggtttatgacgagacagctagctctagtgccttaatttgttatcttagccatgttgaaaataaacacggtaagaagaaggcactagattttattctgtcagcattaaagcgtagaccgactattcgtggcttcgaacactttgtaaatatgcaaatgactccctctaatactgatgttagcaatactagtttagatttaattaaagaattaattagtgaatatttaaaagttaagcatagatacagttgtcgtacttgtggttttgacagttcaacccattattggtcatgcccatcatgtcacgagtgggaacagcttaaaccagtgcgtggtctcgaaggcgaataa

SEQ ID NO: 37620 - protein, 389 aa, Colwellia psychrerythraea 34H
MIELLFLLLPVAMAYGWFMGRNSIKQNQQIAKQDLSIKYSTGLNYLLSNQQDKAIDSLLDALKVEDDSVEAHFAMANLFRKRGELDRALKVHEHLVRLNHLPTKDKQQAVFELGKDFLSAGLYDRAETMFIKLLKSKDYGLKSLTYLLKIFQSTKDWQQGIDRQKLIVKYNDKRSLHTLANFYCELATTAFEKDQFIEVIELLEQALLLDPNSCRANWLMAKIYENHEQCELAAKCYQAIYHQDNEFFPDVIDPMLACYTRLDALDEFYSFIKKVYDETASSSALICYLSHVENKHGKKKALDFILSALKRRPTIRGFEHFVNMQMTPSNTDVSNTSLDLIKELISEYLKVKHRYSCRTCGFDSSTHYWSCPSCHEWEQLKPVRGLEGE

SEQ ID NO: 37621 - DNA, 1173 bp, Dechloromonas aromatica RCB
  CDS (1)..(1173): transl_table=11
atgaatgagtttttcgattactggcagttgttgctcattccggttttcttcggtttaggttgggcagcggctcgtgttgatatgcgccaggtggtgcatgaatcacgctcattgccgcgttcgtattttcaaggcttgaacttcctgctcaacgagcagccggataaggccatcgattcgtttctcgaagtggcgaaggtcgattcacagaccgtcgaactccatttcgcgctgggaaatctcttccggcgtaggggggaaaccgaacgggccattcgcatgcaccagaacctgattgatttgcccgatcttgaagagcgtgtccgcctgcaagctttgtcggagctgggccaagattatctgaaggctggattgctggatcgcgccgaagagattttcaacaaacttcttgggagctccttcgaggaggaggccaagcgcaacctgctggaaatctaccaggtcgagaaggagtggttgaaggcggtcgggattgcccgggagttgccggatgtcgcctcgcatcgcgagatcgctgagtattactgcgaactggcggctaatgagattatgagatcccgtccggatacggcgcgcgagtatcttgacgtggccatgcaggagaatcggaagtgtgtccgcgccagcctgctgcagggggatttattgctgcaggaaggggcgacgaccgaagccatcgaggcttggcagcgtatcgagcagcaggatcctgcgtatctggccctggttgcccagcggctgcttgaggcttatcgcaagctggagcggccggccgaaggtatcgccttgctcagtggttatcttgaacgttatccctcgcttgatctgctggaggtggtctatcaacttgtgctggagaacgaggggacggaagcggcctatcgcctagtgcgagctgagttgcaacgcaatccgacgctactcggactggaaaaactgatgagtgcgcgcctgcccttggttgcgccggaggttcgtccggatgtggaactggccaagactatcattcaaggctacaccaagcgcctgtcccgctatcggtgcgataattgcggtttcaaggcccgccagttctactggcgctgtccggcctgtggcggttgggagacttatccgccgcgccgtggcgaagaattcgatcaatccttgtag

SEQ ID NO: 37622 - protein, 390 aa, Dechloromonas aromatica RCB
MNEFFDYWQLLLIPVFFGLGWAAARVDMRQVVHESRSLPRSYFQGLNFLLNEQPDKAIDSFLEVAKVDSQTVELHFALGNLFRRRGETERAIRMHQNLIDLPDLEERVRLQALSELGQDYLKAGLLDRAEEIFNKLLGSSFEEEAKRNLLEIYQVEKEWLKAVGIARELPDVASHREIAEYYCELAANEIMRSRPDTAREYLDVAMQENRKCVRASLLQGDLLLQEGATTEAIEAWQRIEQQDPAYLALVAQRLLEAYRKLERPAEGIALLSGYLERYPSLDLLEVVYQLVLENEGTEAAYRLVRAELQRNPTLLGLEKLMSARLPLVAPEVRPDVELAKTIIQGYTKRLSRYRCDNCGFKARQFYWRCPACGGWETYPPRRGEEFDQSL

SEQ ID NO: 37623 - DNA, 1224 bp, Ralstonia eutropha JMP134
  CDS (1)..(1224): transl_table=11
atgatgtttgaaacctggtggctgcttgcgctgccacttgtctttggccttggatggatggcggcacgcttcgatgtgcgccagctcatcagcgagcagggtgccttgccgcgctcgtatttcaagggcctcaatttcctgctcaatgagcagccggaccaggccatcgacgccttcatcgaggtcgcgcggctcgatccggagaccaccgaactgcactttgcgcttggcgcgctgttccgtcgccgtggcgaaaccgagcgcgccatccgtgtgcaccagaacctcgccacacgtccggatctgcccgagccagagcgtgagcacgcgctgtatgaactggggcaggacttcttgcgtgcgggcctgctggatcgcgccgaagagtcgttgcgccggctgatgtctggcccgtacgcggcgtcagccaagcgggtgctgcttgaactctatgaagtggagaaagaatggcagaaggccatcgatgccgcgcgcgagctgcaggcgctcgagaataaggactaccgcctgcaaattgcccagttctgctgcgaactggcgcaggatgcgctgcaacgcaagcgtcctgaagacgccgtcaagtggctgaaccaggcggtccaggaaaatcccgccaatgtgcgcgcgccgatcctgcttggcgatgtggcggcggctgccggtaatgcgcgcgccgcgttgggccactggctcggcatcgagcgacaggatgcgtccttcctgccgctggtcgcagagcgcgtggtgaaagcctatgccggcctcggcgaacaaggcgtcgcactggattggctgcgcggtctgctgaagggcagtcttgcggctgaactgctcgacgttgcgttcaagacggaactcgaccagaacgggccggaagcggcgacccggctgatgcgcgagcaactgcgccgccagccgacgctgctggccctgacccggtacttcgaggcgcaggccgccagtatggcgccagccggcgcaatggccggcaatggcagcgaagccgataccggcgagaccgttgagggcgacaagacaaaggaggtcacggcgatccgcgacctgctgcaattgcgtacgcgcaacctggcccgctacacctgccgcgaatgcggcttccgtgcgcggcttttctactggcaatgtcccggctgcaaccgctgggagacctatgcgccccggcgatccgaagcgctcggctga

SEQ ID NO: 37624 - protein, 407 aa, Ralstonia eutropha JMP134
MMFETWWLLALPLVFGLGWMAARFDVRQLISEQGALPRSYFKGLNFLLNEQPDQAIDAFIEVARLDPETTELHFALGALFRRRGETERAIRVHQNLATRPDLPEPEREHALYELGQDFLRAGLLDRAEESLRRLMSGPYAASAKRVLLELYEVEKEWQKAIDAARELQALENKDYRLQIAQFCCELAQDALQRKRPEDAVKWLNQAVQENPANVRAPILLGDVAAAAGNARAALGHWLGIERQDASFLPLVAERVVKAYAGLGEQGVALDWLRGLLKGSLAAELLDVAFKTELDQNGPEAATRLMREQLRRQPTLLALTRYFEAQAASMAPAGAMAGNGSEADTGETVEGDKTKEVTAIRDLLQLRTRNLARYTCRECGFRARLFYWQCPGCNRWETYAPRRSEALG

SEQ ID NO: 37625 - DNA, 1185 bp, Thiobacillus denitrificans ATCC 25259
  CDS (1)..(1185): transl_table=11
atggaattcgaattctggtggctgctcgcgtttccgctctttttcgccctcggctggatcgcggcccgggtcgacatccggcaggtcgtcaccgaatcgcgggcgctgcccaactcgtatttccgcggcctcaatttcctgctcaatgagcagccggacaaggccatcgaggcgtttctggaagtcgtcaagctcgagcccgagaccatcgatttgcattttgcgctgggcggactgttccggcgccgcggcgaattcgaccgcgccatccgcatgcacgagcacctgctcgagcgcgaatatcctcagggtcacaaagggctcgccgaggagcagcgcctgcgggcgatgagcgagctgggccaggactacctcaaggccggcctgctcgatcgcgccgagcaggtgttcggcaagctgctcgagacctcccagcacgggcaggcgcgcacgcatctgctcgaaatctacgtgcaggaaaaggactggcagaaagcgatcgacgcggcgcgcctgctcgagcgcgacacgagcaagccgctgaacgcggatatcgcgcacttttattgcgagctcgccctgctcgagtcagccaagggcaattcggacgccgcagcagcgcagctgcagcaggcgctcgccgcgaaccgccagtcggtgcgcgcgaacctgatgacgggcgacctgcacgccgcggccgggcggcacgaagcggcgatcgcggcgtggcgtctggtcgagacccagagcgcgggtcacatggcgctcgtcgtcgaccgcgtgctcgggagctatcgccagcttgggcgcgtcggcgagggcgtgcagtggctccgcgccttctatgcgcggcagccttcgcacgatgttttcaacgccttgtatctggcggtgtccgagaccgaaggggcggcggccgcgcgccaactcgcacgagaggaactgcgccgcaacccgagcctgcgcacgctcgatcgcctgctcgaggccgaaatcgtcacggcagaccccgagcagcgtgagctgttgcaggtggaaaagagcctcgtcgcctcgtacagccagcgcatgatgcgctaccagtgcggcagctgcggcttcaaggccaagcaattcttctggcgttgtccggcgtgcgggcgctgggacagcttcgatcccgagcgcggcgaaggcgagagctag

SEQ ID NO: 37626 - protein, 394 aa, Thiobacillus denitrificans ATCC 25259
MEFEFWWLLAFPLFFALGWIAARVDIRQVVTESRALPNSYFRGLNFLLNEQPDKAIEAFLEVVKLEPETIDLHFALGGLFRRRGEFDRAIRMHEHLLEREYPQGHKGLAEEQRLRAMSELGQDYLKAGLLDRAEQVFGKLLETSQHGQARTHLLEIYVQEKDWQKAIDAARLLERDTSKPLNADIAHFYCELALLESAKGNSDAAAAQLQQALAANRQSVRANLMTGDLHAAAGRHEAAIAAWRLVETQSAGHMALVVDRVLGSYRQLGRVGEGVQWLRAFYARQPSHDVFNALYLAVSETEGAAAARQLAREELRRNPSLRTLDRLLEAEIVTADPEQRELLQVEKSLVASYSQRMMRYQCGSCGFKAKQFFWRCPACGRWDSFDPERGEGES

SEQ ID NO: 37627 - DNA, 1206 bp, Saccharophagus degradans 2-40
  CDS (1)..(1206): transl_table=11
atgcaagatttgttggtttttgcagtcattcttgcagcgctacttattggttttggtgcgggtatcgccttcagccgaaaacgcagggcgaagcgcgtattcgaccccgacgcgttttggccccagcaacattactttaaaggcttaactcagctacttaacgaagagccagatgcagccatagatacttttatatcctctatagatgttaattccgatacgctcgaaacgcatttagcccttggcagtttgttgcgccgcaaaggcgaggtggagcgagcaattcgtgtgcaccaaaacctcttatcccgcagtaaccttactaccgatcagcaatacacagcccaaatggaattagcgttagactacttgcgcagcggcctgctagatagagccgaaatgctacttaaagagctagccgacgcccctaaaataagcaaccccatgcgcaagcgcgcacttgaatgcctaatagagctataccaagatatgcgcgagtggctttctgccatagatgtagcagataggctaactgccagaaagttctcggggcctgcagataagtggcgccagcagcaagcccactacgcgtgcgaaatagcgcaaacagccattacgcaaaaagattggctaactgcccgccgctgggtacgaacagccatgcggcacgataaagactgcgcccgcgcaagcttgctaagcgcccaactagatatagcgcaaaaagaatatgctaaagcgcttatatctctgcggcaaatagtgcagcaggatgagcgctatctctccgaaatgttgcccttggcttatagctgccacaaaaagctcgaatctatgcctgtgtttttaaacgagcttagagcgttgtacgagcacaagggcgaactgctggttttacggtatttggccaaagctgtagagatgtgtgagggcggggatgccgttatctccctgttaatgcaagagctaccgcagtacccgcaaatggaagtggccggtgccctgttaaaaatagtgttggacgagcgcgggccagccagcttgcggaattatgtacaagtaaaaggcctgcttaaaaagctaaccgactctaaataccactaccaatgcaccagctgtggctttaccggtgagcagcttcactggttgtgccctagctgtaaaagctgggcttctcagcaatacacatccgtaccgcatatctaa

SEQ ID NO: 37628 - protein, 401 aa, Saccharophagus degradans 2-40
MQDLLVFAVILAALLIGFGAGIAFSRKRRAKRVFDPDAFWPQQHYFKGLTQLLNEEPDAAIDTFISSIDVNSDTLETHLALGSLLRRKGEVERAIRVHQNLLSRSNLTTDQQYTAQMELALDYLRSGLLDRAEMLLKELADAPKISNPMRKRALECLIELYQDMREWLSAIDVADRLTARKFSGPADKWRQQQAHYACEIAQTAITQKDWLTARRWVRTAMRHDKDCARASLLSAQLDIAQKEYAKALISLRQIVQQDERYLSEMLPLAYSCHKKLESMPVFLNELRALYEHKGELLVLRYLAKAVEMCEGGDAVISLLMQELPQYPQMEVAGALLKIVLDERGPASLRNYVQVKGLLKKLTDSKYHYQCTSCGFTGEQLHWLCPSCKSWASQQYTSVPHI

SEQ ID NO: 37629 - DNA, 1161 bp, Shewanella sp. MR-4
  CDS (1)..(1161): transl_table=11
atgcttgagatcctcttcctgttgctccctattgctgccggttacggctggtatatggggcggcggagcataaggcaaaaccagagtaatcagcgtaaacaattaagtcgtgattatttcaccggcttaaatttcctgttgtcgaacgagtcagacaaagcggtcgacttgtttatcagtatgctcgatgtggatgatgaaactatcgatacccatctttccctcggttcgttatttcgcaaacgcggtgaagttgaccgttccattcgtatccatcagaacttaattgcacgaccaacgctcaccaatgagcagcgcgatatggctatgatggaactgggtaaagattaccttgccgcagggttttacgaccgcgctgaggaaattttcttgaatttagtgagtcaagatgatcacagtgaagagtctgaaactcagctgattgccatttatcaggtgattaaggaatggcaaaaagccatcgacatcaccaaacgcttaagccgtaagcgtcagcaggcactcaaaccgattattgcccatttttattgccagcttgcggatgaatccggggatgatgcggataaaataaagctgctgcaacaggcattaaaacaagatcctaagtgcggccgagccttgctcacgctcgccaaaaaatttctcgatgctaaggattacacccagtgtaaatccatgctgatggcactgaaaaaagccgatatagaactctttgccgatgctttgcccaccgcgaaacaagtgtatcgcgatacccaagataaagagggttatcaagaattattagcgggtgctatggccgaaggggcgggagcctctgtggtggtagcgcttgctcaacatatgattagtctcgatgagataaaggccgctgaaaacatggtattggatgccctgtatcgccatcccaccatgaagggatttcagcacttaatgcagatgcacctgcgtcaagccgaagaagggcaagccaaacaaagtttgactatgcttgagcaactcgttgaacaacaaattaaattccgtccaagttatcgctgtaaagaatgcggttttccatcccacacactttattggcattgtccctcctgtaaaaaatggggcaccattaaacggatccgtggtttagacggtgaataa

SEQ ID NO: 37630 - protein, 386 aa, Shewanella sp. MR-4
MLEILFLLLPIAAGYGWYMGRRSIRQNQSNQRKQLSRDYFTGLNFLLSNESDKAVDLFISMLDVDDETIDTHLSLGSLFRKRGEVDRSIRIHQNLIARPTLTNEQRDMAMMELGKDYLAAGFYDRAEEIFLNLVSQDDHSEESETQLIAIYQVIKEWQKAIDITKRLSRKRQQALKPIIAHFYCQLADESGDDADKIKLLQQALKQDPKCGRALLTLAKKFLDAKDYTQCKSMLMALKKADIELFADALPTAKQVYRDTQDKEGYQELLAGAMAEGAGASVVVALAQHMISLDEIKAAENMVLDALYRHPTMKGFQHLMQMHLRQAEEGQAKQSLTMLEQLVEQQIKFRPSYRCKECGFPSHTLYWHCPSCKKWGTIKRIRGLDGE

SEQ ID NO: 37631 - DNA, 1170 bp, Alkalilimnicola ehrlichei MLHE-1
  CDS (1)..(1170): transl_table=11
atgcccgagttgctttggcttttgctgcccgtggcggcgatgtccgggtggttggccgggagacggagcggggccgggcatcggggcggcgagcaacgggacctgcccgaggcctatttccagggcctcaactacctcctgaacgaggagcgcgacaaggcgctcgaagtgttcacccaaatggtggaggtggacagcgagacagtcgagacccacctggcgctgggcagcctgttccggcgccggggtgaggtcgaccgcgccatccgtattcaccagaacctcatcgcccgcccggccctgagccgccagcagcgcacctacgccctgctggagctgggcgaggactacatgcgtgcgggcctgctcgaccgggccgagacgctcttcgaggaggtgatcgacctcaaccaccacgtcgaaccggccctgcgtcaactgctggccatctatcagcaggagaaggagtgggaccaggccatcggcgccgccctgcgcctggaaaaggtctccgcccagaacctccacccccaggtggcgcacttctactgcgagatggcgggcgaagcctgggcggccggcgatctcagccgtgcccgcaccctctacaagcgcgccctcacccacgacccgcggtgtgtccgggcgagtatccaggccgggcatctggcgcggcagatggggcatgcccggcaggcggtacgtttgtaccggcaggtgcctacccaggcaccggagttcgtcggcgaggtgctcgatggcctgtaccaggcgctggagagcctgggtcagctccaccgctacccggagtttctcgatcaattgctcgccaccggcaaggccccggtggcggtggcgctggcgaaagtggagtggctgcgcgcggaggctgggcacgaggcggcgatgcgctggctggccgagcaccttgaagcccagccctcggtgcgcggcctactccggctggtggagatgagcgacggcgccccccctgtggcggagggtccggtggaggcggcactgcaccggactctccgcgcgctgctggaggcgcgggcgcagtacctttgcgggcaatgcggcttcaccgcccgcacgctgttctggcaatgccccggctgcaagagctggggcagtatccgccccctgcgtggcgtggagggagagtaa

SEQ ID NO: 37632 - protein, 389 aa, Alkalilimnicola ehrlichei MLHE-1
MPELLWLLLPVAAMSGWLAGRRSGAGHRGGEQRDLPEAYFQGLNYLLNEERDKALEVFTQMVEVDSETVETHLALGSLFRRRGEVDRAIRIHQNLIARPALSRQQRTYALLELGEDYMRAGLLDRAETLFEEVIDLNHHVEPALRQLLAIYQQEKEWDQAIGAALRLEKVSAQNLHPQVAHFYCEMAGEAWAAGDLSRARTLYKRALTHDPRCVRASIQAGHLARQMGHARQAVRLYRQVPTQAPEFVGEVLDGLYQALESLGQLHRYPEFLDQLLATGKAPVAVALAKVEWLRAEAGHEAAMRWLAEHLEAQPSVRGLLRLVEMSDGAPPVAEGPVEAALHRTLRALLEARAQYLCGQCGFTARTLFWQCPGCKSWGSIRPLRGVEGE

SEQ ID NO: 37633 - DNA, 1197 bp, Actinobacillus pleuropneumoniae serovar 1 str. 4074
  CDS (1)..(1197): transl_table=11
atgctagaattactgttccttttgttacctatagctgcgctttacggctggtatatggggcaacgcagtgcaaagaaggatcaagaaactgttaataataagttttcccgtgattatgtgacggggcttaattttcttttatctaatcaacaggaaaaggcggtcgatcttttcctttccatgcttcagaaacaagaagccgaaaatcagattgcaacggaatcacaatttgaagcggaattaacgctcggtaatcttttccgctcgcgtggtgaagtggatcgcgccttacgtattcatcaagctttagatgccagcccggattattccatcgaacagaaattattagcgaaacaacaattagcgaaagattttatggcggcgggtttttatgatagagctgaaaattattatattatgttgctcgatgagccggagtttgcggtaaattcactaactcaattgatgacggtttatcagaaaaccaaggaatggaagaaagcgattaatgttgcggaaaagctcattaaaatagagccggatacggataaaatcccgctttctcattattattgcgaatatgctcaggcgataaaaaatgaagatttagacggacatttgagcgcattatccaaagccttggaatattctccgcaatgtgccagagcctcgatcttattaggcgattattatttagcacaaaatcaatttcaaagcgcattaaaaaattacgagcgtattttgcagcaagatccggattttattagtgaagtgatagagaaaataaaagcctgttatatggcagaaaacgatttggcgaattacgagttgtttttaattagagcaaatcagattaagcataatagtagcgtggatctcgctttagcggaatatattgagcaaaaagatggcgtggtagccgcacattccaagttatatcaacagttaagccaatatccgagtatgattacgttccatcgtttcattcattatcaaattaatgaagcggaggagggtagagcaaaagaaagtttgatgttgttatataatatggtcggttcaagaatgaaaaaaggctttcagtatcgatgtttaaactgcggttaccaaagttatcgattaagttggcattgtccgtcttgtcgccgatgggaacaaattaaacctatacacagcattgattcacaaattaattga

SEQ ID NO: 37634 - protein, 398 aa, Actinobacillus pleuropneumoniae serovar 1 str. 4074
MLELLFLLLPIAALYGWYMGQRSAKKDQETVNNKFSRDYVTGLNFLLSNQQEKAVDLFLSMLQKQEAENQIATESQFEAELTLGNLFRSRGEVDRALRIHQALDASPDYSIEQKLLAKQQLAKDFMAAGFYDRAENYYIMLLDEPEFAVNSLTQLMTVYQKTKEWKKAINVAEKLIKIEPDTDKIPLSHYYCEYAQAIKNEDLDGHLSALSKALEYSPQCARASILLGDYYLAQNQFQSALKNYERILQQDPDFISEVIEKIKACYMAENDLANYELFLIRANQIKHNSSVDLALAEYIEQKDGVVAAHSKLYQQLSQYPSMITFHRFIHYQINEAEEGRAKESLMLLYNMVGSRMKKGFQYRCLNCGYQSYRLSWHCPSCRRWEQIKPIHSIDSQIN

SEQ ID NO: 37635 - DNA, 1191 bp, Haemophilus influenzae R2866
  CDS (1)..(1191): transl_table=11
atgatagaattactctttctattattgcctattgctgctgcctatggctggtatatggggcggcgtagtgcgaagaaagatcaagatgacataagtaataaactctcccgagattatgttacgggagtgaattttttactttctaatcaaactgataaagctgtagatttgtttttagatatgttgcaaaagcaagaaatcgaaaatgaaatcgaaagccactcccaatttgaagccgagcttacacttggtaatctgtttcgttctcgaggcgaagttgatcgtgcattgcgtattcatcaagctttagatcttagtcctaattatacttttgaacaaaaattacttgcaaaacaacaacttgctcgagattttatggtggttggtttttttgaccgagctgagaatctttatattttactagtagatgaacctgagtttgcagaaaatgctttacagcaacttttagtgatttatcaaaagacaaaagaatggaaaaaagcagtcaatattgctgaaaaactcgctaaaataaagccacaagagaataatattgaacttgcgcaatgttattgtgaatattcacaaagtttagagcctgaaagtgcggttgaaaaacgcagtgttttacaaaaggctttgtcggtttctccgacttgtgttcgcgcttctttattgcttgcaaatttagcaatgcttgacggtcaatatcaacaagcagtaaaaatattagaaaatgttttggagcaaaatccagattatacgggtgaaattttgttacctttaaaacattgttacgaagaattaaatcagttagataattttgagttatttttaattcgtgcaggtcaaattattaataatgatgaagtagagctagctttggttaaattaattgaagaaaaagatggcaagtctgctgctcaagctaagctttatcagcaactcacgaaaaagccaagtactttaattttccatcgttttatgcagtatcaaattgatgatgcagaagacgggcgtggaaaagaaagtctaattttattacataaaatggttggcgaaaggattaagcaaacatcgccttatcgttgtacaaattgtggttatcaaatccataagctattgtggaattgcccatcttgccgtcaatgggaaagtattaaaccggtttcaaatcaagaacataattaa

SEQ ID NO: 37636 - protein, 396 aa, Haemophilus influenzae R2866
MIELLFLLLPIAAAYGWYMGRRSAKKDQDDISNKLSRDYVTGVNFLLSNQTDKAVDLFLDMLQKQEIENEIESHSQFEAELTLGNLFRSRGEVDRALRIHQALDLSPNYTFEQKLLAKQQLARDFMVVGFFDRAENLYILLVDEPEFAENALQQLLVIYQKTKEWKKAVNIAEKLAKIKPQENNIELAQCYCEYSQSLEPESAVEKRSVLQKALSVSPTCVRASLLLANLAMLDGQYQQAVKILENVLEQNPDYTGEILLPLKHCYEELNQLDNFELFLIRAGQIINNDEVELALVKLIEEKDGKSAAQAKLYQQLTKKPSTLIFHRFMQYQIDDAEDGRGKESLILLHKMVGERIKQTSPYRCTNCGYQIHKLLWNCPSCRQWESIKPVSNQEHN

SEQ ID NO: 37637 - DNA, 1173 bp, Burkholderia vietnamiensis G4
  CDS (1)..(1173): transl_table=11
atggatctggatttctggtggttgctcgcgattcccgtcgcgttcgcgctcggatgggcggcgtcacgctatgacctgaagaatctcctgtcggagagcgccaacctgccgcgctcgtattttcgcggcctgaattttctgttgaacgaacaaccggacaaggcgatcgatgcgttcatcgaggtcgccaagctcgaccccgagacggtcgagctgcacttcgcgctcggcaacctgtttcgccgccgcggcgagacggaccgcgcgatccgcgtccaccagaacctgctgagccgcacggacctgccggtgaacgagcgcgaccacgcgctgtacgagctcggccaggacttcctgaaggccggcctgctcgaccgggcggaggaggcgttccaccgcctcgccgacggcgactacgcgctcggtgcgcaacgggcgttgctgacgatctacgagatcgaaaaggactggaacaagtcgatcgacaccgcgcgacgcatcgagtcgatgagcgacaagccgcttggcaccgaaatcgcgcagttccactgcgaactcgcgcaggatgcgctgcagcgcaagaacaccgcggcggccgccgagcagttgaagctcgcgctggcggcgaacccgcagaacgtgcgcgcgacgatcctgtcgggcgacgcggccgaagcggccggcgatcccgccgccgcgatcggtcactggaagcgcgtcgaaacgcagaaccccgcctacctgccgctcgtcgccgacaaactgatgaaggcgtacatcgcgctcggcaagccggtcgacggcgcggagctgctgatgggctatgtcgatcgctatccgtcgaacgatctgctcgacatcgcgtatcagcacatcgcgggcatgcgcggccaggacgctgcgcacgcactcgcgcgcgcccagatggagaagtcgccgaacctgtcgggcatgctgcacctgctggatgcgcagatcgccgcggccgacgagccgcgccgtaaggagcttgaaatgatgcgcgcgctgatccggcagcgcaccaagaatctgccgcgctatacgtgccaaaattgcggtttccgggcacggctcttctactggcagtgccccggttgcagcggctgggaaacctatgcgccgcggcgcgtcgaacctgcgatgccgggctga

SEQ ID NO: 37638 - protein, 390 aa, Burkholderia vietnamiensis G4
MDLDFWWLLAIPVAFALGWAASRYDLKNLLSESANLPRSYFRGLNFLLNEQPDKAIDAFIEVAKLDPETVELHFALGNLFRRRGETDRAIRVHQNLLSRTDLPVNERDHALYELGQDFLKAGLLDRAEEAFHRLADGDYALGAQRALLTIYEIEKDWNKSIDTARRIESMSDKPLGTEIAQFHCELAQDALQRKNTAAAAEQLKLALAANPQNVRATILSGDAAEAAGDPAAAIGHWKRVETQNPAYLPLVADKLMKAYIALGKPVDGAELLMGYVDRYPSNDLLDIAYQHIAGMRGQDAAHALARAQMEKSPNLSGMLHLLDAQIAAADEPRRKELEMMRALIRQRTKNLPRYTCQNCGFRARLFYWQCPGCSGWETYAPRRVEPAMPG

SEQ ID NO: 37639 - DNA, 1137 bp, Pseudoalteromonas tunicata D2
  CDS (1)..(1137): transl_table=11
atgatagaactattatttctattattgcctattgcagctggttacggttggattatgggacgcaatagtgccaaatctcaagctcatattatcaaccgccaaattacctcccaatatagcaaaggtttaaagtttctcctcgatcgggaggaagatcaaggtttagagcacttaattaatttgctagaagtttctgctgactctgttgagcattatttgacattagcaactatgtttcgtcgcagaggtgagctggacagggcgattaaaatacatgagcttttacttaaacaaccttctttagatgcagctaccttagaaaatattgtaattgagcttgccgaagattatatcatggctgggctatttgatagcgcagagcaccacctattaaaattactatctcatggcaattgccgagcgattgaattgttatttggtatttaccaacaaaccagtgactggcaaaaaggtgtcagtctatatgagtcctatcctaagttatttattaaatcccaacaaaaaattgcagtcgctaatttctattgtgaacttgcacttgaaaaacaaaatacaaaaataattaaaaaaagtcttaatttagatcagctagttgtaagacctctatttgagctcggaaaaagtgctcataaccgtggcgattatgtcaaagcaatttcttattggcgcgatttactgatccaatctcctttttacgccccaatatttatttatgaacttgagcaatgttaccaacaattgaatttactttctgattttgaaaaattaattgttgcagaagtaaatcgtggcggtgtgatgattaaaattcgctactgtaaatttctaatcgagtctgagcagaccgaagaagcaattttatttttatcacaatctttgcaaaaacatccgaatattcgagggttcagctatttattggaattagtcgcttctaaaaattcagatattaatgacttaatttcaaagttgaatcaattagtgcaatcttatattgcaaccaaatctgaatttcaatgtaaacactgtggttttacaagccacactctttattggtcctgcccatcatgtaaacactgggaatctatagttccaagtcgtggtttagatggtttttga

SEQ ID NO: 37640 - protein, 378 aa, Pseudoalteromonas tunicata D2
MIELLFLLLPIAAGYGWIMGRNSAKSQAHIINRQITSQYSKGLKFLLDREEDQGLEHLINLLEVSADSVEHYLTLATMFRRRGELDRAIKIHELLLKQPSLDAATLENIVIELAEDYIMAGLFDSAEHHLLKLLSHGNCRAIELLFGIYQQTSDWQKGVSLYESYPKLFIKSQQKIAVANFYCELALEKQNTKIIKKSLNLDQLVVRPLFELGKSAHNRGDYVKAISYWRDLLIQSPFYAPIFIYELEQCYQQLNLLSDFEKLIVAEVNRGGVMIKIRYCKFLIESEQTEEAILFLSQSLQKHPNIRGFSYLLELVASKNSDINDLISKLNQLVQSYIATKSEFQCKHCGFTSHTLYWSCPSCKHWESIVPSRGLDGF

SEQ ID NO: 37641 - DNA, 1194 bp, Oceanospirillum sp. MED92
  CDS (1)..(1194): transl_table=11
atgccgtttaacgcaaacgaattcctccttctgattcctctggtcatagcaatagcaataggttggttgctaggccggagggaagtcaaaaagtctgtatacacccctgcccagactaacttaagtcatgagtacttcacgggccttgattaccttttaaatgaaaaaatggatgaagcgatcgaaagcttcattcgagcgttagaagtcaattcggataccattcctgcccacctggccctggcaaaactctttcgtcgaaagggtgatgtggacagagccattcagattcatcaaaatctgttggcgcgtccggacctgtcccgttctgattttatgcgtgtacagatggcgcttgcccgtgattattatgcagtgggcctgctcgaccgagcggaaaacctattgcaggaaatcatcaagtcaaactccactgccaagacgcaatctaaagcgctcagtttgctgatcaagctctatgaaaaagagggggagtgggaagaagcgttaaaagcggctgaaaagttagcggccgaagaaaagcgcgatatctcagttgagctttctcattactgctgtgagctggccgaagtggctttcgaacataagcagtttcaaaaagcgtcagaagtacttaaacgtgcagaacagttggactctgtgaatgtcagagtcagtcttctgaaagctcaggcttacatgtcgaccgaacagtggaaacaagccataaaatgtttgaaatccattgctaagcaagacagtttatttgtttcagaaactatcccgtacttaaaactgtgttaccagaaaatcggtgataaaaatgcatatgctagctatttaaaaagtagcttaaacagtgctccctcgactaccgtcatcgttgctctggcagagctgattaaagatgaaagaggtatctacgctgcgggtagttttattactgaagaattgaaacgtcggccgtcggtaaaaggatttaatagtctgatcgatcttcatatagaatatggctcggagagtgccagggacagccttcgtgtactaagaggtttgacggggcagcttgaactgtctaagccggtataccgatgtaacagttgtggattttccggacgtagcctctcctggcagtgcccgtcttgtaaaacctggggtacaaccaaaccgattcaaggccttgaaggtgaataa

SEQ ID NO: 37642 - protein, 397 aa, Oceanospirillum sp. MED92
MPFNANEFLLLIPLVIAIAIGWLLGRREVKKSVYTPAQTNLSHEYFTGLDYLLNEKMDEAIESFIRALEVNSDTIPAHLALAKLFRRKGDVDRAIQIHQNLLARPDLSRSDFMRVQMALARDYYAVGLLDRAENLLQEIIKSNSTAKTQSKALSLLIKLYEKEGEWEEALKAAEKLAAEEKRDISVELSHYCCELAEVAFEHKQFQKASEVLKRAEQLDSVNVRVSLLKAQAYMSTEQWKQAIKCLKSIAKQDSLFVSETIPYLKLCYQKIGDKNAYASYLKSSLNSAPSTTVIVALAELIKDERGIYAAGSFITEELKRRPSVKGFNSLIDLHIEYGSESARDSLRVLRGLTGQLELSKPVYRCNSCGFSGRSLSWQCPSCKTWGTTKPIQGLEGE

SEQ ID NO: 37643 - DNA, 1161 bp, Rickettsiella grylli
  CDS (1)..(1161): transl_table=11
atgctggaattgttgtttctattgcttcctcttgcagctgcttcaggttggtatgctgcttattgccaattttctaatttacacctccgtaaaaaacaggcatgtaatcgtgagtatttgcgtggtttaaactacttactcaacgagcagtctgataaagcggttgatacgtttattagaatacttgaagtggatacggaaacggttgaaacgcatttagcgttaggtgtgttatttcgccgccggggggaaattgaccgagctattcgacttcatcaaaatttgattgcaagacctcatctctcatccgcattaaaattacaagcattacttgccttaggaagagattattattgtgcgggtttactcgatagggctgaacgtttgttttttgaagtcattcagcaggatgataatgaatcagcacgtatagctgtacgttatttgttagaaatctatcaacaacaaaaacggtgggaaattgctatcaagcaagcaaaaaaaatttcgaaatgggatagcaaaatttttaaaaacattgctcattattattgtgaattagcattaaatctactgaatgcagaaaataatcacaaagaagctatccgattattggatctcgccttaaaatatgacaaacactgcgtacgcgctaatctcattaagggaaaattagcgattattaacgaaaaatgggaacaggctattgcactctaccaagccgtaaaaaaacaagatcctgattatattacagaaacgttagagcctttaaatcaatgctacttacaacatcagtcaggaataataggcctactcaattatttacgtgaaacactcaatgagcatgcgcaaacttccatttcattagcgattgtaaaattgattcaagaaaaagatagtaataaagcattgcaatttttaacgcaacaattgcaaactaaaccttcattaatcggtttatatcaattagttgatttacatttagcacaagaaaataatccattaaccaatagaaatcatttaaccagtttgaaagatctgattaaaaaattaatggaaaataagccagtttatcgttgtttaaactgcggttttaatagcaaaatgcttgattggttatgccctgcctgtcgtaattggagcagcattaaacccttataa

SEQ ID NO: 37644 - protein, 386 aa, Rickettsiella grylli
MLELLFLLLPLAAASGWYAAYCQFSNLHLRKKQACNREYLRGLNYLLNEQSDKAVDTFIRILEVDTETVETHLALGVLFRRRGEIDRAIRLHQNLIARPHLSSALKLQALLALGRDYYCAGLLDRAERLFFEVIQQDDNESARIAVRYLLEIYQQQKRWEIAIKQAKKISKWDSKIFKNIAHYYCELALNLLNAENNHKEAIRLLDLALKYDKHCVRANLIKGKLAIINEKWEQAIALYQAVKKQDPDYITETLEPLNQCYLQHQSGIIGLLNYLRETLNEHAQTSISLAIVKLIQEKDSNKALQFLTQQLQTKPSLIGLYQLVDLHLAQENNPLTNRNHLTSLKDLIKKLMENKPVYRCLNCGFNSKMLDWLCPACRNWSSIKPL

SEQ ID NO: 37645 - DNA, 1137 bp, Alteromonadales bacterium TW-7
  CDS (1)..(1137): transl_table=11
atgattgagcttttgtttttactactacctgttgcagccggctacggttggattatgggtaaaaacagtgctaaaaatcatgctcaccaactcaatcgtcaaataacttctgaatacagtaaagggcttaagtttttattagaccgcgaagaagatcaaggtttagaacacttaataaatttactagaggttgcagccgattcagtcgaacattactctacacttgccactatgtttcgtcgcagaggcgaattagaccgcgcaatcaaaatccatgaacttcttttaaaacacccaagtttgagtgagcagcaagctgctactagtcgcctagaattagccgaagattatataatggctggattgctagatggtgcagaagagcatttggtttggttggtcaaggccggccatgtagaagctctcgatcctattattaccttatattcgcaaactcgtgagtgggataaaggcattaatatgtttgaatctcacagcgaattattctctaaagagcaacaatttaaggctatcgcgaatttttattgtgagtctgcccttagtgacaatactcctcaaattatgcgaaaagcaattagtctaaactacaaagccgttaggcctttgtacgagttaggtgttatcgctttttctaaagaagattatgttaaagcgatctactattggcgtgaacttatttgccagtttactttgtttgcccccttattcattgatgatctggcgcatagctataagcaactaaatttaacgcatcaatttcatgagttagtaaacgatttactagataagggtggtgttcttataaaaataaaacattgccaagctcttttagagcaaggtcatacaaaacaagctttcgattttttaactgacagtttaaaaagacaaccaacgatcagggggtttagttttttactgcagctaatgggtgaccaaaataaaaatacaaaagaagtacttaatgaaattgatagtcttgtaacgtcatatattgctactaagcctgattttcaatgccagcattgtggcttcacaagttatacaatttattggaattgcccttcttgtaaacattgggaaaccattgtcccaagtagaggtttagacggattttaa

SEQ ID NO: 37646 - protein, 378 aa, Alteromonadales bacterium TW-7
MIELLFLLLPVAAGYGWIMGKNSAKNHAHQLNRQITSEYSKGLKFLLDREEDQGLEHLINLLEVAADSVEHYSTLATMFRRRGELDRAIKIHELLLKHPSLSEQQAATSRLELAEDYIMAGLLDGAEEHLVWLVKAGHVEALDPIITLYSQTREWDKGINMFESHSELFSKEQQFKAIANFYCESALSDNTPQIMRKAISLNYKAVRPLYELGVIAFSKEDYVKAIYYWRELICQFTLFAPLFIDDLAHSYKQLNLTHQFHELVNDLLDKGGVLIKIKHCQALLEQGHTKQAFDFLTDSLKRQPTIRGFSFLLQLMGDQNKNTKEVLNEIDSLVTSYIATKPDFQCQHCGFTSYTIYWNCPSCKHWETIVPSRGLDGF

SEQ ID NO: 37647 - DNA, 1200 bp, marine gamma proteobacterium HTCC2143
  CDS (1)..(1200): transl_table=11
gtgatagctgatagttggcaatttattttagtgtttattgccatagccatcggttggctcttgggtcgtggcagtcgcgttagtgatgtcggtgataatgcaccgctgcacagggaatactacaaaggcctaaattacctgctgaatgaccaacccgataatgctctcgatagttttatcacctccctcgaagttaatagcgagaccctcgaaacccatattgccgttggtaacttaatgcgccggaaaggcgaggtggatcgggctatccgcattcaccaaaacttgctgtcccgtcccagtttaccgcgagtacatttgcacaaagcgcatctggagttggcgagggattttattagtgccggtttactagatcgagcagagcgcttattaaaggatttaatcgaagaggctccggagctgcgagaaatttcattgcggcttttactggaaatttatcaagacgaaaaagaatgggtcgaagcaatcggcgttgctcgtcagttattaccgcggcgttctttattgaaggcagcgagccctgcggataagtctgttgtcctcgccttgtcacattattgttgtgagctggctaaacgggcgctggataaagatgaataccaagttgctcgtactcatgtaaaaaaagcgctttcttatgaccgtaactgtgttcgcgcatcattactgtctgctgatatcgaatttcaggttggtcattataactgggcgataaaaagtttgcggaaagtcagatatcaagatccagcttttatccctgaaaccatggaattattgaacgccagttatgagcagcttgaccagattgacgagtattatcgttatttgatcgaaacactcgattactcacaatcggttagtagcttgttatcggttgtcgaaaatatcagtaggacccaaggcgacactgcagcaggtgaatttctcggccaacagttaacgcgcagtccatcattgcggggattggccaagttggtggaactgtatattgccaatagcgacggcggttcaaaagataacctaaacgtattacagctgttaatagagcagttgatgcgaagtaagccccagtaccaatgtcaccactgtggtttttcgggtaagcgcttgcactggctttgtcccagttgcaaacaatggggacaaataaaggcgattcgaggtgccgagggtgagtga

SEQ ID NO: 37648 - protein, 399 aa, marine gamma proteobacterium HTCC2143
MIADSWQFILVFIAIAIGWLLGRGSRVSDVGDNAPLHREYYKGLNYLLNDQPDNALDSFITSLEVNSETLETHIAVGNLMRRKGEVDRAIRIHQNLLSRPSLPRVHLHKAHLELARDFISAGLLDRAERLLKDLIEEAPELREISLRLLLEIYQDEKEWVEAIGVARQLLPRRSLLKAASPADKSVVLALSHYCCELAKRALDKDEYQVARTHVKKALSYDRNCVRASLLSADIEFQVGHYNWAIKSLRKVRYQDPAFIPETMELLNASYEQLDQIDEYYRYLIETLDYSQSVSSLLSVVENISRTQGDTAAGEFLGQQLTRSPSLRGLAKLVELYIANSDGGSKDNLNVLQLLIEQLMRSKPQYQCHHCGFSGKRLHWLCPSCKQWGQIKAIRGAEGE

SEQ ID NO: 37649 - DNA, 1212 bp, marine gamma proteobacterium HTCC2080
  CDS (1)..(1212): transl_table=11
gtgattgatcttctcttactactcaccctaactgcggctatcgccgccggctggtggctggggcgacggggtaatcgacccttaatttggggcagttcagcgcaacctccttctgaatattatcgtggtttaaattttcttcttgatggtagtcaagataatgctatcgatgcgtttacccaggcattggaagttaatgccgagacgtttgatacacatattgcattgggcaatgtgctgcgtcgtcgtggtgaggtggagcgcgccataagagttcatcaaaatttactggcacggccgagtttgcctcagacgcaattgcacctagcgcaccttgagcttgccagggactatatttccgcgggcctgcttgatcgagctgaaaaattattgattgatcttgtggccgagtcaggcaaccaccggagagtagcgcgtcgccatctgctggaaatttatgaggctcagagggattggtcagctgcctgcgatgttgctgaagaattacttcctaagcgaagcttgattaaatcagccgataacgctgctgacgaagttggtcagccggttggtgtactgttagcgcattactattgcgagcaggcggagttggccagggtccgtggagactatggagagggccgagagctgctggctaaagcgctgcgctacgacaaggtttgtgtccgcgccacgctatccttgggtgctcttgagttatccgcgggacaaccggagcagagtattaaaattctcaagacggtttttgatcaaggaccagagtacttggcagaggtcacgccgctcatgagagaggcgatggattcattggggataagaaaaaatttacgttcctaccttgaggggtgttttgagcgaacgccaacaacgccgcttgcgctcgctattgctcacgagttacacggcacgattggcaatgacgcggcaaaaaagtttttacgcctaagtctgaaagacaaaccctcgctacgcggtgtggcgttgcttatgagtcttcacgattcgacagaggcgggggatgatgagtctctagagcttgaaactattgaaaagatcattgatcaacggttttcttatcgctgtactcactgcggatttcgtaaccagcagctgcactggtattgtccaggctgtaagcattggggcactattcgggatttagggacgacaggtgaggcattaaatggttga

SEQ ID NO: 37650 - protein, 403 aa, marine gamma proteobacterium HTCC2080
MIDLLLLLTLTAAIAAGWWLGRRGNRPLIWGSSAQPPSEYYRGLNFLLDGSQDNAIDAFTQALEVNAETFDTHIALGNVLRRRGEVERAIRVHQNLLARPSLPQTQLHLAHLELARDYISAGLLDRAEKLLIDLVAESGNHRRVARRHLLEIYEAQRDWSAACDVAEELLPKRSLIKSADNAADEVGQPVGVLLAHYYCEQAELARVRGDYGEGRELLAKALRYDKVCVRATLSLGALELSAGQPEQSIKILKTVFDQGPEYLAEVTPLMREAMDSLGIRKNLRSYLEGCFERTPTTPLALAIAHELHGTIGNDAAKKFLRLSLKDKPSLRGVALLMSLHDSTEAGDDESLELETIEKIIDQRFSYRCTHCGFRNQQLHWYCPGCKHWGTIRDLGTTGEALNG

SEQ ID NO: 37651 - DNA, 24 bp, Artificial sequence
  primer
atgctggagttgttgtttctgctt

SEQ ID NO: 37652 - DNA, 22 bp, Artificial sequence
  primer
ttacaggccatcaagaccgcga

SEQ ID NO: 37653 - protein, 453 aa, Artificial sequence
  consensus sequence
  Variant (2)..(2): Xaa in position 2 is any amino acid
  Variant (5)..(5): Xaa in position 5 is any amino acid
  Variant (7)..(9): Xaa in position 7 to 9 is any amino acid
  Variant (12)..(31): Xaa in position 12 to 31 is any amino acid
  Variant (32)..(33): Xaa in position 32 to 33 is any or no amino acid
  Variant (35)..(36): Xaa in position 35 to 36 is any amino acid
  Variant (38)..(38): Xaa in position 38 is any amino acid
  Variant (40)..(40): Xaa in position 40 is any amino acid
  Variant (43)..(46): Xaa in position 43 to 46 is any amino acid
  Variant (48)..(48): Xaa in position 48 is any amino acid
  Variant (50)..(52): Xaa in position 50 to 52 is any amino acid
  Variant (54)..(69): Xaa in position 54 to 69 is any amino acid
  Variant (70)..(77): Xaa in position 70 to 77 is any or no amino acid
  Variant (80)..(80): Xaa in position 80 is any amino acid
  Variant (84)..(84): Xaa in position 84 is any amino acid
  Variant (88)..(89): Xaa in position 88 to 89 is any amino acid
  Variant (94)..(94): Xaa in position 94 is any amino acid
  Variant (97)..(97): Xaa in position 97 is any amino acid
  Variant (99)..(103): Xaa in position 99 to 103 is any amino acid
  Variant (104)..(109): Xaa in position 104 to 109 is any or no amino acid
  Variant (111)..(117): Xaa in position 111 to 117 is any amino acid
  Variant (119)..(121): Xaa in position 119 to 121 is any amino acid
  Variant (123)..(124): Xaa in position 123 to 124 is any amino acid
  Variant (126)..(129): Xaa in position 126 to 129 is any amino acid
  Variant (131)..(132): Xaa in position 131 to 132 is any amino acid
  Variant (137)..(141): Xaa in position 137 to 141 is any amino acid
  Variant (143)..(153): Xaa in position 143 to 153 is any amino acid
  Variant (154)..(159): Xaa in position 154 to 159 is any or no amino acid
  Variant (161)..(163): Xaa in position 161 to 163 is any amino acid
  Variant (165)..(169): Xaa in position 165 to 169 is any amino acid
  Variant (171)..(172): Xaa in position 171 to 172 is any amino acid
  Variant (175)..(176): Xaa in position 175 to 176 is any amino acid
  Variant (178)..(189): Xaa in position 178 to 189 is any amino acid
  Variant (190)..(205): Xaa in position 190 to 205 is any or no amino acid
  Variant (207)..(209): Xaa in position 207 to 209 is any amino acid
  Variant (212)..(212): Xaa in position 212 is any amino acid
  Variant (214)..(224): Xaa in position 214 to 224 is any amino acid
  Variant (225)..(245): Xaa in position 225 to 245 is any or no amino acid
  Variant (247)..(254): Xaa in position 247 to 254 is any amino acid
  Variant (256)..(282): Xaa in position 256 to 282 is any amino acid
  Variant (284)..(298): Xaa in position 284 to 298 is any amino acid
  Variant (300)..(311): Xaa in position 300 to 311 is any amino acid
  Variant (312)..(312): Xaa in position 312 is any or no amino acid
  Variant (314)..(336): Xaa in position 314 to 336 is any amino acid
  Variant (337)..(338): Xaa in position 337 to 338 is any or no amino acid
  Variant (340)..(342): Xaa in position 340 to 342 is any amino acid
  Variant (344)..(350): Xaa in position 344 to 350 is any amino acid
  Variant (352)..(354): Xaa in position 352 to 354 is any amino acid
  Variant (356)..(392): Xaa in position 356 to 392 is any amino acid
  Variant (393)..(425): Xaa in position 393 to 425 is any or no amino acid
  Variant (427)..(427): Xaa in position 427 is any amino acid
  Variant (429)..(430): Xaa in position 429 to 430 is any amino acid
  Variant (434)..(439): Xaa in position 434 to 439 is any amino acid
  Variant (441)..(441): Xaa in position 441 is any amino acid
  Variant (444)..(444): Xaa in position 444 is any amino acid
  Variant (446)..(447): Xaa in position 446 to 447 is any amino acid
  Variant (449)..(452): Xaa in position 449 to 452 is any amino acid
LXLPXAXXXGWXXXXXXXXXXXXXXXXXXXXXXYXXGXNXLLXXXXDXAXXXFXXXXXXXXXXXXXXXXXXXXXXXXLGXLFRXRGEXXRAIRXHQXLXXXXXXXXXXXLXXXXXXXAXXXLXXDXXXXGXXDRAEXXXXXLXXXXXXXXXXXXXXXXXLXXXYXXXXXWXXAIXXAXXXXXXXXXXXXXXXXXXXXXXXXXXXXAXXXCEXAXXXXXXXXXXXXXXXXXXXXXXXXXXXXXXXXAXXXXXXXXRXXXXXXXXXXXXXXXXXXXXXXXXXXXQXXXXXXXXXXXXXXXYXXXXXXXXXXXXXLXXXXXXXXXXXXXXXXXXXXXXXXXGXXXAXXXXXXXLXXXPXXXXXXXXXXXXXXXXXXXXXXXXXXXXXXXXXXXXXXXXXXXXXXXXXXXXXXXXXXXXXXXXXXXXXXYXCXXCGFXXXXXXWXCPXCXXWXXXXP

SEQ ID NO: 37654 - protein, 24 aa, Artificial sequence
  protein pattern
  Variant (2)..(2): Xaa in position 2 is any amino acid
  Variant (4)..(5): Xaa in position 4 to 5 is any amino acid
  Variant (8)..(8): Xaa in position 8 is Phe or Tyr
  Variant (9)..(9): Xaa in position 9 is any amino acid
  Variant (10)..(10): Xaa in position 10 is Ala, Gly, Ser or Thr
  Variant (11)..(14): Xaa in position 11 to 14 is any amino acid
  Variant (16)..(16): Xaa in position 16 is any amino acid
  Variant (19)..(19): Xaa in position 19 is Ala, Gly or Ser
  Variant (21)..(22): Xaa in position 21 to 22 is any amino acid
  Variant (24)..(24): Xaa in position 24 is Ala, Asp, Glu, Gly or Ser
YXCXXCGXXXXXXXWXCPXCXXWX

SEQ ID NO: 37655 - protein, 25 aa, Artificial sequence
  protein pattern
  Variant (2)..(2): Xaa in position 2 is any or no amino acid
  Variant (4)..(5): Xaa in position 4 to 5 is any or no amino acid
  Variant (7)..(7): Xaa in position 7 is any amino acid
  Variant (8)..(8): Xaa in position 8 is Leu or Val
  Variant (9)..(9): Xaa in position 9 is any amino acid
  Variant (11)..(11): Xaa in position 11 is Arg or Ser
  Variant (12)..(12): Xaa in position 12 is Lys or Arg
  Variant (15)..(15): Xaa in position 15 is any amino acid
  Variant (16)..(16): Xaa in position 16 is Asp or Glu
  Variant (19)..(19): Xaa in position 19 is Ile or Leu
  Variant (21)..(21): Xaa in position 21 is Ile, Leu, Met or Val
  Variant (23)..(23): Xaa in position 23 is Glu or Gln
  Variant (24)..(24): Xaa in position 24 is any amino acid
AXLXXGXXXRXXGEXXRAXRXHXXL

SEQ ID NO: 37656 - protein, 27 aa, Artificial sequence
  protein pattern
  Variant (2)..(3): Xaa in position 2 to 3 is any or no amino acid
  Variant (5)..(6): Xaa in position 5 to 6 is any amino acid
  Variant (8)..(8): Xaa in position 8 is Leu or Val
  Variant (9)..(9): Xaa in position 9 is Asp or Asn
  Variant (10)..(10): Xaa in position 10 is any amino acid
  Variant (13)..(13): Xaa in position 13 is Asp, Asn or Ser
  Variant (14)..(14): Xaa in position 14 is Asp, Glu, Gly or Asn
  Variant (15)..(16): Xaa in position 15 to 16 is any amino acid
  Variant (17)..(17): Xaa in position 17 is Asp or Glu
  Variant (18)..(18): Xaa in position 18 is any amino acid
  Variant (20)..(20): Xaa in position 20 is Ile or Val
  Variant (21)..(21): Xaa in position 21 is Asp or Glu
  Variant (22)..(22): Xaa in position 22 is any amino acid
  Variant (23)..(23): Xaa in position 23 is Phe or Leu
  Variant (24)..(26): Xaa in position 24 to 26 is any amino acid
  Variant (27)..(27): Xaa in position 27 is Ala, Leu or Val
SXXYXXGXXXLLXXXXXXAXXXXXXXX

SEQ ID NO: 37657 - protein, 25 aa, Artificial sequence
  protein pattern
  Variant (2)..(4): Xaa in position 2 to 4 is any amino acid
  Variant (6)..(6): Xaa in position 6 is Ala or Gly
  Variant (7)..(7): Xaa in position 7 is any amino acid
  Variant (9)..(9): Xaa in position 9 is Phe or Tyr
  Variant (10)..(10): Xaa in position 10 is Ile, Leu, Met or Val
  Variant (11)..(11): Xaa in position 11 is any amino acid
  Variant (12)..(12): Xaa in position 12 is Ala, Ser or Val
  Variant (14)..(14): Xaa in position 14 is Phe, Leu, Met or Val
  Variant (15)..(15): Xaa in position 15 is any amino acid
  Variant (20)..(24): Xaa in position 20 to 24 is any amino acid
AXXXLXXDXXXXGXXDRAEXXXXXL

SEQ ID NO: 37658 - DNA, 1497 bp, Escherichia coli
  CDS (1)..(1497): transl_table=11
atgcatacagattcgaatggtggtcattatattttacgctttgataacgagcggaaaacaaaccaaaggcgaagaatcatggaaaccaatatcgttgaagtagagaactttgttcagcagtcagaagagaggcggggtagcgcctttacgcaggaagtgaaacgctacctggagcgctacccgaatacgcaatatgttgatgttttacttaccgatttaaatggttgcttccgtggaaagcgtattcctgtttcaagcctgaagaagctcgagaaagggtgttatttcccggcctcggtatttgcaatggatattctgggcaacgtagtagaagaagcaggtctgggtcaggaaatgggcgagccggatcgtacctgtgttcctgttctcggttccttaactccttctgccgccgatccagagtttatcggtcagatgctcctgaccatggtcgatgaagatggcgctccctttgacgttgagccgcggaacgttcttaaccgcctgtggcagcagctgcgccagcgcggattgttcccggtcgtagcggtagagctggagttctatttactggatcgccagcgcgacgctgaagggtatctgcaaccgccctgcgcgcctggcaccgatgaccgcaatacacaaagccaggtttactccgttgataacctcaaccacttcgccgacgtgctcaatgatattgatgaactggcgcagttacagctgattccggcagatggcgcggtcgctgaggcctcgccgggtcagtttgaaatcaacctttaccatactgataacgtgctggaagcctgcgatgatgcgctggcactaaaacgcctggtgcgtctgatggcagaaaagcataagatgcacgccacttttatggcgaagccgtatgaagagcacgcgggcagcggaatgcatatccatatcagtatgcaaaataatcgtggcgagaacgtgctttctgacgcggaaggcgaagattcgccgctgctgaaaaagatgctcgccgggatgattgacctgatgccgtcgtcgatggcgttgctggcaccaaacgtgaactcgtatcgccgcttccagccgggaatgtatgtgccgacgcaggcgtcgtggggccataacaaccgcaccgtcgccctgcgtattccgtgcggcgaccgtcataatcaccgcgtggaatatcgcgtggcgggtgccgatgccaacccatatctggtgatggcagcgatttttgccggtattttgcatggccttgataacgagctgccgttgcaggaagaagtcgaaggcaacgggctggaacaggaaggcttaccctttccgattcgccagagcgatgccctgggtgagtttatcgagaatgatcacctgcgccgctatttaggcgaacgcttctgccatgtctatcacgcctgtaaaaatgatgagctgttgcagtttgagcgcctcatcacagaaacagaaattgagtggatgttgaaaaacgcgtaa

SEQ ID NO: 37659 - protein, 498 aa, Escherichia coli
MHTDSNGGHYILRFDNERKTNQRRRIMETNIVEVENFVQQSEERRGSAFTQEVKRYLERYPNTQYVDVLLTDLNGCFRGKRIPVSSLKKLEKGCYFPASVFAMDILGNVVEEAGLGQEMGEPDRTCVPVLGSLTPSAADPEFIGQMLLTMVDEDGAPFDVEPRNVLNRLWQQLRQRGLFPVVAVELEFYLLDRQRDAEGYLQPPCAPGTDDRNTQSQVYSVDNLNHFADVLNDIDELAQLQLIPADGAVAEASPGQFEINLYHTDNVLEACDDALALKRLVRLMAEKHKMHATFMAKPYEEHAGSGMHIHISMQNNRGENVLSDAEGEDSPLLKKMLAGMIDLMPSSMALLAPNVNSYRRFQPGMYVPTQASWGHNNRTVALRIPCGDRHNHRVEYRVAGADANPYLVMAAIFAGILHGLDNELPLQEEVEGNGLEQEGLPFPIRQSDALGEFIENDHLRRYLGERFCHVYHACKNDELLQFERLITETEIEWMLKNA

SEQ ID NO: 37660 - DNA, 1401 bp, Mesorhizobium loti MAFF303099
  CDS (1)..(1401): transl_table=11
atggacaatgccatcgtgacctccccttcggggtcctcgcccgccgaggcgcaagcctttctcgacgcccatcccgagatcgaagccttcgatatcgtgctgaccgacgccaatggcgtgggccgcggcaagatcgtacgccggcatgagctgaagagcattttcgagggtggccggcatatgccgatctcgatcctcggcctcgacattaccggcgaggacgtgcacgagaccggactgatctggacgacaggcgacggcgacctccgggcatggccaatccccggcacgctggtgccgctctacggcaccaatccaccgcgtggccaggtgctgatggcgatgtatcatctcgacggccagcccatgtcgtcggacccgcgcctcgcgctcgcccggcaggtcgacatcctcgcggccaaggggctttacccggcgggcgccttcgaactggaattcttcctgctggccaacgagcgcgacgccgacggcaaggtgcagccggcgcgcgcggtgctcgatggccgcgtttcgggcaagacggaggtctattcagtcgaccatctgcacggcatggagccgctgttctccgacatttacgccgccgccaaggcgcaaggcattccggccgagacggtgatatcggaatatgcgcccggccagtacgagctgacgctgaactaccgcaaggatgtgatgcgggccgccgacgacctcgtcatgctgaagcggctggtgcgggcgcaggcgcgccgccatggcgtcaccgcctgcttcatggccaagccgatcgagaaatatgccggctcgggcatgcatttccacgtctcgctgcaggacaaagccggccgcaacgtctttgccgaagccggcggcgagagctggtcgctacccttgctgcaggggctcggcgggctgatccagacgatggcggaatcaatgctggtgtttgcgccgcacgccaattcctggcggcgattcgtctcgcaatcctatgcgccggtggcgccaacctggggcgtcaacaatcgctcggtggcgctgcgcgtgccggcgggcgacgccaagaaccggcgcatcgagcaccggccgtcgggcgtcgacgccaatccctacctgatcgccgcgacggtgctggccggcatcgtcaaaggcctcgacgaagggctcgatcctggtccagaaacgaccggcaatggctatgaggcggccgtcacccgcacgacgatgccggcggactggcgcgcggcgatcgaagcggccaaggcctccagcttcctcaaaggcgcgctgggcgaggatttgcaccgcaccttcgtggcgatcaaacagtccgaatatctgcgtgtggcgcgcaccgtcagcgaactggattatcatctctatttgcacgaggtgtga

SEQ ID NO: 37661 - protein, 466 aa, Mesorhizobium loti MAFF303099
MDNAIVTSPSGSSPAEAQAFLDAHPEIEAFDIVLTDANGVGRGKIVRRHELKSIFEGGRHMPISILGLDITGEDVHETGLIWTTGDGDLRAWPIPGTLVPLYGTNPPRGQVLMAMYHLDGQPMSSDPRLALARQVDILAAKGLYPAGAFELEFFLLANERDADGKVQPARAVLDGRVSGKTEVYSVDHLHGMEPLFSDIYAAAKAQGIPAETVISEYAPGQYELTLNYRKDVMRAADDLVMLKRLVRAQARRHGVTACFMAKPIEKYAGSGMHFHVSLQDKAGRNVFAEAGGESWSLPLLQGLGGLIQTMAESMLVFAPHANSWRRFVSQSYAPVAPTWGVNNRSVALRVPAGDAKNRRIEHRPSGVDANPYLIAATVLAGIVKGLDEGLDPGPETTGNGYEAAVTRTTMPADWRAAIEAAKASSFLKGALGEDLHRTFVAIKQSEYLRVARTVSELDYHLYLHEV

SEQ ID NO: 37662 - DNA, 1377 bp, Pseudomonas aeruginosa PAO1
  CDS (1)..(1377): transl_table=11
atgtcggtacccctgcgtgccgttcagctcactgagccgagcctgttccttcaggaacatcccgaggtccagttcgtcgaccttctgatttcagacatgaatggcgtggttcgcggcaagcgaatcgaacgcaacagtctgcccaaagtcttcgaaaaaggtatcaaccttcccgcttccctgttcgccctcgatatcaccggctccaccgtagagagtaccggcctgggtctcgacatcggcgacgccgaccggatctgctacccgatccccggcaccctctccatggaaccctggcagaagcgcccgaccgcgcaactgctgatgaccatgcacgaactggaaggcgagccgttcttcgccgacccccgcgaagtcctgcgccaggtggtggccaggttcaccgagatggaactgaccatcgtcgccgccttcgagctggagttctacctgatcgaccaggagaacgtgaacggccggccgcagccgccgcgctcgccgatctccggcaagcgtccgcagtcggtgcaggtgtactccatcgacgacctcgacgaatacgtcgagtgcctccaggacatcatcgacggcgcccgcgcccagggcatcccggccgacgccatcgtcgccgaatccgcaccggcgcagttcgaggtcaacctgcatcacgtcgccgacccgatgaaggcctgcgactatgcggtgctgctcaagcgcctgatcaagaacatcgcctacgaccatgagatggacaccaccttcatggccaagccctatccgggccaggccgggaacggactgcacgtgcatatctcgctgctcgacaagcacggcaacaacatcttcaccagcgaggatcccgagcagaacgccgcattgcgccatgcgatcggcggcgtgctcgagaccctgccggcctccatggccttcctctgcccgaacgtcaactcctaccgccgcttcggttcgcagttctacgtgccgaacgcgccgagctggggcctggacaaccgcaccgtggccctgcgcgtgcccaccggcagcccggacgcggtacgcctggaacatcgcgtcgccggcgccgacgccaacccctacctgctgctggcctcggtgcttgccggggtgcaccacgggctgaccaacaaggtcgagccgggcgcgccgatcgaaggcaactcctacgagcagttggagccgagcctgccgaacaacctgcgcgacgccctgcgcgaactggacgacagcgagatcctggcgaagtacatcgatccgaagtacatcgacatcttcgtcgcctgcaaggaaagcgagctggaggagttcgagtactcgatctccgacctcgagtacaactggtacctgcacaccgtgtga

SEQ ID NO: 37663 - protein, 458 aa, Pseudomonas aeruginosa PAO1
MSVPLRAVQLTEPSLFLQEHPEVQFVDLLISDMNGVVRGKRIERNSLPKVFEKGINLPASLFALDITGSTVESTGLGLDIGDADRICYPIPGTLSMEPWQKRPTAQLLMTMHELEGEPFFADPREVLRQVVARFTEMELTIVAAFELEFYLIDQENVNGRPQPPRSPISGKRPQSVQVYSIDDLDEYVECLQDIIDGARAQGIPADAIVAESAPAQFEVNLHHVADPMKACDYAVLLKRLIKNIAYDHEMDTTFMAKPYPGQAGNGLHVHISLLDKHGNNIFTSEDPEQNAALRHAIGGVLETLPASMAFLCPNVNSYRRFGSQFYVPNAPSWGLDNRTVALRVPTGSPDAVRLEHRVAGADANPYLLLASVLAGVHHGLTNKVEPGAPIEGNSYEQLEPSLPNNLRDALRELDDSEILAKYIDPKYIDIFVACKESELEEFEYSISDLEYNWYLHTV

SEQ ID NO: 37664 - DNA, 1497 bp, Escherichia coli O157:H7 EDL933; identical to SEQ ID NO: 32045
  CDS (1)..(1497): transl_table=11

SEQ ID NO: 37665 - protein, 498 aa, Escherichia coli O157:H7 EDL933; identical to SEQ ID NO: 32046

SEQ ID NO: 37666 - DNA, 1359 bp, Agrobacterium tumefaciens str. C58; identical to SEQ ID NO: 32051
  CDS (1)..(1359): transl_table=11

SEQ ID NO: 37667 - protein, 452 aa, Agrobacterium tumefaciens str. C58; identical to SEQ ID NO: 32052

SEQ ID NO: 37668 - DNA, 1440 bp, Agrobacterium tumefaciens str. C58; identical to SEQ ID NO: 32053
  CDS (1)..(1440): transl_table=11

SEQ ID NO: 37669 - protein, 479 aa, Agrobacterium tumefaciens str. C58; identical to SEQ ID NO: 32054

SEQ ID NO: 37670 - DNA, 1368 bp, Sinorhizobium meliloti 1021
  CDS (1)..(1368): transl_table=11
atgtcaatcgatgcggacgaccccgaagtgttccagtcctggcttgagcagaacggcccgatagaaagtatccaggcggtgatctgcgacctgaacggcatcatgcgcggcaagcgggtgccggtggaacaggccaggaaggtgctcggcggcggcatccgcatgccgctctcgatcgtcggcgtcgacgtctggggtgaggacatcatcggcagcgcgcaggtctttgcgaccggcgatcgcgacggcatctgcggcgtcacgggacgaggggccctgccggtcaactggacgtcgcggccgagcgcgctggttccgctctggctgttcgtcgagaacggcagaccgtttcttgccgatccgcgccaggcgctagcggcgatcatgcgcgaatatcgcgaactggggctgcgcccggtggtggcgacggagctggaattctatctcatcgatcccgagccggacagcgccgtcccgccgatctcgccctataccggcaagcggctcgattccgacgcgatcctttcgatcgacgagctcgacgatttcggcgaattcttctccgacgtctacagggagtgcgcgcggcagaacgtgccggccgatgcggcgatcgccgaaaacggcatcggccagttcgagatcaatctgctgcacagcgacgatccgctgaaggcggcggacgacgcgatcttcttcaagcgcatcgtcaagggggtcgcccgcaagcacgggctcgcggcgacattcatggccaaaccctacggcacccgttccggcaacggcatgcacgtccatttcagcctgctcgacgaggaaggcaacaacgtcttcgacgacggcagcgacgagggatcggccgtgctcaagcatgcggtggccggcctcctgcgcggcatggccgagacgacgctgatgttcgccccgcacttcaattcctaccggcggctgcggcccgacacgcatgcgccgacctcgatttcctggggttacgagaaccgcacctcggcaatccgcatcccgggcggcaatccggcggcgcggcggatcgagcaccgcgttgcgggcgccgacgccaatccctatctcgtcatcgccgcgatcctcggcgccgcgctcgtcggcatccgcaacaagtggaagccgccggtgcctgtcgagggacgagcctatgcggcggagaaactgcccaaaatacctgccgattgggggcaggcggtcgacgccttcgaggccggaccgatcgccgccgagatcttcgatcccgtgcttcgctccatgctgatcgcctgcaagcgccaggagatagccggcttcgccgagcaggtcacggattacgaattcagcgcctacctggaaatcgtatga

SEQ ID NO: 37671 - protein, 455 aa, Sinorhizobium meliloti 1021
MSIDADDPEVFQSWLEQNGPIESIQAVICDLNGIMRGKRVPVEQARKVLGGGIRMPLSIVGVDVWGEDIIGSAQVFATGDRDGICGVTGRGALPVNWTSRPSALVPLWLFVENGRPFLADPRQALAAIMREYRELGLRPVVATELEFYLIDPEPDSAVPPISPYTGKRLDSDAILSIDELDDFGEFFSDVYRECARQNVPADAAIAENGIGQFEINLLHSDDPLKAADDAIFFKRIVKGVARKHGLAATFMAKPYGTRSGNGMHVHFSLLDEEGNNVFDDGSDEGSAVLKHAVAGLLRGMAETTLMFAPHFNSYRRLRPDTHAPTSISWGYENRTSAIRIPGGNPAARRIEHRVAGADANPYLVIAAILGAALVGIRNKWKPPVPVEGRAYAAEKLPKIPADWGQAVDAFEAGPIAAEIFDPVLRSMLIACKRQEIAGFAEQVTDYEFSAYLEIV

SEQ ID NO: 37672 - DNA, 1383 bp, Caulobacter crescentus CB15
  CDS (1)..(1383): transl_table=11
atgatgagcgctgtagccgacatccaggagtgccgcgacttcctcgccgcccatccgcaggtcaagttcgtcgaggtgttcttcaccagcatgaccggcgtgccgcgcggcaagcggttgcgagtgcatgagttggaggccatctacgagtacggccggttcctgcccgggtcggtgctggtggtcgacaccaacggcgccgactgtgaagacacgggcctggtctgggaagacggcgacgccgatcgccgcgcgcgacctgtgccgggaaccctgaccctggcgccgtggctgggccccgacgtcgcccaggtcatgctgtcgctgtacgagctggacgggacgcccaatgatttggatccccgccatgtgctgcagcgggttctggaccgctacgccgccgatggcctgacgccggtcgcggcctgcgagctggagtactatctcgttgacttgcagcgcgggccgaacggcgagctgctgcccgccaagtcgctgcagaccggtctgcggccgaccggcatccaggtctatggcctgccggaactggaggcccacgccccgttcctgcgcgagctgtgggacgtggccgacacgctgggcgtgccgctggaaggcgcgatctcggagttcgccccggcccaggtggagctgaccctcaagcacaagcccgacgccctgcgcgccgccgacgacgcggtgctctacaagcgcgcggccaagggcgtggccctgcgtcacgggatggaggccacgttcatggccaagccgtggagcgaccgggccggcaacggcttccacgtccatctcagcgtcaatgacgcggcgggaaacaacctctgcgccagcgaggacatcgagggctcggacctgctgaagcacgctatcggcggcatgaaggtgctgttgggcgagggcatggcgatcctggcgccgaacgccaacagctatcgccgcttcaaggccaattcttacgccccggtggcgccgacctggggcgtcaacaatcgcaccgtatccttacgcgtgccggcggggccgcccaagacccgtcacgtcgagcatcgcgtggccggcgcggacggcaatccgtatctcgtcttggccgtgctgctggccagcgcccaccacgggatcaccaacaagatcgatccaggtcccgcggtgattggcgacggctacgccgcggccgccaaggagaacatccggctacccaacaactggttcgccgccgtggacctgttcgagcagtcgagcgtgctgcgcgactacctcggcgaccgtttcgtggacatgttcgtgtcggtgaagcgcacggaacaggcgcgtttcttcgaggtggtcaccgaactggatttcgactggtacctgcgcaacgcctga

SEQ ID NO: 37673 - protein, 460 aa, Caulobacter crescentus CB15
MMSAVADIQECRDFLAAHPQVKFVEVFFTSMTGVPRGKRLRVHELEAIYEYGRFLPGSVLVVDTNGADCEDTGLVWEDGDADRRARPVPGTLTLAPWLGPDVAQVMLSLYELDGTPNDLDPRHVLQRVLDRYAADGLTPVAACELEYYLVDLQRGPNGELLPAKSLQTGLRPTGIQVYGLPELEAHAPFLRELWDVADTLGVPLEGAISEFAPAQVELTLKHKPDALRAADDAVLYKRAAKGVALRHGMEATFMAKPWSDRAGNGFHVHLSVNDAAGNNLCASEDIEGSDLLKHAIGGMKVLLGEGMAILAPNANSYRRFKANSYAPVAPTWGVNNRTVSLRVPAGPPKTRHVEHRVAGADGNPYLVLAVLLASAHHGITNKIDPGPAVIGDGYAAAAKENIRLPNNWFAAVDLFEQSSVLRDYLGDRFVDMFVSVKRTEQARFFEVVTELDFDWYLRNA

SEQ ID NO: 37674 - DNA, 1383 bp, Agrobacterium tumefaciens str. C58; identical to SEQ ID NO: 32063
  CDS (1)..(1383): transl_table=11

SEQ ID NO: 37675 - protein, 460 aa, Agrobacterium tumefaciens str. C58; identical to SEQ ID NO: 32064

SEQ ID NO: 37676 - DNA, 1395 bp, Agrobacterium tumefaciens str. C58; identical to SEQ ID NO: 32065
  CDS (1)..(1395): transl_table=11

SEQ ID NO: 37677 - protein, 464 aa, Agrobacterium tumefaciens str. C58; identical to SEQ ID NO: 32066

SEQ ID NO: 37678 - DNA, 1380 bp, Xanthomonas campestris pv. campestris str. ATCC 33913
  CDS (1)..(1380): transl_table=11
atggcaaccgaaacccgtgtcgcgtccctgcccagcatcgatgccgccgccctggccgcgatcgagggctgtgcgctggtggacctgctgctgcccgataccaacggcgtgttgcgcggcaagcgtgtcacccgagaggcgctcgacaaggtctaccgcgacggcgtgtgcctgccgatgtcgctgatcgccaccgacatcaccggcaatacggtggaagaaaccggcctgggctacgccattggcgatgccgatcgcatctgccgcccgatcgccggctcgctccgcccggtgccatgggcgccgcaaccgatggcgcagctgttgctggcaatgcacacccccaacggtgccttgttcgaggtcgcgccgcgcgcggtgctgcagcgcgtggtgcaaggattcgccgcgctgggcctgacgccggtgatcgccgtggagctggagttctacctgttcgacgccatggccgatgcccagggccgtccgcagacgccgcgcgatgcacacaccggcgagcgcaacaccagcacccaggtgtatgcattgcaggatctggacgaccaccgcagcttcaccgatgccgtcactgcggcgtgccggcagcaaggcattccggccgataccgcggtggccgaatacgcgcccgggcagttcgagatcaacctgcagcaccgcgccgatgcggtggccgcatgcgacgaggcgctgctgctcaagcgcaccatcaaggcgatcgcgcagcagcaacacctgttggccagtttcatggccaagccattcgccggccaggccggcagcgggctgcacgtgcacgtcagcctgctcgatgccgccggccacaacgtgctgcacggcacagcagatgcgccggccgccgccctgcgccatgccattgccgggttgcaacggcatgcggacgcatcgctgctgctgttcgcgccgcatgccaacagttaccgccgtttcgtgccgaatgcgttcgtgccgctggacgccagctggggcttcaacaaccgcaccgtggccttgcgcatcccgcacagcgatgcgcacaacacccgtatcgaacaccgcatcgccggcgccgatgccaacccctacctggtggcggcggccgtgttggccgcgatgctggacggcttgcagcaccccggcgaccccaccgccccggtgcagggcaacgcctacgcgcaggcgaccttcaccccgcgcacctggcagggtgcggtggatgcgttcctgcgcagcgacttcatcgccacccaattgggcacgcagttccagcatgtgttcggccagcagaagcagcgcgagctgctcgactatcaggcgctggtgccggacctggactacgcccggtatctgcggacggtctga

SEQ ID NO: 37679 - protein, 459 aa, Xanthomonas campestris pv. campestris str. ATCC 33913
MATETRVASLPSIDAAALAAIEGCALVDLLLPDTNGVLRGKRVTREALDKVYRDGVCLPMSLIATDITGNTVEETGLGYAIGDADRICRPIAGSLRPVPWAPQPMAQLLLAMHTPNGALFEVAPRAVLQRVVQGFAALGLTPVIAVELEFYLFDAMADAQGRPQTPRDAHTGERNTSTQVYALQDLDDHRSFTDAVTAACRQQGIPADTAVAEYAPGQFEINLQHRADAVAACDEALLLKRTIKAIAQQQHLLASFMAKPFAGQAGSGLHVHVSLLDAAGHNVLHGTADAPAAALRHAIAGLQRHADASLLLFAPHANSYRRFVPNAFVPLDASWGFNNRTVALRIPHSDAHNTRIEHRIAGADANPYLVAAAVLAAMLDGLQHPGDPTAPVQGNAYAQATFTPRTWQGAVDAFLRSDFIATQLGTQFQHVFGQQKQRELLDYQALVPDLDYARYLRTV

SEQ ID NO: 37680 - DNA, 1380 bp, Xanthomonas axonopodis pv. citri str. 306
  CDS (1)..(1380): transl_table=11
atggcttccgagacttccgtcgcgtccctgcccgctgccgatgcccacaccctctctcgcatcgccgggtgcgagtctgtcgatctgttattgcccgacaccaatggcgtgctgcgcggcaagcgcgtaaccgccgatgcgctgagcaaggtgtatcgcgacggcgtgtgcctgccgatgtcgctgatcgccaccgacatcaccggcaacaccgtggaagaaaccggtcttggctacgcgatcggcgacgccgaccgcatctgccggccgatcgaaggctcgctacgactggtgccctgggcgccacggccgatggcgcagctgttgctggcgatgcacacacccgaaggcgggctgttcgaagtcgccccgcgggcggtgttgcagcgcgtgctgcaggggtttggcgcactcggcctgaccccggtcatcgccgtagagcttgagttctatctgttcgatgcggtggccgatgcgcaggggcgcccgcaaaccccgcgcgacccgatcaccggcgaacgcagcgacagcacgcaggtatattcgctgcaggatctggacgaccagcgtggcttcaccgatgcggtcaccgtcgcttgcagacagcaaggcattccggccgacaccgccgtggccgagtacgcacccggccagttcgaaatcaatctgcaacaccgtgccgatgcggtggccgcctgcgacgaggcggttctgctcaagcgcaccatcaaggccattgcgcagcaacggggcaagctagccagtttcatggccaagcctttccccggccaggccggcagcggtttgcatgtgcatgtgagcctgctcgatgccgccgggcacaacgtgctggccagcgccgccgacgcgcctgcgcagtcgctacgccacgccatcgccgggctacagcggcatgcagatgcctcgctcttgatgttcgccccgcatgccaacagctatcgccgcttcgtcagcaatgcgttcgtgccgctggatgcgagctggggcttcaacaaccgtaccgtggcactgcgcatcccgcacagcgatgcgcacaacacccgcatcgaacaccgcattgccggcgccgatgccaacccatatctggccgctgcagccgtgctggccgcgatgctggacggcctgcggcagccggccgaacccaccgcgccggtcaccggcaatgcgtacgcacagtcggtgttcgccccacgcagctggcaaggcgcggtggatgcgttcctcggcagcgacttcatcggcgagcagttcggcacgcagttccagcacgtattcggccagcagaaacaacgcgagctgctcgactaccaggcgcaggtaccggacctggattacgcgcggtacctgcgcaccgtgtga

SEQ ID NO: 37681 - protein, 459 aa, Xanthomonas axonopodis pv. citri str. 306
MASETSVASLPAADAHTLSRIAGCESVDLLLPDTNGVLRGKRVTADALSKVYRDGVCLPMSLIATDITGNTVEETGLGYAIGDADRICRPIEGSLRLVPWAPRPMAQLLLAMHTPEGGLFEVAPRAVLQRVLQGFGALGLTPVIAVELEFYLFDAVADAQGRPQTPRDPITGERSDSTQVYSLQDLDDQRGFTDAVTVACRQQGIPADTAVAEYAPGQFEINLQHRADAVAACDEAVLLKRTIKAIAQQRGKLASFMAKPFPGQAGSGLHVHVSLLDAAGHNVLASAADAPAQSLRHAIAGLQRHADASLLMFAPHANSYRRFVSNAFVPLDASWGFNNRTVALRIPHSDAHNTRIEHRIAGADANPYLAAAAVLAAMLDGLRQPAEPTAPVTGNAYAQSVFAPRSWQGAVDAFLGSDFIGEQFGTQFQHVFGQQKQRELLDYQAQVPDLDYARYLRTV

SEQ ID NO: 37682 - DNA, 1431 bp, Brucella suis 1330; identical to SEQ ID NO: 32069
  CDS (1)..(1431): transl_table=11

SEQ ID NO: 37683 - protein, 476 aa, Brucella suis 1330; identical to SEQ ID NO: 32070

SEQ ID NO: 37684 - DNA, 1419 bp, Shigella flexneri 2a str. 301; identical to SEQ ID NO: 32087
  CDS (1)..(1419): transl_table=11

SEQ ID NO: 37685 - protein, 472 aa, Shigella flexneri 2a str. 301; identical to SEQ ID NO: 32088

SEQ ID NO: 37686 - DNA, 1359 bp, Pseudomonas putida KT2440; identical to SEQ ID NO: 32093
  CDS (1)..(1359): transl_table=11

SEQ ID NO: 37687 - protein, 452 aa, Pseudomonas putida KT2440; identical to SEQ ID NO: 32094

SEQ ID NO: 37688 - DNA, 1365 bp, Pseudomonas putida KT2440; identical to SEQ ID NO: 32095
  CDS (1)..(1365): transl_table=11

SEQ ID NO: 37689 - protein, 454 aa, Pseudomonas putida KT2440; identical to SEQ ID NO: 32096

SEQ ID NO: 37690 - DNA, 1359 bp, Pseudomonas putida KT2440; identical to SEQ ID NO: 32097
  CDS (1)..(1359): transl_table=11

SEQ ID NO: 37691 - protein, 452 aa, Pseudomonas putida KT2440; identical to SEQ ID NO: 32098

SEQ ID NO: 37692 - DNA, 1377 bp, Pseudomonas putida KT2440; identical to SEQ ID NO: 32099
  CDS (1)..(1377): transl_table=11

SEQ ID NO: 37693 - protein, 458 aa, Pseudomonas putida KT2440; identical to SEQ ID NO: 32100

SEQ ID NO: 37694 - DNA, 1383 bp, Pseudomonas putida KT2440; identical to SEQ ID NO: 32101
  CDS (1)..(1383): transl_table=11

SEQ ID NO: 37695 - protein, 460 aa, Pseudomonas putida KT2440; identical to SEQ ID NO: 32102

SEQ ID NO: 37696 - DNA, 1377 bp, Pseudomonas syringae pv. tomato str. DC3000
  CDS (1)..(1377): transl_table=11
atgtcggtacccccgcgtgccgttcagcttaacgaagcgaacgcgttccttaaggaacatcctgaggttctgtacgttgaccttctgattgcagatatgaatggtgtggtgcgtggcaaacgcatcgagcgcaccagcctccataaggtttacgagaaaggcatcaacctgccggcctctttatttgccctggatatcaacggctccacggtggaaagcaccggtctgggcctggatatcggtgatgctgaccgaatctgttatcccatccctgacaccctgtgcaacgagccttggcaaaagcgccctaccgcgcaactgctgatgaccatgcacgaaatcgaaggtgacccgtttttcgccgacccgcgcgaagtcttgcgccaggtagtcgccaagttcgatgaaatgggcctgaccatctgcgccgccttcgagctggagttctacctgatcgatcaggagaacgttaacggccgtccgcaaccgccccgctcccctatctccggcaagcgcccgcactcgacacaggtctacctgatcgatgacctcgacgaatacgtcgattgcctgcaggacattctggaaggtgcgaaggagcaaggcattcctgccgacgccatcgtcaaggaaagtgcccctgcgcagttcgaagtgaacctgcaccacgtcgcagacgctatcaaagcgtgcgactacgctgtgctgctcaagcgcctgatcaagaacatcgcctacgatcacgaaatggacacgaccttcatggccaagccctatccgggtcaggcgggtaatggtctgcacgtccacatctcgattctggatcgcgatggcaagaacatcttcaccagcgaggatcccgagcagaacgccgcattgcgtcacgcgatcggcggtgtgctcgagaccctgcctgcgcagatggcgttcctgtgcccgaacgtcaactcgtaccgtcgctttggtgctcagttttacgtaccaaactcgcccacctggggcctggacaaccgcacggtcgcggtccgcgtgccaaccggttcggccgatgccgtgcgtatcgaacaccgcgtagccggtgccgatgccaacccgtatctggtcatggcttcggtgctggcaggcgtgcatcacggtctggtcaacaagatcgagcctggcgctccggtggaaggcaactcgtacgaacagcacgaacaaagcctgccgaacaacctgcgcgacgcactgcgcgagctggacgacaacccggtcatggccaagtacatcgatccgaaatacatcgacatctttgtcgcctgtaaagagagcgagctggaagagttcgaacactcgatctccgaccttgagtacaactggtacctgcatacggtctga

SEQ ID NO: 37697 - protein, 458 aa, Pseudomonas syringae pv. tomato str. DC3000
MSVPPRAVQLNEANAFLKEHPEVLYVDLLIADMNGVVRGKRIERTSLHKVYEKGINLPASLFALDINGSTVESTGLGLDIGDADRICYPIPDTLCNEPWQKRPTAQLLMTMHEIEGDPFFADPREVLRQVVAKFDEMGLTICAAFELEFYLIDQENVNGRPQPPRSPISGKRPHSTQVYLIDDLDEYVDCLQDILEGAKEQGIPADAIVKESAPAQFEVNLHHVADAIKACDYAVLLKRLIKNIAYDHEMDTTFMAKPYPGQAGNGLHVHISILDRDGKNIFTSEDPEQNAALRHAIGGVLETLPAQMAFLCPNVNSYRRFGAQFYVPNSPTWGLDNRTVAVRVPTGSADAVRIEHRVAGADANPYLVMASVLAGVHHGLVNKIEPGAPVEGNSYEQHEQSLPNNLRDALRELDDNPVMAKYIDPKYIDIFVACKESELEEFEHSISDLEYNWYLHTV

SEQ ID NO: 37698 - DNA, 1389 bp, Vibrio parahaemolyticus RIMD 2210633; identical to SEQ ID NO: 32109
  CDS (1)..(1389): transl_table=11

SEQ ID NO: 37699 - protein, 462 aa, Vibrio parahaemolyticus RIMD 2210633; identical to SEQ ID NO: 32110

SEQ ID NO: 37700 - DNA, 1419 bp, Shigella flexneri 2a str. 2457T
  CDS (1)..(1419): transl_table=11
atggaaaccaatatcgttgaagtagagaactttgttcagcagtcagaagagaggcggggtagcgcctttacgcaggaagtgaaacgctacctggagcgctacccgaatacgcaatatgttgatgttttacttactgatttgaatggttgcttccgtggaaaacgtatccctgtttcaagcctgaagaagctcgagaaagggtgttatttcccggcctcggtatttgcaatggatattctgggcaacgtagtagaagaagcaggtctgggtcaggaaatgggcgagccggatcgtacctgtgttcctgttctcggttccttaactccttctgccgccgatccagagtttatcggtcagatgctcctgaccatggtcgatgaagatggcgctccctttgacgttgagccgcggaacgttcttaaccgcctgtggcagcagctgcgccagcgcggattgttcccggttgtagcggtagagctggagttctatttactggatcgccagcgcgacgctgaaggggatctgcaaccgccctgcgcgcctggcaccgatgaccgcaatacacaaagccaggtttactccgttgataacctcaaccacttcgccgacgtgctcaatgatattgatgaactggcgcagttgcagctgattccggcagatggcgcggtcgctgaggcctcgccgggtcagtttgaaatcaacctttaccatactgataacgtgctggaagcctgcgatgatgcgctggcactaaaacgcctagtgcgtctgatggcagaaaagcataagatgcacgccacttttatggcgaagccgtatgaagagcacgcgggcagcgggatgcatatccatatcagtatgcaaaataatcgtggcgagaatgtgctttctgacacagaaggcgaagattcgccgctgctgaaaaagatgctcgccgggatgattgacctgatgccgtcgtcgatggcgttgctggcaccaaacgtgaactcgtatcgccgcttccagccgggaatgtatgtgccgacgcaggcgtcgtggggccataacaaccgcaccgtcgccctgcgtattccgtgcggtgaccgtcataatcaccgcgtggaatatcacgtggcgggtgccgatgccaacccatatctggtgatggcagcgatttttgccggtattttgcatggccttgataacgagctgccgttgcaggaagaagtcgaaggcaacgggctggaacaggaaggcttacccttcccgattcgccagagcgatgccctgggtgagtttatcgagaatgatcacctgcgccgctatttaggcgaacggttttgccatgtgtatcacgcctgtaaaaatgatgagctgttgcagtttgagcgcctcatcacagaaacagaaattgagtggatgttgaaaaacgcgtaa

SEQ ID NO: 37701 - protein, 472 aa, Shigella flexneri 2a str. 2457T
METNIVEVENFVQQSEERRGSAFTQEVKRYLERYPNTQYVDVLLTDLNGCFRGKRIPVSSLKKLEKGCYFPASVFAMDILGNVVEEAGLGQEMGEPDRTCVPVLGSLTPSAADPEFIGQMLLTMVDEDGAPFDVEPRNVLNRLWQQLRQRGLFPVVAVELEFYLLDRQRDAEGDLQPPCAPGTDDRNTQSQVYSVDNLNHFADVLNDIDELAQLQLIPADGAVAEASPGQFEINLYHTDNVLEACDDALALKRLVRLMAEKHKMHATFMAKPYEEHAGSGMHIHISMQNNRGENVLSDTEGEDSPLLKKMLAGMIDLMPSSMALLAPNVNSYRRFQPGMYVPTQASWGHNNRTVALRIPCGDRHNHRVEYHVAGADANPYLVMAAIFAGILHGLDNELPLQEEVEGNGLEQEGLPFPIRQSDALGEFIENDHLRRYLGERFCHVYHACKNDELLQFERLITETEIEWMLKNA

SEQ ID NO: 37702 - DNA, 1335 bp, Chromobacterium violaceum ATCC 12472; identical to SEQ ID NO: 32113
  CDS (1)..(1335): transl_table=11

SEQ ID NO: 37703 - protein, 444 aa, Chromobacterium violaceum ATCC 12472; identical to SEQ ID NO: 32114

SEQ ID NO: 37704 - DNA, 1311 bp, Gloeobacter violaceus PCC 7421
  CDS (1)..(1311): transl_table=11
atgactgttccactttcagagcttgcccgcgaaaagggcatccggtactttttgatctcttttaccgacttgttcggcacccagcgggccaaactggtgccgacccaggccatcgacgcgatagccgccagtggtgcggggttcgcgggcttcgccgcctggatggacatgagccccgccgacccggacatgttcgcccatcccgatgcaggctctgtgttccaactgccctggcagccggaggtggcctggatgccggcggacctgttcacccccgaaggcacggcgatcgcccagactccgaggctggtgctcaagcgggtgctgaaactggccctggagctaggttatcgcgtccgtacgggtgtcgagtgcgagtattttctgctggcggcggacgaggtgcagattgccgactcccgtgattttcagagcaaaccctgctacgaccagcaggcgctgatgcgccgctacgcggtgatctcggagatttgcgacgccatgaacgcccttgggtggggtgcctatcagaacgaccacgaggatgccaacggccagttcgagatgaactggacctacgccgacgcgctggtgaccgccgatcgccacgcctttttcaagtacatggtgaaaaccgttgccgagaagcacagcctgcgggctacttttatgcccaaaccgtttatgcacctcaccggcaacggctgccacacccacctctcggtctgggacagcgagggcaaggtcaaccgcttcgacgatccccggggagaactgggcctctcgccgctcgcctatcactttatcggcggtgtgcagcattcggcggaggcgctgtgcgcctttgccaatccgaccgtcaattcctacaaacgcatcaacgctcccattaccgcctccggcgccacctggtcgcccaacaccatcagctacagcggcaacaaccgcacccacgccatccgcatccccgaaccgggccgcttcgagttgcgcctggccgacggagcggccaacccctacttgctgcccgccgccctcaccgccgtgggcctcgacggcatcgcccaccagcgcgatgccggcccgcgccgtgacaacaacagctacaccaaccctctgcccccggagagcgccaaacccctgccggccaacctgctcgacgccctgcgcgccctggagagcgacaccgttttgtccgaagcgatgggtgcggattttgtcgcgtcttacttgaagctcaaacaccgcgaatggcaggattactgcgcccgtgtcactccttgggaactggaacataccctcgattgctag

SEQ ID NO: 37705 - protein, 436 aa, Gloeobacter violaceus PCC 7421
MTVPLSELAREKGIRYFLISFTDLFGTQRAKLVPTQAIDAIAASGAGFAGFAAWMDMSPADPDMFAHPDAGSVFQLPWQPEVAWMPADLFTPEGTAIAQTPRLVLKRVLKLALELGYRVRTGVECEYFLLAADEVQIADSRDFQSKPCYDQQALMRRYAVISEICDAMNALGWGAYQNDHEDANGQFEMNWTYADALVTADRHAFFKYMVKTVAEKHSLRATFMPKPFMHLTGNGCHTHLSVWDSEGKVNRFDDPRGELGLSPLAYHFIGGVQHSAEALCAFANPTVNSYKRINAPITASGATWSPNTISYSGNNRTHAIRIPEPGRFELRLADGAANPYLLPAALTAVGLDGIAHQRDAGPRRDNNSYTNPLPPESAKPLPANLLDALRALESDTVLSEAMGADFVASYLKLKHREWQDYCARVTPWELEHTLDC

SEQ ID NO: 37706 - DNA, 1386 bp, Rhodopseudomonas palustris CGA009; identical to SEQ ID NO: 32117
  CDS (1)..(1386): transl_table=11

SEQ ID NO: 37707 - protein, 461 aa, Rhodopseudomonas palustris CGA009; identical to SEQ ID NO: 32118

SEQ ID NO: 37708 - DNA, 1401 bp, Mycobacterium sp. JLS
  CDS (1)..(1401): transl_table=11
atgatcgactcacgcaccgcccccaccgcctcggaggtcctcgcccgactgcacgccgaggacatcgcgacggtgatcctcggcggcaccgacacccacggggtgatgcgcggcaagcgggtcccgatcagccagctgccccggatgctcgagcacgggatgccgatgtgcgacgtgttctgggtgatgcacgtcgacgaatccgacctcgtcgcacgccccgacggataccgcggatacttccccaccgaacggcagggctaccccgacatcctggccgtccccgacctgaccaccctgcggatcgtgccctggcacaacgacaccgcgctgttgctgtgtgactgggagctgccggccgaccaccggccggtgcccatcgcgccgcggtcggtgctgcgccgcgtcgtcgaacgtgccgacgcgatgggctaccggccgctgagcgcgctggagttggagttctatctgctgcgcgagaaggcgggcaccacgcaccgcaaacgggccgacgaactcgtcccgctgcaggaggcgcccagcacctacggcgtggtgatgggttcgctgcaggaggacatcggagcgctgatccggcgccacatgctcgactacggcctgcccgtcgaggcctgcaaccccgagacgggtcccgggcagttcgagatcacgctgcggtacggcaacagcctgaagtccgccgacgacgccttcctgttcaagtcggcggtcaaggaggtcgccgcccagaacgacctgctcgcgacgttcatggcgaaacccgtgaccgactgggcgggtaacagctgccacgtgcacctgagcctgcgcgacatcgccgggggcggggtcttcttcgaccaggacgcccccgatcagctctccaccgcgctgcgccacttcgccggcggaatcctgcacaccatgcgggaattcaccgcgctgatggcgccgacaccgaactcctaccgccgcttcgtgccgtactcgtgggccggcaccaccgccacctggggtgtcgacaaccgttcggtcggcttgcgcgtcattcgcgaaggcgaccacggcacccgcgtcgagcaccgtcagcccggtggtgacgccaacccgtatctggccaccgccgccgccctcgcgggcggactgcacggactgctcaacgagatcgaaccccgcgaactgtccacgaccgacatctacagccagccgagcgaggatctgccggtcctgcctgccaccctcgccgaggcggtggacctgctcgcggacagcgcggcggcacgggagtggttcggggacgacttcgtcgaccattacgtgctgatgaagcgcgcagagatcgcggcccagtcggtggcggtcaccgactgggaggtcgcccggtacctcgaggcgatgtaa

SEQ ID NO: 37709 - protein, 466 aa, Mycobacterium sp. JLS
MIDSRTAPTASEVLARLHAEDIATVILGGTDTHGVMRGKRVPISQLPRMLEHGMPMCDVFWVMHVDESDLVARPDGYRGYFPTERQGYPDILAVPDLTTLRIVPWHNDTALLLCDWELPADHRPVPIAPRSVLRRVVERADAMGYRPLSALELEFYLLREKAGTTHRKRADELVPLQEAPSTYGVVMGSLQEDIGALIRRHMLDYGLPVEACNPETGPGQFEITLRYGNSLKSADDAFLFKSAVKEVAAQNDLLATFMAKPVTDWAGNSCHVHLSLRDIAGGGVFFDQDAPDQLSTALRHFAGGILHTMREFTALMAPTPNSYRRFVPYSWAGTTATWGVDNRSVGLRVIREGDHGTRVEHRQPGGDANPYLATAAALAGGLHGLLNEIEPRELSTTDIYSQPSEDLPVLPATLAEAVDLLADSAAAREWFGDDFVDHYVLMKRAEIAAQSVAVTDWEVARYLEAM

SEQ ID NO: 37710 - DNA, 1422 bp, Bartonella quintana str. Toulouse; identical to SEQ ID NO: 32153
  CDS (1)..(1422): transl_table=11

SEQ ID NO: 37711 - protein, 473 aa, Bartonella quintana str. Toulouse; identical to SEQ ID NO: 32154

SEQ ID NO: 37712 - DNA, 1392 bp, Acinetobacter sp. ADP1
  CDS (1)..(1392): transl_table=11
atgttgcagcaagccgtgaaggagatgtttgatcatcatgaattgaccagtcaacccatgtaccgaccagaagtacaaaaggtcattgatcagcatcatttaaaatatgttttggcgcaatttgttgatattcatggtgctgccaaaaccaagtcggttcccatttcaggtttgaaagcgattgaaaaagacggtgttggatttgcaggttttgctatttctggtatgggaatgcaaccccatggtcctgactttatggtgaaaggcgatttatccactctaactcctgtgccttggcaaccgggttacggacgtgtagtttgtgaaggctatgttaacggcaagccgcatccttacgattcacgctatgtattacgtcagcaagtagaacgtttgagtgcgcaaggctggaccttaaatactgggcttgagccagagtttagcctgtttcgccgtagcgaagatggcaaactgaaaatggtcgatgactccgataatctggataaaccttgttatgactataaaggcttgtctcgttcacgtgagtttttagagcgtttaaccgaagctctcattccagtcgggtttgatatttaccagattgatcatgaagatgccaatggtcagtttgagatcaattatacctatgcagacgccatgaagtcggcagatatgtttacctttttccgtatggctgcgggtgaaatcgccaatgatttgggcatgatctgttcatttatgccaaaacctgatccaaaacgtgcgggcaatggtatgcacttccacctatcaattggcagtgatgaatgcagcaacctgttccatgatgccagtgatccaagtgggatgggcttatccaaaatggcctatcactttattgcaggtttacttgagcatggtccagcactctgtgctttttgtgcgcccacggtaaattcttataaacgccttgtggtgggccgttcactctctggcgcgacatgggcacctgcgttcattgcttatggtggcaacaaccgttcagccatggtgcgtattccatatggtcgtatcgagctgcgcttacccgatgcaggctgtaatccttatctggtgtcggctgccattattgcagcagggcttgacggaatcgaacgtgaattgatgccaccaactgcatgcaatgaaaacctctatagccttgggcttgaagagattgcagcacgcggcattcaaaccttaccgcagtcactcaaagaagccattgatgcacttaaggcagatccattgtttgcacagaaaatgggatctgaaattgtgaatgagtttattgaacaaaaaagcatggagtgggtggaatactgccgtcatgtgtccgactgggaaattcagcgttataccgagtttttctaa

SEQ ID NO: 37713 - protein, 463 aa, Acinetobacter sp. ADP1
MLQQAVKEMFDHHELTSQPMYRPEVQKVIDQHHLKYVLAQFVDIHGAAKTKSVPISGLKAIEKDGVGFAGFAISGMGMQPHGPDFMVKGDLSTLTPVPWQPGYGRVVCEGYVNGKPHPYDSRYVLRQQVERLSAQGWTLNTGLEPEFSLFRRSEDGKLKMVDDSDNLDKPCYDYKGLSRSREFLERLTEALIPVGFDIYQIDHEDANGQFEINYTYADAMKSADMFTFFRMAAGEIANDLGMICSFMPKPDPKRAGNGMHFHLSIGSDECSNLFHDASDPSGMGLSKMAYHFIAGLLEHGPALCAFCAPTVNSYKRLVVGRSLSGATWAPAFIAYGGNNRSAMVRIPYGRIELRLPDAGCNPYLVSAAIIAAGLDGIERELMPPTACNENLYSLGLEEIAARGIQTLPQSLKEAIDALKADPLFAQKMGSEIVNEFIEQKSMEWVEYCRHVSDWEIQRYTEFF

SEQ ID NO: 37714 - DNA, 1371 bp, Burkholderia mallei ATCC 23344; identical to SEQ ID NO: 32161
  CDS (1)..(1371): transl_table=11

SEQ ID NO: 37715 - protein, 456 aa, Burkholderia mallei ATCC 23344; identical to SEQ ID NO: 32162

SEQ ID NO: 37716 - DNA, 1335 bp, Burkholderia pseudomallei K96243
  CDS (1)..(1335): transl_table=11
atgcaagacatcgatgattttttgaggcagcaccggatcaccgaagtggaagcgatcattcccgacatggcgggcatcgcgcgcggcaagatcattccgcgcaacaagttcgaaaccggcgaatcgatgcgcctgccgcaagcggtgatggtgcagaccgtcaccggcgattatccggaggacggcacgctcacgggcgtcacggatcccgacatggtgtgcgtggccgacgcgtcgacgatctgcctgattccgtgggcagtcgaccccaccgcgcaggtgattcacgattgcgtgcatttcgacggctcgcccgtcgaaatttcgccgcgctacgtgctgcgccgcgtgctcgacctgtatcgcgcgagggggtggaagcccgtcgtcgcgccggagctcgagttctatctggtcgacatgaacaaggacccggacctgccgctgcggccgcccgtcggacgcacggggcgcgcggaaacggggcggcagtcgtactcgatcgaagcggtcaacgaattcgatccgctcttcgaggacatctacgagtactgcgagctgcagggcctcgacatcgacacgctgattcacgaagtcggcgccgcgcagatggagatcaacttcctgcacggcgatgcgctatcgctcgccgaccaggtgtttctgttcaagcgcacggtgcgcgaggcggcgctgcgccacaacatgtacgccaccttcatggcaaagccgatggagagcgagcccggctcggcgatgcacattcatcagagcgtcgtcgacatcgagaccgggcgcaatctcttcatcggcgcgagcggcgacgtgacgccgatgttccgcagctatctcgccgggctgcagaagtacacgcccgcgctgatgccgatcttcgcgccgtacatcaactcgtaccggcggctgtcgcgcttcatggccgcgccgatcaacgtgcaatggggctacgacaaccgcacggtcggcttccggattccgcactcggcggccgccgcgcggcggatcgagaaccggattccgggcgtcgactgcaacccgtatctcgcgatcgcgggcacgctcgcggcgggctacctcggcgtcacgcaggggctcgagccgaccgagccgctcgcgagcgacggctacagcctgccgtatcaactgccgcgcaatctggaggaagggctcacgctgatgagcgcatgcgcgccgcttgccgagatgctcggcgagaaattcgtgaaagcctatctcgcattgaaggaaacggagtacgaagcatttttccgcgtgatcagctcgtgggagcgcaggcacctgctgctgcacgtttga

SEQ ID NO: 37717 - protein, 444 aa, Burkholderia pseudomallei K96243
MQDIDDFLRQHRITEVEAIIPDMAGIARGKIIPRNKFETGESMRLPQAVMVQTVTGDYPEDGTLTGVTDPDMVCVADASTICLIPWAVDPTAQVIHDCVHFDGSPVEISPRYVLRRVLDLYRARGWKPVVAPELEFYLVDMNKDPDLPLRPPVGRTGRAETGRQSYSIEAVNEFDPLFEDIYEYCELQGLDIDTLIHEVGAAQMEINFLHGDALSLADQVFLFKRTVREAALRHNMYATFMAKPMESEPGSAMHIHQSVVDIETGRNLFIGASGDVTPMFRSYLAGLQKYTPALMPIFAPYINSYRRLSRFMAAPINVQWGYDNRTVGFRIPHSAAAARRIENRIPGVDCNPYLAIAGTLAAGYLGVTQGLEPTEPLASDGYSLPYQLPRNLEEGLTLMSACAPLAEMLGEKFVKAYLALKETEYEAFFRVISSWERRHLLLHV

SEQ ID NO: 37718 - DNA, 1341 bp, Silicibacter pomeroyi DSS-3
  CDS (1)..(1341): transl_table=11
atgcaagccaaaaactggctgcggaagaacccgcaggtaagaaccattcgtgtggccgcggccgatctgaacggccagccgcgcggcaagcgcgtgcccggacgctttgccgacaaggcgatcgagggcggcacccgctttccgctgtcggtgatgaatctcgacatctggggcgaggatatcgaggacagcccgctggtgctggcctcgggtgaccgcgacggcgttctgcaaccgaccgagcgtggtttcatgccgatgccctggctcgacacgcccaccggcctgctgccgatctggatgttccacgaagatggccgcccctatgagggcgatccgcgccatgcgctgaacaccgttgtcaaacgctacaaggcgcgcgggctgaaacccgttgtcgccgtcgagctggagttctttctgatcgacgacagcggtcgccaccttcaggtgccgcaatcgccccggtccggcaagcggcgcaaggcgggcgagatcctgtcgctgcgcgcgctcgaccagtttgatcatttcttcaccgagctctacgacgcctgcgaagtgatggacatccccgccgataccgccatttccgaggccggtgtcggccagttcgaaatcaacctgatgcatcaggacgacgccctgcgcgccgccgacgatgcctggctgttcaagatgctggtcaaggggctggcccgcaaacacggatttgccgccagcttcatggccaaaccctacgaggactatgccggatcgggcatgcatatgcatttctcggtgctggatgaggatggcaacaacgtctttgatgatggcaccgagcgcggcagcgacaccatgctgcatgcggtgcgcggctgtctggacgcaatgtccggaagcacgctgatctttgcccctcatgacaacagctatgcccggctggtgcccaatgcccatgcccccaccggggtcgcctgggcctatgaaaaccgcaccgccgccatccgcatcccctcgggcagcccggtcgcgcgccggatcgaacaccgggtcgcgggcggcgacgtcaatccctatctgatgatcgccgcggttctgggcgccgccctgaacgggatcgaggatggccagatgccgccgcagccgatctcgggcaatgcctacaaggcgaacctggcgcagatccccgaccgttgggacacggcgatcgacgccttcgaatccgatccggccgtcgcgcggattttcgcgcccgagctgatccgcaactttgtcatgaccaagcggcaggaattccgctactttcaggagttgaccgagaaggaaaaaaccgaagtctatctggacacggtctga

SEQ ID NO: 37719 - protein, 446 aa, Silicibacter pomeroyi DSS-3
MQAKNWLRKNPQVRTIRVAAADLNGQPRGKRVPGRFADKAIEGGTRFPLSVMNLDIWGEDIEDSPLVLASGDRDGVLQPTERGFMPMPWLDTPTGLLPIWMFHEDGRPYEGDPRHALNTVVKRYKARGLKPVVAVELEFFLIDDSGRHLQVPQSPRSGKRRKAGEILSLRALDQFDHFFTELYDACEVMDIPADTAISEAGVGQFEINLMHQDDALRAADDAWLFKMLVKGLARKHGFAASFMAKPYEDYAGSGMHMHFSVLDEDGNNVFDDGTERGSDTMLHAVRGCLDAMSGSTLIFAPHDNSYARLVPNAHAPTGVAWAYENRTAAIRIPSGSPVARRIEHRVAGGDVNPYLMIAAVLGAALNGIEDGQMPPQPISGNAYKANLAQIPDRWDTAIDAFESDPAVARIFAPELIRNFVMTKRQEFRYFQELTEKEKTEVYLDTV

SEQ ID NO: 37720 - DNA, 1323 bp, Synechococcus elongatus PCC 6301
  CDS (1)..(1323): transl_table=11
gtgggtgtggaacgagacatggattctttggcagccttggcgcgcgatcggggcattcgttactttctgattgccttcaccgatctatttggcgtacagcgagccaagctggtgccagccagcagcatcgacctcatggccactagtggtgcgggctttgccggttttgcagcttggcttgatctcagcccagcggatgcggacgttttagccattcccgatcgcgacagtctgttccaactgccttggcaaccggaagtcgcttggatgccagcagatctctacctcaacgatcaaccgctggagcaagcgccgcgctgggtactaaagcgggttctctcggtggctgagtccctcggctatcgccccaaaacaggggtggagtgtgagttcttccttctggatgaaaccggagatgcgatcgctgatccgcgcgatcgccaggcgaaaccttgctacgaccagcagtccctgatgcggcgctacgacctgattacccagatcagtgaagcgatggaggaactgggctgggggccgtatcaaagtgatcatgaagatgccgacggtcagtttgaaatgaactggacctatgcggatgcgctagtcactgccgatcgccaggctttcttcaagtacatggtcaaaactctcgcggaacggcaaggattaagggctacctttatgcccaagcccttcgcggatttgaccggcaatggttgccacatgcacctttcactctggaatcgggagggcacaaccaatacttttgtcgatccggttgcgactgctcccctctcgaccctgggctatcagtttattggtggattgctgcattcggcggcatccctctgcgccctcaccaacccaaccatcaactcctataagcggattaatgcaccggcgacgacctcgggtgcgacttggtctccgaacggtattagctacagtggcaacaaccgcacccacctgatccgtattcccgatgccggtcgctttgagttgcgactcgccgatggggctgctaacccttacctgttgcctgctgccgcgatcgctgccggcttagatggtattcagaacaaacgcgatccaggcccccgctacgacaatgacaactatgctcagcccttaccacccggcacagttccgaccttgcccgagcatttgctggatgccctgcgatcgctacaagaaagcactgttctcaccgaaggtttgggagctgcgttcacaagtgcatacctcaagcttaagcatcaggaatggcgcagtttttgtgctgaaattaccccttgggagcgcgctacaaccttggattgctag

SEQ ID NO: 37721 - protein, 440 aa, Synechococcus elongatus PCC 6301
MGVERDMDSLAALARDRGIRYFLIAFTDLFGVQRAKLVPASSIDLMATSGAGFAGFAAWLDLSPADADVLAIPDRDSLFQLPWQPEVAWMPADLYLNDQPLEQAPRWVLKRVLSVAESLGYRPKTGVECEFFLLDETGDAIADPRDRQAKPCYDQQSLMRRYDLITQISEAMEELGWGPYQSDHEDADGQFEMNWTYADALVTADRQAFFKYMVKTLAERQGLRATFMPKPFADLTGNGCHMHLSLWNREGTTNTFVDPVATAPLSTLGYQFIGGLLHSAASLCALTNPTINSYKRINAPATTSGATWSPNGISYSGNNRTHLIRIPDAGRFELRLADGAANPYLLPAAAIAAGLDGIQNKRDPGPRYDNDNYAQPLPPGTVPTLPEHLLDALRSLQESTVLTEGLGAAFTSAYLKLKHQEWRSFCAEITPWERATTLDC

SEQ ID NO: 37722 - DNA, 1377 bp, Pseudomonas syringae pv. syringae B728a
  CDS (1)..(1377): transl_table=11
atgtcggtacccccgcgtgccgttcagcttaacgaagcgaacgcgttccttaaggaacatcctgaggttctgtacgttgaccttctgattgcagatatgaatggtgtggtgcgtggcaaacgcatcgaacgcaccagcctccataaggtttacgagaagggcatcaacctgcctgcctctttatttgctctggatatcaatggctccacggtggagagcaccggtctgggcctggacatcggtgatgctgaccgaatctgttatcccatccccgacaccctgtgcaacgagccatggcaaaagcgccctaccgcgcaattgctgatgaccatgcacgaactcgaaggcgatccgtttttcgccgacccgcgtgaagtattgcgccaggtcgtcgccaaattcgacgaaatgggcctgaccatctgcgccgcgttcgagctggagttctacctgatcgatcaggagaacgtgaacggtcgcccacaaccgccccgctcgccgatctccggcaaacgcccgcattcgacacaggtctacctgatcgacgacctcgacgaatacgtcgactgccttcaggacatcctcgaaggtgcgaaggaacaaggcattcctgccgacgccatcgtcaaggaaagcgccccggcccagttcgaagtcaacctgcatcacgtcgccgacgcgatcaaggcgtgcgattacgcggtattgctcaagcgcctgatcaagaacatcgcctacgatcacgagatggacacgaccttcatggccaagccctatccgggtcaggcgggtaatggtctgcacgttcatatttcgattctggatcgcgacggcaagaacatcttcaccagcgaggatcccgagcagaacgccgcattgcgtcacgcaatcggcggtgtgctcgagaccctgccggcacaaatggccttcctgtgcccgaacgtcaactcgtaccgccggttcggtgcgcagttctatgtgcccaactcaccgacctggggcctggataaccgtacggtcgccgttcgcgtaccgaccggcaccgccgatgcggtacgtatcgaacaccgcgttgccggcgccgacgccaacccgtatctggtgatggcttcggtcctggcgggcgtgcaccacggcctggtcaacaaggtcgagcctggcgctccggtcgaaggcaactcctacgagcaacacgaacaaagcctgccgaacaacctgcgcgacgcattgcgcgagctggacgacaacccggtgatggccaagtacatcgacccgaaatacatcgacatttttgtcgcctgtaaagagagcgagctggaagagttcgaacactccatctccgacctcgagtacaactggtacctgcatacggtctga

SEQ ID NO: 37723 - protein, 458 aa, Pseudomonas syringae pv. syringae B728a
MSVPPRAVQLNEANAFLKEHPEVLYVDLLIADMNGVVRGKRIERTSLHKVYEKGINLPASLFALDINGSTVESTGLGLDIGDADRICYPIPDTLCNEPWQKRPTAQLLMTMHELEGDPFFADPREVLRQVVAKFDEMGLTICAAFELEFYLIDQENVNGRPQPPRSPISGKRPHSTQVYLIDDLDEYVDCLQDILEGAKEQGIPADAIVKESAPAQFEVNLHHVADAIKACDYAVLLKRLIKNIAYDHEMDTTFMAKPYPGQAGNGLHVHISILDRDGKNIFTSEDPEQNAALRHAIGGVLETLPAQMAFLCPNVNSYRRFGAQFYVPNSPTWGLDNRTVAVRVPTGTADAVRIEHRVAGADANPYLVMASVLAGVHHGLVNKVEPGAPVEGNSYEQHEQSLPNNLRDALRELDDNPVMAKYIDPKYIDIFVACKESELEEFEHSISDLEYNWYLHTV

SEQ ID NO: 37724 - DNA, 1377 bp, Pseudomonas fluorescens Pf-5
  CDS (1)..(1377): transl_table=11
atgtcggtccccccgcgtgccattcaactcaatgaagccaatgccttcctgaaaaaacaccccgaggttctctacgtcgatctgctgattgcagacatgaacggtgtggtgcgcggcaagcgcatcgagcgcaccgcgctgcacaaggtctatgagaagggcatcaacctgcccgcctcgctgtttgccctggatatcaacggttccacggtggaaagcaccggcctgggcctggacatcggcgatgccgaccgcatctgctacccgatccccggcaccctgagcgtcgagccctggcagaagcgccccaccgcgcaactgctgatgaccatgcacgagatcgaaggccagccattcttcgccgacccccgcgaagtgctgcgccaggtggtgagcaagttcgatgagatgggcctgaccatctgcgcggcctttgaactggagttctacctgatcgaccaggacaacgtgaacggccgtccgcagtcgccccgttcgccgatctccggcaaacgtccgcattccacccaggtctacctgatcgacgacctcgacgagtacgtcgactgcctgcaagacatcctcgaaggcgcgaaagagcagggcattccggccgacgccatcgtcaaggaaagcgccccggcgcagttcgaagtcaacctgcaccacgtcagcgaccctatcaaagcctgcgactacgcagtactgctcaagcgcctggtgaagaacatcgcctacgaccatgaaatggacaccaccttcatggccaagccctacccgggccaggcgggtaacggcctgcacgtgcacatctcgatcctcgacaagcagggcaacaacatcttcgccagcgaagacccagagaccaacgaagccctgcgccacgccatcggcggcgtgctggacaccctgccgcagcagatggctttcctgtgccccaacgtcaactcgtaccgccgcttcggtgcgcagttctacgtgccgaactcgccgacctggggcatcgacaaccgcaccgtggccgtgcgcgtacccaccggttctgccgatgcggtgcgcatcgagcaccgggtggccggcgccgacgccaacccttacctgctgatggcttcggtgctggcgggcattcaccacggcctgaccaacaagatcgacccgggcgcgccggttgaaggcaactcctacgagcagaacgaacaaagcctgcccaccaacctgcgggacgccctgcgcgtactggacgacagcgaagtgatggccaagtacatcgacccgatgtacatcgacgtgttcgtggcctgtaaggaaagcgagttggcggagttcgaaaactccatctccgacctggaatacaactggtacctgcacacggtctga

SEQ ID NO: 37725 - protein, 458 aa, Pseudomonas fluorescens Pf-5
MSVPPRAIQLNEANAFLKKHPEVLYVDLLIADMNGVVRGKRIERTALHKVYEKGINLPASLFALDINGSTVESTGLGLDIGDADRICYPIPGTLSVEPWQKRPTAQLLMTMHEIEGQPFFADPREVLRQVVSKFDEMGLTICAAFELEFYLIDQDNVNGRPQSPRSPISGKRPHSTQVYLIDDLDEYVDCLQDILEGAKEQGIPADAIVKESAPAQFEVNLHHVSDPIKACDYAVLLKRLVKNIAYDHEMDTTFMAKPYPGQAGNGLHVHISILDKQGNNIFASEDPETNEALRHAIGGVLDTLPQQMAFLCPNVNSYRRFGAQFYVPNSPTWGIDNRTVAVRVPTGSADAVRIEHRVAGADANPYLLMASVLAGIHHGLTNKIDPGAPVEGNSYEQNEQSLPTNLRDALRVLDDSEVMAKYIDPMYIDVFVACKESELAEFENSISDLEYNWYLHTV

SEQ ID NO: 37726 - DNA, 1371 bp, Colwellia psychrerythraea 34H; identical to SEQ ID NO: 32169
  CDS (1)..(1371): transl_table=11

SEQ ID NO: 37727 - protein, 456 aa, Colwellia psychrerythraea 34H; identical to SEQ ID NO: 32170

SEQ ID NO: 37728 - DNA, 1377 bp, Pseudomonas fluorescens PfO-1
  CDS (1)..(1377): transl_table=11
atgtcggtccctctgcgtgccgttcaactcaacgaagcaaacgcattccttaagaaacatcctgaggttttgtacgtcgaccttctgattgcagacatgaacggtgtggtgcgcggcaagcgcatcgagcgcaccagtcttcacaaggtttacgagaaaggcatcaacctgccggcctcgctctttgccctcgacatcaacggctccacggtggaaagcaccggcctgggcctggacatcggcgacgccgaccgtatctgctacccgatccctggcaccctgagcatcgagccctggcagaagcgcccgaccgcacaactgctgatgaccatgcacgaactggaaggcgagccgttctttgccgacccgcgtgaagtgctggccaacgtggtgcgcaagttcgacgcattgggcctgaccatttgcgccgcgttcgaactcgagttctacctgattgaccaggacaacgtgaacggccgtccgcaatcgccgcgttcgccggtttcgggcaagcgtccggtgtcgacccaggtctatctgatcgacgacctcgacgagtatgtcgactgcctgcaagacatcctcgaaggcgcgaaagagcagggcattcctgccgacgccatcgtcaaggaaagcgccccggcgcaattcgaagtcaacctgcatcacgtgtctgacccgatcaaggcgtgcgactacgccgtcctgctcaagcgtctggtgaagaacatcgcctacgaccacgagatggacaccaccttcatggccaagccgtatccgggccaggcgggcaacggtctgcacgtgcacatttcgattctggacaaagaaggcaataacatcttcgccagcgaggatcccgagcagaacgccgcgctacgccacgcgatcggcggtgtgctggagaccctacctgcgcaaatggccttcctgtgcccgaacgtcaactcgtaccgccgcttcggcgcgcagttttatgtgccgaactcgccgagctggggtatcgacaaccgcaccgtggccgtccgcgttccgaccggttcgccggatgccgtgcgcatcgaacaccgtgtcgccggtgccgacgccaacccatacctgctgatggcttccgtgctggccggtatccaccacggcctgaccaacgaaatcgaaccgggcgccccggtcgaaggcaacagctacgagcagaacgaacagagcctgccgaacaacctgcgcgacgccctgcgtgagctggacgacagcgaagtcatggcccgctacatcgacccgatgtacatcgacgtatttgtcgcgtgcaaggaaagcgagctggccgagttcgaaaactcgatctctgaccttgagtacaactggtatctgcatacggtgtga

SEQ ID NO: 37729 - protein, 458 aa, Pseudomonas fluorescens PfO-1
MSVPLRAVQLNEANAFLKKHPEVLYVDLLIADMNGVVRGKRIERTSLHKVYEKGINLPASLFALDINGSTVESTGLGLDIGDADRICYPIPGTLSIEPWQKRPTAQLLMTMHELEGEPFFADPREVLANVVRKFDALGLTICAAFELEFYLIDQDNVNGRPQSPRSPVSGKRPVSTQVYLIDDLDEYVDCLQDILEGAKEQGIPADAIVKESAPAQFEVNLHHVSDPIKACDYAVLLKRLVKNIAYDHEMDTTFMAKPYPGQAGNGLHVHISILDKEGNNIFASEDPEQNAALRHAIGGVLETLPAQMAFLCPNVNSYRRFGAQFYVPNSPSWGIDNRTVAVRVPTGSPDAVRIEHRVAGADANPYLLMASVLAGIHHGLTNEIEPGAPVEGNSYEQNEQSLPNNLRDALRELDDSEVMARYIDPMYIDVFVACKESELAEFENSISDLEYNWYLHTV

SEQ ID NO: 37730 - DNA, 1407 bp, Rhodobacter sphaeroides 2.4.1
  CDS (1)..(1407): transl_table=11
gtgaccgcaacgatgaccgaccagcccagcccctccggttcgaccctcagcgaggccgaaaccttcctcgccgcccatcccgagatcgaggccttcgacatcgtcctgcacgatgccaacggcatcggccgaggcaagatcatccggcgccacgaacttttgtccttctacaagggcgggcggcacctgccgatctcgatcctcgggctcgacatctgcggcgaggatgtccacgagaccggcctgatctgggatcagggcgacggcgacctgcgggcctggccgatccccggcacgctggtgccccttcatggcaccacgccgccgcggggcgaggtcttcatgtgcatgtacgacctcgacggccggccgatgagctcggacccgcgccatgcgctcgcacggcaggtggaggcgctggcggagctgggccttcacccgtcggcggccttcgagctcgaattcttccttctggccaacgagcgcggccccgacgggcgcgtgcagccggcagccgacgtgctggacggccggcgcagcgccaagaccgaggtctattccgtcgatcacctgcacgggatgatgccgctcttctccgacatctatgcgggggccgagacggcggggatcaaggccgagaccatgatctcggaatatgcgccgggccagtacgagctcacgctccattaccgcaccgatgtgctgcaggcggcggacgacctgatgcggctcaagcggatcgtgcgggcgcaggcgcgccgccatggcgtcaccgcctgtttcatggccaagcccgtggaaagctacgccggttcggggatgcatctgcatgtctcgctctgcgatgccgaggggcgcaacatcttcgtcgaggagaccgagggccagtggtcgcgcccgatcctgcacgcgctcggcggcctgcgcgagacgatgggggaatcgatgctggtcttcgcgccgcatgcgaactcctggcggcgcttcgcgagccagagctacgctccggtctcgcccagctggggggtgaacaaccgctcggtcgcgctgcgcatcccggcgggcgacatccgcgcccggcggatcgagcatcgcccggccggggtcgacgccaacccctatctcgtggccgccaccgtgctggccggcatccgccgcgggctcgagcagcagatcgaccccggccccgagaccaccggcaacggctacgaggatccgggcgacacgcagccgatcccgacctgctggcgcagcgccatcgcggcggcggaacattcggccttcctgcgcgaggcgctggggccggacatgcaccgcaccttcaccgccatcaaggccgcggaatatgcccgcgtggcgcggacgatcccggacgtcgactacgatctgtacctccacacggtctga

SEQ ID NO: 37731 - protein, 468 aa, Rhodobacter sphaeroides 2.4.1
MTATMTDQPSPSGSTLSEAETFLAAHPEIEAFDIVLHDANGIGRGKIIRRHELLSFYKGGRHLPISILGLDICGEDVHETGLIWDQGDGDLRAWPIPGTLVPLHGTTPPRGEVFMCMYDLDGRPMSSDPRHALARQVEALAELGLHPSAAFELEFFLLANERGPDGRVQPAADVLDGRRSAKTEVYSVDHLHGMMPLFSDIYAGAETAGIKAETMISEYAPGQYELTLHYRTDVLQAADDLMRLKRIVRAQARRHGVTACFMAKPVESYAGSGMHLHVSLCDAEGRNIFVEETEGQWSRPILHALGGLRETMGESMLVFAPHANSWRRFASQSYAPVSPSWGVNNRSVALRIPAGDIRARRIEHRPAGVDANPYLVAATVLAGIRRGLEQQIDPGPETTGNGYEDPGDTQPIPTCWRSAIAAAEHSAFLREALGPDMHRTFTAIKAAEYARVARTIPDVDYDLYLHTV

SEQ ID NO: 37732 - DNA, 1347 bp, Burkholderia sp. 383
  CDS (1)..(1347): transl_table=11
atggctgacgtcgttcccgcgctggtcgatgaagtccgcgcattccggcaggcgcaccccgagatccgttatgtcgacctgatctgcctcgacctgcccggacatttctacggcaagcgctacccgatcgatgcgctcgaaaaggtggcggccggctcgctgctgaagctgccgcagaactgcatcctgctcggcacgcagggcgggctctacaagatcggcgactactgtttcaacgacggcgacccggacgccgtgcgccggctgatccccggcacgctgaagccggtgacctgggagaagcagccgctcggccagatgctgatcacgacggacggcaccgacgcgccggtcgagttcgagccgcgcgaggtgctcgcgcgcgtgctgaagcggctcgcgcggcgcggcatccggccggtcgtcgcgttcgagctcgagttctacctgttcgccgcgcagctcgaagacgggatgccgaagtatccgcgcgaccgcctgtccgatgatcgcgacgatcagccgaacatgcatatcgagcggctgtcgcgcttctccgacgtgctgcacgaaatggtcgacgtcgcgtgcgtgcagggaatcgacgcgaccgtgatcaccgccgagctcgggccggggcagttcgaaatcaacttcggccattgcgacgacggactgcgcgcggccgactggtcggcgatgttctgccgcagcacgcgcggcgtcgcgttgcagcacggctatcgcgcgagcttcatgggcaagccgtacctgcatgcgccgggcagcgggatgcacgtgcacgtgagcctctacgacgatgcggggcgcaacctgctcgcggcggacgggcagcggccgctgcggcacgcggtggccggatgcctcgccctgctgccgcattgcatgccggtgttcgcgccgaatcacaacgcgttccggcgttacggttcgatggtgaacgcggcgagccgtgcgagctggggcttcgaggatcgcgatgcgtgcatccggattcctgaatcggatgcacgcaacctgcggatcgagcaccggctcgcgagtgcggacgcgaacccgtatctcgtgctcgcggcgattctcagcgggatggagcacgggctcgacgcgaagctcgagccgatcgcaccgctcaacgaggatcgcggcagcgggatcgatttcccgaaggagatgctgtcggcggtcgccgagatgcaggatcatgcggccgtgcgcgaagggctcggcagcgagttcgtgatggtgtattgcgagaacaagcggcaggaagagctggatttccgcaatgaaatcggggcgcgggagtatcggtggttcttgtga

SEQ ID NO: 37733 - protein, 448 aa, Burkholderia sp. 383
MADVVPALVDEVRAFRQAHPEIRYVDLICLDLPGHFYGKRYPIDALEKVAAGSLLKLPQNCILLGTQGGLYKIGDYCFNDGDPDAVRRLIPGTLKPVTWEKQPLGQMLITTDGTDAPVEFEPREVLARVLKRLARRGIRPVVAFELEFYLFAAQLEDGMPKYPRDRLSDDRDDQPNMHIERLSRFSDVLHEMVDVACVQGIDATVITAELGPGQFEINFGHCDDGLRAADWSAMFCRSTRGVALQHGYRASFMGKPYLHAPGSGMHVHVSLYDDAGRNLLAADGQRPLRHAVAGCLALLPHCMPVFAPNHNAFRRYGSMVNAASRASWGFEDRDACIRIPESDARNLRIEHRLASADANPYLVLAAILSGMEHGLDAKLEPIAPLNEDRGSGIDFPKEMLSAVAEMQDHAAVREGLGSEFVMVYCENKRQEELDFRNEIGAREYRWFL

SEQ ID NO: 37734 - DNA, 1365 bp, Rhodospirillum rubrum ATCC 11170
  CDS (1)..(1365): transl_table=11
atgacggttcttccccccgccgatggcggcgccttgttgcgcgaagaggtgcggcgtttccgcgaggcccatcccgatatcgcctatgtcgatctgctgtcgctggatctgcccgggcatttctatggcaagcgcctgccgatcgccatgctcgacgatatcgccgccggcgcgccgctcaagctgccgcaaaacgccattatcctcggtgccaccggcggcgtctatccgatcggccgctatgccttggaagacggcgatcccgatgcgccgcgccgtctggtcgccggcaccctggcccccgtgccctgggaaagccggccgaccgcccagatgctggtgacctccagcggcaccgatcacccggtgtgcttcgagccgcgcgaggttctgaacggcgtcgtcgaacggctgcgcgccaagggtctgttccccaccgtcgccttcgagctggaattctatctgctgtcccaagaccgccccgacggcctgatcgccccgccgcgcgacccgctgtcgggccgggccgatctgcatccggccatgcatatcgagcggctaagccgcttttcggacgtgctgcacgccatcatcgacgccgcccaggcccagggcatcgagacgacggcgatgagcgcggaagtcggcctggggcaatacgagatcaatttcgcccattgcgccgatccgctgcgcgccgccgactggtcggcgctgttttgccgagcaacgcgcggcgtggcgatgcgccatggctatcaggcgaccttcctgtccaagccctatctgcagagcgcgggcagcggcatgcatctgcatgtcagcctgtgcgacgagcgcggcgccaatctgctcgccccggagaacgcgctcggcctgaagcgcgccgtcgccggctgtctggccctgatgccggccagcgtcgccctgttctcggccaatcacaacgccttccgccgctcggccagcggcgcggtcaatacggcggccggtggctgctggggctgggacgatcgctcggcgggcatccgcatcccgccctcgggtccggcggctttgcgcctggaacaccgggtggccggggccgacgccaatccctatctggcgctggccgccatccttgccgggatggactacggccttgagtgcgcccttgatccccgccccacccgcgaggaggccccaagcgccagcgtcgccctgcccggcgatatgctcgaggccctgcgcacgatggacgccagcgccgaactccgcgcccgcctgggcgatgagttcgtcaccgtctacaccaccatgaagcgccaggatcatctggctttcctggggatgatcagtcctcgggaatacgactggtatttgtga

SEQ ID NO: 37735 - protein, 454 aa, Rhodospirillum rubrum ATCC 11170
MTVLPPADGGALLREEVRRFREAHPDIAYVDLLSLDLPGHFYGKRLPIAMLDDIAAGAPLKLPQNAIILGATGGVYPIGRYALEDGDPDAPRRLVAGTLAPVPWESRPTAQMLVTSSGTDHPVCFEPREVLNGVVERLRAKGLFPTVAFELEFYLLSQDRPDGLIAPPRDPLSGRADLHPAMHIERLSRFSDVLHAIIDAAQAQGIETTAMSAEVGLGQYEINFAHCADPLRAADWSALFCRATRGVAMRHGYQATFLSKPYLQSAGSGMHLHVSLCDERGANLLAPENALGLKRAVAGCLALMPASVALFSANHNAFRRSASGAVNTAAGGCWGWDDRSAGIRIPPSGPAALRLEHRVAGADANPYLALAAILAGMDYGLECALDPRPTREEAPSASVALPGDMLEALRTMDASAELRARLGDEFVTVYTTMKRQDHLAFLGMISPREYDWYL

SEQ ID NO: 37736 - DNA, 1371 bp, Burkholderia thailandensis E264; identical to SEQ ID NO: 32185
  CDS (1)..(1371): transl_table=11

SEQ ID NO: 37737 - protein, 456 aa, Burkholderia thailandensis E264; identical to SEQ ID NO: 32186

SEQ ID NO: 37738 - DNA, 1368 bp, Silicibacter sp. TM1040; identical to SEQ ID NO: 32191
  CDS (1)..(1368): transl_table=11

SEQ ID NO: 37739 - protein, 455 aa, Silicibacter sp. TM1040; identical to SEQ ID NO: 32192

SEQ ID NO: 37740 - DNA, 1350 bp, Myxococcus xanthus DK 1622; identical to SEQ ID NO: 32193
  CDS (1)..(1350): transl_table=11

SEQ ID NO: 37741 - protein, 449 aa, Myxococcus xanthus DK 1622; identical to SEQ ID NO: 32194

SEQ ID NO: 37742 - DNA, 1335 bp, Rubrobacter xylanophilus DSM 9941
  CDS (1)..(1335): transl_table=11
gtgatcgagcagagaagaccggcggtccttccgcccgagctctcggacggctccgtcacgtcggtgcgggtgctgtacgccgacctgcacggcgtggcgcgcggcaaggacgtgcccatcggcgagttcgagcgcgccgtcgagcacgggctggcgttctgctcggcgatcatgggcaccgacctgcggcacacccccgtggtgggcggggaggagggctacccggacctcgtggcctaccccgacctctcgaccatgacgctcgtgccctgggagcccggggtggcgtgctgcctcgccgacctgcggccggtcggggaccacgcgccgcccgccgaccccaggggggcggtgcgccgggcggtcgcggccttcgaggagctggggctctcgcccgtggtggggccggagctcgagttcttcctgtgcgagcgcgacccggcgggcggcgtgcgccgctacgtggacaacctcagcatggtctacaccgtggggccgcaggccgacccgcgggggatagtgcgcgagatcgcggagatgctctcggggatgggcctcggggccttcgccgccaaccacgagttcatgaactcgcagtacgagatcaatttgcaccacgcggacgccctcgccgccgccgaccgggccttccggctcaagtgcgcggtgaaggacgtggccgcgatgcgggggctcgtcgccaccttcatgggcaagccgttcaacgaccagggcggctcgggcttccacatccacttctcgctcgagcgcgggggcgagaacgccttcgccgggggcgaagaaggaggcgtcaccggcctcctgaggcacttcgtggcgggcgtgctcgagcacgcctccgggctcatggcgttcctcaacccgaccataaacgcctaccggcgcctggtgcccgactcgctcgcgccgacccacgccaactggggctgggacaaccgcaccgcgttcgtgcgcatcccgcccgagcgcggcggggccacgcgggtcgaggtgcgcgtgggcgacgggagcgccaacccgtacctggcgaccgcggcgaccctcttcgccgggctgcacggggtgcgcgagcggctgccgctcggcccgccggtggggggcgacgcctacgcgctcgcgggcgagaaggcggggccgccgctcccggccacgctcgaggaggcgctggacgcgctggaggccgacgaggtgctgcgcggggcgatgggggagcagatcgtgggcaccttcctcgcgctcaagaggtacgaggcagagcggcaccgcacgtgggtctcggactgggagatctccgagtacctgcaccacctgtag

SEQ ID NO: 37743 - protein, 444 aa, Rubrobacter xylanophilus DSM 9941
MIEQRRPAVLPPELSDGSVTSVRVLYADLHGVARGKDVPIGEFERAVEHGLAFCSAIMGTDLRHTPVVGGEEGYPDLVAYPDLSTMTLVPWEPGVACCLADLRPVGDHAPPADPRGAVRRAVAAFEELGLSPVVGPELEFFLCERDPAGGVRRYVDNLSMVYTVGPQADPRGIVREIAEMLSGMGLGAFAANHEFMNSQYEINLHHADALAAADRAFRLKCAVKDVAAMRGLVATFMGKPFNDQGGSGFHIHFSLERGGENAFAGGEEGGVTGLLRHFVAGVLEHASGLMAFLNPTINAYRRLVPDSLAPTHANWGWDNRTAFVRIPPERGGATRVEVRVGDGSANPYLATAATLFAGLHGVRERLPLGPPVGGDAYALAGEKAGPPLPATLEEALDALEADEVLRGAMGEQIVGTFLALKRYEAERHRTWVSDWEISEYLHHL

SEQ ID NO: 37744 - DNA, 1428 bp, Mesorhizobium sp. BNC1; identical to SEQ ID NO: 32195
  CDS (1)..(1428): transl_table=11

SEQ ID NO: 37745 - protein, 475 aa, Mesorhizobium sp. BNC1; identical to SEQ ID NO: 32196

SEQ ID NO: 37746 - DNA, 1359 bp, Cytophaga hutchinsonii ATCC 33406
  CDS (1)..(1359): transl_table=11
atgactgaaaaagaaatcgttgattatattaagaacaatgacattcaaaagataaaatttgcctttgcagatatagatggtgtcttacgcggcaaactcattcataccgataaatttttagatggtttaaaagaaggcctgggattttgtgatgttgtcttcggctgggatagtgcagatgctggctacgataatgtatccgctacaggctggcacacgggttaccccgataaacttgcgcagatagatctttctacattccgtttaattccctgggaaaacaatacaccgttcttcttagctgattataaaaacaacgaccagacagctttgcctatctgcccgcgtactttattaaaaaggatcgctcaggaatgctctgctatgggctaccatgcagcgtttgcacaggagtttgaatggtttaatttcagagaaacgcaacagtcgctcgttgaaaaaaactttcacgacctcactcctctaaccaacggcatgttcggctattcaatccttcgcccttcattagaagatgcctattacaatgacctgtttgatctgttaggtgcatttgatattccgctggaagggctgcatacagaaacaggtccgggtgtgtatgagtgtgcttacttccacgatgaagtagtacgcgctgctgataaagcaaccttactaaaaaccgctgtaaaagaaatcgccaataaacatggtatcattgctacgtttatggctaagatcagtgacaagcttccgggctgcagcggtcatatccaccagagcttatggaataccggtaaaacagaaaatttattttatgatccgaatcaggaacataacatgagtgacctgtttaaacactatgtagccggacaattatattgcctgccgcatattgttcccatgcttgcacctaccgtgaacagttacaaacgcctggtcgaaggtgcctgggcgcccacaaccctcacctggggttttgataaccgcacaactgccttgcgtgtattaaatcattcgaaaaaaactgcccgtctcgaacaacgtgtttccggatcagataccaatccgtatttagctatagcggcttcgcttgcatcgggtttatacggtattaagcataaactttcattagacgttccccctactacaggtaatggctatgccaacaaaagcaacggctctattgcatccaacttaatggatgcaacccaattaatgaaaaattcgtctatagcaaaagaattattcggagaggcgtttgttcagcattttactgctacacgtgaatgggaatggagacaattttccaaacacgtaagtgattgggaaatgaagcgctacatggaaattatttaa

SEQ ID NO: 37747 - protein, 452 aa, Cytophaga hutchinsonii ATCC 33406
MTEKEIVDYIKNNDIQKIKFAFADIDGVLRGKLIHTDKFLDGLKEGLGFCDVVFGWDSADAGYDNVSATGWHTGYPDKLAQIDLSTFRLIPWENNTPFFLADYKNNDQTALPICPRTLLKRIAQECSAMGYHAAFAQEFEWFNFRETQQSLVEKNFHDLTPLTNGMFGYSILRPSLEDAYYNDLFDLLGAFDIPLEGLHTETGPGVYECAYFHDEVVRAADKATLLKTAVKEIANKHGIIATFMAKISDKLPGCSGHIHQSLWNTGKTENLFYDPNQEHNMSDLFKHYVAGQLYCLPHIVPMLAPTVNSYKRLVEGAWAPTTLTWGFDNRTTALRVLNHSKKTARLEQRVSGSDTNPYLAIAASLASGLYGIKHKLSLDVPPTTGNGYANKSNGSIASNLMDATQLMKNSSIAKELFGEAFVQHFTATREWEWRQFSKHVSDWEMKRYMEII

SEQ ID NO: 37748 - DNA, 1356 bp, Trichodesmium erythraeum IMS101
  CDS (1)..(1356): transl_table=11
atgagcgataaaaaaccaaacctagaaaaagacattttcaaatatctcaaaaaaaaaggtacaaaatttgttcgtatcctcttttgtgacaatgctaacattatccgctccaaagcattccatattgaccaattaccagaacacttcgatacaggagttagcattacagtcgctcaacaagcatttacagttatgtctgatgtggtaatacctgaaacaggtctggctccggtgggagaagcttggttagttcctgactggtctaccctccatatattaccctatgctcctactcatgctagtgtagttagtgatatgtttaaagatggctccccttggtctttgtgtcctcgtagatttctcaaacaagcgatcgctactgcggaaaaagtaggtttacaaataaaagctgcttttgaaaatgaattctatctgttgaaatctacttctgatggtattgcccccacagataatacagtttttgcctctaccttcggaatggatattaaccgtctagtcattgatgacattgctgagtctctcattgctcaaaaaattcaagtggaaaagtattatccagagtcaggtcctggtcaacaggaaatttctatccgctataccgatgctttacaagctgctgatagacaaataagttttcgggaaacagtgcgaggagtagctctcaaatatggacttactgcttcttttctgccgaaaatttttgctaacaaagcaggtagcggttgccacttacatctaagtctctgggaaggagagcaaaatattgttcctgactcagatgaaatagggaaaatttccaaaactgctcgttgtttcattgctggtattctcaaacatttacctgctttaatggcactgacaactccgagtgttaattcttatcgtcgcattcgccctcatttttggagtggtgcttttcgtacttgggggttggataaccgggaagctgctgtgagggtgccgagtaattttgctcccccttctcctactcattttgaattgaaaactgttgatgcttctgctaatccttatttggctttgggtagtgttattgtagctggtttggatggtattaactgtggtcttgatgtgggagaacctgtgtcggttgaccctggtaatatgatgcaggcagaaagggaggcgcggggaatagatgctttgcctagttcgttggcagaggcgatcgctcatctgaataataatgatgtgctgaaaaatgctttggggtctgagttggctcaagcgtttattgctgttcggcaagctgagtgggaggaaatgaagaatatggaaatagaagaggaggttaaaattttgttgtctagatattga

SEQ ID NO: 37749 - protein, 451 aa, Trichodesmium erythraeum IMS101
MSDKKPNLEKDIFKYLKKKGTKFVRILFCDNANIIRSKAFHIDQLPEHFDTGVSITVAQQAFTVMSDVVIPETGLAPVGEAWLVPDWSTLHILPYAPTHASVVSDMFKDGSPWSLCPRRFLKQAIATAEKVGLQIKAAFENEFYLLKSTSDGIAPTDNTVFASTFGMDINRLVIDDIAESLIAQKIQVEKYYPESGPGQQEISIRYTDALQAADRQISFRETVRGVALKYGLTASFLPKIFANKAGSGCHLHLSLWEGEQNIVPDSDEIGKISKTARCFIAGILKHLPALMALTTPSVNSYRRIRPHFWSGAFRTWGLDNREAAVRVPSNFAPPSPTHFELKTVDASANPYLALGSVIVAGLDGINCGLDVGEPVSVDPGNMMQAEREARGIDALPSSLAEAIAHLNNNDVLKNALGSELAQAFIAVRQAEWEEMKNMEIEEEVKILLSRY

SEQ ID NO: 37750 - DNA, 1356 bp, Shewanella sp. MR-7; identical to SEQ ID NO: 32201
  CDS (1)..(1356): transl_table=11

SEQ ID NO: 37751 - protein, 451 aa, Shewanella sp. MR-7; identical to SEQ ID NO: 32202

SEQ ID NO: 37752 - DNA, 1383 bp, Rhizobium leguminosarum bv. viciae 3841
  CDS (1)..(1383): transl_table=11
ttggccttgtcccggaggattttcaaggtcatggcaagcgacaggatgcacggcaaggccgacaacggtgacccgcgtttcgaggtcctgatcgtcggcatgaacggcgacctgcgcggcaagcagcttccgcctggcaccgaagacaaggtctgggccggcgacatccgcctgccgacctcgacgcaatcgctcgacatctggggcgacgacaatgacgatatcaccgggctgtcgctgacgatcggcgatcccgacggcaaggtcatccccgaccggcgcagcctggcgccgatgccctgggcgcccgagggctcgatgcaggtgctcgcaaccatgcatgaattcgacggcagcccgagcttcatggatccgcgcgccatcctcgcctcggtggtcgagcgctatgcggcgcgcgggctgacgcccgtcgtcgccaccgaactggaattttacgtgatgtcgggtgactggcgcgagaccggacgcccctgcccgccggaaagcctgacctatcgcggcgaaccgaacggtttccagctctacgacatgagcgccgtcgacgcgctcgatggctatttgcagacgctgagggcctatgcgaaggcgcagaacctgccggcggatgcgacgacggcggagttcggtccgggccagttcgagttcaacctgctgcaccgcgcggatgcgctggcagccgcagacgattgcctctatctcaagcgcatcgccgaacaggcggcgcgccggcatgggctgaaatcgacctgcatggccaagccctattccgaacatgccggctccggcctgcatgtgcatgcgagcatcatcgacgggcaaggccgcaacattctcgatgccaagggcggcgaaccgaagctcatcaaatcggtgatatcaggcctgctcgataccatgcgcgcggcgcaactgatctttgctccctttgccaattcctaccgccgcttccagccgggctcgtttgcgcctgtggatctgacatggggcagcggccatcgcggcacggcgatccgcatccccgacaaggatggcccggccgcacgcatcgaacaccgcgtcgccggcgccgacgccaatccctatctgctgctggcagcgatcctcggcggcatgctcgccggtctcgatggcgaactcgaccccggcgaagagacgacgccctcgcacatacctgcgaatacgacgcgactgacgcatgatttcctcagcgccgtcgagaccttccgcacctcgccgttcatcgccgatatcttcggcgcgcgctatcaggcgctctacggcgacaccaagcgcaaggaagcgcttgcgcatctgcgcaccgtttcggatttcgactaccgcacctatctgccgcggctctga

SEQ ID NO: 37753 - protein, 460 aa, Rhizobium leguminosarum bv. viciae 3841
MALSRRIFKVMASDRMHGKADNGDPRFEVLIVGMNGDLRGKQLPPGTEDKVWAGDIRLPTSTQSLDIWGDDNDDITGLSLTIGDPDGKVIPDRRSLAPMPWAPEGSMQVLATMHEFDGSPSFMDPRAILASVVERYAARGLTPVVATELEFYVMSGDWRETGRPCPPESLTYRGEPNGFQLYDMSAVDALDGYLQTLRAYAKAQNLPADATTAEFGPGQFEFNLLHRADALAAADDCLYLKRIAEQAARRHGLKSTCMAKPYSEHAGSGLHVHASIIDGQGRNILDAKGGEPKLIKSVISGLLDTMRAAQLIFAPFANSYRRFQPGSFAPVDLTWGSGHRGTAIRIPDKDGPAARIEHRVAGADANPYLLLAAILGGMLAGLDGELDPGEETTPSHIPANTTRLTHDFLSAVETFRTSPFIADIFGARYQALYGDTKRKEALAHLRTVSDFDYRTYLPRL

SEQ ID NO: 37754 - DNA, 1377 bp, Pseudomonas aeruginosa UCBPP-PA14
  CDS (1)..(1377): transl_table=11
atgtcggtaccccagcgtgccgttcagctcactgaaccgagcgagttcctcaaggaacatcccgaggtccagttcgtcgacctccttattgcagacatgaatggcgtggttcgcggcaagcggatcgaacgcaacagtctgaacaaagtcttcgaaaaaggtatcaatctccccgcttccctgttcgccctcgatatcaccggctccaccgtagagagtaccggcctgggtctcgacatcggcgacgccgaccggatctgctacccgatccccggcaccctctccatggaaccctggcagaagcgcccgaccgcgcaactgctgatgaccatgcacgaactggaaggcgagccgttcttcgccgacccccgcgaagtcctgcgccaggtggtggccaggttcaccgagatggaactgaccatcgtcgccgcattcgagctggagttctacctgatcgaccaggagaacgtgaacggccggccgcagccgccacgctcgccgatctccggcaagcgtccgcagtcggtgcaggtgtactccatcgacgacctcgacgaatacgtcgagtgcctccaggacatcatcgacggcgcccgcgcccagggcatcccggccgacgccatcgtcgccgaatccgcaccggcgcagttcgaggtcaacctcaaccacgtcaacgacgccctcaaggcctgcgaccacgcggtgctgctcaagcgcctggtcaagaacatcgcctacgaccacgagatggacaccaccttcatggccaagccctatccgggccaggccgggaacggactgcacgtgcatatctcgctgctcgacaagcacggcaacaacatcttcaccagcgaggatcccgagcagaacgccgcattgcgccatgcgatcggcggtgtgctcgagaccctgccggcctccatggccttcctctgcccgaacgtcaactcctaccgccgcttcggttcgcagttctacgtgccgaacgcgccgagctggggcctggacaaccgcaccgtggccctgcgcgtgcccaccggcagcccggacgcggtacgcctggaacaccgcgtggccggcgccgacgccaacccctacctgctactggcagcggtgctggcaggcgttcatcacgggctgaccaacaaggtcgagccgggcgcgccgatcgaaggcaactcctacgagcagatggagccgagcctgccgaacaacctgcgcgacgccctgcgcgagctggacgaaagcgagatcatggcgaagtacatcgacccgaagtacatcgacatcttcgtcgcctgcaaggaaagcgagctggaggagttcgagcactcgatctccgacctcgagtacaactggtacctgcataccgtctga

SEQ ID NO: 37755 - protein, 458 aa, Pseudomonas aeruginosa UCBPP-PA14
MSVPQRAVQLTEPSEFLKEHPEVQFVDLLIADMNGVVRGKRIERNSLNKVFEKGINLPASLFALDITGSTVESTGLGLDIGDADRICYPIPGTLSMEPWQKRPTAQLLMTMHELEGEPFFADPREVLRQVVARFTEMELTIVAAFELEFYLIDQENVNGRPQPPRSPISGKRPQSVQVYSIDDLDEYVECLQDIIDGARAQGIPADAIVAESAPAQFEVNLNHVNDALKACDHAVLLKRLVKNIAYDHEMDTTFMAKPYPGQAGNGLHVHISLLDKHGNNIFTSEDPEQNAALRHAIGGVLETLPASMAFLCPNVNSYRRFGSQFYVPNAPSWGLDNRTVALRVPTGSPDAVRLEHRVAGADANPYLLLAAVLAGVHHGLTNKVEPGAPIEGNSYEQMEPSLPNNLRDALRELDESEIMAKYIDPKYIDIFVACKESELEEFEHSISDLEYNWYLHTV

SEQ ID NO: 37756 - DNA, 1401 bp, Mycobacterium sp. KMS
  CDS (1)..(1401): transl_table=11
atgatcgacgcacgcaccgcccccaccgcctcggaggtcctcgcccgactgcacgctgaggacatcgcgacggtgatcctcggcggcaccgacacccacggggtgatgcgcggcaagcgggtcccgatcagccagctgccccggatgctcgagcacgggatgccgatgtgcgacgtgttctgggtgatgcacgtcgacgaatccgacctcgtcgcacgccccgacggataccgcggatacttccccaccgaacggcagggctaccccgacatcctggccgtccccgacctgaccaccctgcggatcgtgccctggcacaacgacaccgcgctgttgctgtgtgactgggagctgccggccgaccaccggccggtgcccatcgcgccgcggtcggtgctgcgccgcgtcgtcgaacgtgccgacgcgatgggctaccagccgctgagcgcgctggagttggagttctatctgctgcgcgagaaggcgggcaccacgcaccgcaaacgggccgacgaactcgtcccgctgcaggaggcgcccagcacctacggcgtggtgatgggttcgctgcaggaggacatcggagcgctgatccggcgccacatgctcgactacggcctgcccgtcgaggcctgcaaccccgagacgggtcccgggcagttcgagatcacgctgcggtacggcaacagcctgaagtccgccgacgacgccttcctgttcaaatcggcggtcaaggaggtcgccgcccagaacgacctgctcgcgacgttcatggcgaaacccgtgaccgactgggcgggtaacagctgccacgtgcacctgagcctgcgcgacatcgccgggggcggggtcttcttcgaccaggacgcccccgatcagctctccaccgcgctgcgccacttcgccggcggaatcctgcacaccatgcgggaattcaccgcgctgatggcgccgacaccgaactcctaccgccgcttcgtgccgtactcgtgggccggcaccaccgccacctggggtgtcgacaaccgttcggtcggcttgcgcgtcattcgcgaaggcgaccacggcacccgcgtcgagcaccgtcagcccggtggtgacgccaacccgtatctggccaccgccgccgccctcgcgggcggactgcacggactgctcaacgagatcgaaccccgcgaactgtccacgaccgacatctacagccagccgagcgaggatctgccggtcctgcctgccaccctcgccgaggcggtggacctgctcgcggacagcgcggcggcacgagagtggttcggggacgacttcgtcgaccattacgtgctgatgaagcgcgcagagatcgcggcccagtcggtggcggtcaccgactgggaggtcgcccggtacctcgaggcgatgtaa

SEQ ID NO: 37757 - protein, 466 aa, Mycobacterium sp. KMS
MIDARTAPTASEVLARLHAEDIATVILGGTDTHGVMRGKRVPISQLPRMLEHGMPMCDVFWVMHVDESDLVARPDGYRGYFPTERQGYPDILAVPDLTTLRIVPWHNDTALLLCDWELPADHRPVPIAPRSVLRRVVERADAMGYQPLSALELEFYLLREKAGTTHRKRADELVPLQEAPSTYGVVMGSLQEDIGALIRRHMLDYGLPVEACNPETGPGQFEITLRYGNSLKSADDAFLFKSAVKEVAAQNDLLATFMAKPVTDWAGNSCHVHLSLRDIAGGGVFFDQDAPDQLSTALRHFAGGILHTMREFTALMAPTPNSYRRFVPYSWAGTTATWGVDNRSVGLRVIREGDHGTRVEHRQPGGDANPYLATAAALAGGLHGLLNEIEPRELSTTDIYSQPSEDLPVLPATLAEAVDLLADSAAAREWFGDDFVDHYVLMKRAEIAAQSVAVTDWEVARYLEAM

SEQ ID NO: 37758 - DNA, 1359 bp, Sulfitobacter sp. EE-36; identical to SEQ ID NO: 32217
  CDS (1)..(1359): transl_table=11

SEQ ID NO: 37759 - protein, 452 aa, Sulfitobacter sp. EE-36; identical to SEQ ID NO: 32218

SEQ ID NO: 37760 - DNA, 1359 bp, Roseovarius nubinhibens ISM; identical to SEQ ID NO: 32219
  CDS (1)..(1359): transl_table=11

SEQ ID NO: 37761 - protein, 452 aa, Roseovarius nubinhibens ISM; identical to SEQ ID NO: 32220

SEQ ID NO: 37762 - DNA, 1362 bp, Oceanicola batsensis HTCC2597; identical to SEQ ID NO: 32221
  CDS (1)..(1362): transl_table=11

SEQ ID NO: 37763 - protein, 453 aa, Oceanicola batsensis HTCC2597; identical to SEQ ID NO: 32222

SEQ ID NO: 37764 - DNA, 1338 bp, Oceanospirillum sp. MED92
  CDS (1)..(1338): transl_table=11
atgtcttctaataacgataaagaatttgatctgtttattaccgaccttaacggtaatcttcgcggcaaacgtatgcctgcgaatgctttaagcaaagtgatggaagagggggtaaaactacctcgctctgttatcggctttgatttctggggtgatgatgtactggacaacggtctggtatttgagactggcgacagtgatggcatctgcatgccagtacatgacgaagcggtacctgtaccttgggctgactccccacgtaaccagattctggcaactatgttcaaccccgatggtacgccttttagtgctgatcctcgtcaggcgctgaacgcggttgttgatcgttttaagaaactgggcctgacgccggttgttgcaaccgagcttgagttctacctgatggacggtaagtccgaagaaactcagcgcccacagccacctattctagtagaaggtcacggtcgccgtctggcggaaactgactgctactcgatcgatgagatggacggtctgtcttcattctttgctgaagtacgtgaagtgtgcgaacagcagggtgtgcctgctgacaccattatctctgagcttggccctggccagtttgagatcaaccttaaccatgtacctaacccgatgctggctggtgatcaggcgatcatgttcaagcgtctcgtacgcggtattgcacgcaagcacggatactccgcaacctttatggcgaagccttatgccaacaagagcggtaacggtttccacgtgcacttcagcttgctgaatgaagcaggtatcaatgtcttcgataatggtggagacgaaggtaccgatgtactgaagcatgcggttgcaggcctgatgaatactatggcggacagcatgctggcgttcgcgccgcatatgaactcttaccgccgctttatggtgggtgcgcacgcgccgacttgtgcaagctggggctatgaaaaccgcactgtagctattcgaattccagacagcccgccggttgcccgtcgtatcgaacatcgtgtagcgggggccgatgcgaacccttatctggtgttggcaacgattctggcgggtgctttatatggtatcgagaacaaactgatgccgcctgcgccgatcgctggtgatgcttataccgaagcaaaccaggatctgatcctgccaaataagtgggatgatgcgacagatatctttaatcgcagtgatgtgatgcgcgaatatctgggtgaagagtttgtacgggtctttaccgcagcgaaacgtcaggagctgcgtaaattacacgcgcagatctccgatatagaatacgaatcctacctcggatttttataa

SEQ ID NO: 37765 - protein, 445 aa, Oceanospirillum sp. MED92
MSSNNDKEFDLFITDLNGNLRGKRMPANALSKVMEEGVKLPRSVIGFDFWGDDVLDNGLVFETGDSDGICMPVHDEAVPVPWADSPRNQILATMFNPDGTPFSADPRQALNAVVDRFKKLGLTPVVATELEFYLMDGKSEETQRPQPPILVEGHGRRLAETDCYSIDEMDGLSSFFAEVREVCEQQGVPADTIISELGPGQFEINLNHVPNPMLAGDQAIMFKRLVRGIARKHGYSATFMAKPYANKSGNGFHVHFSLLNEAGINVFDNGGDEGTDVLKHAVAGLMNTMADSMLAFAPHMNSYRRFMVGAHAPTCASWGYENRTVAIRIPDSPPVARRIEHRVAGADANPYLVLATILAGALYGIENKLMPPAPIAGDAYTEANQDLILPNKWDDATDIFNRSDVMREYLGEEFVRVFTAAKRQELRKLHAQISDIEYESYLGFL

SEQ ID NO: 37766 - DNA, 1401 bp, Xanthobacter autotrophicus Py2
  CDS (1)..(1401): transl_table=11
atgcaggcccaggttccaggccgccgacccgaccctgccgcggccctcggggtcacggacgaggcggcggattatgtgacagccttcggcgtgccggaggtggtggaggttcttctgcccgacacctccgcggtgctgcggggcaagtggattcccggccattccctgggcaagatctggaaggacggcgtggccatcccgctctccatcttcggcctcgatgtctggggctgcgaggtggacgccaccgagatccacatggagaccggcgacaaggacggcctgtgctggccggtgccggggacgctgaagccggtgccctgggcgtcgcgccacaccgcgcaggtgctcatcaccatgcacgagcccgacggctcggcccgcggcaggccgtggaagctcgatccgcgccagcaactcgccgccgtggtggagcgcttcgccgcgcgcgggctcaccccctgcgtcgccttcgaactggaattctacctgctgaagccgtcggacgtgccgggcgcgccgcccgagccggtgttccaggccaccgggcaggcgcggcagaacatgtacgccatgtccgacctcgacgcctacgccgaggtcctgcacgacatgcgcgccgcgtgcgtcacgcagggcctgcccgccgataccgtgatcgcggaggcggcgcccggccagttcgaggtcaatctctaccacaaggtggatgcgctcggcgccgccgacgacgcggtgctgctgcgccggctgatcgacggcgtggcacgccgccatgggctgaaggccaccttcatggccaagccgctggcggatttcgccggcaacgggatgcatgtccatgccagcctgatggagcatggcggcggcaacctgttcgcccgcgaggacggggtgggcgacaccgccctgcgccatgccgcgggcggcatgctggccagcatggccgacgccacgctcattttcgtgccgagcttcaacggctatcgccggctagtgccgggcagctacgcgccgacctcggcgagctggggcttcgacaaccggctggtggcggtgcgcgtgcccaacggcccgcgccacgcccgccggctggagcaccgcatcgccggggcggaggctcacccccacctcgtgctcgcggccatcctcgccggcatgctggacgggctggagcggggcatcgagccgccgccgccgctggaaggcaacgcctacgagcagatcggcgagcccctgtcgccagatatggaggtggcggtggaccgcttcgccgcctccgacttcatcgcccgcaccttcggggaggactaccggcgcatctatgaggccatgaagcgggaggaattggctgcattccgcagggtcatccttccattggagtacgaaacgtatttgtga

SEQ ID NO: 37767 - protein, 466 aa, Xanthobacter autotrophicus Py2
MQAQVPGRRPDPAAALGVTDEAADYVTAFGVPEVVEVLLPDTSAVLRGKWIPGHSLGKIWKDGVAIPLSIFGLDVWGCEVDATEIHMETGDKDGLCWPVPGTLKPVPWASRHTAQVLITMHEPDGSARGRPWKLDPRQQLAAVVERFAARGLTPCVAFELEFYLLKPSDVPGAPPEPVFQATGQARQNMYAMSDLDAYAEVLHDMRAACVTQGLPADTVIAEAAPGQFEVNLYHKVDALGAADDAVLLRRLIDGVARRHGLKATFMAKPLADFAGNGMHVHASLMEHGGGNLFAREDGVGDTALRHAAGGMLASMADATLIFVPSFNGYRRLVPGSYAPTSASWGFDNRLVAVRVPNGPRHARRLEHRIAGAEAHPHLVLAAILAGMLDGLERGIEPPPPLEGNAYEQIGEPLSPDMEVAVDRFAASDFIARTFGEDYRRIYEAMKREELAAFRRVILPLEYETYL

SEQ ID NO: 37768 - DNA, 1395 bp, gamma proteobacterium HTCC2207
  CDS (1)..(1395): transl_table=11
ttgattaacacaaccgccggaaaaatagagctcaatatgaaatccatcgatgcgctaacgcagtttttacagacccatcccgatgtcgagactttcgaggttattcttcacgatctaaacggtatccaccgtggcaaatggctgcctcgggagcagattgataagctctttgagggcggctataaaatgccgcagagtacatgctcactggactgctggggccgcgatctcgaacagttggtagcggcaaccggcgatacagacggcatatgcacgcctcacccagaaactctggcagtggtgccctgggctagtagacccacagcgcagattattgtctctatgcttagtcccgatggtcagtcagactatcccgccgatcccagagtcgtcctacaacaggttttagcgcgctatacaaagctcggcttaaccccagtggtggccagcgagatggaattccatctgctggaaatcgaccgcgaccaatttggccgtccccagcatactcagcgcgccctcgacggatcgccagcactgggaggggctacctatggtatcgaggctatgcgcaaaatagccccgttgatggatgccattaacagtaccgcagggcaacagaatttaccggtagatactttaattagtgagtttggcgcctctcagtgcgagattaatttacattatcaggactgcgctctgcgcgcttgtgatcaggccagtatgttacgcagagcgattcgcgctgtggctcatcagcagggtaagcaggccagctttatggccaagccctttgctgatgatgtgggcaatggcatgcatatccactttagtttgatcgacaacaaccgcaacaatgtctttgataatggcacccctgagggcagtgacctcttgcaccatgcagttgccggctgtctcgataatatggccgactctatggcgatctttgcaccgaatattaattcctgcagacgattggtgcccggctgttatgcgcccacagcgcccacctggggttatgaaaatcgcactacagcgctgcgtattcctgctgggaaaggtcatgctatgcgcatcgagcaccgggttgcaggtgctgatgccaatgtctatttaacggtggcggcaatgttggctgccgcgctccatggcattgagaaaaaactactgccgccagcggccatcgtaggtgatgctggagaattggccataaaagcagagcaacagctgccgcgcttctggggcgatgcattgcagcgttttgaacagtctgagtttgtagagggttatttgggcgaggcgtttcagacggtttatgcgcagagcaagcgcagtgaaaaagccgagtttgatagccgcgtgacgctgctggagtacgatgcctacctctga

SEQ ID NO: 37769 - protein, 464 aa, gamma proteobacterium HTCC2207
MINTTAGKIELNMKSIDALTQFLQTHPDVETFEVILHDLNGIHRGKWLPREQIDKLFEGGYKMPQSTCSLDCWGRDLEQLVAATGDTDGICTPHPETLAVVPWASRPTAQIIVSMLSPDGQSDYPADPRVVLQQVLARYTKLGLTPVVASEMEFHLLEIDRDQFGRPQHTQRALDGSPALGGATYGIEAMRKIAPLMDAINSTAGQQNLPVDTLISEFGASQCEINLHYQDCALRACDQASMLRRAIRAVAHQQGKQASFMAKPFADDVGNGMHIHFSLIDNNRNNVFDNGTPEGSDLLHHAVAGCLDNMADSMAIFAPNINSCRRLVPGCYAPTAPTWGYENRTTALRIPAGKGHAMRIEHRVAGADANVYLTVAAMLAAALHGIEKKLLPPAAIVGDAGELAIKAEQQLPRFWGDALQRFEQSEFVEGYLGEAFQTVYAQSKRSEKAEFDSRVTLLEYDAYL

SEQ ID NO: 37770 - DNA, 1365 bp, Oceanobacter sp. RED65
  CDS (1)..(1365): transl_table=11
atgaaatcacgttcagtattggataggtttttaaagcaacatcctgatgttgaaactattgaattacttgtcgcagatacatctggggtgttacgtggtaagcgagtggaaaaaagcttactgactaaagtgtttgagcaaggcttttatttacctggatcaatcatgtctttggatgcaactggcgccactgttgaagaagcgggactgggcgcaaaagttggcgataaagatcgtttgtgtaaaccaatacctgaaactttgagtattgtgccttggcatgatgccagggatcgagctcaggtcttatgcaccatgcatgaagatgatggttctgcgttttttgccgacccacgccaagtactaaagcgcgcagtagataaatttgaaaccctgggctacacaccaggtatcgcattggaattagaattttatttgatcgatcctgagcgtgacattaatggtcaaatccagccgcctttaattcccgggactaaccgtcgaatgacctcttgccaagtctatagtatcgacgaactggacgattatgacttttttattcgagatgttatagaagctgctgcgcaacaagggattcctgccgataccgttatcgcggaatatgcaccaggccagtttgaagtgaatctaaactacggcaacgatattttagcggctgccgataatgccattttattgaagcgcgtgattcatagtgtggcgaaaaaacatggcatgatggcatcattcatggcaaagccttacatccaagagagcggtaacgggctgcacattcatttgtccctgatggatgagcaaggtaacaatattttcgctgatgatgatcccacgcaaaatccctttatgcgccatgcggtggcgggtttattggacatggcagatgctactcaggctttcttatttcctaacatcaatagttatcgtcgattggatcccggcgcctatgcaccgaccagtaaaacatggggtaatgacaatcgtacggtagccattcgaattccttctggtggtaaagatgcgacgcgtttagagcatcgtattagtggagctgatgccaatccgtatttggctgttacgtctatattagccggtgttgtggagggtattaccaatgaactgacacccccagaggctgtagtaggagatgcttacgagcaagaccacgaacatattagtgacaacgcacgggatgcgctgcgcaatatggaaggggatgcgcgcatccaagagtggttcggaaaggattttgttcaggtttatagcatttgcaaatggcaagaaattcgattgtttgaacatcagataactgccaaggaatatgatttacttctgccgtacctttag

SEQ ID NO: 37771 - protein, 454 aa, Oceanobacter sp. RED65
MKSRSVLDRFLKQHPDVETIELLVADTSGVLRGKRVEKSLLTKVFEQGFYLPGSIMSLDATGATVEEAGLGAKVGDKDRLCKPIPETLSIVPWHDARDRAQVLCTMHEDDGSAFFADPRQVLKRAVDKFETLGYTPGIALELEFYLIDPERDINGQIQPPLIPGTNRRMTSCQVYSIDELDDYDFFIRDVIEAAAQQGIPADTVIAEYAPGQFEVNLNYGNDILAAADNAILLKRVIHSVAKKHGMMASFMAKPYIQESGNGLHIHLSLMDEQGNNIFADDDPTQNPFMRHAVAGLLDMADATQAFLFPNINSYRRLDPGAYAPTSKTWGNDNRTVAIRIPSGGKDATRLEHRISGADANPYLAVTSILAGVVEGITNELTPPEAVVGDAYEQDHEHISDNARDALRNMEGDARIQEWFGKDFVQVYSICKWQEIRLFEHQITAKEYDLLLPYL

SEQ ID NO: 37772 - DNA, 1344 bp, marine gamma proteobacterium HTCC2080
  CDS (1)..(1344): transl_table=11
gtgcaacgcgaagtcgaattattcttgaaggcctacccatctgtcgaaatgatagaggcgcttattacggactgtaatggggtcgctaggggtaagtggatacctcgaggaaaaatacaatctatcctagacgacggattgaagctgccaaaatccgcgttaggtctggatatttggggaagagatattcccgaattggcccatgccaacggtgatatcgatggttactgcatggctgtagaagattctttaaagcctgtgctcaccccccgtggtaccgatcagggacaactgatcatgactatggttgacgaaaccggcgccccttatatgggtgatcccaggcaaattcttgccaaagttttagaagggttttcagagcgaaacctcaagccctgcatggctgctgagctggagttctacctgctgccggatcctgggcgagacaagccactgagagaatccctcgacagcctagatactttgggcggcaatctttatgcgctcaacgagctcgaccaccacagtgaaatgctggatctgctgcgggaaacatttaaaacacaagatctcccttacgaggggattatcaaagaatctgccccagctcagtttgagatcaacatggcacacagcgacaatgtgatgctgatggcggatcaaatcataagaatgcagcgctgcattcgcagagtggccagccagtgtaatctgatcgctagcttcatgcccaaacctctagataacgaggctgggaatggtatgcacattcactgcagcgtattggaggaacggggtctcaatatctttaatgacggtaatgatgaaggcagccccctgctaaagcaggccatcgcaggatgcttagagttaatgcctgattccatgctaatttttgcacccagcttcaacgcctatcggcgttttcaagcgggcaatcatgctccaactgttccaacatggggttatgacaatcgcaccaccgcactgcgggttccttcgggcccccaagctgctttacgtatcgagcatcgtgtggccggtgccgatgcaaacccctatttagtgatggccgtgatgctcgctggcattttgcacgggttagaaaataaaatggagccccccgcagcgatcgagggcaacgcttgggacatgaagcacgatactccagacctcccatgcctaatgaacgtagccgtggagaaatttcttaactcaccactcatcgagaagtacctaagcgcagagttccagttgctttatgggaaaaccaaagagcaggaactgaatgaatttcaacgccgggtgaccgactttgaaattgaaagctatctacggggttaa

SEQ ID NO: 37773 - protein, 447 aa, marine gamma proteobacterium HTCC2080
MQREVELFLKAYPSVEMIEALITDCNGVARGKWIPRGKIQSILDDGLKLPKSALGLDIWGRDIPELAHANGDIDGYCMAVEDSLKPVLTPRGTDQGQLIMTMVDETGAPYMGDPRQILAKVLEGFSERNLKPCMAAELEFYLLPDPGRDKPLRESLDSLDTLGGNLYALNELDHHSEMLDLLRETFKTQDLPYEGIIKESAPAQFEINMAHSDNVMLMADQIIRMQRCIRRVASQCNLIASFMPKPLDNEAGNGMHIHCSVLEERGLNIFNDGNDEGSPLLKQAIAGCLELMPDSMLIFAPSFNAYRRFQAGNHAPTVPTWGYDNRTTALRVPSGPQAALRIEHRVAGADANPYLVMAVMLAGILHGLENKMEPPAAIEGNAWDMKHDTPDLPCLMNVAVEKFLNSPLIEKYLSAEFQLLYGKTKEQELNEFQRRVTDFEIESYLRG

SEQ ID NO: 37774 - DNA, 1359 bp, Pseudomonas putida GB-1; identical to SEQ ID NO: 32231
  CDS (1)..(1359): transl_table=11

SEQ ID NO: 37775 - protein, 452 aa, Pseudomonas putida GB-1; identical to SEQ ID NO: 32232

SEQ ID NO: 37776 - DNA, 1335 bp, Pseudomonas putida GB-1; identical to SEQ ID NO: 32233
  CDS (1)..(1335): transl_table=11

SEQ ID NO: 37777 - protein, 444 aa, Pseudomonas putida GB-1; identical to SEQ ID NO: 32234

SEQ ID NO: 37778 - DNA, 1383 bp, Pseudomonas putida GB-1; identical to SEQ ID NO: 32235
  CDS (1)..(1383): transl_table=11

SEQ ID NO: 37779 - protein, 460 aa, Pseudomonas putida GB-1; identical to SEQ ID NO: 32236

SEQ ID NO: 37780 - DNA, 1377 bp, Pseudomonas putida GB-1; identical to SEQ ID NO: 32237
  CDS (1)..(1377): transl_table=11

SEQ ID NO: 37781 - protein, 458 aa, Pseudomonas putida GB-1; identical to SEQ ID NO: 32238

SEQ ID NO: 37782 - DNA, 1359 bp, Pseudomonas putida GB-1; identical to SEQ ID NO: 32239
  CDS (1)..(1359): transl_table=11

SEQ ID NO: 37783 - protein, 452 aa, Pseudomonas putida GB-1; identical to SEQ ID NO: 32240

SEQ ID NO: 37784 - DNA, 1323 bp, Pseudomonas putida GB-1; identical to SEQ ID NO: 32241
  CDS (1)..(1323): transl_table=11

SEQ ID NO: 37785 - protein, 440 aa, Pseudomonas putida GB-1; identical to SEQ ID NO: 32242

SEQ ID NO: 37786 - DNA, 1347 bp, Pseudomonas putida GB-1; identical to SEQ ID NO: 32245
  CDS (1)..(1347): transl_table=11

SEQ ID NO: 37787 - protein, 448 aa, Pseudomonas putida GB-1; identical to SEQ ID NO: 32246

SEQ ID NO: 37788 - DNA, 1350 bp, Marinobacter sp. ELB17; identical to SEQ ID NO: 32247
  CDS (1)..(1350): transl_table=11

SEQ ID NO: 37789 - protein, 449 aa, Marinobacter sp. ELB17; identical to SEQ ID NO: 32248

SEQ ID NO: 37790 - DNA, 1308 bp, Rhizobium meliloti; identical to SEQ ID NO: 32281
  CDS (1)..(1308): transl_table=11

SEQ ID NO: 37791 - protein, 435 aa, Rhizobium meliloti; identical to SEQ ID NO: 32282

SEQ ID NO: 37792 - DNA, 1335 bp, Bacillus cereus; identical to SEQ ID NO: 32283
  CDS (1)..(1335): transl_table=11

SEQ ID NO: 37793 - protein, 444 aa, Bacillus cereus; identical to SEQ ID NO: 32284

SEQ ID NO: 37794 - DNA, 1335 bp, Bacillus subtilis; identical to SEQ ID NO: 32285
  CDS (1)..(1335): transl_table=11

SEQ ID NO: 37795 - protein, 444 aa, Bacillus subtilis; identical to SEQ ID NO: 32286

SEQ ID NO: 37796 - DNA, 1320 bp, Thermotoga maritima
  CDS (1)..(1320): transl_table=11
atgacaattgagaccatcaaaagaatcatcgaagaggagaatgttcgattcatcaggctgcaattcaccgacatcaacgggaccttgaagaatttagagataacgccggatgtttttctcgaatcctgggaggacggaatcatgttcgacggttcatccatcgagggttttgtgagaatcgaagagtctgatatgtacctcaagcccgtcctcgacaccttcgccgttcttccgtggacggtcgatggtgcaaagagtgcaagagtcatctgtgacgtttacactccagatggtaaaccctttgagggagatccccgttacagactaagaagaatgatggaaaaagcagaacagctgggttacacaccgtatgcgggtcccgagatggaatttttcatccttcccatcaacgaaaaaggagaacctgttcctgagtttcttgaccatggaggatatttcgatcttctgccgctcagtaaagtcgaggagatcagaagggacatcgcgatagctctcgaaaagatggggatcactgttgaagcaacgcaccacgaagttgctccctcacagcacgaggtggacttcaggtacgacactttcctgagaaccgccgacaatgcccagaccgtgaaactcgtcatcaaaaccatggcaatcttccacggatatcatgcaaccttcatgcccaaacccttctacggtgtgaacggatcgggaatgcatgtccacatgagtcttttcaggggtgacaaaaatgccttctacgatcccgacgatcctcttgggctttctaaagaactcagatacttcgttggtggtatattgaagcacgccaaagctctcgcagccgtcacaaatcccacgataaacagctacaagagactcgttcccggttacgaagcgcccgtttacatctcctggtcagttggaaacagaagcgccctcatcagaattccaaaggcaagaggaaaagcgacaagattggagtacagatcacccgatccatcctgtaacatctatcttgccttcgcggctatcctcgcggcaggtctggacggtatcatcaacaaaatcgagcctcccgcgccggttgaagaaaacatttaccacatgacgtctgagagaagggaagaactcaacatagaatcgcttccaggatcactgaaagaggctgtcgaagaactcaagaaagacgatgttataatagatgcactgggagaacatatattcgaaaaatttgtggaggctgccgaaaaggattggaaggaattcagcacctacgttacaaactgggaactgcagcgctacttgtatctctga

SEQ ID NO: 37797 - protein, 439 aa, Thermotoga maritima
MTIETIKRIIEEENVRFIRLQFTDINGTLKNLEITPDVFLESWEDGIMFDGSSIEGFVRIEESDMYLKPVLDTFAVLPWTVDGAKSARVICDVYTPDGKPFEGDPRYRLRRMMEKAEQLGYTPYAGPEMEFFILPINEKGEPVPEFLDHGGYFDLLPLSKVEEIRRDIAIALEKMGITVEATHHEVAPSQHEVDFRYDTFLRTADNAQTVKLVIKTMAIFHGYHATFMPKPFYGVNGSGMHVHMSLFRGDKNAFYDPDDPLGLSKELRYFVGGILKHAKALAAVTNPTINSYKRLVPGYEAPVYISWSVGNRSALIRIPKARGKATRLEYRSPDPSCNIYLAFAAILAAGLDGIINKIEPPAPVEENIYHMTSERREELNIESLPGSLKEAVEELKKDDVIIDALGEHIFEKFVEAAEKDWKEFSTYVTNWELQRYLYL

SEQ ID NO: 37798 - DNA, 1419 bp, Escherichia coli; identical to SEQ ID NO: 32297
  CDS (1)..(1419): transl_table=11

SEQ ID NO: 37799 - protein, 472 aa, Escherichia coli; identical to SEQ ID NO: 32298

SEQ ID NO: 37800 - DNA, 25 bp, Artificial sequence
  primer
atgcatacagattcgaatggtggtc

SEQ ID NO: 37801 - DNA, 24 bp, Artificial sequence
  primer
ttacgcgtttttcaacatccactc

SEQ ID NO: 37802 - protein, 461 aa, Artificial sequence
  consensus sequence
  Variant (2)..(3): Xaa in position 2 to 3 is any amino acid
  Variant (5)..(6): Xaa in position 5 to 6 is any amino acid
  Variant (10)..(40): Xaa in position 10 to 40 is any amino acid
  Variant (41)..(59): Xaa in position 41 to 59 is any or no amino acid
  Variant (61)..(74): Xaa in position 61 to 74 is any amino acid
  Variant (76)..(89): Xaa in position 76 to 89 is any amino acid
  Variant (90)..(93): Xaa in position 90 to 93 is any or no amino acid
  Variant (95)..(99): Xaa in position 95 to 99 is any amino acid
  Variant (100)..(104): Xaa in position 100 to 104 is any or no amino acid
  Variant (107)..(108): Xaa in position 107 to 108 is any amino acid
  Variant (110)..(119): Xaa in position 110 to 119 is any amino acid
  Variant (121)..(125): Xaa in position 121 to 125 is any amino acid
  Variant (126)..(126): Xaa in position 126 is any or no amino acid
  Variant (128)..(128): Xaa in position 128 is any amino acid
  Variant (130)..(130): Xaa in position 130 is any amino acid
  Variant (133)..(133): Xaa in position 133 is any amino acid
  Variant (135)..(180): Xaa in position 135 to 180 is any amino acid
  Variant (181)..(195): Xaa in position 181 to 195 is any or no amino acid
  Variant (197)..(200): Xaa in position 197 to 200 is any amino acid
  Variant (202)..(202): Xaa in position 202 is any amino acid
  Variant (204)..(204): Xaa in position 204 is any amino acid
  Variant (206)..(215): Xaa in position 206 to 215 is any amino acid
  Variant (216)..(216): Xaa in position 216 is any or no amino acid
  Variant (218)..(222): Xaa in position 218 to 222 is any amino acid
  Variant (224)..(229): Xaa in position 224 to 229 is any amino acid
  Variant (231)..(232): Xaa in position 231 to 232 is any amino acid
  Variant (234)..(236): Xaa in position 234 to 236 is any amino acid
  Variant (238)..(238): Xaa in position 238 is any amino acid
  Variant (241)..(241): Xaa in position 241 is any amino acid
  Variant (244)..(248): Xaa in position 244 to 248 is any amino acid
  Variant (250)..(252): Xaa in position 250 to 252 is any amino acid
  Variant (254)..(254): Xaa in position 254 is any amino acid
  Variant (256)..(256): Xaa in position 256 is any amino acid
  Variant (258)..(263): Xaa in position 258 to 263 is any amino acid
  Variant (264)..(265): Xaa in position 264 to 265 is any or no amino acid
  Variant (267)..(281): Xaa in position 267 to 281 is any amino acid
  Variant (282)..(288): Xaa in position 282 to 288 is any or no amino acid
  Variant (290)..(302): Xaa in position 290 to 302 is any amino acid
  Variant (304)..(305): Xaa in position 304 to 305 is any amino acid
  Variant (311)..(317): Xaa in position 311 to 317 is any amino acid
  Variant (318)..(323): Xaa in position 318 to 323 is any or no amino acid
  Variant (325)..(328): Xaa in position 325 to 328 is any amino acid
  Variant (331)..(332): Xaa in position 331 to 332 is any amino acid
  Variant (335)..(338): Xaa in position 335 to 338 is any amino acid
  Variant (340)..(340): Xaa in position 340 is any amino acid
  Variant (342)..(343): Xaa in position 342 to 343 is any amino acid
  Variant (344)..(350): Xaa in position 344 to 350 is any or no amino acid
  Variant (352)..(352): Xaa in position 352 is any amino acid
  Variant (354)..(354): Xaa in position 354 is any amino acid
  Variant (356)..(359): Xaa in position 356 to 359 is any amino acid
  Variant (361)..(361): Xaa in position 361 is any amino acid
  Variant (366)..(367): Xaa in position 366 to 367 is any amino acid
  Variant (369)..(370): Xaa in position 369 to 370 is any amino acid
  Variant (372)..(376): Xaa in position 372 to 376 is any amino acid
  Variant (378)..(396): Xaa in position 378 to 396 is any amino acid
  Variant (397)..(408): Xaa in position 397 to 408 is any or no amino acid
  Variant (410)..(414): Xaa in position 410 to 414 is any amino acid
  Variant (416)..(439): Xaa in position 416 to 439 is any amino acid
  Variant (440)..(440): Xaa in position 440 is any or no amino acid
  Variant (442)..(443): Xaa in position 442 to 443 is any amino acid
  Variant (445)..(455): Xaa in position 445 to 455 is any amino acid
  Variant (457)..(460): Xaa in position 457 to 460 is any amino acid
DXXGXXRGKXXXXXXXXXXXXXXXXXXXXXXXXXXXXXXXXXXXXXXXXXXXXXXXXXXDXXXXXXXXXXXXXXWXXXXXXXXXXXXXXXXXXGXXXXXXXXXXPRXXLXXXXXXXXXXGXXXXXXAXEXEFXLXXXXXXXXXXXXXXXXXXXXXXXXXXXXXXXXXXXXXXXXXXXXXXXXXXXXXXXXXXXXXEXXXXQXEXNXXXXXXXXXXXDXXXXXKXXXXXXAXXHXXXAXFMXKPXXXXXGXXXHXHXSXXXXXXXXNXXXXXXXXXXXXXXXXXXXXXXGXXXXXXXXXXXXXPXXNSYRRXXXXXXXXXXXXXPXXXXWGXXNRXXXXRXPXXXXXXXXXRXEXRXXXXDXNPYLXXAXXLXXXXXGXXXXXXXXXXXXXXXXXXXXXXXXXXXXXXXPXXXXXAXXXXXXXXXXXXXXXXXXXXXXXXXKXXEXXXXXXXXXXXEXXXXL

SEQ ID NO: 37803 - protein, 42 aa, Artificial sequence
  protein pattern
  Variant (2)..(6): Xaa in position 2 to 6 is any amino acid
  Variant (7)..(7): Xaa in position 7 is any or no amino acid
  Variant (9)..(13): Xaa in position 9 to 13 is any amino acid
  Variant (14)..(14): Xaa in position 14 is any or no amino acid
  Variant (16)..(21): Xaa in position 16 to 21 is any amino acid
  Variant (22)..(22): Xaa in position 22 is Ala, Cys, Ser or Thr
  Variant (23)..(23): Xaa in position 23 is Cys, Ser or Thr
  Variant (24)..(24): Xaa in position 24 is any amino acid
  Variant (25)..(25): Xaa in position 25 is Leu or Met
  Variant (26)..(26): Xaa in position 26 is Ala, Gly, Pro or Ser
  Variant (28)..(28): Xaa in position 28 is Ile or Pro
  Variant (29)..(33): Xaa in position 29 to 33 is any amino acid
  Variant (35)..(35): Xaa in position 35 is Asn, Ser or Thr
  Variant (36)..(36): Xaa in position 36 is Ala or Gly
  Variant (37)..(37): Xaa in position 37 is any amino acid
  Variant (39)..(39): Xaa in position 39 is any amino acid
  Variant (41)..(41): Xaa in position 41 is any amino acid
DXXXXXXRXXXXXXAXXXXXXXXXXXKXXXXXXGXXXHXHXS

SEQ ID NO: 37804 - protein, 18 aa, Artificial sequence
  protein pattern
  Variant (2)..(2): Xaa in position 2 is Phe, Ile, Leu or Val
  Variant (4)..(4): Xaa in position 4 is any amino acid
  Variant (5)..(5): Xaa in position 5 is His or Arg
  Variant (6)..(6): Xaa in position 6 is any amino acid
  Variant (7)..(7): Xaa in position 7 is Ala, Gly, Pro or Ser
  Variant (8)..(8): Xaa in position 8 is Asp, Gly or Ser
  Variant (9)..(9): Xaa in position 9 is any amino acid
  Variant (10)..(10): Xaa in position 10 is Ala, Asp, Gly or Ser
  Variant (11)..(11): Xaa in position 11 is Ala, Cys, Thr or Val
  Variant (16)..(17): Xaa in position 16 to 17 is any amino acid
RXEXXXXXXXXNPYLXXA

SEQ ID NO: 37805 - protein, 18 aa, Artificial sequence
  protein pattern
  Variant (2)..(5): Xaa in position 2 to 5 is any amino acid
  Variant (6)..(6): Xaa in position 6 is Trp or Tyr
  Variant (7)..(7): Xaa in position 7 is Ala, Gly, Ser or Thr
  Variant (8)..(8): Xaa in position 8 is any amino acid
  Variant (9)..(9): Xaa in position 9 is Asp, Glu, Gly, Asn or Gln
  Variant (12)..(14): Xaa in position 12 to 14 is any amino acid
  Variant (15)..(15): Xaa in position 15 is Phe, Ile, Leu or Val
  Variant (17)..(17): Xaa in position 17 is Ile or Val
PXXXXXXXXNRXXXXRXP

SEQ ID NO: 37806 - protein, 14 aa, Artificial sequence
  protein pattern
  Variant (2)..(3): Xaa in position 2 to 3 is any amino acid
  Variant (4)..(4): Xaa in position 4 is Ile or Pro
  Variant (5)..(6): Xaa in position 5 to 6 is any amino acid
  Variant (7)..(7): Xaa in position 7 is Ala, Gly or Ser
  Variant (8)..(8): Xaa in position 8 is any amino acid
  Variant (10)..(10): Xaa in position 10 is any amino acid
  Variant (13)..(13): Xaa in position 13 is Phe, His or Tyr
  Variant (14)..(14): Xaa in position 14 is Ile, Leu or Val
GXXXXXXXEXEFXX

SEQ ID NO: 37807 - DNA, 1488 bp, Escherichia coli
  CDS (1)..(1488): transl_table=11
atgaattttcatcatctggcttactggcaggataaagcgttaagtctcgccattgaaaaccgcttatttattaacggtgaatatactgctgcggcggaaaatgaaacctttgaaaccgttgatccggtcacccaggcaccgctggcgaaaattgcccgcggcaagagcgtcgatatcgaccgtgcgatgagcgcagcacgcggcgtatttgaacgcggcgactggtcactctcttctccggctaaacgtaaagcggtactgaataaactcgccgatttaatggaagcccacgccgaagagctggcactgctggaaactctcgacaccggcaaaccgattcgtcacagtctgcgtgatgatattcccggcgcggcgcgcgccattcgctggtacgccgaagcgatcgacaaagtgtatggcgaagtggcgaccaccagtagccatgagctggcgatgatcgtgcgtgaaccggtcggcgtgattgccgccatcgtgccgtggaacttcccgctgttgctgacttgctggaaactcggcccggcgctggcggcgggaaacagcgtgattctaaaaccgtctgaaaaatcaccgctcagtgcgattcgtctcgcggggctggcgaaagaagcaggcttgccggatggtgtgttgaacgtggtgacgggttttggtcatgaagccgggcaggcgctgtcgcgtcataacgatatcgacgccattgcctttaccggttcaacccgtaccgggaaacagctgctgaaagatgcgggcgacagcaacatgaaacgcgtctggctggaagcgggcggcaaaagcgccaacatcgttttcgctgactgcccggatttgcaacaggcggcaagcgccaccgcagcaggcattttctacaaccagggacaggtgtgcatcgccggaacgcgcctgttgctggaagagagcatcgccgatgaattcttagccctgttaaaacagcaggcgcaaaactggcagccgggccatccacttgatcccgcaaccaccatgggcaccttaatcgactgcgcccacgccgactcggtccatagctttattcgggaaggcgaaagcaaagggcaactgttgttggatggccgtaacgccgggctggctgccgccatcggcccgaccatctttgtggatgtggacccgaatgcgtccttaagtcgcgaagagattttcggtccggtgctggtggtcacgcgtttcacatcagaagaacaggcgctacagcttgccaacgacagccagtacggccttggcgcggcggtatggacgcgcgacctctcccgcgcgcaccgcatgagccgacgcctgaaagccggttccgtcttcgtcaataactacaacgacggcgatatgaccgtgccgtttggcggctataagcagagcggcaacggtcgcgacaaatccctgcatgcccttgaaaaattcactgaactgaaaaccatctggataagcctggaggcctaa

SEQ ID NO: 37808 - protein, 495 aa, Escherichia coli
MNFHHLAYWQDKALSLAIENRLFINGEYTAAAENETFETVDPVTQAPLAKIARGKSVDIDRAMSAARGVFERGDWSLSSPAKRKAVLNKLADLMEAHAEELALLETLDTGKPIRHSLRDDIPGAARAIRWYAEAIDKVYGEVATTSSHELAMIVREPVGVIAAIVPWNFPLLLTCWKLGPALAAGNSVILKPSEKSPLSAIRLAGLAKEAGLPDGVLNVVTGFGHEAGQALSRHNDIDAIAFTGSTRTGKQLLKDAGDSNMKRVWLEAGGKSANIVFADCPDLQQAASATAAGIFYNQGQVCIAGTRLLLEESIADEFLALLKQQAQNWQPGHPLDPATTMGTLIDCAHADSVHSFIREGESKGQLLLDGRNAGLAAAIGPTIFVDVDPNASLSREEIFGPVLVVTRFTSEEQALQLANDSQYGLGAAVWTRDLSRAHRMSRRLKAGSVFVNNYNDGDMTVPFGGYKQSGNGRDKSLHALEKFTELKTIWISLEA

SEQ ID NO: 37809 - DNA, 1729 bp, Oryza sativa
  CDS (72)..(1580)
acatctccaaacttccaatttctctctccacatctctctgtgtttcttttatttctcctctgctcgcggcgatggcggcggcgaacggcggcgacagcaaggggttcgaggtgccgaagctggagatcaagttcaccaagctcttcatcaatggccgcttcgtcgacgccgtctccggcaagacattcgaaacccgtgacccgcgcaccggcgaggtcatcgccaagatcgccgaaggagacaaggccgacatcgacctcgccgtgaaggccgccagggaggccttcgaccatggcccctggccaagaatgtccggctttgcgaggggaaggatcctgcacaagttcgcggacctggtggagcagcacgtggaggagctggcggcgctggacacggtggacgccggcaagctgttcgcgatggggaagctcgtcgacatccccggcggcgcgaacctgctccggtactacgccggcgcggcggacaaggtgcacggcgagacgctcaagatggcgcggccgtgccacgggtacacgctcaaggagcccgtcggcgtcgtcggccacatcgtgccgtggaactaccccaccaccatgttcttcttcaaggccagcccggcgctcgccgccggctgcaccatggtcgtcaagcccgccgagcagacccccctctccgcgctcttctacgcccacctcgccaagcttgccggcgtccccgacggcgtgctcaacgtcgtccccggcttcggccccaccgccggcgccgctatctcctcccacatggacattgacaaggtgagcttcaccggctcgacggaggtcggccggctggtgatggaggcggcggcgaagagcaacctgaagcccgtctcgctcgagctgggtggcaagtctccggtcatcgtgttcgacgacgccgacctcgacacggccgtgaacctggtccacatggcctcctacaccaacaagggtgagatctgcgtcgccggctcgcgaatctatgtccaggaggggatctacgatgcgttcgtgaagaaggcgaccgagatggccaagaaatcggtggtcggagatccgttcaacccgcgagttcatcaaggccctcagattgacaaggagcaatacgagaagatcctcaagtacatcgacatcggtaagcgcgaaggcgcgacgttggtcaccggagggaagccctgcggcgaaaacgggtactacatcgagcccaccatcttcacggacgtcaaggaagaaatgtcgatcgcgcaagaggaaaccttcgggccggtgatggccctcatgaaattcaagacggttgaggaggcgatccagaaggcgaacagcacccggtacggcctggctgccggcatagtcaccaagaacatcgacgtcgcgaacacggtttcgcggtcgatccgggcaggggcaatctggatcaattgctacctcggcttcgaccccgacgtgccgttcggggggtacaagatgagcggcttcggcaaggacatgggcatggacgcccttgagaagtacctccacaccaaggcggtggtcacccctctctacaacaccccttggctatgatctgatgatgaacagcacagaaagattaattacagtggaaaaaaataacatttctatatatacagctgaaaggttgggttatatttgtggttagttgattgcttgtatcaaatatcaatttgtcggaataaagacagtatatttcagtt

SEQ ID NO: 37810 - protein, 502 aa, Oryza sativa
MAAANGGDSKGFEVPKLEIKFTKLFINGRFVDAVSGKTFETRDPRTGEVIAKIAEGDKADIDLAVKAAREAFDHGPWPRMSGFARGRILHKFADLVEQHVEELAALDTVDAGKLFAMGKLVDIPGGANLLRYYAGAADKVHGETLKMARPCHGYTLKEPVGVVGHIVPWNYPTTMFFFKASPALAAGCTMVVKPAEQTPLSALFYAHLAKLAGVPDGVLNVVPGFGPTAGAAISSHMDIDKVSFTGSTEVGRLVMEAAAKSNLKPVSLELGGKSPVIVFDDADLDTAVNLVHMASYTNKGEICVAGSRIYVQEGIYDAFVKKATEMAKKSVVGDPFNPRVHQGPQIDKEQYEKILKYIDIGKREGATLVTGGKPCGENGYYIEPTIFTDVKEEMSIAQEETFGPVMALMKFKTVEEAIQKANSTRYGLAAGIVTKNIDVANTVSRSIRAGAIWINCYLGFDPDVPFGGYKMSGFGKDMGMDALEKYLHTKAVVTPLYNTPWL

SEQ ID NO: 37811 - DNA, 1675 bp, Oryza sativa
  CDS (82)..(1575)
acgattcgatccgctgtttaccactcgatcgactcccgcatcccattctcgttatccttccatccacctgatatcgccaccatgccgactctcaaccttgacctgcctaacggcatcaagtccaccgtccaggccgagctgttcatcaacaacaagttcgtgcccgctctcgacggcaagaccttcgccaccgtcaacccgtccaacggcaaggagatcggccaggtcgccgaggcctccgccaaggatgtcgacgttgccgtcaaggccgcccgcgaggccttcgacaccgtctggggcgagaacacgcccggtgatgcgcgcggcaagctcctcatgaagcttgccgacctcgtcgaggagcacgtggacgagcttgctgccatcgagtcgctcgacaacggcaaggccttctccatcgccaagggcttcgacgtcgccgccgtcgccgccaacctgcgctactacggcggttgggccgacaagaaccacggtaaggtcatggaggtcgacaccaagcgtctcaactacacccgacacgagcccatcggcgtttgcggccagatcatcccttggaacttcccgctgctcatgttcgcatggaagctcggtcccgcgcttgctaccggtaacaccatcgtgctcaagaccgccgagcagacgccgctctcggcgctcaagatgtgcgagctcatcgtcgaggccggcttccctgccggtgtcgtcaacgtcgtctcgggcttcggtcccgtcgccggagctgccatctcgcagcacatggatatcgacaagatcgccttcaccagctccaccctggtcggccgcaacatcatgaaggccgcggcctcgaccaacctcaagaaggtcacgctcgagctcggcggcaagtcgcccaacatcgtcttcaaggacgccgacctggaccaggccgtgcgctggtctgcgttcggcatcatgttcaaccacggccagtgctgctgcgccggcccgcgcgtctacgtcgaggagtccatctacgaccagttcatggagaagatgaccgcctactgcaagggtctccaggtgggcgaccccttcgccgagaacaccttccagggtccccaggtctcgcagctccagtacgaccgcatcatggagtacatcgagtcgggcaagaaggacgccaacctccacctcggcggtgtgcgcaagggcaacgaaggctacttcatcgagcccaccatcttcaccgacgtgccccacggcgccaagatcgccaaggaggagatcttcggccccgtcgtcgtcgtgtccaagttcaaggacgagaaggacctcatccgcatcgccaacgactcgatctatggcctcgccgccgccgtcttcagccgcgacgtcagccgcgcgctcgagaccgcgcacaagctcaaggctggcaccgtgtgggtcaactgctacaacatgctcgtgccccaggtgcccttcggtggatacaaggcttcgggtattggccgagagcttggcgagtacgcgcttgccaactacaccaacatcaaggccgtgcacgtcaacctcaacatccccgctcccatctaagcgtggtcgaagcgcctgcccaggaaaaaaaaaaggtaaaaaacgtctcggttgtggtctttgtgtatgtctcgatgaatacaatgaatgccgtctcgtg

SEQ ID NO: 37812 - protein, 497 aa, Oryza sativa
MPTLNLDLPNGIKSTVQAELFINNKFVPALDGKTFATVNPSNGKEIGQVAEASAKDVDVAVKAAREAFDTVWGENTPGDARGKLLMKLADLVEEHVDELAAIESLDNGKAFSIAKGFDVAAVAANLRYYGGWADKNHGKVMEVDTKRLNYTRHEPIGVCGQIIPWNFPLLMFAWKLGPALATGNTIVLKTAEQTPLSALKMCELIVEAGFPAGVVNVVSGFGPVAGAAISQHMDIDKIAFTSSTLVGRNIMKAAASTNLKKVTLELGGKSPNIVFKDADLDQAVRWSAFGIMFNHGQCCCAGPRVYVEESIYDQFMEKMTAYCKGLQVGDPFAENTFQGPQVSQLQYDRIMEYIESGKKDANLHLGGVRKGNEGYFIEPTIFTDVPHGAKIAKEEIFGPVVVVSKFKDEKDLIRIANDSIYGLAAAVFSRDVSRALETAHKLKAGTVWVNCYNMLVPQVPFGGYKASGIGRELGEYALANYTNIKAVHVNLNIPAPI

SEQ ID NO: 37813 - DNA, 1642 bp, Oryza sativa
  CDS (49)..(1539)
attgctccctgtttgctactcccaacaaacaagacacatcacttcaatatgacttccgtccagcttgagacgccgcactccggcaagtacgggcagccgaccggcctgttcatcaacaacgagttcgtcaagggccaagaaggcaagaccttcgatgtcatcaacccctccgacgagagcgtgatcacccaggtccacgaggccaccgagaaggatgtcgacatcgccgtcgccgccgcccgcaaggccttcgagggctcatggagacaggagacacccgagaaccgtggcaagctgctcacaaacctcgccaacctgttcgagaagaacatcgaccttctcgctgccgtcgagtcgctcgacaacggcaaggccatctccatggccaaggtcgacatcagcatgtgcgttggctgcctcagatactacggtggttgggcagacaagattaccggcaaggtcatcgacactactcccgacactttcaactacgtcaagaaggagcccattggtgtgtgcggtcagatcattccctggaacttccccctcctcatgtgggcatggaagatcggcccggccattgcttgcggtaacactgtcgtcctgaagactgccgagcagacccctcttggtggtctcgtcgctgccagactggtcaaggaggctggtttccctcctggtgtcatcaacgtcatttccggtttcggtaaggtcgctggtgccgctctctcttcccacatggacgtcgacaaggttgccttcaccggttccaccgtcgtcggccgcacaatcctcaaggctgctgccgcttccaacttgaagaaggtcacccttgagctaggtggcaagtcacccaacattgtcttcgaggacgccgacattgacaacgccatctcatgggtcaacttcggtattttcttcaaccacggccagtgctgctgcgctggttcccgtgtgtacgtccaggagagcatctacgacaagtttgtccagaagtccaaggagcgcgcacagaagaacgtcgttggcgaccctttcgctgccgacaccttccagggtcctcaggtttccaaggtccaattcgaccgcatcatggagtacatccaggctggcaaggacgccggtgccaccattgagactggtggcaagcgcaagggtgacaagggctacttcatcgagcctacgatcttctccaatgtcacagaggacatgaagatcgtgaaagaggagatcttcggccccgtctgctcgatcgccaagttcaagaccaaggaggacgccatcaagctcggtaacgccagcacatacggtctcgccgccgccgtccacaccaagaacctcaacaccgccatcgaggtctccaacgccctccgggcgggtaccgtctgggtcaacacctacaacaccctccaccaccagatgcccttcggtggttacaaggaatccggtatcggccgtgagctcggcgaggatgcgttggccaactacactcagaccaagactgtcagcattcgtctcggtgacgctctcttcggttaagcgagttgagagatggactaatggcttgttgaagcggctggagatcgtttcgatgtaattacgtatgacgttatgaaatgaataacaatgtgtactgtacaag

SEQ ID NO: 37814 - protein, 496 aa, Oryza sativa
MTSVQLETPHSGKYGQPTGLFINNEFVKGQEGKTFDVINPSDESVITQVHEATEKDVDIAVAAARKAFEGSWRQETPENRGKLLTNLANLFEKNIDLLAAVESLDNGKAISMAKVDISMCVGCLRYYGGWADKITGKVIDTTPDTFNYVKKEPIGVCGQIIPWNFPLLMWAWKIGPAIACGNTVVLKTAEQTPLGGLVAARLVKEAGFPPGVINVISGFGKVAGAALSSHMDVDKVAFTGSTVVGRTILKAAAASNLKKVTLELGGKSPNIVFEDADIDNAISWVNFGIFFNHGQCCCAGSRVYVQESIYDKFVQKSKERAQKNVVGDPFAADTFQGPQVSKVQFDRIMEYIQAGKDAGATIETGGKRKGDKGYFIEPTIFSNVTEDMKIVKEEIFGPVCSIAKFKTKEDAIKLGNASTYGLAAAVHTKNLNTAIEVSNALRAGTVWVNTYNTLHHQMPFGGYKESGIGRELGEDALANYTQTKTVSIRLGDALFG

SEQ ID NO: 37815 - DNA, 1559 bp, Oryza sativa
  CDS (93)..(1529)
atatcacgtagttcggtcgtttccaaatccttgaaatcggtgctatagactgttcctcttcacacagccaaacacagtatcacatcggcatcatgtcaaaatttgagacgagattgtttgtcaatggagaattcatggaagcagaacatgccgagacattctcgctttcgaaccccgccactggagagaccgtagcagagattccaatcgctggcgaggttgacatcgacaatgctgtgaaggccgcagagcgtgctcagcctgcatggtcccgtgtgcctgcgcgcaggcgagcagcaatcatccgaaagttcgccgccttgatggaccagaacaagcacaagttgagcgagctcgactctatttgcatgggaaagcctcttcatgggggtcttgaggatatccaggaagcagttgatatctcgaactactttgcaggccttgtagaaattgccggcggagagacttcactcaactccccggaagtgctcagcatttctatgcgacaaccatatggtgtcgttgcttcgatcattccgtggaacttcccgtccatgatttggtgccacgatgttgtgcctgctgcaggtgcaggaaatgctgtcatactaaagacatccgaaaagtctcctctcagtggtatcttcctagcgaagcttgcgttcgaggctggatttcctgcagggatcatcaatgttgtgtctgggcctggaagcacaggtgctcttctatcatcacacatgaagattaggaggatcagtttcaccagatctacaggagctggccgtgctattatgcaagcagcggcgaagtcgaacctcaaagctgtatcgctggagctcggcggaaaatcgcccctcattgtgttcgatgacgcagatttggagaagactgccgctgctgccgtcggctccattactatcaactctggtcagatttgtaccgcgtcctctcgcctatatgttcagaagggcgtgtctgagaccttcaagctgaagctaaaacaaaagatggaagctcttaagcttggaaatccgctccagtctgggacggagatgggccctcaggcagacaaaaagcaggctgaggctatcgcaaagttccttgaaattggcaaccaggaaggtgtcgcattgaccggcggtaagccggcaaaagataagggcgataatttcattcagcccaccgtcttcactggtctttccgatagcagtaggctcaacatagacgaaatctttggaccagtcctcgtacttcacgagttcgaaaccgaagaagaggttattcgtcgtgccaatgccactgaatatggattgtatgcttccgttttctcaaagaacattgatactgcgcttcgcgttgcacgagcacttgaggcaggcaatgttggtgtcaacacaacttcacctttcggggcttacgaattggcgtttgggggctttaagggctccggagttgggcgccagaagggttcacgctcggtgcttgattggacggaagaaaagtctgtttacatcaaccatgaatagctttggtagacaatttgcagcatcagttcc

SEQ ID NO: 37816 - protein, 478 aa, Oryza sativa
MSKFETRLFVNGEFMEAEHAETFSLSNPATGETVAEIPIAGEVDIDNAVKAAERAQPAWSRVPARRRAAIIRKFAALMDQNKHKLSELDSICMGKPLHGGLEDIQEAVDISNYFAGLVEIAGGETSLNSPEVLSISMRQPYGVVASIIPWNFPSMIWCHDVVPAAGAGNAVILKTSEKSPLSGIFLAKLAFEAGFPAGIINVVSGPGSTGALLSSHMKIRRISFTRSTGAGRAIMQAAAKSNLKAVSLELGGKSPLIVFDDADLEKTAAAAVGSITINSGQICTASSRLYVQKGVSETFKLKLKQKMEALKLGNPLQSGTEMGPQADKKQAEAIAKFLEIGNQEGVALTGGKPAKDKGDNFIQPTVFTGLSDSSRLNIDEIFGPVLVLHEFETEEEVIRRANATEYGLYASVFSKNIDTALRVARALEAGNVGVNTTSPFGAYELAFGGFKGSGVGRQKGSRSVLDWTEEKSVYINHE

SEQ ID NO: 37817 - DNA, 1961 bp, Oryza sativa
  CDS (164)..(1687)
ggtccaagagatctactgttctccttgttgagaggaagccatccagccagctagctataagatagatagaagaagatcaagacgacgaccaagtagaggataggcatctctcgaagcttagagacaaataattaactagagatcaagagcctattcgtcgtccatggggagcaccggcgactgcggcaatggaaaggcggccgccggcggcggcgggttggtggtgccggagatcaagttcaccaagctcttcatcaacggcgagttcgtcgacgccgcctcgggcaagacattcaagacaagggacccacgaacaggcgatgtcctggcccacatcgcagaggcagacaaggctgatgtggacctcgccgtcaaggccgcgagagaggccttcgagcacggcaagtggccccgcatgtcaggctatgagaggagcagggtgatgaacaagctggccgacctggtggagcagcacgccgacgagctggcggcgctggacggcgccgacgccgggaagctgctgacgctgggcaagatcatcgacattcccgccgcggcgcagatgatgcggtactacgccggcgcggccgacaagatccacggcgagtcccttcgggtggccggcaagtaccaggggtacaccctcagggagcccatcggcgtcgtcggcgtcatcatcccctggaacttccccaccatgatgttcttcctcaaggtcagccccgccctcgccgccggctgcaccatcgtcgtcaagcccgccgagcagacgcccctctccgctctgtactacgctcacctcgccaagctggctggagttccggatggagtgatcaacgtcgtcccgggattcgggccgacagccggtgcggcactctcctcccacatggacgtcgacagtgttgctttcactggctctgctgaaatcggccgtgccatcatggagtcggcggcgcggagcaacctgaagaatgtgtctcttgagctcggcggcaagtctccgatgatagtcttcgacgacgccgatgtcgacatggctgtcagtctgtcatcccttgcagttttcttcaacaagggagagatttgcgtggccgggtcacgcgtctatgtccaagaagggatctacgatgagtttgtgaggaaggccgtggaggctgccaagaactggaaagttggagacccttttgatgctgccaccaatatgggtcctcaggttgacaaggtccaatttgagagggttctcaagtacattgagatcggcaagaacgagggagcaaccctactcacaggtggcaaacccactggtgacaaaggatactacattgagcctaccatatttgtggatgtcaaggaggaaatgacgattgcgcaagaggagatcttcggcccggtgatgtccctcatgaagttcaagacggtggaggaggcgatagagaaggccaactgcaccaagtacgggctggctgccggcattgtgaccaagaacctcaacattgccaacatggtgtcgaggtcagtgcgggccggcacggtgtgggtgaactgctacttcgccttcgaccccgacgcgccgttcggcgggtacaagatgagcgggttcggccgggaccaagggatggtcgccatggacaagtacctgcaggtcaagaccgtcatcaccgccgtcccggactcgccctggtactgataaatcaaatcaagcagcagctatagctagagtgtaccatgtaccatgaatgctgcagcctgtgtagtgttttcggatgtttttctccttaattctgctgctgcttggtgtggttgtatgtagtttggttgtggggtgagatatggtgcagattaaaaggggttctgatgatcatgatctgatccttgtttggttgaacttgttgagaaatggatgtatagaactcatgtgccatcgtttgaaatcgtacaaaatgtgcctcaaagttcaaagc

SEQ ID NO: 37818 - protein, 507 aa, Oryza sativa
MGSTGDCGNGKAAAGGGGLVVPEIKFTKLFINGEFVDAASGKTFKTRDPRTGDVLAHIAEADKADVDLAVKAAREAFEHGKWPRMSGYERSRVMNKLADLVEQHADELAALDGADAGKLLTLGKIIDIPAAAQMMRYYAGAADKIHGESLRVAGKYQGYTLREPIGVVGVIIPWNFPTMMFFLKVSPALAAGCTIVVKPAEQTPLSALYYAHLAKLAGVPDGVINVVPGFGPTAGAALSSHMDVDSVAFTGSAEIGRAIMESAARSNLKNVSLELGGKSPMIVFDDADVDMAVSLSSLAVFFNKGEICVAGSRVYVQEGIYDEFVRKAVEAAKNWKVGDPFDAATNMGPQVDKVQFERVLKYIEIGKNEGATLLTGGKPTGDKGYYIEPTIFVDVKEEMTIAQEEIFGPVMSLMKFKTVEEAIEKANCTKYGLAAGIVTKNLNIANMVSRSVRAGTVWVNCYFAFDPDAPFGGYKMSGFGRDQGMVAMDKYLQVKTVITAVPDSPWY

SEQ ID NO: 37819 - DNA, 2026 bp, Glycine max
  CDS (115)..(1737)
ccacgcgtccgattttttattctgacgcgtccgtacggctgcgagaagacgacagaagggggaggagaagaaaaagaagcagggaaaaactcgagcctattcggctctagggtcatggcaactcgaagactttcattgctcctctctcgctctctatcttccacttcttttcaagctgcttctctacttcactcactagggagaaactctggcaagtggggaaactttaacagattcagcactgcagcagcagttgaggatttaatcactccacaagttccaataacatacactaagcatctgataaatggacaatttgtggatgctgcttcagggaaaacttttccaacatatgacccacgcacaggagaagtgattgctcaagttgctgaaggtgatgcagaagatatcaaccgtgcagtatcggcagctcgcaaggcctttgatgaaggaccttggccaaaattgactgcttatgaaagatgcaagataatactgcgctttgctgatttggttgagaaacacggtgatgaacttgcagctctggagacatggaacaatggaaagccttatgaacagtctgccactgctgaattaccaacgtttgtgcgtttgtttcgttactatgctggttgggcagataaaatccatggtctgacagtgcctgctgatggaaattatcatgtggagacattgcatgaaccaattggtgttgcaggacaaatcataccttggaactttcctctcctcatgtttgcttggaaagttggaccagctcttgcatgtggaaatactgtcatccttaagactgctgaacaaacacctttaacagctctctatgtagcaaaactttttcatgaggctggtcttccaccaggtgttttgaatgtagtttctggctatggtccaactgctggtgcagctctagcaagtcatatggatgttgacaagctagcattcactggatctaccgagactggaaaagttgtgcttggattggctgcgcaaagcaatttgaagcctgtgacattggaacttggagggaaatcacctttcatagtgtgtgaggatgctgatgttgaccaggctgtagaacttgcgcactttgctttgttctttaatcaggggcaatgttgctgtgctgggtctcgtacctttgtacatgagcatatctatgatgagttcttggagaaagcaaaggctcgtgctttgaaacgtgttgttggggatcccttcaaaaagggtgtcgaacaaggacctcagattgatgtggaacaattccagaaggtccttaggtacataaagtccggtattgaaagcaaggccacccttgaatgtgggggtgaccaaattggctcaaagggcttctttgtccagcccactgtcttctcaaatgttcaggatgacatgttgatagcaaaagatgaaatatttggccctgtacaaaccatcttgaagttcaaggacatcgacgaagtaattcgaaggtcaaacgcaacgcactatggtctagctgcaggagttttcactaagaatgtgcacacagccaacactttgatgcgagcactgagggttggaacagtatggatcaattgctttgatgtttttgatgctgcaattccctttggagggtacaaaatgagcggcattggcagggagaagggtatctacagtctcaacaattacctgcaagtgaaagctgtggtttcaccagtgaagaaacctgcatggttgtgatttgtgaattgctcaaactgctatgaccgaaatcctacgtggctatcatctttttccgctgaggcaatggcatgcaataaataatgtgatgttactaagataaaacctgattaggtacctgaacattataccagttgaatttatgtatttttcacttgttaattgctcaaacacaaacttggatactgtaatgacactgttgctgtaggatataaattttgcaccattcacacttgtgtggattactgtcaaaaaaaaaaaaaaacaaaaaaaaaaaaaaaaaaaaaaa

SEQ ID NO: 37820 - protein, 540 aa, Glycine max
MATRRLSLLLSRSLSSTSFQAASLLHSLGRNSGKWGNFNRFSTAAAVEDLITPQVPITYTKHLINGQFVDAASGKTFPTYDPRTGEVIAQVAEGDAEDINRAVSAARKAFDEGPWPKLTAYERCKIILRFADLVEKHGDELAALETWNNGKPYEQSATAELPTFVRLFRYYAGWADKIHGLTVPADGNYHVETLHEPIGVAGQIIPWNFPLLMFAWKVGPALACGNTVILKTAEQTPLTALYVAKLFHEAGLPPGVLNVVSGYGPTAGAALASHMDVDKLAFTGSTETGKVVLGLAAQSNLKPVTLELGGKSPFIVCEDADVDQAVELAHFALFFNQGQCCCAGSRTFVHEHIYDEFLEKAKARALKRVVGDPFKKGVEQGPQIDVEQFQKVLRYIKSGIESKATLECGGDQIGSKGFFVQPTVFSNVQDDMLIAKDEIFGPVQTILKFKDIDEVIRRSNATHYGLAAGVFTKNVHTANTLMRALRVGTVWINCFDVFDAAIPFGGYKMSGIGREKGIYSLNNYLQVKAVVSPVKKPAWL

SEQ ID NO: 37821 - DNA, 1989 bp, Glycine max
  CDS (191)..(1813)
gctgtctaccttctcttccattcgggtgacacagtactgagatgcttactgggtaacactttattaagctcttaaaagaagggtggtaagaaaattaatttcacgaagatttgtatagttctagaaatctctgagggtaggattacaaagaaagggaagaaaaaaaaatcctcaacattaaagaatcttcatgcaggtcatggcctctagaattctttcaactctacattatgtgtgttcttcttctgcctcagccacaaaacgatgtttaggcctatatagtcattggcagagaagtataagtggaattgctgcgtctgttgttgctgatgtggagcctagcatagcaccagtgcaaattgatcaaagtcagcttctaattgatgggaaatttgttgatgcagcttctggaaaaacttttccaacttttgatcctaggactggagatgtaattgccaatgttgctgaaggagatgctgaagatgtaaatcgcgctgtccatgctgctcgcaaggcttttgatgagggaccatggccaaagatgacagcttatgaaagatcacgtataattttgcgctttgctgatttattggagaaacacaatgatgaagttgcagccatagaaacatgggatagtggcaagacttatgaacaggctgcaaatgttgaaatacccatggtagtacgattgttccgatattatgcaggttgggcggataaaattcacggtctaacagttccagctgatggaccataccatgtccaaactttgcatgaaccaattggtgtagcagggcagattgttccttggaatttcccacttcttattttttcatggaaggttgcacctgcattagcttgtggtaatacagttgtaatgaaaactgcagagcagacacccctttcagccctttatgtgtcaaagctatttcttgaggcaggacttcctcctggagttctgaatgttatctctggctttggtcctactgctggtgcagcactgtgtagtcatatggacgttgacaagcttgctttcacaggatccactagcactggtaaacgtgtacttgaactgtctgcacacagcaacctgaagccagtaactctggagctgggtggaaaatctccattcattgtgtgcaaggatgctgatgttgatgcagccgttgaggcttcacattttgctttattttttaatcaggggcaatgttgctgtgctggttctcgcacatttgtccatgaaagcatatatggtgaatttgttgaaaaggctaaagcccgtgctcttaaacgagtagttggagaccctttcaaaaatggggttgagcaaggtcctcagattgattctgtgcaattcgagaagatcatgaaatacataagatcaggcgttgaaagtggtgctcaactggaatctggtggtcaaagaattggctccaaaggctactacatccaacccactgttttctcaaatgttcaggacaacatgttgatagcaaaagatgagatatttggtccagtacaatctatcttgaaattcaaggatctagaggaagtgataagaagagccaatgcaacttcctatggcctggctgctggagtttttactaaaaatatggacactgccaacaccttgatgcgagcattgcaagctggaacggtatggatcaactgctatgatgtctttgatgcagcaataccttttggtggatataagatgagtggtcaagggagagtaaggggaatctacagccttagaagctaccttcaagttaaagctgttgtcactgctttgaagaatcccgcatggctgtagttttcccactacctgagtgttcatgttcataatgtcttatctagaaaaaaaactacatctttcatggaacattcctaaggcattgaattagccaaagttattacacaactaaagcttttctgtgccaatctttgctaactcaacttaccttctgttagaatatcacccttggtgtc

SEQ ID NO: 37822 - protein, 540 aa, Glycine max
MQVMASRILSTLHYVCSSSASATKRCLGLYSHWQRSISGIAASVVADVEPSIAPVQIDQSQLLIDGKFVDAASGKTFPTFDPRTGDVIANVAEGDAEDVNRAVHAARKAFDEGPWPKMTAYERSRIILRFADLLEKHNDEVAAIETWDSGKTYEQAANVEIPMVVRLFRYYAGWADKIHGLTVPADGPYHVQTLHEPIGVAGQIVPWNFPLLIFSWKVAPALACGNTVVMKTAEQTPLSALYVSKLFLEAGLPPGVLNVISGFGPTAGAALCSHMDVDKLAFTGSTSTGKRVLELSAHSNLKPVTLELGGKSPFIVCKDADVDAAVEASHFALFFNQGQCCCAGSRTFVHESIYGEFVEKAKARALKRVVGDPFKNGVEQGPQIDSVQFEKIMKYIRSGVESGAQLESGGQRIGSKGYYIQPTVFSNVQDNMLIAKDEIFGPVQSILKFKDLEEVIRRANATSYGLAAGVFTKNMDTANTLMRALQAGTVWINCYDVFDAAIPFGGYKMSGQGRVRGIYSLRSYLQVKAVVTALKNPAWL

SEQ ID NO: 37823 - DNA, 2348 bp, Glycine max
  CDS (295)..(1914)
attccgtttcgtttatgtttgaactttggcagaatacgaagactaccatgctttgattttacagactcttgagtcgcaacttttcctccttatcttttttttcatgctgttggtaaggttttcttggttcaagagggtcaagataaagtaagtcttcggccactgatggggtacagggtcaatccatcagttcaactaaacaataataacacatcgaaacatttaaacatggtacattaatactttacgataaacagtagtggagagagggagaaaaaccaaagaagattgaccatggcttcttcattgaggatctcaaggctcctctctcgttcttttctttctgcttccactactactcctttgttttctagaggcggaagtggtgctcttggtgcagggctcagtaaattcagcactgctgctgccattgaagaaccaattaaaccaccacttaaagtagaacacacccagctcttaattgatggaaaatttgttgatgctgctactggcaaaacttttccaacgttggaccccaggacaggagatgtgatttctcatgttgctgagggtgaccatgaagatgttgatcgagcagttgcagctgctcgcaaagccttcgaccgcggaccttggccaaagatgacagcctatgaaagacaaaggatattgctgcgtgctgctgatctgtttgaaaagcacaatgatgaccttgctgcactcgagacttgggataatgggaagccatatgaacagtctgctcaaatcgaaattccaatgctggttcgcctatttcgatactatgctggttgggcagataagattcatggtctcacagttccagctgatgggccatatcatgtgcaaacattgcatgaacccattggtgttgccggtcagatcattccgtggaacttccctcttgtcatgtttgcctggaaggttgggccagcattggcctgtggtaacaccattgttctcaaaacagctgagcagacaccattatctgctttatatgcatcaaaactacttcatgaggctggacttcctgctggtgttctgaatgtaatatctggctttggtccaactgctggtgctgctattgctagtcacatggacatagataagcttgctttcactggttcaactgaaactggaaaaattgtccttgaactggcagctagaagtaatcttaagcctgtaactttggagcttggtgggaaatccccatttattgtatgtgaagatgctgatgtagatgaggctgttgagctagcacactttgcattattctttaatcagggacaatgctgctgtgccgggtctagaacatttgtacacgaacgtgtgtacgatgaatttattgagaaagcaaaggcacgcgctttgaagcgtgctgttggtgatccattcaaggggggaatagagcaaggtcctcagattgattcagaacaatttcagaaaatactgaagtatattagatccggtgttgaaagtggagctactcttgaaaccggaggagatagatttggcaactcgggcttctatattcagcctactgtcttctcaaatgttaaggatgacatgctgattgcgaaggaagagatctttggtccagtgcaaagcatattaaaattcaaggaccttgatgatgtgattcaaagagcaaataacacacactatggccttgcagcaggggtgttcacaaaaaacattaacacagctaatactttgactagagcattgagagttggaacagtgtgggtgaactgctttgatacatttgatgcagcaattccctttggagggtacaaaatgagtggtcaaggaagagaaaaaggagaatacagtctcaagaattacttgcaagtgaaggctgttgttacatccttgaagaacccagcttggctttgaacatcattagctttagatttatttgatgaaaagattaataaataggctccaataataaagatcattaaattgggtttattccattcatagtttctgataatgatgaaaataatctagtttctttttctgtttccccccctgcattttatgggtagagcgaaatatactatggagtctatggtataaaattcaacgtagaggtgaatttctggttgggactggaatcaaatttgtataatgatggatgtaaatttcatattacctgttctcaaaggacattgttcgtttttagtaaatggcaatgttatgatttgaactgtgattcaacaaacaacgattcaatatctatttttaaaaaaaaaaaaaaaaaaaaaaaaaaaaaaaaaaaaaaaaaaaaaatcctagatcgcgatcttttttttttgagcgttcac

SEQ ID NO: 37824 - protein, 539 aa, Glycine max
MASSLRISRLLSRSFLSASTTTPLFSRGGSGALGAGLSKFSTAAAIEEPIKPPLKVEHTQLLIDGKFVDAATGKTFPTLDPRTGDVISHVAEGDHEDVDRAVAAARKAFDRGPWPKMTAYERQRILLRAADLFEKHNDDLAALETWDNGKPYEQSAQIEIPMLVRLFRYYAGWADKIHGLTVPADGPYHVQTLHEPIGVAGQIIPWNFPLVMFAWKVGPALACGNTIVLKTAEQTPLSALYASKLLHEAGLPAGVLNVISGFGPTAGAAIASHMDIDKLAFTGSTETGKIVLELAARSNLKPVTLELGGKSPFIVCEDADVDEAVELAHFALFFNQGQCCCAGSRTFVHERVYDEFIEKAKARALKRAVGDPFKGGIEQGPQIDSEQFQKILKYIRSGVESGATLETGGDRFGNSGFYIQPTVFSNVKDDMLIAKEEIFGPVQSILKFKDLDDVIQRANNTHYGLAAGVFTKNINTANTLTRALRVGTVWVNCFDTFDAAIPFGGYKMSGQGREKGEYSLKNYLQVKAVVTSLKNPAWL

SEQ ID NO: 37825 - DNA, 1828 bp, Oryza sativa
  CDS (1)..(1581)
atggcgagcgagagcgagagcaacggccaccaccacgccggcgacgaggcgcgcgcggagaacagcggcgcggggtgcctccacggcggcgacgacggcggcgggacgcccaggacgacgccggagatcaggtacaccaagctgttcatcaacgggcgcttcgtcgacgcggcctccggtaagacgttcgagaccagggacccccgcaccggcgacgtgatcgcccgcgtcgccgaaggcgacaaggaggacgtcgacctggcggtgaaggcggcgagggaagcattcgaccacggcgaatggcctcgcatgtcgggatcagagagagggagggtcatggcgaagtacgcggaggtggtggagcggcacgcggatgagctggcggcactggagagccttgacgccggcaagccgctcgccgccgccagggcggtggacgtcggcgagtgcgtcggcatcctgcgctacttcgccggcgccgccgacaagatccacggcgagacgctcaagatgtcgaggcagctccagggttacaccctccgcgagcccctcggcgtcgccggcctcatcgtcccctggaacttcccggccatcatgttcttctccaaagtctcaccggcgctcgccgccggctgcaccgtcgtcgtcaagcccgccgagcagacgcccctcagcgccctgttcctcgcccacctatcaaagcaagcaggagtaccggatggggtgatcaacgtggtgacaggattcggcccaacagcgggagctgcaatttcatctcacatggatgttgacgtggtggctttcacgggatctactgaggttggacggcttataatggaggcctccgcgaagagcaacctgaagccggtggcactcgagctcggcggcaagtcgccgttcatcgtcttcgacgacgccgacctggacaaggccgtcgagctcgccatcggcgggaacttcttcaacaagggagaagcctgcgtcgccgggagccgcgtgttcgtgcaggagggcatctacgaccggttcgagcagaagctagcggacaccatgaagagctgggtcgtcggcgaccccttcgatcctcgcgtcaatcaaggaccacaggtggacaaggctcagtatgagagggtgctcgggtacatcgagcaaggcaaggcagaaggggcaactgttctcacgggagggaagccctgcggtaagaaagggtactacatcgagcccaccattttcaccaatgtgaaggacgacatggtcatcgcgagggaggagatcttcggccccgtcatgtgcctgatgaagttcaagacggtggaggaggcgatcgagagggcgaacgggacgaggtacgggctggcggcggggctggtgacgagggacatcgacgtggcgaaccggatggcgaggtcgatccgggcaggggtggtgtgggtgaactgctacttcgccatggacaggagctgcccgttcggtggccgcaagatgagcgggttcggcaaggacgacagcatgcacgcgctcgacaagttcctcgccgtcaagtccgtcgtcacccccgtccatggctccccctggttctgagttctttctggatctcgtcgccgatcgagtcggccatgcgtatgtacacatgttggtgttgttggatttgctgggtggtggagtatttgtaacggtggaagattattacagagagtcaataagttgcattatccattattttccttgtatatgccagttggtgttctcctcctttttatactacctttggaagccaaattctccttttaaaaaaaaaaaaaaaaaactcgagactagttctctctcc

SEQ ID NO: 37826 - protein, 526 aa, Oryza sativa
MASESESNGHHHAGDEARAENSGAGCLHGGDDGGGTPRTTPEIRYTKLFINGRFVDAASGKTFETRDPRTGDVIARVAEGDKEDVDLAVKAAREAFDHGEWPRMSGSERGRVMAKYAEVVERHADELAALESLDAGKPLAAARAVDVGECVGILRYFAGAADKIHGETLKMSRQLQGYTLREPLGVAGLIVPWNFPAIMFFSKVSPALAAGCTVVVKPAEQTPLSALFLAHLSKQAGVPDGVINVVTGFGPTAGAAISSHMDVDVVAFTGSTEVGRLIMEASAKSNLKPVALELGGKSPFIVFDDADLDKAVELAIGGNFFNKGEACVAGSRVFVQEGIYDRFEQKLADTMKSWVVGDPFDPRVNQGPQVDKAQYERVLGYIEQGKAEGATVLTGGKPCGKKGYYIEPTIFTNVKDDMVIAREEIFGPVMCLMKFKTVEEAIERANGTRYGLAAGLVTRDIDVANRMARSIRAGVVWVNCYFAMDRSCPFGGRKMSGFGKDDSMHALDKFLAVKSVVTPVHGSPWF

SEQ ID NO: 37827 - DNA, 2215 bp, Zea mays
  CDS (169)..(1881)
ctagaaacgtagcgtcccgcggagtcactgcctgcgggctcggccgcgcctctcgcccacatggcagtggtcaggacgtactgcagatgatctgattacctagataatatatggattgattcgttatactaggtgataaagagtatatataggtaaatagatagatagatggagatagagacagggagggggagtggtccgaggtcaataggatataactccaggactcctcgctctccagaagaatcagagacgagtcgagtgaggggcagaggccacaaaacagaggtacccaaacgatcgatctgtgcatctccccgtccgtcccgcaaccatctgattcagaagcagacatcaatggcgagcaacggctgcaacggcaacggcaacggcaaggcggcgccggcgggtgtggtggtgccggagatcaagttcaccaagctcttcatcaacggcgagttcgtcgacgccgcctccggcaagacattcgataccagggacccacggaccggcgacgtgctggcccacgtagcagaggcagacaaagctgatgtggacctggcggtgaagtccgcccgggacgccttcgagcacggcaagtggccccgcatgtcaggctacgagcgcgggcggatcatgagcaagctggcggacctggtggagcagcacacggaggagctggcggcgctggacggtgccgacgccgggaagctgctgctgctgggcaagatcatcgacatccccgcggccacgcagatgctgcgctactacgccggcgccgccgacaagatccacggcgacgtcctgcgcgtctccggcaggtaccagggctacacgctcaaggagcccatcggcgtcgtgggcgtcatcatcccctggaacttccccaccatgatgttcttcctcaaggtcagcccggcgctcgccgcgggctgcaccgtcgtcgtcaagcccgccgagcagacgccgctctccgcgctctactacgcgcacctcgcaaagatggccggcgtccccgacggagtgatcaacgtcgtccccgggttcggccccaccgccggcgccgcgctcgcctcccacatggacgtcgacagcgtggccttcaccggctccacagaggtgggtcgcctcatcatggagtcggccgcgcggagcaacctcaagacggtctcgctggagctcggcggcaagtcgccgctcatcatcttcgacgacgccgacgtcgacatggccgtcaacctgtcgaggcttgccgtcttcttcaacaagggagaggtttgcgtggcgggatcgcgcgtgtacgtgcaggaagggatctatgacgagttcgtcaagaaggccgtggaggccgcgcggagctggaaggttggagacccgttcgatgtcaccagcaacatgggccctcaggttgacaaggaccagtttgagagggtcctaaagtacattgagcatggcaagagcgagggagcgactctgctcaccggcggcaagcctgccgccgacaaagggtactacattgagcccaccatctttgtcgatgtcactgaggacatgaagatcgcgcaggaagagatcttcggccccgtcatgtccctcatgaagttcaagacggttgatgaggtgatcgagaaggccaactgcaccaggtacgggctcgccgccgggatcgtgaccaagagcctggacgtcgccaaccgggtgtcccggtcggtgcgcgccggcaccgtgtgggtgaactgctacttcgccttcgacccggacgcgcccttcggcgggtacaagatgagcggcttcggccgggaccaggggctggcagccatggacaagtacctgcaggtcaagagcgtcatcaccgcgctcccggactcgccatggtattgagttgagccagggaccgaccgatggaaccccatcgatctcttcttgtgcagtgtacatgcgtcatgcgtgcgtgctcacacagctgggttgctgctttgtgcttgtgttcgtctctggtttgtggctcatgtgttagtctgcaccctatccttctgtacgtagctgccggacatgcatatagtatgttaagtacaccatataaactcttgttttataaattcaagtttagcttggagccttgactccttcagacaaagacaaaaaaaataaaaaaaagtggagcttggagccttcactcccttcagccttgacactcgagggggggcccggtacc

SEQ ID NO: 37828 - protein, 570 aa, Zea mays
MEIETGRGSGPRSIGYNSRTPRSPEESETSRVRGRGHKTEVPKRSICASPRPSRNHLIQKQTSMASNGCNGNGNGKAAPAGVVVPEIKFTKLFINGEFVDAASGKTFDTRDPRTGDVLAHVAEADKADVDLAVKSARDAFEHGKWPRMSGYERGRIMSKLADLVEQHTEELAALDGADAGKLLLLGKIIDIPAATQMLRYYAGAADKIHGDVLRVSGRYQGYTLKEPIGVVGVIIPWNFPTMMFFLKVSPALAAGCTVVVKPAEQTPLSALYYAHLAKMAGVPDGVINVVPGFGPTAGAALASHMDVDSVAFTGSTEVGRLIMESAARSNLKTVSLELGGKSPLIIFDDADVDMAVNLSRLAVFFNKGEVCVAGSRVYVQEGIYDEFVKKAVEAARSWKVGDPFDVTSNMGPQVDKDQFERVLKYIEHGKSEGATLLTGGKPAADKGYYIEPTIFVDVTEDMKIAQEEIFGPVMSLMKFKTVDEVIEKANCTRYGLAAGIVTKSLDVANRVSRSVRAGTVWVNCYFAFDPDAPFGGYKMSGFGRDQGLAAMDKYLQVKSVITALPDSPWY

SEQ ID NO: 37829 - DNA, 1653 bp, Zea mays
  CDS (1)..(1653)
atggctgcaaccgtgaggagggctgcttcctccgtcctctctcgcttcctcctcacaaagccttcgccttcgcctgcttctgccgccggcaataattccgctctcctcggatcaggggctgctgctcttcacaggttcagcaccgcaccggcatccgcggccgcggccgcagaggagccgatccagcccgcggtggaggtgaagcacacccagctcctcatcaatggcaacttcgtcgacgctgcttctgggaagacgttcccgacgctggacccgcgcaccggcgaggtcatcgcgcgcgtcgccgagggcgacagcgaggacatcgaccgcgccgtggccgccgcccgcagggccttcgacgagggcccgtggccgaggatgaccgcctacgagcggtgccgcgtgctgctgcgcttcgcggacctgatcgagcggcacgcggaggaggtcgcggcgctggagacgtgggacaacggcaagacgctggcgcaggcggcgggggccgaggtgcccatggtggcgcggtgcgtccggtactacgccgggtgggcggacaagatccacggcctggtggcgccggccgacggcgcgcaccacgtgcaggtgctgcacgagccggtcggcgtggccggccagatcatcccctggaacttcccgctgctcatgttcgcctggaaggtcggcccggcgctcgcctgcggcaacaccgtcgtcctcaagaccgccgagcagacgccgctctccgcgctctacgtggccaacctcctcctcgaggctgggctccccgagggtgttctgaacgtggtgtccggcttcggcccgacggccggcgcagcgctctccagccacatgggtgtcgacaagcttgcgttcacgggatcgacgggcacggggcagatcgtgctcgagctggcggcgaggagcaaccttaagccggtgacgctggagctcggtggcaagtcccctttcatcgtcatggacgacgccgacgtcgaccaggccgtcgagctcgcgcaccaggcggtcttcttcaaccagggccaatgctgctgcgccgggtcgcggacgttcgtgcacgagcgcgtgtacgacgagttcgtggagaagtccaaggcccgcgccctgaagcgcgtcgtcggcgaccccttcagggacggggtcgaacaggggcctcagatcgacggcgagcaattcaacaagatcttgcggtacgtccagtccggcgtcgacagcggtgccaccctcgtcgccggcggcgacagggtaggcgacaggggcttctacatacagccgacggtgtttgccgacgccaaggacgaaatgaagatcgctcgggaggagatattcgggccggtgcaaaccattctcaagttcagcggcgtggaggaggtgatccggcgcgcgaacgcgacgccctacgggctggcggcgggggtgttcacgcggagcctggacgcggccaacaccctgtcgcgggcgctgcgggcgggcaccgtgtgggtgaactgctacgacgtgttcgacgccaccatcccgttcggcggctacaagatgagcggcgtcgggcgggagaagggcatctacgccctccgcaactacctccagacaaaggccgtcgtcacacccatcaagaaccccgcatggctgtaa

SEQ ID NO: 37830 - protein, 550 aa, Zea mays
MAATVRRAASSVLSRFLLTKPSPSPASAAGNNSALLGSGAAALHRFSTAPASAAAAAEEPIQPAVEVKHTQLLINGNFVDAASGKTFPTLDPRTGEVIARVAEGDSEDIDRAVAAARRAFDEGPWPRMTAYERCRVLLRFADLIERHAEEVAALETWDNGKTLAQAAGAEVPMVARCVRYYAGWADKIHGLVAPADGAHHVQVLHEPVGVAGQIIPWNFPLLMFAWKVGPALACGNTVVLKTAEQTPLSALYVANLLLEAGLPEGVLNVVSGFGPTAGAALSSHMGVDKLAFTGSTGTGQIVLELAARSNLKPVTLELGGKSPFIVMDDADVDQAVELAHQAVFFNQGQCCCAGSRTFVHERVYDEFVEKSKARALKRVVGDPFRDGVEQGPQIDGEQFNKILRYVQSGVDSGATLVAGGDRVGDRGFYIQPTVFADAKDEMKIAREEIFGPVQTILKFSGVEEVIRRANATPYGLAAGVFTRSLDAANTLSRALRAGTVWVNCYDVFDATIPFGGYKMSGVGREKGIYALRNYLQTKAVVTPIKNPAWL

SEQ ID NO: 37831 - DNA, 1838 bp, Triticum aestivum
  CDS (127)..(1623)
atagcactctatatatagagtcctagttctacaagacttttctcccgtagaggagcagaaagatcgagaggcagagccaacctactcaactcgaggccgtgttgctgaggtgagacacgcatcgcaatggggagcaacgagggcggcgggtgcgacggcaagccggtggtggtggtgccggagatcaagtacaccaagctcttcatcaacggcgagttcgttgacgccgcatcaggcaagacgtttgagacgagggacccgcggacaggcgacgtgctggcccacatcgcagaggcggacaaagccgacgtggacctcgccgtcgaggccgccagggaggccttcgagcatggcaagtggccccgcatgtcaggctacgagaggagcagggccatgaacaagctggccgacctgatggagcagcacatcgaggagctggcggcgctggacggcgccgacgccggcaagctgctcctgttgggcaagatcatcgacatcccttccgcggtgcagatgctgcgctattacgccggcgccgccgacaagatccacggcgagtcgctgcgtgtgtccggcaagtaccaggggtacaccctcaaggagcccatcggggtcgtcggcatcatcatcccgtggaacttccccagcctcatgttcttcctcaagatcagcccggcgctcgccgccggatgcaccgtcgtcgtcaagcccgccgagcagacgcccctctcggccctctactatgctcaccttgcaaagctggctggcattccggacggagtgatcaatgtcgtccctggcttcggcccgacggccggcgccgccatcgcctcccacatggacgttgacagcgttgccttcactggctctggtgaagtaggccgcctcatcatggaggcatctgcccggagcaacctgaagacggtatcgcttgagctcggtggcaagtcgcctctgataatcttcgacgacgctgatgtcgacatggcggtcgagctctcaaggcttgccatcttcttcaacaagggagaggtttgcgtcgcggggtcccgtgtttatgttcaggaagggatctacgacgagtttgtgaagagggctgtggtggctgcccagaactggaaagtcggagacccgtttgatgtcgccaccaacatgggtccccaggttgataaggagcaatttgagagggtcctaaggtacattgagcatggcaagagcgagggagcgacacttctcaccggcggcaaacctgccagcgacaaaggatactacattgagcctaccatatttgcagatgtcaaggaggacatgaagatcgctcaagatgagatctttggccccgtgatgtccctcatgaagttcaagacggtcgatgaggcgatagagaaggccaactgcaccaagtacgggctggccgccggcataatcaccaagaatttggacatcgccaacagggtgtcgagatcggtgcgcgcggggaccgtgtgggtcaactgctacttcgccttcgaccccgaggcgcccttcggcggggtacaagatgagcgggttcggccgggaccaggggatgatggccatcgacaagtacatgcaggtcaagagcgtcatcaccgcagtccctgactcgccttggtattagcagaatagccaagacaatgcaagttcttaattctctgcagtactgtacatgcttgttgagttggctggtgcttgtgaagcagtcctttgtttgcgttgcctgggtgccaagttgttggtgtgtgtgatataggaaaaagtccaaaacaaaccttgaacttgtagaccaaagctaaatcaaaccctgaacttcaaatcag

SEQ ID NO: 37832 - protein, 498 aa, Triticum aestivum
MGSNEGGGCDGKPVVVVPEIKYTKLFINGEFVDAASGKTFETRDPRTGDVLAHIAEADKADVDLAVEAAREAFEHGKWPRMSGYERSRAMNKLADLMEQHIEELAALDGADAGKLLLLGKIIDIPSAVQMLRYYAGAADKIHGESLRVSGKYQGYTLKEPIGVVGIIIPWNFPSLMFFLKISPALAAGCTVVVKPAEQTPLSALYYAHLAKLAGIPDGVINVVPGFGPTAGAAIASHMDVDSVAFTGSGEVGRLIMEASARSNLKTVSLELGGKSPLIIFDDADVDMAVELSRLAIFFNKGEVCVAGSRVYVQEGIYDEFVKRAVVAAQNWKVGDPFDVATNMGPQVDKEQFERVLRYIEHGKSEGATLLTGGKPASDKGYYIEPTIFADVKEDMKIAQDEIFGPVMSLMKFKTVDEAIEKANCTKYGLAAGIITKNLDIANRVSRSVRAGTVWVNCYFAFDPEAPFGGVQDERVRPGPGDDGHRQVHAGQERHHRSP

SEQ ID NO: 37833 - DNA, 1774 bp, Zea mays subsp. mays
  CDS (78)..(1589)
atccatctatccatcatcaccagctagcacctcctttcccacgactcccgagcgctctgcgtgtggcgcgcggcagcatggcgactgcgaacgggagcagcaaggggtcgttcgaggtgcccaaggtggaggtcaggttcaccaagctcttcatcgacggcaagttcgtcgacgccgtctccggcaagacgttcgagacccgggaccctcgcaccggcgaggtgatcgccagcatcgcggagggaggcaaggccgacgtcgacctcgccgtcaaggccgcccgggaggccttcgacaacgggccctggcccaggatgacgggatacgagcgtggtcggatcctccacaggttcgcggacctgatcgacgagcacgtggaggagctggcggcgctggacacggtggacgccggcaagctgttcgccgtgggcaaggcgcgggacatcccgggcgccgcgcacctgctgcgctactacgccggcgccgccgacaaggtgcacggcgcgacgctcaagatggcgcagcggatgcacgggtacacgctcaaggagcccgtgggcgtggtgggccacatcgtgccctggaactaccccaccaccatgttcttcttcaaggtagggcccgcgctcgccgccggctgcgccgtcgtcgtcaagcccgccgagcagacgccgctgtccgcgctcttctacgcgcacctcgccagggaggccggcgtcccagccggcgtgctcaacgtcgtgccgggattcgggcccacggccggggccgccgtcgccgcccacatggacgtcgacaaggtcagcttcaccgggtccacggaggtcggccgcctcgtcatgagggccgcggccgagagcaacctcaagcccgtgtcgctcgagctgggcggcaagtctcccgtcatcgtcttcgacgacgccgacctcgacatggccgttaacctcgtcaacttcgccacctacaccaacaagggcgagatctgtgtggccggcacacgcatctacgtgcaggaagggatctacgacgagttcgtgaagaaggccgccgagctcgccagcaagtccgtggtcggagacccgttcaacccgagtgtcagccagggcccccaggttgacaaggaccagtacgagaaggtcctcaggtacattgacatcggaaagcgcgaaggcgccacgctggtcaccggagggaagccctgcggcgacaataagggctactacatcgagcccaccatcttcacggacgtcaaggacgacatgacgatcgcacaggatgaaatctttgggccggtgatggctctcatgaaattcaagaccgtggaggaggtgatccagaaagcgaacaacacccggtacggcctggccgccggcatcgtgaccaagaacatcgacgtcgccaacaccgtgtcgcggtccatccgcgccggcgccatctggatcaactgctacttcgcgttcgacccggacgcgccgttcggcgggtacaagatgagcgggttcggcaaggacatgggcatggacgcgctcgacaagtacctgcagaccaagaccgtcgtcactccgctgtacaacactccatggctctgaccgaccgacctctcatcctgtccgatgaacagttcaacatcacaaacaagaagaaacatgtcttgtaagatactcctccaaaggatcgggtgcctgtagctgtactcttacacctgcatggattgatgtcttgatgatgtagtgcaatgtagcattcagaacaataaagacatgtttcggactgc

SEQ ID NO: 37834 - protein, 503 aa, Zea mays subsp. mays
MATANGSSKGSFEVPKVEVRFTKLFIDGKFVDAVSGKTFETRDPRTGEVIASIAEGGKADVDLAVKAAREAFDNGPWPRMTGYERGRILHRFADLIDEHVEELAALDTVDAGKLFAVGKARDIPGAAHLLRYYAGAADKVHGATLKMAQRMHGYTLKEPVGVVGHIVPWNYPTTMFFFKVGPALAAGCAVVVKPAEQTPLSALFYAHLAREAGVPAGVLNVVPGFGPTAGAAVAAHMDVDKVSFTGSTEVGRLVMRAAAESNLKPVSLELGGKSPVIVFDDADLDMAVNLVNFATYTNKGEICVAGTRIYVQEGIYDEFVKKAAELASKSVVGDPFNPSVSQGPQVDKDQYEKVLRYIDIGKREGATLVTGGKPCGDNKGYYIEPTIFTDVKDDMTIAQDEIFGPVMALMKFKTVEEVIQKANNTRYGLAAGIVTKNIDVANTVSRSIRAGAIWINCYFAFDPDAPFGGYKMSGFGKDMGMDALDKYLQTKTVVTPLYNTPWL

SEQ ID NO: 37835 - DNA, 1589 bp, Arabidopsis thaliana
  CDS (47)..(1552)
acgagcatagagaaagagagagagagagaaatacaaagaaaaataaatggagaacggcaaatgcaacggagccacgacggtgaagttaccggagatcaaattcaccaagcttttcatcaacggccagttcattgatgctgcttcagggaagacgtttgagacgatagaccctaggaacggtgaagtgatcgcaacaatagccgaaggagacaaagaagacgttgacttggccgttaacgctgcacgttacgccttcgaccatggtccttggcctcgcatgaccggcttcgagagggcaaagcttatcaacaaattcgcagacttaatagaggaaaacattgaggaattggctaaacttgatgcggttgacggtggaaaattgtttcagttgggaaaatatgctgatattccggccacagccggtcattttcgatacaatgcgggtgcagcagataaaatccacggcgagactcttaaaatgacgcgtcaatctttgttcggatacaccctcaaagaaccaattggagtggttggtaatatcatcccttggaatttcccaagcattatgtttgccacaaaggtggctccggctatggctgctggttgcaccatggtggtcaagccagctgaacagacttcactctctgctttgttctatgcccatctctcaaaagaagcgggaattcctgatggtgtgctcaacattgtaactggttttggatcaactgctggagctgccattgcctcccatatggacgtagacaaagttagtttcactgggtcaacagatgttggaaggaagataatgcaagccgcagccgcaagtaatctcaaaaaagtttcccttgaattaggcgggaaatcgccacttctcatattcaacgacgctgatattgacaaagccgccgatcttgcgcttctcggttgcttttacaacaagggtgaaatttgcgtggcgagctctcgtgtgtttgttcaagaaggtatatacgataaggttgtggagaagttagtagagaaggctaaagattggaccgttggtgatccttttgattccactgctcgacaaggacctcaagtggataaaagacagtttgagaagattctatcttacattgagcacggtaaaaacgaaggagcgaccttattaactggaggaaaagccattggagacaaaggatatttcatccaaccaactatattcgcagatgtcactgaggatatgaagatataccaagatgaaatctttggaccagtcatgtcactgatgaaattcaagacggtagaggaagggatcaaatgcgcaaacaacacgaaatacggtcttgcagcaggaatactaagccaagacatagacttgatcaacacggtttcgaggtcaatcaaagctggaatcatttgggttaattgctacttcgggtttgatcttgactgtccttatggtggctacaagatgagtggtaattgtcgtgaaagtggcatggacgctctcgacaactatctacaaaccaaatccgtcgttatgcctcttcacaattccccttggatgtaataaaattgtccataacacatagaaaaaaacttaatcc

SEQ ID NO: 37836 - protein, 501 aa, Arabidopsis thaliana
MENGKCNGATTVKLPEIKFTKLFINGQFIDAASGKTFETIDPRNGEVIATIAEGDKEDVDLAVNAARYAFDHGPWPRMTGFERAKLINKFADLIEENIEELAKLDAVDGGKLFQLGKYADIPATAGHFRYNAGAADKIHGETLKMTRQSLFGYTLKEPIGVVGNIIPWNFPSIMFATKVAPAMAAGCTMVVKPAEQTSLSALFYAHLSKEAGIPDGVLNIVTGFGSTAGAAIASHMDVDKVSFTGSTDVGRKIMQAAAASNLKKVSLELGGKSPLLIFNDADIDKAADLALLGCFYNKGEICVASSRVFVQEGIYDKVVEKLVEKAKDWTVGDPFDSTARQGPQVDKRQFEKILSYIEHGKNEGATLLTGGKAIGDKGYFIQPTIFADVTEDMKIYQDEIFGPVMSLMKFKTVEEGIKCANNTKYGLAAGILSQDIDLINTVSRSIKAGIIWVNCYFGFDLDCPYGGYKMSGNCRESGMDALDNYLQTKSVVMPLHNSPWM

SEQ ID NO: 37837 - DNA, 1720 bp, Glycine max
  CDS (47)..(1657)
ataaaatggaactgagttagggaagagagagaagaggaacactgacatggcttcttcactcagaatttcaagactcatctctcgctccttttcttctacctccttcttttcacgaggtgggaatggtttccttggttcaagacactgcaaatacagcacttcttctgccattgaagaagaacccgttaaaccatcagtgcaagtagaacacacccaactcttaattgatggaaaatttgtagatgctgcttctggtaaaacttttccaactttagatcctaggacaggtgaagtaattgctcatgttgctgagggtcactctgaggatgttgatcgagcagttgcagctgcacgaaaagcatttgatcatggaccatggcctaagatgacggcttatgaacggcaaaggatcttgttgcgcgcagctgatctgcttgagaagcataatgatgagcttgcagcacttgagacttgggataatggaaagccttatgaacaagctgctaagattgaagttccaatgcttgttcgcctgattcgatactatgctggttgggcagataagatccatggtctaacagttccagctgatggaccatatcatgtgcaaacattgcatgaaccaattggtgttgccggtcagatcattccttggaacttccctcttctcatgtttgcctggaaggttggaccggcattggcctgtggcaacaccattgttctcaaaacagctgagcagacaccgttatctgctttatatgcagcaaaactatttcatgaggctggacttcctgctggtgttttaaatgtagtatctggctttggtccaactgctggtgctgctcttgctagccacatggaagttgacaagcttgcttttactggttccactgatactgggaaagttgtccttgaactggcggctaaaagcaatcttaagcctgttactttggagcttggtgggaaatccccctttattgtgtgtgaagatgctgatgtagatcaggctgttgagctagcccattttgctttattctttaatcagggacaatgttgctgtgctgggtctcgaacatttgtacatgaaagtgtatacgatgagtttgttgagaaagcaaaggctcgtgctttgaagcgtgttgttggtgatccattcaaggggggaatagagcaaggtcctcagattgattcagatcaatttgagaaaatactgaggtacatcagatctggtgttgaaagtggggcaacccttgaaaccggaggagacaagcttggcaacaagggcttctacattcaacctacagtcttctcaaatgttaaggatggcatgctgattgcaagggatgagatctttggtccagtccaatccatattaaaattcaaggatcttggtgaggtagttcaaagagcaaataacacacgttacgggcttgcggccggagtgttcacaacgaacatggacactgcctacactttgacgcgggcactgagagttggaacagtgtggataaactgctttgacacatttgatgctgcaattccctttggagggtacaagatgagtggtcaaggcagagaaaaaggagagtatagtctcaaaaactacttgcaagtgaaggctgttgttaatcccctgaaaaacccagcatggctttgagcaaacactagccttctttggataatcaataactatcagtgcctcaatgataatgatgataag

SEQ ID NO: 37838 - protein, 536 aa, Glycine max
MASSLRISRLISRSFSSTSFFSRGGNGFLGSRHCKYSTSSAIEEEPVKPSVQVEHTQLLIDGKFVDAASGKTFPTLDPRTGEVIAHVAEGHSEDVDRAVAAARKAFDHGPWPKMTAYERQRILLRAADLLEKHNDELAALETWDNGKPYEQAAKIEVPMLVRLIRYYAGWADKIHGLTVPADGPYHVQTLHEPIGVAGQIIPWNFPLLMFAWKVGPALACGNTIVLKTAEQTPLSALYAAKLFHEAGLPAGVLNVVSGFGPTAGAALASHMEVDKLAFTGSTDTGKVVLELAAKSNLKPVTLELGGKSPFIVCEDADVDQAVELAHFALFFNQGQCCCAGSRTFVHESVYDEFVEKAKARALKRVVGDPFKGGIEQGPQIDSDQFEKILRYIRSGVESGATLETGGDKLGNKGFYIQPTVFSNVKDGMLIARDEIFGPVQSILKFKDLGEVVQRANNTRYGLAAGVFTTNMDTAYTLTRALRVGTVWINCFDTFDAAIPFGGYKMSGQGREKGEYSLKNYLQVKAVVNPLKNPAWL

SEQ ID NO: 37839 - DNA, 1850 bp, Glycine max
  CDS (82)..(1587)
  misc_feature (1836)..(1836): n is a, g, c or t
atcgaaaagtattacaattagtctcagtccccaacgactggttctgttttctctctgctgcttcgattcattcacacaaccatgactagccttactaatggcgatgctggctccctcaacaaggtccccacgatcaagttcaccaagctcttcattaatggagacttcgttgactctctgtcaggaaagacatttgagacaatagatccaagaacaggagatgttatagcgaggataagcgagggagataaagaagacattgacattgctgttaaagcagcacgtcatgcatttgacaacggtccatggcctcgccttcccggctctgagagagcaagaatattgctgaaatgggcagaaataattgaggaaaacgcagaagaacttgcagcactagatgcgattgatgcggggaagttgtaccatatgtgtaggaatgtggaagttccagcagcggcaaacactcttcgttactatgctggtgcagccgataagattcatggagaggtgttgaaaatgtctcgagagttccatgcctatacattacttgaaccacttggtgttgtgggacacattactccctggaatttccccaataccatgttctacatcaaagtcgctccttctttagctgctggctgcaccatggtcctcaagcctgctgagcaaacacccctctctgctttgttttctgctcatcttgctaaattggctggaatcccagatggagtgatcaatgtagtgcctggatttggcccaactgctggtgctgcattaagctcacacatggatgttgataaggtcagctttaccggttcaacacaaacaggccgtgtgataatgcaggctgcagcaaagagtaacttgaaacaagtttcacttgaattaggaggcaagtcacccctcataatttttgatgatgcagatatagacaaagctactgagctagctctactaggcatcctatataacaagggagaagtttgtgttgcaagttcccgtgtgtttgttcaagaagggatctatgatgaatttgagaaaaaactggtggagaaggcaaaagcttgggtcgttggggatccctttgatcctaaagttcaacaaggccctcaggttgacaaggaacaatttgaaaaagttctttcatatattgagcatggaaagaaagaaggagctacccttttgaccgggggtaaaacagtggggaacaagggctactttattgagccgacaattttctccaatataagggaggatatgcttatagcacaggatgaaatatttggcccagtgatggcactgaagaagtttaagaccactgaggaagcaattaagagtgctaacaataccaagtatggcctagcagcaggcatagtgaccaagaatttggatacagcaaacacagtgtcaaggtctattcgggcaggcactatatggatcaactgctattttgcctttggcgatgatgttccctttggaggatataagatgagtggatttggaaaagatcatggattggaagcccttcacaagtacctacaagttaaatctgttgttactcccctttacaattctccctggctttgaatgtctactgcatggatcttggaaaatggtccattctggccatttcctatcaatttgcatctgccatgaggcatggaaattcagttcttgaacagtggtgtctattatattgtcaacaagctggccttttcctacttttcagtcatgctttaatagaaaatgtatggaagaaaaatagtaattttatttttgtttggtttgtaattaaaaggaaatatcaacacaatttaacttattgcttcaacaganatatatgaattgtt

SEQ ID NO: 37840 - protein, 501 aa, Glycine max
MTSLTNGDAGSLNKVPTIKFTKLFINGDFVDSLSGKTFETIDPRTGDVIARISEGDKEDIDIAVKAARHAFDNGPWPRLPGSERARILLKWAEIIEENAEELAALDAIDAGKLYHMCRNVEVPAAANTLRYYAGAADKIHGEVLKMSREFHAYTLLEPLGVVGHITPWNFPNTMFYIKVAPSLAAGCTMVLKPAEQTPLSALFSAHLAKLAGIPDGVINVVPGFGPTAGAALSSHMDVDKVSFTGSTQTGRVIMQAAAKSNLKQVSLELGGKSPLIIFDDADIDKATELALLGILYNKGEVCVASSRVFVQEGIYDEFEKKLVEKAKAWVVGDPFDPKVQQGPQVDKEQFEKVLSYIEHGKKEGATLLTGGKTVGNKGYFIEPTIFSNIREDMLIAQDEIFGPVMALKKFKTTEEAIKSANNTKYGLAAGIVTKNLDTANTVSRSIRAGTIWINCYFAFGDDVPFGGYKMSGFGKDHGLEALHKYLQVKSVVTPLYNSPWL

SEQ ID NO: 37841 - DNA, 2219 bp, Zea mays subsp. mays
  CDS (278)..(1927)
attcgagccctgaaatcccaaaagcccaaaccaaatccaagcgcaagagggggcaaagccgcaaagggggaggcaccaggcaccggcagccattacttactggtcctcactcccacaccaaccaaccaacctcctctgcctgccgcttctcctgctgcgggcgggcactgctgcaagtactagaggaggacatccgcttccattactgcgcctgcggaggatcggaggaaccagtagcggaggcttcgattttcggcgggcgcaataaatttcccgcatggctcggagggccgcgtcctcgctcgtctcccgctgcctcctggcgagggcccctgccggcgcgccgcccgctgccccctctgcgccgcgcaggacagtgcctgcagatgggatgcacaggctgttgccaggtgtccttcagaggttcagcactgcagcagcagtagaggagcccatcacgccgtcagtccatgtgaactacacaaagctcctcattaatgggaactttgttgattccgcatccggcaagaccttcccaactctggaccctcgtacaggggaggtgattgctcatgtggctgagggtgacgcagaggacattaaccgtgcagtagctgcggctcgcaaggcttttgatgaagggccatggccgaagatgactgcctatgagaggtcccgtatcctactgcggtttgctgatttgatagagaagcacaatgacgagcttgctgctttggagacatgggacaacgggaagccatatgagcaagcagcccagattgaagtacccatggtggcccgtcttatgcgttactatgctggttgggctgataagatccatgggctcattgtgccggctgatggcccacaccatgtacagatcttgcatgagccaattggtgttgcaggtcagatcatcccatggaactttcctcttctgatgtatgcctggaaagttggccctgctttggcatgtggaaatactctcgtgctcaagactgctgaacaaacccctctatcggctttgtatatctccaaattgttgcatgaggctggactacctgagggtgttgtgaatgtcgtttctggttttggccctactgctggtgctgctcttgctagtcacatggatgttgataagatcgcatttactggatctaccgatactggaaaaattattctcgagttggctgcaaagagcaaccttaagacagtgacactggagttaggaggcaagtcccctttcatcataatggacgatgctgatgttgaccatgctgttgagcttgcgcactttgccctgttctttaaccagggacaatgctgctgcgctggatctcgcacgtttgtacatgagcgtgtttatgatgagtttgtggagaaggccaaggctcgtgcattgaagcgcgtcgttggtgatccgttcaggaaaggtgttgaacagggcccgcagattgacgacgagcaattcaacaagatcttgcgctacattaggtatggtgttgacggtggagctacccttgtgacgggtggtgataggttgggtgacaagggtttctacatccagccaacgattttctcagatgtccaggacggcatgaagattgctcaggaggagatatttgggcctgtgcagtcgatcctcaagttcaaagacctcaatgaggttatcaagagggcaaacgcgagccagtatggattggccgccggcgtgttcaccaacagcctggacacggccaacaccctgacgcgcgcgctcagggccgggaccgtctgggtgaactgcttcgacgtcttcgatgctgcgattccgtttggtgggtacaagatgagcggcatcgggagggagaagggcgttgacagcctgaagaactacctgcaggtgaaggcggtcgtcaccccaatcaagaacgccgcgtggttgtagacgctgcaagtgtggccttgtgcacgagaaccacgtatattcatttcctggtcacatccccgaacaatgtgaaggcgttaatcagatagatgacgatgaagaagaacaactataataagatttgccctagcctgggttctcagttatctctaataagttttatggttggtgcctatatattgtgcaatttggttgctcccttttattttgtttctttttgataagactgttctagcaacggatatgcagagttcattatgaaaatgcatttgttagtgtctttgatggttaa

SEQ ID NO: 37842 - protein, 549 aa, Zea mays subsp. mays
MARRAASSLVSRCLLARAPAGAPPAAPSAPRRTVPADGMHRLLPGVLQRFSTAAAVEEPITPSVHVNYTKLLINGNFVDSASGKTFPTLDPRTGEVIAHVAEGDAEDINRAVAAARKAFDEGPWPKMTAYERSRILLRFADLIEKHNDELAALETWDNGKPYEQAAQIEVPMVARLMRYYAGWADKIHGLIVPADGPHHVQILHEPIGVAGQIIPWNFPLLMYAWKVGPALACGNTLVLKTAEQTPLSALYISKLLHEAGLPEGVVNVVSGFGPTAGAALASHMDVDKIAFTGSTDTGKIILELAAKSNLKTVTLELGGKSPFIIMDDADVDHAVELAHFALFFNQGQCCCAGSRTFVHERVYDEFVEKAKARALKRVVGDPFRKGVEQGPQIDDEQFNKILRYIRYGVDGGATLVTGGDRLGDKGFYIQPTIFSDVQDGMKIAQEEIFGPVQSILKFKDLNEVIKRANASQYGLAAGVFTNSLDTANTLTRALRAGTVWVNCFDVFDAAIPFGGYKMSGIGREKGVDSLKNYLQVKAVVTPIKNAAWL

SEQ ID NO: 37843 - DNA, 2219 bp, Zea mays subsp. mays; identical to SEQ ID NO: 37841
  CDS (392)..(1927)

SEQ ID NO: 37844 - protein, 511 aa, Zea mays subsp. mays
MHRLLPGVLQRFSTAAAVEEPITPSVHVNYTKLLINGNFVDSASGKTFPTLDPRTGEVIAHVAEGDAEDINRAVAAARKAFDEGPWPKMTAYERSRILLRFADLIEKHNDELAALETWDNGKPYEQAAQIEVPMVARLMRYYAGWADKIHGLIVPADGPHHVQILHEPIGVAGQIIPWNFPLLMYAWKVGPALACGNTLVLKTAEQTPLSALYISKLLHEAGLPEGVVNVVSGFGPTAGAALASHMDVDKIAFTGSTDTGKIILELAAKSNLKTVTLELGGKSPFIIMDDADVDHAVELAHFALFFNQGQCCCAGSRTFVHERVYDEFVEKAKARALKRVVGDPFRKGVEQGPQIDDEQFNKILRYIRYGVDGGATLVTGGDRLGDKGFYIQPTIFSDVQDGMKIAQEEIFGPVQSILKFKDLNEVIKRANASQYGLAAGVFTNSLDTANTLTRALRAGTVWVNCFDVFDAAIPFGGYKMSGIGREKGVDSLKNYLQVKAVVTPIKNAAWL

SEQ ID NO: 37845 - DNA, 1857 bp, Arabidopsis thaliana
  CDS (76)..(1680)
ataaacagagttctcacaccaatacaaaagagaccatcaccgtgagaaagagaagaagaacaaaaaaagttagccatggcatcaagaagagtttcttcgctgctctctcgctctttcatgtcctcctcacgttctatcttctctcttagaggcatgaacagaggagctcaaagatacagtaacctcgctgctgctgtcgaaaacactattactccaccagtgaaagttgaacacacacagcttctaatcggtggaagattcgttgatgcagtgtcaggaaaaactttccctactttggatccaagaaatggagaagtgattgctcaagtgtctgaaggtgatgcagaagacgtgaaccgcgcggttgcagctgcacgaaaggcttttgatgaaggaccatggcctaaaatgacagcttatgagagatcaaagatactgtttcgtttcgctgatttaatcgagaaacataatgatgagattgctgctcttgagacttgggataatgggaaaccttatgaacaatctgctcaaattgaagtaccaatgcttgctagggtgttccggtactatgctggttgggcagacaagatacatggaatgacaatgccaggagatggtccacaccatgtgcagaccttacatgagcctataggagtcgctggacaaatcatcccatggaacttccctcttctcatgctttcttggaaacttggaccagctttagcttgcggtaacaccgttgttctcaaaactgctgagcaaactcctctatctgctcttcttgttgggaaactacttcatgaggctggacttcctgatggagttgtgaatatagtttctggatttggggctactgctggtgcagctatagctagtcacatggacgttgataaggttgctttcaccgggtctactgatgttgggaagattattcttgagttagcttcaaaaagcaaccttaaggcagtgactcttgagcttggaggaaagtcaccattcattgtatgtgaagatgctgatgtggatcaggccgttgagcttgcacatttcgctttgttctttaaccagggacaatgttgttgtgctggttcgcgtacatttgtacatgaacgtgtgtatgatgagtttgtagagaaagctaaagctcgtgcactcaagcgaaatgttggagatcccttcaagtcaggcattgagcaaggtccccaggtagactcagagcaattcaacaaaatcctgaagtacatcaaacatggagttgaggctggagccacattacaagctggaggtgacaggcttggttccaagggttactacattcaacctactgtcttctcagatgtgaaagatgacatgctcatagcaacagacgagattttcgggccggttcaaaccatactgaaattcaaggatcttgatgaggtgattgcaagggccaacaactcaaggtacggtttagctgctggagtgttcacacagaatcttgacacagcacaccggctgatgcgagcactcagagttgggactgtttggatcaactgttttgatgtacttgatgcatcaattccatttggagggtataagatgagtggcattggtagagagaaaggtatctacagtctcaacaattacttgcaagtcaaggctgttgttacttccctcaagaaccctgcctggctctaaaccataccaggtggttacacttatttctcgagtttggtttatgatttgcacttttgctttgaaaacctggagttgtactgtgtctctaggatttctagattttgagagtaatttatcttcaatacattttgcaaataaagctacatgacaatgtgtgattaataaacacaaactctt

SEQ ID NO: 37846 - protein, 534 aa, Arabidopsis thaliana
MASRRVSSLLSRSFMSSSRSIFSLRGMNRGAQRYSNLAAAVENTITPPVKVEHTQLLIGGRFVDAVSGKTFPTLDPRNGEVIAQVSEGDAEDVNRAVAAARKAFDEGPWPKMTAYERSKILFRFADLIEKHNDEIAALETWDNGKPYEQSAQIEVPMLARVFRYYAGWADKIHGMTMPGDGPHHVQTLHEPIGVAGQIIPWNFPLLMLSWKLGPALACGNTVVLKTAEQTPLSALLVGKLLHEAGLPDGVVNIVSGFGATAGAAIASHMDVDKVAFTGSTDVGKIILELASKSNLKAVTLELGGKSPFIVCEDADVDQAVELAHFALFFNQGQCCCAGSRTFVHERVYDEFVEKAKARALKRNVGDPFKSGIEQGPQVDSEQFNKILKYIKHGVEAGATLQAGGDRLGSKGYYIQPTVFSDVKDDMLIATDEIFGPVQTILKFKDLDEVIARANNSRYGLAAGVFTQNLDTAHRLMRALRVGTVWINCFDVLDASIPFGGYKMSGIGREKGIYSLNNYLQVKAVVTSLKNPAWL

SEQ ID NO: 37847 - DNA, 1857 bp, Arabidopsis thaliana; identical to SEQ ID NO: 37845
  CDS (118)..(1680)

SEQ ID NO: 37848 - protein, 520 aa, Arabidopsis thaliana
MSSSRSIFSLRGMNRGAQRYSNLAAAVENTITPPVKVEHTQLLIGGRFVDAVSGKTFPTLDPRNGEVIAQVSEGDAEDVNRAVAAARKAFDEGPWPKMTAYERSKILFRFADLIEKHNDEIAALETWDNGKPYEQSAQIEVPMLARVFRYYAGWADKIHGMTMPGDGPHHVQTLHEPIGVAGQIIPWNFPLLMLSWKLGPALACGNTVVLKTAEQTPLSALLVGKLLHEAGLPDGVVNIVSGFGATAGAAIASHMDVDKVAFTGSTDVGKIILELASKSNLKAVTLELGGKSPFIVCEDADVDQAVELAHFALFFNQGQCCCAGSRTFVHERVYDEFVEKAKARALKRNVGDPFKSGIEQGPQVDSEQFNKILKYIKHGVEAGATLQAGGDRLGSKGYYIQPTVFSDVKDDMLIATDEIFGPVQTILKFKDLDEVIARANNSRYGLAAGVFTQNLDTAHRLMRALRVGTVWINCFDVLDASIPFGGYKMSGIGREKGIYSLNNYLQVKAVVTSLKNPAWL

SEQ ID NO: 37849 - DNA, 1857 bp, Arabidopsis thaliana; identical to SEQ ID NO: 37845
  CDS (154)..(1680)

SEQ ID NO: 37850 - protein, 508 aa, Arabidopsis thaliana
MNRGAQRYSNLAAAVENTITPPVKVEHTQLLIGGRFVDAVSGKTFPTLDPRNGEVIAQVSEGDAEDVNRAVAAARKAFDEGPWPKMTAYERSKILFRFADLIEKHNDEIAALETWDNGKPYEQSAQIEVPMLARVFRYYAGWADKIHGMTMPGDGPHHVQTLHEPIGVAGQIIPWNFPLLMLSWKLGPALACGNTVVLKTAEQTPLSALLVGKLLHEAGLPDGVVNIVSGFGATAGAAIASHMDVDKVAFTGSTDVGKIILELASKSNLKAVTLELGGKSPFIVCEDADVDQAVELAHFALFFNQGQCCCAGSRTFVHERVYDEFVEKAKARALKRNVGDPFKSGIEQGPQVDSEQFNKILKYIKHGVEAGATLQAGGDRLGSKGYYIQPTVFSDVKDDMLIATDEIFGPVQTILKFKDLDEVIARANNSRYGLAAGVFTQNLDTAHRLMRALRVGTVWINCFDVLDASIPFGGYKMSGIGREKGIYSLNNYLQVKAVVTSLKNPAWL

SEQ ID NO: 37851 - DNA, 1524 bp, Pseudomonas putida
  CDS (1)..(1524): transl_table=11
atgtccggtgattatatggtacaagcaacaacaaatttggttggcgccgcctattggcgcggtcgtgctgatgaaatccagttcgaaggtcggtgcttaattgatgggaaaatggttgaagcgcagtctgggtatactttcgattgcgtgtcgccggtagacgggcgcgtactgacaaaggtatctgcaggtggcgaggcggacgtcaatagagccgttgctgcagcgcgctcagcatttcgagatcggcgttggtcagggcaatctccagtatcccgcaagcgtactctccaggcattcgcagcgttgattcgcctgcatcgagacgaactggcgctcttggaaacgctcgatatgggtaagcccatttctgcatcacggagcgttgatgtcgaggcagtggcgagttgttttgaatggtatgcagaagcgatcgataagctctacgaacagattgcaccaaccgctgagactgatttagcacttataacccgtgagccattaggggtagtgggcgctattgtgccatggaactttcctatgctgactgcggcttggaagacggcgccggcgctggcttgtgggaattctgtggtgctcaagcctgccgagcaatcgcctctgacagcaattcgtctagcccaattggcgctggaggcgggcgttcccgaaggggtattcaatgtcgtgcctgggcttggtggatctgccggtagggcacttgcctgccacatggatgttgatggtattttctttactggatccaccgcgacaggacgacttctcaccgagtacgctgcgaagagtaacctcaagcgagtttgtctggagctcggagggaagagtccaaatataattctcgcctcctacggtgacattgaaaaagcggctgtagcctcagccgagagtatgttcaataaccaaggggaggtatgcattgctccatctcgattgatagttgaacgctcaatccataaacgggttgtagagattgttgctgaagtcgcaaagcggcgtcagcctggggacccgctcgacccgaccacgcgtatgggcgctttggtggatgctaatcatgccgaccgtgtgatgggatttatcgggcgagcaaaagcggacggcgcaacacttgtggcgggcggtacgcgcgcgctgactgaaaccgggggctcttatgttgtgccaacggtctttgacaacgtgtcaaattgtatggagattgctcgcgacgaagttttcggtccggtgctgtcagtaatccctgtcgccaacgttggcgaggcagttgctgtcgccaacgacagcccttatgggctcggagcaggtgtgtggacggaccgtttatctgatgcgcataagatttcccgagagctgcgggcgggtgttgtgtatgtcaactgttacaacgactgtgacatcaccacaccttttgggggagtcaagcaatccggtaatgggagggacaagtccctttatgcgcttgatgaatatactgaactgaagactacttggatcaagttgtag

SEQ ID NO: 37852 - protein, 507 aa, Pseudomonas putida
MSGDYMVQATTNLVGAAYWRGRADEIQFEGRCLIDGKMVEAQSGYTFDCVSPVDGRVLTKVSAGGEADVNRAVAAARSAFRDRRWSGQSPVSRKRTLQAFAALIRLHRDELALLETLDMGKPISASRSVDVEAVASCFEWYAEAIDKLYEQIAPTAETDLALITREPLGVVGAIVPWNFPMLTAAWKTAPALACGNSVVLKPAEQSPLTAIRLAQLALEAGVPEGVFNVVPGLGGSAGRALACHMDVDGIFFTGSTATGRLLTEYAAKSNLKRVCLELGGKSPNIILASYGDIEKAAVASAESMFNNQGEVCIAPSRLIVERSIHKRVVEIVAEVAKRRQPGDPLDPTTRMGALVDANHADRVMGFIGRAKADGATLVAGGTRALTETGGSYVVPTVFDNVSNCMEIARDEVFGPVLSVIPVANVGEAVAVANDSPYGLGAGVWTDRLSDAHKISRELRAGVVYVNCYNDCDITTPFGGVKQSGNGRDKSLYALDEYTELKTTWIKL

SEQ ID NO: 37853 - DNA, 1772 bp, Arabidopsis sp
  CDS (15)..(1619)
caaaaaagttagccatggcatcaagaagagtttcttcgctgctctctcgctctttcatgtcctcctcacgttctatcttctctcttagaggcatgaacagaggagctcaaagatacagtaacctcgctgctgctgtcgaaaacactattactccaccagtgaaagttgaacacacacagcttctaatcggtggaagattcgttgatgcagtgtcaggaaaaactttccctactttggatccaagaaatggagaagtgattgctcaagtgtctgaaggtgatgcagaagacgtgaaccgcgcggttgcagctgcacgaaaggcttttgatgaaggaccatggcctaaaatgacagcttatgagagatcaaagatactgtttcgtttcgctgatttaatcgagaaacataatgatgagattgctgctcttgagacttgggataatgggaaaccttatgaacaatctgctcaaattgaagtaccaatgcttgctagggtgttccggtactatgctggttgggcagacaagatacatggaatgacaatgccaggagatggtccacaccatgtgcagaccttacatgagcctataggagtcgctggacaaatcatcccatggaacttccctcttctcatgctttcttggaaacttggaccagctttagcttgcggtaacaccgttgttctcaaaactgctgagcaaactcctctatctgctcttcttgttgggaaactacttcatgaggctggacttcctgatggagttgtgaatatagtttctggatttggggctactgctggtgcagctatagctagtcacatggacgttgataaggttgctttcaccgggtctactgatgttgggaagattattcttgagttagcttcaaaaagcaaccttaaggcagtgactcttgagctggaggaaagtcaccattcatttgtatgtgaagatgctgatgtggatcaggccgttgagcttgcacatttcgctttgttctttaaccagggacaatgttgttgtgctggttcgcgtacatttgtacatgaacgtgtgtatgatgagtttgtagagaaagctaaagctcgtgcactcaagcgaaatgttggagatcccttcaagtcaggcattgagcaaggtccccaggtagactcagagcaattcaacaaaatcctgaagtacatcaaacatggagttgaggctggagccacattacaagctggaggtgacaggcttggttccaagggttactacattcaacctactgtcttctcagatgtgaaagatgacatgctcatagcaacagacgagattttcgggccggttcaaaccatactgaaattcaaggatcttgatgaggtgattgcaagggccaacaactcaaggtacggtttagctgctggagtgttcacacagaatcttgacacagcacaccggctgatgcgagcactcagagttgggactgtttggatcaactgttttgatgtacttgatgcatcaattccatttggagggtataagatgagtggcattggtagagagaaaggtatctacagtctcaacaattacttgcaagtcaaggctgttgttacttccctcaagaaccctgcctggctctaaaccataccaggtggttacacttatttctcgagtttggtttatgatttgcacttttgctttgaaaacctggagttgtactgtgtctctaggatttctagattttgagagtaatttatcttcaatacattttgcaataaagctacatgacaatgg

SEQ ID NO: 37854 - protein, 534 aa, Arabidopsis sp
MASRRVSSLLSRSFMSSSRSIFSLRGMNRGAQRYSNLAAAVENTITPPVKVEHTQLLIGGRFVDAVSGKTFPTLDPRNGEVIAQVSEGDAEDVNRAVAAARKAFDEGPWPKMTAYERSKILFRFADLIEKHNDEIAALETWDNGKPYEQSAQIEVPMLARVFRYYAGWADKIHGMTMPGDGPHHVQTLHEPIGVAGQIIPWNFPLLMLSWKLGPALACGNTVVLKTAEQTPLSALLVGKLLHEAGLPDGVVNIVSGFGATAGAAIASHMDVDKVAFTGSTDVGKIILELASKSNLKAVTLELEESHHSFVCEDADVDQAVELAHFALFFNQGQCCCAGSRTFVHERVYDEFVEKAKARALKRNVGDPFKSGIEQGPQVDSEQFNKILKYIKHGVEAGATLQAGGDRLGSKGYYIQPTVFSDVKDDMLIATDEIFGPVQTILKFKDLDEVIARANNSRYGLAAGVFTQNLDTAHRLMRALRVGTVWINCFDVLDASIPFGGYKMSGIGREKGIYSLNNYLQVKAVVTSLKNPAWL

SEQ ID NO: 37855 - DNA, 1503 bp, Streptomyces refuineus
  CDS (1)..(1503): transl_table=11
ctgagcgcattgggagcatgtgtgaatccttccccgggagtggctgcccgcgcctttctgtcccgtccccacctgctcttcatcggcggccggttcgtggcctccgcgacggggcgcaccttcgccaccgtcgacccgtccaccggtgaacgcctcgcgcaggtcgcccacgcgggaccggaggatgtcgaggcagccgtcgcggccgcccggaccgcgctcgaaggagcgtggggcgcgcttcccgcggccgagcgcggcaggctcatcacccgcctcgcggacctcgtcgagcgcaacgccgaggaactcgccgaactcgagtccctcgacgtgggcaagccgatcgccaagacccgcgccctcgacgtcccggccgccgcagcccagttccgctacttcggcggctggcccacgaagatcgagggggagacgatcccggtcgcggtaccggacacgctgtgctacacgcgcaaggaaccggtgggtgtctgcgcgcagatcgtcccctggaacttcccgctgctgatggcggcctggaagctcggagcggcactcgccgccgggtgcaccgtggtgctcaagcccgcggagcagaccccgctgaccaccctgcgcctggccgaactgatcgcggaggccggcttccccgagggcacggtcaacgtgctcaccggtgacggtccgaccggtgccgcgctggtcgaccatccgggcatcgacaagatcgctttcaccggctccaccgcggtgggacgcgagatcggggcgaaggccggcgcccggctcaagcgggtgaccctggagctcggcgggaagagccccaacatcgtcctcccggacgccgacatcgaggccgcgatctcgggcgccgccgagggcatcttcttcaacaccggccaggcctgcaacgccgcctcccggctgtacgtgcaccgggacgtgttcgacgacgtggtcgagggagtgctggcgcgggcccggcgggcgcgcgtcggcccggctctcgacccggcgaccgagtacgggccgctggtgtcggccgaacagtaccgccgggtgcgcggctacctcctcgacggcgtctccgaaggcgccgtgctgcgggcgggggaagtgcctgcggccgacccgggcggcgggtacttcgtccgtcccgcgctgttcacgaacgtcacaccgaccatgcggatctgccgtgaggagatcttcggaccggttctcgtggcggcgccgttcgagaccgtcgacgaggtcgtccgcctggccaacgacaccgagtacggcctggcggccggggtgtggacccggagcctgagcgccgcgcacggcctcgcggcccggctgaaagcggggtcggtgtacctcaactcatgggcgcccggcgatccggcttccccgttcggcggactcaaggcgtccggggtcgggcgggagatggggcgcgccggcctcgacgcctacctcgaactgaaaaccgtgtggacgtcaatcgccccctga

SEQ ID NO: 37856 - protein, 500 aa, Streptomyces refuineus
LSALGACVNPSPGVAARAFLSRPHLLFIGGRFVASATGRTFATVDPSTGERLAQVAHAGPEDVEAAVAAARTALEGAWGALPAAERGRLITRLADLVERNAEELAELESLDVGKPIAKTRALDVPAAAAQFRYFGGWPTKIEGETIPVAVPDTLCYTRKEPVGVCAQIVPWNFPLLMAAWKLGAALAAGCTVVLKPAEQTPLTTLRLAELIAEAGFPEGTVNVLTGDGPTGAALVDHPGIDKIAFTGSTAVGREIGAKAGARLKRVTLELGGKSPNIVLPDADIEAAISGAAEGIFFNTGQACNAASRLYVHRDVFDDVVEGVLARARRARVGPALDPATEYGPLVSAEQYRRVRGYLLDGVSEGAVLRAGEVPAADPGGGYFVRPALFTNVTPTMRICREEIFGPVLVAAPFETVDEVVRLANDTEYGLAAGVWTRSLSAAHGLAARLKAGSVYLNSWAPGDPASPFGGLKASGVGREMGRAGLDAYLELKTVWTSIAP

SEQ ID NO: 37857 - DNA, 1713 bp, Hordeum sp
  CDS (79)..(1581)
ttcggcacgaggaacacaacctccttcccctctctccacgtaggccaagggacgaagcgaagggaacgggcgacgtcgatggcggcagcgaacggcggccaggggtttgaggtgccggaactggacatcaagttcaccaagctcttcatcaatggccagttcgtcgacgcagcttcaggcaagacgttcgagacccgggacccacgcaccggcgaggtgatcgccaggatcgccgagggagacaaggccgacatcgacctcgccgtgaaggccgcccgcgacgccttcgacaacggcccctggcccagaatgcccggctgcgcaagggcaaggatcctgcacaagttcgccgacctggtcgaccagcacgtggaggagctggcggcgctggacacggtggacgccggcaagctgttccagatgggcaagctggtggacatccccggaggcgccaacctgctccggtactacgccggtgccgccgacaagatccacggcgagacgctcaagatggcgcggccgctgcacgggtacacgctcaaggagcccgtcggcgtcgtgggccacatcgtgccctggaactaccccaccaccatgttcttcttcaaggtcagccccgcgctcgccgccgggtgcaccatggtcgtcaagccggccgagcagacgcccctctccgcgctcttctacgctcacctcgccaaggaggccgggatccccgacggcgtcctcaacgtcgtgcccggctttggcccgacggccggtgcggccatggcttctcacatggacatcgacaagatcagcttcacgggatccacggaggtcgggcggctggtcatgcaggcggcggccctgagcaacctcaagcccgtctcgctggagctggggggcaagtccccgatcatcgtgtttgacgacgccgatgttgacatggccgtgagcctcgttaacatggccacctacaccaacaagggcgagatctgcgtcgctggcacgcgcatatacgtgcaggaagggatctacgacgcctttgtgaacaagtcagtggagcttgccaagaaatccgtggtcggagatcctttcaacccgaacgtacatcaaggtcctcaggttgacaagaatcaatacgagaaggtcctcaagtacatcgacgtcggtaagagcgaaggcgccaccctactcaccggagggaaggcctgcagcgacaagggttactacatcgagcccgccatcttcaccgacgtcaaggatgacatgtcgattgcgcaagaggaaatcttcgggccggtgatggctctcatgaaattcaagacaatggaggaggtgattcagaaggcgaacagcacccgctatggcctggccgccggcgtggtgaccaagaacatcgacaccatgaacaccgtgtcgcggtcggtcaggtccggggtcgtctgggttaactgctacttcgccttcgacccggacgccccgttcggcggctgcaagatgagcggcttcggcaaggacatgggcacggatgccctcgacaagtacctgcacaccaagacggtggtcactccactctacaacacgccctggttgtgatctggacggacatccgatcgaaacgcatggggaaagatttcctagttatatataatatttatacagctggatgctttcaggttacttctgcagttgtacttattacttgtggtcaatctttttcgtggtatt

SEQ ID NO: 37858 - protein, 500 aa, Hordeum sp
MAAANGGQGFEVPELDIKFTKLFINGQFVDAASGKTFETRDPRTGEVIARIAEGDKADIDLAVKAARDAFDNGPWPRMPGCARARILHKFADLVDQHVEELAALDTVDAGKLFQMGKLVDIPGGANLLRYYAGAADKIHGETLKMARPLHGYTLKEPVGVVGHIVPWNYPTTMFFFKVSPALAAGCTMVVKPAEQTPLSALFYAHLAKEAGIPDGVLNVVPGFGPTAGAAMASHMDIDKISFTGSTEVGRLVMQAAALSNLKPVSLELGGKSPIIVFDDADVDMAVSLVNMATYTNKGEICVAGTRIYVQEGIYDAFVNKSVELAKKSVVGDPFNPNVHQGPQVDKNQYEKVLKYIDVGKSEGATLLTGGKACSDKGYYIEPAIFTDVKDDMSIAQEEIFGPVMALMKFKTMEEVIQKANSTRYGLAAGVVTKNIDTMNTVSRSVRSGVVWVNCYFAFDPDAPFGGCKMSGFGKDMGTDALDKYLHTKTVVTPLYNTPWL

SEQ ID NO: 37859 - DNA, 1720 bp, Glycine max
  CDS (111)..(1574)
ggcacgaggcgccagcgtctctacgacaatctcctttctctctaactcataactcagatgagtgccctctctctaactccagtagtagccacggcaattccttcctcaagatgccccccatcaagtttaccaagctcttcatcaatggagatttcgttgattccatatcaggaaggacatttgagactatagaccccagaaaagaagaggtaattgcaagagttagtgagggagataaagaagacattgatattgctgttaaagcagcacgtcaggcatttgactcgggtccatggcctcgcttgccaggctctgaaagggcaaaaattatgatgaaatgggcagacctagttgatgaaaatatagaagaactagcagcattagataccattgatgctggaaagctatactatattaataaggtagcggaaattccttcagctacaaatgcgttacggtactatgcaggtgctgctgataaaattcacggtgacgtattaaaaatgaacggggatttccatgcatatacacttttggaaccaattggtgttgtgggacacataattccatggaatgcccccagcctctcatttttcatcaaggttagcccttccttagctgcaggctgtactatggtcctcaaacctgctgaacaaacacccctctctgcgtggtgttatgctcatataactaaggtggctggaatcccagatggtgtgcttaatatagtacctggatttggcccaactgctggcgcagcaataagctcacacatggacatagatgcggtcagttttactggttcaattgaagtagggcgtgaagtgatgcaggctgcagctaggagcaatttaaaaccagtttcacttgaattaggaggcaagtctcctctcattattttcaatgacgcggatatagacaaagctgcccagcttgctctctttggcatcatgtctaacaagggagaaatttgtgtggcaagttctcgggtgtttgtccaggaagagatctatgatgaatttgagaagaagttggtggagaaggcaaaatcttgggtcgttggggatccttttgatcccaaatccctgcaagggcctcaggctgacaggaaccaattggagaaaatactctcctatattgaacacggaaagagagaaggagctacccttttgaccggaggtaatacagtgggcaacaaaggttactacatagaacctacaattttctgtaatgtaaaggaggacatgcttatagcacgagatgaaatatttggccctgtactagcgctgatgaaatttaagaccatggaggaagcaattaaaagtgctaacaacaccaagtatggcctagcagcaggaattgtgaccaagaatttggatactgcaaacactatgtcaaggtccattcgtgcaggcattgtttggatcaactgctatttaaccgtagggagtgacgttccttttggagggtataagatgagtggatttggaagagatttgggattgcaggcccttcataagtacttacaagttaaatctgttgtaacacctattcacaattctccttggctttgaataattgaatgtctcctacatgagcacatatgcgtgtcttctctcatttgaaataaattacactttatttccttatgatgtatgacttaaaaatacttagtctcttgtattatgagttctttgttttattacaacgttgttaactt

SEQ ID NO: 37860 - protein, 487 aa, Glycine max
MPPIKFTKLFINGDFVDSISGRTFETIDPRKEEVIARVSEGDKEDIDIAVKAARQAFDSGPWPRLPGSERAKIMMKWADLVDENIEELAALDTIDAGKLYYINKVAEIPSATNALRYYAGAADKIHGDVLKMNGDFHAYTLLEPIGVVGHIIPWNAPSLSFFIKVSPSLAAGCTMVLKPAEQTPLSAWCYAHITKVAGIPDGVLNIVPGFGPTAGAAISSHMDIDAVSFTGSIEVGREVMQAAARSNLKPVSLELGGKSPLIIFNDADIDKAAQLALFGIMSNKGEICVASSRVFVQEEIYDEFEKKLVEKAKSWVVGDPFDPKSLQGPQADRNQLEKILSYIEHGKREGATLLTGGNTVGNKGYYIEPTIFCNVKEDMLIARDEIFGPVLALMKFKTMEEAIKSANNTKYGLAAGIVTKNLDTANTMSRSIRAGIVWINCYLTVGSDVPFGGYKMSGFGRDLGLQALHKYLQVKSVVTPIHNSPWL

SEQ ID NO: 37861 - DNA, 2197 bp, Triticum sp
  CDS (171)..(1820)
tacccacgcgtccgcatcactgctccccctctctcctcagtccccactctcttcccacgcagctggggacgccctcccatttactgagccaagaggaggaggggaagaagaattgattgccgatccggcgcagaccaataaattgttcccgcctccgccgcgagatcatcatggctgctgccgccacgaggagggccgcctcctcgctcgcctcccgctgcctgctcgccaggcccgcagcgtcgcccgccgctgtcccctccgcgctccgcagggcagatggtgcacgtggattgttgccaggactccttcagaggttcggcactgcggcagcagcagaggagcccatttcgccttctgtccaagtgggcgagacacagctccttatcaacggcaaattcgttgatgctgcatctggtaaaactttcccgactgtggaccctcgcaccggggaggtgattgcccgcgtggccgaaggagatgccgaagatgttgaccgtgcggttgtcgctgcccgcaaggcattcgatgaagggccatggcccaggatgactgcctatgagagatcccgtattcttctgcggtttgctgatttgatagagaaacacaatgatgatatcgctgcactggagacgtgggacaacgggaagccctatgagcaagctgcccacatcgaagtgccaatgcttgttcggcttatgcggtactatgcaggctggactgacaagatccatggtctcatcgtaccggctgatggcccgcaccatgtacaggtgctgcacgagccgattggtgtcgtgggtcagatcatcccgtggaacttcccacttttgatgtatggctggaaagttggccctgctttggcctgtggtaacactattgttctcaagactgctgaacaaactcctctatctgccctctatgtttctaagctgttgcatgaggctggactacccgaaggtgtcctgaatatcgtatctggtttcggtcctactgctggggctgctcttgctagccacatggatgttgacaagattgcattcactggatcaaccgatactgggaaagttattcttgagttatctgcacggagcaatcttaagccagtgacactggagctaggaggcaagtctccttttatcgtcatggatgatgcagatatcgaccaagccgttgagcttgcgcattttgcgctgttttttaaccagggacaatgctgctgcgctgggtctcgcacgttcgtacatgagcgtgtttatgatgagtttgttgagaagtccaaggctcgcgctttgaagcgtgtagttggtgatccattcaggaagggtgttgagcagggtcctcagattgatgatgagcaattcaagaagatcttgcgctacatcaagtcgggtgtggacagtggagccacccttgtgacgggtggtgacaagttgggtgacaaaggttactacatccagccaacaattttctcagatgtgcaggatggcatgaaaattgcccaagaggagatatttgggcctgttcagtcaatcttcaagttcaatgacctcaacgaggtgatcaagagggcgaacgcaagccagtacggattggctgccggtgttttcaccaacaacctggacacggccaacaccttgacgcgtgccctcagggccggcacggtctgggtgaattgctttgacatcttcgacgcggcgatccccttcggcgggtacaagatgagcggcatcggtagggagaagggcatcgacagcctgaagaactacctgcaagtcaaggcggtcgtcaccgcgcttaagaaccccgcgtggttgtgagcatagcgcactatggtcctcttgacactccggagaacgtgaagactcgcgataattgaatgaggagaggaagaagaagatgatgatgatgatgacaccaacgaggatcactaataagcccctgccttcatgggcagccagccaccgtctctaataaatatcatatgtgatttggtttcctttgtcaaccgcggcaagacatatatgttgtagcaacattatgtttattatcgcttgttggagaagtctctggttgcagtaaatctgtttttttttatcagttgttgaagctaatggtgttcactaccctagttaattcatgcccttgttaagcagagaataaagttcttggtttggctgaagctgctaacttcatt

SEQ ID NO: 37862 - protein, 549 aa, Triticum sp
MAAAATRRAASSLASRCLLARPAASPAAVPSALRRADGARGLLPGLLQRFGTAAAAEEPISPSVQVGETQLLINGKFVDAASGKTFPTVDPRTGEVIARVAEGDAEDVDRAVVAARKAFDEGPWPRMTAYERSRILLRFADLIEKHNDDIAALETWDNGKPYEQAAHIEVPMLVRLMRYYAGWTDKIHGLIVPADGPHHVQVLHEPIGVVGQIIPWNFPLLMYGWKVGPALACGNTIVLKTAEQTPLSALYVSKLLHEAGLPEGVLNIVSGFGPTAGAALASHMDVDKIAFTGSTDTGKVILELSARSNLKPVTLELGGKSPFIVMDDADIDQAVELAHFALFFNQGQCCCAGSRTFVHERVYDEFVEKSKARALKRVVGDPFRKGVEQGPQIDDEQFKKILRYIKSGVDSGATLVTGGDKLGDKGYYIQPTIFSDVQDGMKIAQEEIFGPVQSIFKFNDLNEVIKRANASQYGLAAGVFTNNLDTANTLTRALRAGTVWVNCFDIFDAAIPFGGYKMSGIGREKGIDSLKNYLQVKAVVTALKNPAWL

SEQ ID NO: 37863 - DNA, 1488 bp, Neurospora crassa
  CDS (1)..(1488)
atggaagtcgagcttacggcccccaacggcaagaagtggatgcagccactgggcttgttcattaataacgagtttgtcaaaagtgccaatgagcagaagttgatttccatcaacccaactaccgaagaggagatctgctcggtatacgccgcaaccgccgaggatgttgacgccgcagtatcagcagcccgcaaggcctttaggcacgaatcatggaagtcgctatccggcactgagcgcggcgccctgatgcgcaagctggccgacctagtggccgagaatgccgaaatcctagccaccatcgagtgcctggacaacggcaagccgtatcagacagcccttaacgagaacgtgcccgaagtgatcaacgtcctcaggtactatgccggctatgcggacaagaactttggccaagtgattgacgttggccccgccaagtttgcctacacggtcaaggagcctctcggcgtatgtggccagatcatcccctggaactacccgctagatatggccgcctggaagctggggccagctctctgctgcggcaacaccgtggtcctcaagctggccgagcagactcccctgtccgtgttgtacttggctaagctcattaaggaggccggcttccctcccggtgtgatcaatatcatcaacggacacggcagggaagcgggtgccgcacttgtgcaacatcctcaggtggacaagattgcctttaccggcagcaccactacgggcaaggagatcatgaagatggcttcctataccatgaagaacatcaccctggagactggcggcaagtcaccgttgatcgtgtttgaggatgccgaccttgagctggcggcgacatggtcacacatcggcatcatgagcaaccagggccaaatctgcacagccacttcacgcattctcgtgcacgagaagatctacgacgagtttgtcgaaaaattcaaggccaaagtccaggaggtttcggtactcggcgaccccttcgaggagagcacgttccacggacctcaggtcaccaaagcgcagtatgagcgtgttctgggctatatcaatgtcggaaaggaagagggtgccacggtgatgatgggtggtgagccggctccgcagaacggtaaaggtttctttgtggccccgactgtcttcacgaacgtcaagccgaccatgaagatcttcagggaggagatctttgggccctgcgtggccattaccacgttcaaaacggaggaggaggcgttgacgctggccaacgacagcatgtatggcctgggagcggctctgttcaccaaggacctaaccagggcacacagagtggcgcgggagatcgaggccggcatggtctgggtcaacagcagcaacgattcagactttaggattccatttggaggcgtgaagcagtctggtattgggagggagttgggagaggcaggtctggcaccttattgcaacgtcaagagtatccatgtaaacctggcggcatga

SEQ ID NO: 37864 - protein, 495 aa, Neurospora crassa
MEVELTAPNGKKWMQPLGLFINNEFVKSANEQKLISINPTTEEEICSVYAATAEDVDAAVSAARKAFRHESWKSLSGTERGALMRKLADLVAENAEILATIECLDNGKPYQTALNENVPEVINVLRYYAGYADKNFGQVIDVGPAKFAYTVKEPLGVCGQIIPWNYPLDMAAWKLGPALCCGNTVVLKLAEQTPLSVLYLAKLIKEAGFPPGVINIINGHGREAGAALVQHPQVDKIAFTGSTTTGKEIMKMASYTMKNITLETGGKSPLIVFEDADLELAATWSHIGIMSNQGQICTATSRILVHEKIYDEFVEKFKAKVQEVSVLGDPFEESTFHGPQVTKAQYERVLGYINVGKEEGATVMMGGEPAPQNGKGFFVAPTVFTNVKPTMKIFREEIFGPCVAITTFKTEEEALTLANDSMYGLGAALFTKDLTRAHRVAREIEAGMVWVNSSNDSDFRIPFGGVKQSGIGRELGEAGLAPYCNVKSIHVNLAA

SEQ ID NO: 37865 - DNA, 1919 bp, Eucalyptus grandis
  CDS (15)..(1532)
aggagagagacgagatggcagagaaccagagcgacgccaacgggagcctgaagacttatgatgaacacgttccggacatcaagtttaccaagctcttcatcaatggcgagttcgtcgattctgtcaaagggaggacgttcgagacgatagatccaagaaatggagaagttacagcaagagttgcagagggagacaaagaggacgtggatttggctgtgaaagccgcccgtcaagcatttgatcacggcccttggccacgcatgcccggctaccaaaggggaaggatcatgtcgaaatttgcggacttgatcgaagagaacatagatgaactggctgctctggacactatcgacgccgggaagatattcagcatgggcaaggccgtggacatccctcacgctgccacatgtctaaggtattatgccggcgcagcggacaagatccatggtgaggtgttgaagatgtcgcgtgaacttcatgggtacacgctgctggagccggttggcgtggtcgggcacattatcccttggaacttcccgaccagcatgttctttatgaaggtcgccccagcactggcggctggttgcaccatgatcgtgaagcctgccgagcagacccctctgtcggctctctattatgctcatttggctaagaaggccggtgttcctaatggagtgatcaatgttgtaactggtttcggaccaacggccggtgctgcaataaccagtcatatggacattgatatggtcaattttacggggtctacaaaagtggggcgcatcgtgatgcagactgcagcgacaagcaatttgaaacaagtgtcactcgaattaggcgggaaatcgcctattatgatatttgatgatgctgatttagatactgctaccgatcttgctctaataggtatcgtccataacaagggagaaatatgcgtcgcgggctctcgcgtttatgttcaggaagggatctatgaagagtttgagaagaagctggtggcaaaggcaaaggcttggccagtcggtgacccatttgatccgaaagtccaacaaggaccgcaggtcgataagaaacaatttgagaagatactttcttatatcgagcatggaaagagagaaggggccacgcttttgactgggggcgagcgtttgggcaccaaagggtactatgttcagccaacaattttcacaaatgttaaggaggacaatgtgatcgtgaaggatgagatttttggtcctgtcatgtcgctcatgaaattcaagactgtggaggaggcgatcaagagggctaacgatactaggtatggtctagcagcagggattgtgacgaagaatatagatgtggcgaacacagtctcgaggtcaattcgagcgggtgtcatatggataaactgctactttgcattcgacaatgactgtccttgtggtggttacaagacaagcggcttcgggagagatctcggtttggatgccctccacaaatgcctacatgttaaatctattgtgaccccgctttataactctccatggctttaagagaattttctaggaaaagagctttgagtcatatggtggctcaaataatgtgtaattccaaattatgaggtatatttgcaataaacaaaatgcaggtcattttggcaaaaaaaaaaaaaaaaaaaagcaagtgtcaaagccattctagtccacttgccttggtggaatgggtttgttgtgtattcttaaatgatctgccctactctctgctcctttgtcgtcttttatatatttttgatattggtaatgaggagatgaattcttctgtgtcctttgtatgtcttatagtctgatatcatcatgagtgatgaagttggtcgaagagcatattgtgcaaactgctaaacttgagttgtactatggggggtttacagtttaaaaaaaaaa

SEQ ID NO: 37866 - protein, 505 aa, Eucalyptus grandis
MAENQSDANGSLKTYDEHVPDIKFTKLFINGEFVDSVKGRTFETIDPRNGEVTARVAEGDKEDVDLAVKAARQAFDHGPWPRMPGYQRGRIMSKFADLIEENIDELAALDTIDAGKIFSMGKAVDIPHAATCLRYYAGAADKIHGEVLKMSRELHGYTLLEPVGVVGHIIPWNFPTSMFFMKVAPALAAGCTMIVKPAEQTPLSALYYAHLAKKAGVPNGVINVVTGFGPTAGAAITSHMDIDMVNFTGSTKVGRIVMQTAATSNLKQVSLELGGKSPIMIFDDADLDTATDLALIGIVHNKGEICVAGSRVYVQEGIYEEFEKKLVAKAKAWPVGDPFDPKVQQGPQVDKKQFEKILSYIEHGKREGATLLTGGERLGTKGYYVQPTIFTNVKEDNVIVKDEIFGPVMSLMKFKTVEEAIKRANDTRYGLAAGIVTKNIDVANTVSRSIRAGVIWINCYFAFDNDCPCGGYKTSGFGRDLGLDALHKCLHVKSIVTPLYNSPWL

SEQ ID NO: 37867 - DNA, 2389 bp, Pinus radiata
  CDS (487)..(2121)
ggttgacaagtcggtgcaccttacccttaacgtgctttgccgaataccatcgtagtagtagaactagccggaggaagggtcggaaacttatggaagtttaagttgtatttagagaaaatttggcaaggatttttggatttataatggttaaattttaaactttttaatttttgatgatgttgaatccattttccacatgatacaaaaactttctctaccaaaattttggaacttttaccggattcccgccacttttgacggtctaggcaattcgtctgccttgttaaacgacttatttaccatctcccaggacgagtgagaaggttgtatatctcccatgagaagaaggttgttggagttccagtgcatgcacctaacgttaacctgcgattccctattgtttcctatttcccaggaggagtcagaaggttgtatatctcccagaacttagaaggagaaggttgttcgagctccagtgcaacaacgatgacaatagccaggagatgttcttcacttatagtgcgaggagtgcggtctgctggttcccgttcatctgctgttggatcgccagctctatcaaaacaagcatcaacaaagaattccagaattcaaagatttggaacagctgcaagtgctttagaggaacctatagcaccacctgtccaagtgaagtacacgcatcttcttattgatggacaattcgttaatgcagcttctgggaaaacatttccaacctttgatcccagaacaggggatttgattgctgatgtggctgaaggcgatgcagaagatgtggacagagctgtaaaggctgcacgaaaagcctttgatgaaggcccatggccaaaaatgactgcttatgaaagatcgtgtattatgtaccggtttgctgacttgcttgaaaagcataatgatgagattgcagctctggaaacatgggacaatgggaagccttatgagcaatcatccttggtcgaagtgccaatggcaatacgggtatttcgttactatgcaggttgggcagataaaatacatggccttacaattccagctgatggaccttatcatgttcaaactttacatgaacctattggagttgcaggtcaaatcattccttggaattttccattgcttttgttttcttggaaagtggctccagcactagcttgtgggaacactattgtattaaagagtgctgagcagacatcattaacagctatttatgcagcaaagcttttccatgaggctggactgccttcaggagtcctgaatatcattccaggatatggtcgaactgcaggagttgcaattgcaaaacacatggatattgataagcttgccttcacaggatcaactgaaactggtaaagcagtactagagttagcttctaagagcaaccttaagcgagtgacattggaacttggagggaagtctccatttatcgtatgtgaagatgctgatgttgaccaggctgttgagcttgcacactctgctctatttttcaaccagggtcaatgctgctgtgctgcatcacgaacctatgtacatgagagcatctatgatgaatttgtagaaaagacaaaagcacggtgtttaagtcgtgttgttggtgatccctttaaaaaaggcgttgaacaaggtcctcagattgaccagatgcagtttaacaaaattatgagttatattaaggctgggaaagagagtggtgcaaaacttgtaacagggggagagcaaattggtaccaagggcttctacattatgcccacagttttctcagaagttcaggatgacatgcccattgccactgatgaaatatttggccctatacaatcaattttgaaattcaaagatataaacgaagtaataaagcgggctaatggtactgattatggcttggcagcgggagtctttacaaagagtatggataccgcaaacactctcactcgtgcgttacgtgcaggatcaatctggattaattgctttcacatttttgatgccggtgtaccttttggtggctataaaatgagtggcaccggaagacaaaagggaatatatggtctccaaagttacttacaggttaaagccgttgtgactcctttgaagaatccagcatggttgtaggctgttacgttccttctaatatatttgatgaatgcagaacatatttaatcccttgtgctattgtcaagtcagtctactttgaaataaactctctattactagaaatgtgttaccttcagaggggtgggatggttcgtttagctgggcatcctatagtaacgtctctgtaaaactgtgtagattcagacgttagaactctggttagctgtgcatcctatagtaacgtctctgtaatacggtgtagattcagacgttggaaatcaattat

SEQ ID NO: 37868 - protein, 544 aa, Pinus radiata
MTIARRCSSLIVRGVRSAGSRSSAVGSPALSKQASTKNSRIQRFGTAASALEEPIAPPVQVKYTHLLIDGQFVNAASGKTFPTFDPRTGDLIADVAEGDAEDVDRAVKAARKAFDEGPWPKMTAYERSCIMYRFADLLEKHNDEIAALETWDNGKPYEQSSLVEVPMAIRVFRYYAGWADKIHGLTIPADGPYHVQTLHEPIGVAGQIIPWNFPLLLFSWKVAPALACGNTIVLKSAEQTSLTAIYAAKLFHEAGLPSGVLNIIPGYGRTAGVAIAKHMDIDKLAFTGSTETGKAVLELASKSNLKRVTLELGGKSPFIVCEDADVDQAVELAHSALFFNQGQCCCAASRTYVHESIYDEFVEKTKARCLSRVVGDPFKKGVEQGPQIDQMQFNKIMSYIKAGKESGAKLVTGGEQIGTKGFYIMPTVFSEVQDDMPIATDEIFGPIQSILKFKDINEVIKRANGTDYGLAAGVFTKSMDTANTLTRALRAGSIWINCFHIFDAGVPFGGYKMSGTGRQKGIYGLQSYLQVKAVVTPLKNPAWL

SEQ ID NO: 37869 - DNA, 1970 bp, Pinus radiata
  CDS (61)..(1704)
gttggagttgcacacaaggttggaggaagaaagttgttggagctctcaggttgaacgaaaatggcagcaatgcgagcaggcaggggattttcttcacttctaactcgagcagtccggtcggctggtacacggtcacccgccgttggattggcagctttatcacaagaagcatccataaagaatactgggattcgaagtttaggaacagcggcaagtgctttggaagaacctatagcaccacctgtccaagtacagtatacacagcttcttatcgatggacaatttgttaatgcggcttctggaagaacatttccaacattggatcccagaacaggggatttgattgtcgatgtggctgaaggtgatgcagaagacgtggacagggctgtaaaggctgcacgaaaagcctttgacgagggcccatggccgaaaatgactgcttatgagagatcatgtattatgctccggttcgctgacttgcttgaaaagcataatgacgagattgcagccttggaaacatgggacaatgggaagccctatgagcaagcagccttggttgaagtgccaatggtagtgcggctatttcgttactatgcagggtgggcagataaaatacatggccttacagttccagctgatggaccttatcattgtcaaacattacatgagcctattggagttgcaggtcaaatcatcccttggaattttccactacttatgtttgcttggaaagttggtcctgcactagcttgtgggaacagtattgtattaaagagtgctgagcagacaccattaacagctctttatgcagcaaaacttttccatgaggctggactgcctccaggagttctgaatgtcatttcaggatatggtccaactgcgggagctgcaattgcaagacacatggatattgataaggttgcttttacaggttcaacttctactggtcaagcagtgctagagttagcttccaagagcaaccttaagccagtgacattggaacttggaggaaagtccccttttattgtatgcaaagatgctgatgtcgatcaagccgtggaactcgctcactttgcattatttttcaatcagggtcaatgctgctgtgctggatcacgaacctttgtacatgagagtatccatgatgagtttgtagaaaaagcaaaagcgcggtgtttaagtcgggttgtcggtgatccttttagaaaaggtgttgagcagggtcctcagattgatcgggaacagtttaacaaggttatgggttatatcaagtctgggagggagagtggtgcaaaacttgtaacagggggagaccaaattggtaccaagggcttctatattatgcctaccatcttctcagaagttaaggatgacatgggcatagctactgacgaaatatttggtccagtacagtcaattataaaattcaaaactttagacgaagtaataaagcgggcgaatgctactcgttatggcttggcagcaggagtgtttacaaagaatatagagaccgcgaactctcttactcgggcattacgtgtcggaacagtttgggttaattgctttgacatttttgatgctggtataccttttggtggctataaaatgagtggcactggaagagagaagggtatctacagtctcaataactacttacaggttaaagctgttgtctctcctttgaagaatccagcctggttgtaggctgttagttcctacaaatggttctattgtgtgggggaacatattcagttcctgatggtcttgtcaagtcagtctaatttgaatttagctttctctgtcaataattaatgtatatgaccttcagagaggtgtgatgctcttgttttcctgtgaaccttcacagttgtgtctctgtaagattctgtggtttcagaatttggaactcaattatcatggccatatcaaatgcgaaatgaagggtgtcattgtttctgccaaaaaaaaaa

SEQ ID NO: 37870 - protein, 547 aa, Pinus radiata
MAAMRAGRGFSSLLTRAVRSAGTRSPAVGLAALSQEASIKNTGIRSLGTAASALEEPIAPPVQVQYTQLLIDGQFVNAASGRTFPTLDPRTGDLIVDVAEGDAEDVDRAVKAARKAFDEGPWPKMTAYERSCIMLRFADLLEKHNDEIAALETWDNGKPYEQAALVEVPMVVRLFRYYAGWADKIHGLTVPADGPYHCQTLHEPIGVAGQIIPWNFPLLMFAWKVGPALACGNSIVLKSAEQTPLTALYAAKLFHEAGLPPGVLNVISGYGPTAGAAIARHMDIDKVAFTGSTSTGQAVLELASKSNLKPVTLELGGKSPFIVCKDADVDQAVELAHFALFFNQGQCCCAGSRTFVHESIHDEFVEKAKARCLSRVVGDPFRKGVEQGPQIDREQFNKVMGYIKSGRESGAKLVTGGDQIGTKGFYIMPTIFSEVKDDMGIATDEIFGPVQSIIKFKTLDEVIKRANATRYGLAAGVFTKNIETANSLTRALRVGTVWVNCFDIFDAGIPFGGYKMSGTGREKGIYSLNNYLQVKAVVSPLKNPAWL

SEQ ID NO: 37871 - DNA, 1848 bp, Pinus radiata
  CDS (255)..(1748)
tggctatgcagcgctccagcggagcctgctttgatgcagccattccttcaacagctctgttctttggttgttcagaaattccttgatgaagtctgctccgttccaacctcatggtttggcagtggtccaaattatttacaggttgttgggttcggttttagcccgacttacttggtgggggcgacgcatctacagcgacggacttcaccggttacggtcttgaaggattcaagaaattcgagttgcatgaaagaatggccggcttagataatggggtagttaatggtatcgtgtctgtgaaattcaccaaactctttattgatggaaaatttgtggacgcaatttcagggaagacttttgaaactttggatcctcgaacaggagatttgataacgcgcgtcgcagaaggtgataaggaggatgtggatttggctgtgaagacggcccgggaggctttcgataagggaccttggcctcgaatgtctggctatgaaaggggtcgcttactgaataggtacgctgatttggtagagcagtatatagatgaactagcagctcttgaaacactagataatggacaaccactcacccttgtccgtgtcattgtgacggggtgtatccagattctcagatactatgcaggagcggctgataaaatacatggggaaacattaaaaatgggagggcaatatcaggcatatactttgcatgagcctattggagtggtcggtcagattataccatggaacttcccacttttcatgtttttcatgaaaatctctccagctttggcttgtggatgcactatagttatcaaacctgcagaacaaactcctctaactgcactttattgtgcacatctggccaaggaggcagggcttccacctggtgttcttaatgtgataactggttttggagaaacggctggtgctgcaataagcaaccatatggatattgacaaggtagcctttacagggtctactgatataggtcgggttatcatggtggccgctgcccacagcaacttgaaacctgtaacccttgaactcgggggaaaatctccgttgattatcatggatgacgctgatattgaggaggccgtgaatcttgcccacaaggccatattttttggcagtggacaagtatgctgcgcaggatcccggatatatgttcaagagggcatccatgataaatttgtgaagagagtagtggaaagagcgaagaaacaggtggtcggcgatcctttcaacccagaagttgaccatggtcctcagattgacaagacacaatttgaaaaaatattagaatacattgagcatgggaagcgagaaggagcaaaactattgacaggcggtagtcgcgtgggtgaaaaaggattttacattgaaccaaccattttctcccatgtgcaggaggacatgaagattgggaaagaagaaatatttggaccagtcgtgtccattttcaagttcaggaccattgaagaagccatagaactgggcaataaaacaatatatggtttagctgctggaattgtgtcgaagaatatagatacagtcaataggctttcgagatctattcgagcaggagtgatttgggttaactgctaccacgtagtatttcctgatgctccgtttggagggtacaagatgagtgggatcggtagagagcagggtctcgatgttcttaaaaattatttggcagtcaagtgtgtcataactcctctccatgattcaccttggttgtagaactatgctttaacctctttcaaatgtgtttgtcaaatgctttcatagctttatatatttaggttgaagcttcaataaatctttgtatgtaaaaaaaaaa

SEQ ID NO: 37872 - protein, 497 aa, Pinus radiata
MAGLDNGVVNGIVSVKFTKLFIDGKFVDAISGKTFETLDPRTGDLITRVAEGDKEDVDLAVKTAREAFDKGPWPRMSGYERGRLLNRYADLVEQYIDELAALETLDNGQPLTLVRVIVTGCIQILRYYAGAADKIHGETLKMGGQYQAYTLHEPIGVVGQIIPWNFPLFMFFMKISPALACGCTIVIKPAEQTPLTALYCAHLAKEAGLPPGVLNVITGFGETAGAAISNHMDIDKVAFTGSTDIGRVIMVAAAHSNLKPVTLELGGKSPLIIMDDADIEEAVNLAHKAIFFGSGQVCCAGSRIYVQEGIHDKFVKRVVERAKKQVVGDPFNPEVDHGPQIDKTQFEKILEYIEHGKREGAKLLTGGSRVGEKGFYIEPTIFSHVQEDMKIGKEEIFGPVVSIFKFRTIEEAIELGNKTIYGLAAGIVSKNIDTVNRLSRSIRAGVIWVNCYHVVFPDAPFGGYKMSGIGREQGLDVLKNYLAVKCVITPLHDSPWL

SEQ ID NO: 37873 - DNA, 1530 bp, Drosophila melanogaster
  CDS (1)..(1530)
atgtggcgacagctcagcggagtcgcacgaacaggaagcagcctaagcctctgcagaatgcgaggattctcggcactggtgcaggataaggccctggtggatggcgcctgggtggattccagcaatgcaaaggcgaccttcgaggtgcggaatcctgccaatggtgctgtcatcggcaaagtgcccaacatgacggtggcggatgcccagaaggccatagacgccgctaagcaggcgtacgagtccaaggagtggcgatccctgaccgccaaggatcggtccaacctgctcaagaagtggcacaaactgatcgagcagcactcgcaggagatagccgagataatgacggccgagtcgggcaagccgatcaacgagtcgaagggggaggtggcctacggaaacgccttcgtcgagtggtttgcagaggaggcccgtcgcatctacggcgaaattgtgcccagtgcatcgcccaatcgcgaaatcatagtaatgaagcagcccattggggtggcggcgctgattacgccctggaacttcccgatggctatgattacgaggaaagcaggagccgccctggccgcaggatgtacggtcgtggtgaaaccttcagaagacactcctcttactgccctggctgtggccaaattggcagtggacgctggcattccaaagggtgtgataaatgtggtcaccacaaacaaagcggctcccattggcgatctcttctgcaagagtcccgatgttaggggtatatccttcacgggctccactgaggtgggcaaactgctgttccggaactctgctgatggcatcaaaaggatttgtctcgagctcggcggcaatgctccgttcattgtcttcgattcggcggacattgaaaaagcagtggatggcgccatggcctcgaagtttaggaattgcggacagacctgcgtctccgccaatagattctttgtccaggacagcgtctacgataagtttgttgggcagctgaaaaaacgcgtggaagctttgaagatcggagatggtcagggttgcgatgtgcaaatcggaccactgatcaacgagatgcagttcaacaaagtcagtggctttgtggaggacgccaggtcgaagaaggcgaacattattctgggcggacagccgttgcccgacaagggatcccttttctacgcacccacaattgtcacagatgtgccaccctcggcgcaactctactcggaggaggtctttggtccagtggtctccatcatacggttccgagacgaagaagaagcggtaaagaaggcaaacgacaccaggagaggcctggccggttacttctacagcgagaatctgcagcaggtgttccgggtggccaagcgactggaggttggcatggtcggcgtcaacgaaggcatcatctccgcagcagaggctccgtttggtggcgtcaaggagtccggtgtcggacgggagggttccaaacacggtatcgacgactatgtggacatcaagtacatttgcatgggcaacctcaagtacgactga

SEQ ID NO: 37874 - protein, 509 aa, Drosophila melanogaster
MWRQLSGVARTGSSLSLCRMRGFSALVQDKALVDGAWVDSSNAKATFEVRNPANGAVIGKVPNMTVADAQKAIDAAKQAYESKEWRSLTAKDRSNLLKKWHKLIEQHSQEIAEIMTAESGKPINESKGEVAYGNAFVEWFAEEARRIYGEIVPSASPNREIIVMKQPIGVAALITPWNFPMAMITRKAGAALAAGCTVVVKPSEDTPLTALAVAKLAVDAGIPKGVINVVTTNKAAPIGDLFCKSPDVRGISFTGSTEVGKLLFRNSADGIKRICLELGGNAPFIVFDSADIEKAVDGAMASKFRNCGQTCVSANRFFVQDSVYDKFVGQLKKRVEALKIGDGQGCDVQIGPLINEMQFNKVSGFVEDARSKKANIILGGQPLPDKGSLFYAPTIVTDVPPSAQLYSEEVFGPVVSIIRFRDEEEAVKKANDTRRGLAGYFYSENLQQVFRVAKRLEVGMVGVNEGIISAAEAPFGGVKESGVGREGSKHGIDDYVDIKYICMGNLKYD

SEQ ID NO: 37875 - DNA, 1467 bp, Bombyx mori
  CDS (1)..(1467)
atggtgaaagtagacgtcaagtacactaagctatttatcaacaatgaatgggtagatgctgtcagcaaaaaaaccttccctaccatcaacccacaagatgaaacagtcataacacaggtcgctgaaggagataaggcggatattgatttggccgtcgccgcagcaaagaaagcattccaccgttattccccatggcgtaccatggacgcttctcaacgcggcctcctattgcttaagctagccgaacttctagaatcccaatctagatacctagctgagctagagactttagactgtggaaaaccggtaaaacaatccgaagaagaagtatacttttccgcaagcgtgctcagatattacgctggaaaagcggacaagatattaggaaataccattccttcagacggagaagtccttacgttcaccatgaaggagcctgtcggagtgtgcggtcagataataccgtggaattaccccataccaatgatgtcttggaaaatagcaccagccttagctgcaggatgtaccgttgttctgaagccagctgaacaaacaccgctgactgcgctcgctgttgccgccctggtcaaagaagcgggctttccaccgggggttgtcaatgtcgttcccggatacggtgcgacagcgggcggtgctcttactcaccacccagatgttgacaaaatcgctttcactggctccactgaggtcggcagaatcatcttaggagctgcttcagctgttaatttgaaacgtgtaactttggaactcggcggcaaaagtccgctggtagttttcaatgatgctgacgttgaaaaagcagcacaaatcgctcacgcagcggctttcgcaaacgccggtcagtgttgctgcgccggaaccagaacgtacgtccaatccggtatctatgacaagtttgtcaagaaagctgccgagatcgcagaaaagagatccgtcggaaatcccttcgatgacgtccaacaaggaccacagatcgatgaagaaatgtacaagaaagtgctcaactacatcgtagctggtaaggaaggtggcgccaggtgcgtcgcaggtggagacaaagtcggagataaaggttactacatcaaacctactgtcttcgctgatgttcaggatgacatgaaaattgccagagaagagatcttcggccccgttcaaagcattctcaagttcgaaacgttcgatgaggtggtggatcgcgctaatgacacaaattacggcctggctgctggtatcatcactaacgacatcaccgtagccatgagtttctctaagcacgttcgcgctggatctatctggatcaacacttacgaacatgttacgactcagactcctttcggtggattcaaagattctggccttggcagagaattgggtgaagatggaattagccaatatttggaaactaaaacaattactatgcacgtaccgaagaagccggagttctaa

SEQ ID NO: 37876 - protein, 488 aa, Bombyx mori
MVKVDVKYTKLFINNEWVDAVSKKTFPTINPQDETVITQVAEGDKADIDLAVAAAKKAFHRYSPWRTMDASQRGLLLLKLAELLESQSRYLAELETLDCGKPVKQSEEEVYFSASVLRYYAGKADKILGNTIPSDGEVLTFTMKEPVGVCGQIIPWNYPIPMMSWKIAPALAAGCTVVLKPAEQTPLTALAVAALVKEAGFPPGVVNVVPGYGATAGGALTHHPDVDKIAFTGSTEVGRIILGAASAVNLKRVTLELGGKSPLVVFNDADVEKAAQIAHAAAFANAGQCCCAGTRTYVQSGIYDKFVKKAAEIAEKRSVGNPFDDVQQGPQIDEEMYKKVLNYIVAGKEGGARCVAGGDKVGDKGYYIKPTVFADVQDDMKIAREEIFGPVQSILKFETFDEVVDRANDTNYGLAAGIITNDITVAMSFSKHVRAGSIWINTYEHVTTQTPFGGFKDSGLGRELGEDGISQYLETKTITMHVPKKPEF

SEQ ID NO: 37877 - DNA, 1542 bp, Bombyx mori
  CDS (1)..(1542)
atgttgcggagcgtctgcaaattggttcaggcgcaaaaagcgaattttgcaacagctgcttcagcggcaccggctccccaaacaaaaccggaaattttatacaccggtctcttcataaacaatgagtgggtgaagtcttctgatgggaagaccttcaaaactgaaaaccctgccaatggccaagttatagctgaggtccaacatgccaacaaagcagatgtggacaaagctgtgaaggcagctagaaatgcgttcaaacttggatcaccatggagaacaatggacgcctccgagaggggggcccttatcaacaaactagcagatttgattgaaagagacagaacctatttagctagcctggagacgctggacaacggcaaaccatacaaggactcgtatttcggtgatctgtatgcttcaataaaaaacctacggtactacgccgggtgggccgacaagatccacgggaatgtcctgcccgccgacggaaaatactttgcttacactcgtcatgagccagtgggtgtgtgcggtcagataataccatggaacttccctatattgatggcggcttggaagctcgggccagctctggcgacgggttgtactgtggtcatgaagccggccgagcagacgccgctcacagcgctgtacatcgctcaactagtcaaggaagcaggtttcccgcccggggtcgtgaatatgttgccgggctacggagacaccggggccgctatcgtggaccaccccgacgtggataaagtggccttcaccgggtcgacggaggtgggcaagctgatccagcgcggcgcggcgtcgacgataaagcgcatcacgttggagctgggcggcaagtcgcccaacatcgtgctggccgacaccgacctgccgcgcgccgtggaggccgcgcacaacgcgctcttctacaacatgggacagtgctgctgcgccggctctcgcaccttcgtggaggacaagatctacgaccagttcgtagagttgtcggccgagcgcgccaaccgccgcgtggtcggggaccccttccggccggacgtggagcagggaccccagatcgacaacgagcagcgcgacaagatcctgcagctgatcagctccgggtcgcggcagggcgcgcggctggcggcgggcggcggcgccgcccccgggcccggctacttcgtgcagcccaccgtcttctgtgacgtcaccgacgacatggacatcgctaagacagagatctttgggccggtgcagcaaatcctgaagttctcccagttcgacgaggtggtggagcgcgccaacaactcggagtacggactggccgccgctgtcttcactaaagatctagacaaggccaactacttcgtacagaggctgcgcgccggcaccatttgggttaacgactacaacgtattcgggaaccaagtgcccttcggcggcttcaagcagtccgggctgggccgcgagaacgggccctacggactccgcaactacctcgaggtcaaggccgtcgtcgtcaaactcgccgacaagaacacgtga

SEQ ID NO: 37878 - protein, 513 aa, Bombyx mori
MLRSVCKLVQAQKANFATAASAAPAPQTKPEILYTGLFINNEWVKSSDGKTFKTENPANGQVIAEVQHANKADVDKAVKAARNAFKLGSPWRTMDASERGALINKLADLIERDRTYLASLETLDNGKPYKDSYFGDLYASIKNLRYYAGWADKIHGNVLPADGKYFAYTRHEPVGVCGQIIPWNFPILMAAWKLGPALATGCTVVMKPAEQTPLTALYIAQLVKEAGFPPGVVNMLPGYGDTGAAIVDHPDVDKVAFTGSTEVGKLIQRGAASTIKRITLELGGKSPNIVLADTDLPRAVEAAHNALFYNMGQCCCAGSRTFVEDKIYDQFVELSAERANRRVVGDPFRPDVEQGPQIDNEQRDKILQLISSGSRQGARLAAGGGAAPGPGYFVQPTVFCDVTDDMDIAKTEIFGPVQQILKFSQFDEVVERANNSEYGLAAAVFTKDLDKANYFVQRLRAGTIWVNDYNVFGNQVPFGGFKQSGLGRENGPYGLRNYLEVKAVVVKLADKNT

SEQ ID NO: 37879 - DNA, 1524 bp, Oryza sativa (japonica cultivar-group)
  CDS (1)..(1524)
atggggagcaccggcgactgcggcaatggaaaggcggccgccggcggcggcgggttggtggtgccggagatcaagttcaccaagctcttcatcaacggcgagttcgtcgacgccgcctcgggcaagacattcaagacaagggacccacgaacaggcgatgtcctggcccacatcgcagaggcagacaaggctgatgtggacctcgccgtcaaggccgcgagagaggccttcgagcacggcaagtggccccgcatgtcaggctatgagaggagcagggtgatgaacaagctggccgacctggtggagcagcacgccgacgagctggcggcgctggacggcgccgacgccgggaagctgctgacgctgggcaagatcatcgacatgcccgccgcggcgcagatgatgcggtactacgccggcgcggccgacaagatccacggcgagtcccttcgggtggccggcaagtaccaggggtacaccctcagggagcccatcggcgtcgtcggcgtcatcatcccctggaacttccccaccatgatgttcttcctcaaggtcagccccgccctcgccgccggctgcaccatcgtcgtcaagcccgccgagcagacgcccctctccgctctgtactacgctcacctcgccaagctggctggagttccggatggagtgatcaacgtcgtcccgggattcgggccgacagccggtgcggcactctcctcccacatggacgtcgacagtgttgctttcactggctctgctgaaatcggccgtgccatcatggagtcggcggcgcggagcaacctgaagaatgtgtctcttgagctcggcggcaagtctccgatgatagtcttcgacgacgccgatgtcgacatggctgtcagtctgtcatcccttgcagttttcttcaacaagggagagatttgcgtggccgggtcacgcgtctatgtccaagaagggatctacgatgagtttgtgaagaaggccgtggaggctgccaagaactggaaagttggagacccttttgatgctgccaccaatatgggtcctcaggttgacaaggtccaatttgagagggttctcaagtacattgagatcggcaagaacgagggagcaaccctactcacaggtggcaaacccactggtgacaaaggatactacattgagcctaccatatttgtggatgtcaaggaggaaatgacgattgcgcaagaggagatcttcggcccggtgatgtccctcatgaagttcaagacggtggaggaggcgatagagaaggccaactgcaccaagtacgggctggctgccggcattgtgaccaagaacctcaacattgccaacatggtgtcgaggtcagtgcgggccggcacggtgtgggtgaactgctacttcgccttcgaccccgacgcgccgttcggcgggtacaagatgagcgggttcggccgggaccaagggatggtcgccatggacaagtacctgcaggtcaagaccgtcatcaccgccgtcccggactcgccctggtactga

SEQ ID NO: 37880 - protein, 507 aa, Oryza sativa (japonica cultivar-group)
MGSTGDCGNGKAAAGGGGLVVPEIKFTKLFINGEFVDAASGKTFKTRDPRTGDVLAHIAEADKADVDLAVKAAREAFEHGKWPRMSGYERSRVMNKLADLVEQHADELAALDGADAGKLLTLGKIIDMPAAAQMMRYYAGAADKIHGESLRVAGKYQGYTLREPIGVVGVIIPWNFPTMMFFLKVSPALAAGCTIVVKPAEQTPLSALYYAHLAKLAGVPDGVINVVPGFGPTAGAALSSHMDVDSVAFTGSAEIGRAIMESAARSNLKNVSLELGGKSPMIVFDDADVDMAVSLSSLAVFFNKGEICVAGSRVYVQEGIYDEFVKKAVEAAKNWKVGDPFDAATNMGPQVDKVQFERVLKYIEIGKNEGATLLTGGKPTGDKGYYIEPTIFVDVKEEMTIAQEEIFGPVMSLMKFKTVEEAIEKANCTKYGLAAGIVTKNLNIANMVSRSVRAGTVWVNCYFAFDPDAPFGGYKMSGFGRDQGMVAMDKYLQVKTVITAVPDSPWY

SEQ ID NO: 37881 - DNA, 1494 bp, Pseudomonas aeruginosa PAO1
  CDS (1)..(1494): transl_table=11
atgaccaccctgacccgcgccgactgggaagcccgcgccaaagacctgaagatcgaaggccgtgccttcgtcaacggcgaatacagcaacgccgcctccggcgagaccttcgattgcctgagcccggtggatggccgcttcctggccaaggtcgccagttgcgacctggccgatgccgagcaggcggtcaaggtcgcccgcaatgccttcgattccggcgcctggtcgcgcctggcgccggccaagcgcaagcagacgatgatccgcttcgccgatctgctgctggagaacgccgaggagctggccctgctggaaaccctggacatgggcaagccgatcagcgactcgctgcacatcgacgtcgccagcgccgccaacagcctgcgctggagcgccgaggcgatcgacaagatctatgacgaagtcgccgccactccccatgccgagctgggcctggtgacccgcgagccggtcggcgtggtcgccgccatcgtgccgtggaacttcccgctgctgatgtcctgctggaaactcggtccggccctggccaccggcaactcggtgatcctcaagccctccgagaagtcgccgctgaccgccatccgcatcgcccagctggccgtcgaggccggcattccgaaaggcgtgttcaacgtgctgccgggctatggccacacggtaggcaaggcgctggcattgcacatggatgtcgacaccctggtgttcaccggttcgaccaagatcgccaagcaactgatggtctatgccggcgagtcgaacatgaagcgcgtctggctggaggccggcggcaagagcccgaacatcgtcttcgccgacgccccggacctgaaggccgccgccgaagccgctgccggcgccatcgccttcaaccagggcgaagtctgcaccgccggttcgcgcctgctggtggagcgctccatcaaggacaagttcctgcccctggtgatcgaggccctcaagggctggaaaccgggcaacccgctggatccggaaaccaacgtcggcgcgctggtggacacccagcagatgaacaccgtgctgtcctacatcgaggccggtcacaacgacggcgccaagctggtcgccggcggcaagcggaccctggaagaaactggtggcacctacgtcgagccgactatcttcgacggcgtgaccaatgcgatgaagatcgcccgcgaggaaatcttcggcccggtgctctcggtgatcgagttcgaggatgccgaggaagccgtgcgcatcgccaacgacacgccctatgggctggcggcggcggtctggaccagcaacctgtccaaggcgcacctgactgccaaggccctgcgcgccggcagcgtctgggtcaaccagtacgacggcggcgacatgaccgctccgttcggcggcttcaagcagtcgggcaacggtcgcgacaagtcgctgcacgccttcgacaagtacaccgagctgaaggcgacctggatcaagctctga

SEQ ID NO: 37882 - protein, 497 aa, Pseudomonas aeruginosa PAO1
MTTLTRADWEARAKDLKIEGRAFVNGEYSNAASGETFDCLSPVDGRFLAKVASCDLADAEQAVKVARNAFDSGAWSRLAPAKRKQTMIRFADLLLENAEELALLETLDMGKPISDSLHIDVASAANSLRWSAEAIDKIYDEVAATPHAELGLVTREPVGVVAAIVPWNFPLLMSCWKLGPALATGNSVILKPSEKSPLTAIRIAQLAVEAGIPKGVFNVLPGYGHTVGKALALHMDVDTLVFTGSTKIAKQLMVYAGESNMKRVWLEAGGKSPNIVFADAPDLKAAAEAAAGAIAFNQGEVCTAGSRLLVERSIKDKFLPLVIEALKGWKPGNPLDPETNVGALVDTQQMNTVLSYIEAGHNDGAKLVAGGKRTLEETGGTYVEPTIFDGVTNAMKIAREEIFGPVLSVIEFEDAEEAVRIANDTPYGLAAAVWTSNLSKAHLTAKALRAGSVWVNQYDGGDMTAPFGGFKQSGNGRDKSLHAFDKYTELKATWIKL

SEQ ID NO: 37883 - DNA, 1488 bp, Escherichia coli O157:H7 EDL933
  CDS (1)..(1488): transl_table=11
atgaattttcatcatctggcttactggcaggataaagcgttaagtctcgccattgaaaaccgcttatttattaacggtgaatatactgctgcggcggaaaatgaaacctttgaaaccgttgatccggttacccaggcaccgctggcgaatattgcgcgcggcaagagcgtcgatatcgaccgtgcggtgagcgcagcacgcggcgtatttgaacgcggcgactggtcactctcttctccggcaaaacgtaaagcggtgctgaataaactcgccgatttaatagaagccaacgccgaagagctggcactgctggaaactctcgacaccggcaaaccgattcgtcacagtctgcgtgatgatatacccggcgcggcgcgcgccattcgctggtacgccgaagcgatcgacaaagtgtatggcgaagtggcgaccaccagtagccatgagctggcgatgatcgtgcgtgaaccggtcggcgtgattgccgccatcgtgccgtggaacttcccgctgctgctgacttgctggaagcttggcccggcgctggcagcagggaacagcgttgtcctgaaaccgtctgaaaaatcaccgctcagtgcgattcgtctcgcggggctggcgaaagaagcaggcttgccggatggtgtgttgaacgtggtgacgggttttggtcatgaagcggggcaggcgctgtcgcgtcataacgatatcgacgccattgcctttaccggttcgacccgtaccgggaaacagctgctgaaagatgcaggcgacagcaacatgaaacgcgtctggctggaagcgggcggcaaaagcgccaacatcgttttcgctgactgcccggatttgcaacaggcggcaagcgccaccgcagcaggcatcttctacaaccaggggcaggtgtgcatcgccggaacgcgcctgttgctggaagagagcatagccgatgaattcttagccctgttaaaacagcaggcgcaaaactggcagccgggccatccacttgatcccgcaaccaccatgggcaccttaatcgactgcgcccacgccgactcggtccatagctttattcaggaaggcgaaagcaaagggcaactgttgttggatggccgtaacgccgggctggctgtcgccatcggcccgaccatcattgtggatgtagacccgaatgcgtccttaagccgcgaagagattttcggtccggtgctggtggtcacgcgtttcacatcagaagaacaggcgctacagcttgccaacgacagccagtacggccttggcgcggcggtatggacgcgcgacctctcccgcgcgcaccgcatgagccgacgcctgaaagccggttccgtcttcgtcaataactacaacgacggcgatatgaccgtgccgtttggcggctataagcagagcggcaacggtcgcgacaaatccctgcatgcccttgaaaaattcaccgaactgaaaaccatctggataagcctggaggcctga

SEQ ID NO: 37884 - protein, 495 aa, Escherichia coli O157:H7 EDL933
MNFHHLAYWQDKALSLAIENRLFINGEYTAAAENETFETVDPVTQAPLANIARGKSVDIDRAVSAARGVFERGDWSLSSPAKRKAVLNKLADLIEANAEELALLETLDTGKPIRHSLRDDIPGAARAIRWYAEAIDKVYGEVATTSSHELAMIVREPVGVIAAIVPWNFPLLLTCWKLGPALAAGNSVVLKPSEKSPLSAIRLAGLAKEAGLPDGVLNVVTGFGHEAGQALSRHNDIDAIAFTGSTRTGKQLLKDAGDSNMKRVWLEAGGKSANIVFADCPDLQQAASATAAGIFYNQGQVCIAGTRLLLEESIADEFLALLKQQAQNWQPGHPLDPATTMGTLIDCAHADSVHSFIQEGESKGQLLLDGRNAGLAVAIGPTIIVDVDPNASLSREEIFGPVLVVTRFTSEEQALQLANDSQYGLGAAVWTRDLSRAHRMSRRLKAGSVFVNNYNDGDMTVPFGGYKQSGNGRDKSLHALEKFTELKTIWISLEA

SEQ ID NO: 37885 - DNA, 1491 bp, Caulobacter crescentus CB15
  CDS (1)..(1491): transl_table=11
gtgacccttcccgccgacatgaccgagcgcctcgccaagcttgcgccgcccagccaggcggtgatcgacggcgacttggtcgaagcggcgtcgggcgcgaccttccataatgtctcgccgcgtgacggccaggtgctgaacctggtcacggcctgccaagccgacgacgtcgagcgcgcggtcgccggcgcgcgcgccgcgttcgaggacggccgctggcgcgatcaggggccgcgccagaagaaggcggtgctgttccgtctggccgaactgatggaacgcgacgccgacgagctggcgctgctggaaagcctggatgtgggcaagccgatcagcgacgcgcgcaacgtcgacatcccgctcgcgatcaacacctgccgctggtacgccgaggcgctggacaaggtttatggcgaggtcgggacctcgcccgctgatcggctgagctatgcggtccatgaaccgctgggcgtgatcggcgccatcgtgccgtggaacttcccgctgcacatggcgatgtggaaggtggcgcccgccctggccatgggcaattcggtcgtgctgaaacccgccgagcagtcgccgctgaccgcgctgaagcttggggcgctggcgctggaggcggggttgccgccaggcgtgctgaacgtcattccggggctgggcggcgtggccggcgaggcgctggccctgtcgatggacgtcgatatgatcgccttcaccggttctgggcccgtggggcgccggctgatggagtattcggcgcgttcgaacctcaagcgcgtgtccctggagttgggcggcaagtcgcctcagatcgtcttcgccgactgtccggacctagaggccgccgcccaggccgccgcctggggcgtgttctataaccagggcgaggtctgcaccgccgcctcgcgcctgctggtcgaggccccgatcaaggacgctttcctggcgcgggtgatcgaggtcgccaagggcatgaaggtcggtgatccgctggatccgtcgacccagttcggggccatggtcagcgagcggcagatgaacaccgcgctcgactatatcgccaccgccgacagccagggcgcgcggcgcgtgctgggcggtcagagggtgcgccaggaggccggcggtttctatgtcgagccgacgatcttcgaccaggtgcggcccgaccagaccctggcgcgggaagaggtgttcggccccgtgctgggcgtgatgaccttctcgtccgaagacgaggcgatgcggctggccaatgacacggtctatggcctggctgcaggtctgtggacggccgacgtcagcaaggctctgcgcggcgcacggcgtttgaaagcagggctcgtctgggtcaacggctgggacgcctgcgacatcaccatgccgttcggaggcttcaagcagtcgggttttggccgcgaccgcagccttcatgcgttgcacaagtacgccgacctgaagtcggtgtccgtgacgctgaggtga

SEQ ID NO: 37886 - protein, 496 aa, Caulobacter crescentus CB15
MTLPADMTERLAKLAPPSQAVIDGDLVEAASGATFHNVSPRDGQVLNLVTACQADDVERAVAGARAAFEDGRWRDQGPRQKKAVLFRLAELMERDADELALLESLDVGKPISDARNVDIPLAINTCRWYAEALDKVYGEVGTSPADRLSYAVHEPLGVIGAIVPWNFPLHMAMWKVAPALAMGNSVVLKPAEQSPLTALKLGALALEAGLPPGVLNVIPGLGGVAGEALALSMDVDMIAFTGSGPVGRRLMEYSARSNLKRVSLELGGKSPQIVFADCPDLEAAAQAAAWGVFYNQGEVCTAASRLLVEAPIKDAFLARVIEVAKGMKVGDPLDPSTQFGAMVSERQMNTALDYIATADSQGARRVLGGQRVRQEAGGFYVEPTIFDQVRPDQTLAREEVFGPVLGVMTFSSEDEAMRLANDTVYGLAAGLWTADVSKALRGARRLKAGLVWVNGWDACDITMPFGGFKQSGFGRDRSLHALHKYADLKSVSVTLR

SEQ ID NO: 37887 - DNA, 1518 bp, Agrobacterium tumefaciens str. C58
  CDS (1)..(1518): transl_table=11
atgcatgaacctttgaccgccgccgaatacaaggcgattgcctcagaccttcagttcccggccaatgccttcattgacggggctttccggcccgccggttccggcaagaccttcaagacgatcaatcccgccaccggcgaaacgctcgccgatatttcggcctgcgacgtgagtgacgtggactatgcggtcggcaaagccagggcggcattcgacgacggccgctggcgcctgctgccacctggcgaacgcaaggccattttgctcacattcgcaaaactactggagcagcatcgccacgaactagccgtcatggaaagcctggacagcggcaagccggtttccgaatgccagaccgtcgacattcctgacacgatccacaccatccgctggcatgcggagctcatcgacaagctgtatgacaataccgcaccggtgggatcgaacgcccttgcactcgtggtgcgcgagccggttggcgtcgtcggctgcgtgctgccgtggaacttccctttgctgatgctggcctggaagatcggcccggcgctcgcctccggatgttcggtgatcgtcaaaccggccgaggagacaacgctgacgaccctgcgcgtcgccgaactggcgcatgaagccgggattccggctggcgtcttcaacgtcgttccgggcggcggcaaggaggtcggcgagccgatcggcatgcatatggatgtcgatatggtagcgtttaccggatcgacgccaacgggacggcggttcctgcgatatgcggccgactccaacctcaagcgcatcgtccttgaatgcggcggcaaaaatccggcggtggtgctggatgatgcggaagacctcgacctcgtcgccgagcaggtggtcaacggcgcattctggaacatgggcgaaaactgctcggcctcgtccaggctcatcgtccatgcaaaaatcaaggacgagctgctgcagcggatcggcgcctatatgcgggaatggaggatgggcgatcctctcgatccgcaaaaccgcgtcggcgcgctcgtcagcaaagcccatttcgataaggtccactccttcctcgaggacgtgaaggcagaaaatcttaccatcgttcacggtggcaagaccgagaagggaatcttcatcgaacccacggtcgtcgatgccgtgccccctgcaagccgtcttttccgggaagagattttcggcccgatcctgtcggtgacgaccttcaacacgctggcagaggcggtagctcttgccaacgacacgaattacggccttgccgcatccgtctacaccggaagccttcgcaaggcgatcaagctctcgcgcgaaatccgggcgggtgtcgtcacggtcaattgcttcggcgaaggcgacgcaacgacgccgtttggcggctacaaggaatccggtttcggcggacgcgacaaatcgatcttcgcgcacgataattattgcgaactcaaaacgatctggatcgacgtctccgatcgttcggtggacgagacggtcagatga

SEQ ID NO: 37888 - protein, 505 aa, Agrobacterium tumefaciens str. C58
MHEPLTAAEYKAIASDLQFPANAFIDGAFRPAGSGKTFKTINPATGETLADISACDVSDVDYAVGKARAAFDDGRWRLLPPGERKAILLTFAKLLEQHRHELAVMESLDSGKPVSECQTVDIPDTIHTIRWHAELIDKLYDNTAPVGSNALALVVREPVGVVGCVLPWNFPLLMLAWKIGPALASGCSVIVKPAEETTLTTLRVAELAHEAGIPAGVFNVVPGGGKEVGEPIGMHMDVDMVAFTGSTPTGRRFLRYAADSNLKRIVLECGGKNPAVVLDDAEDLDLVAEQVVNGAFWNMGENCSASSRLIVHAKIKDELLQRIGAYMREWRMGDPLDPQNRVGALVSKAHFDKVHSFLEDVKAENLTIVHGGKTEKGIFIEPTVVDAVPPASRLFREEIFGPILSVTTFNTLAEAVALANDTNYGLAASVYTGSLRKAIKLSREIRAGVVTVNCFGEGDATTPFGGYKESGFGGRDKSIFAHDNYCELKTIWIDVSDRSVDETVR

SEQ ID NO: 37889 - DNA, 1563 bp, Drosophila melanogaster
  CDS (1)..(1563)
atgctgcgcgttttgaagaccggtgccctgctgcgttcccaggccaagaacttcgcagcagctgttgcgaactactcctccctcccgcagccacagacaacgcccgatatcctctacaccggggtatttatcaacaacgagtggcacaagagcaagtcgggcaaaatatttgaaaccatcaacccgaccacagcggaagtcattgccgaaattcagtgtgctgataaggaagatatcgatattgccgtccaggctgcacgcaatgcattcaagttgggatctccatggcgtcgcatggatgcctcggagcggggtcgcctgctctaccgcctggctgatctcatggaacgcgatcaggtctatcttgccagtctggagacccttgacaacggcaagccctacagcatgtcctacaacgtggatctcccgactgccatcaagaacctgcgctactttgctggatgggcggacaagaaccatggcaagactattcccatggacggagatttcttcacttacacccgccatgaacccgtgggcgtgtgcggccagatcattccctggaacttccccatcctgatgatggcctggaaactgggtcccgctttggctaccggcaacaccattgtactaaagcccgctgagcagaccagtttgactgctctgtacattgcccagttggtgaaggaggctggcttccccgaaggtgtggtcaatgtggttcccggatttggaactgctggcgctgccttggcgaaccactgcgatgtggataaggtggccttcaccggttccaccgatgtgggcaaacttatccaactagcatcgggaaatactaacctaaagagagtgacactggagttgggaggcaagtcgccaaacattattctgtctgacaccgatatggactacgccgtcgagacggctcactttggtctgttctttaacatgggccagtgctgctgtgcaggatctcgtactttcgtggaggacaagatctacgatgagtttgtcgagcgcagcgcggagcgggctaagaagcgcaccgtgggcaatccctttgatctgaacactgagcaaggtcctcaggtgaacgaggagcagatggaaaagatccttggaatgatcaaaacaggcaagaaacagggcgctaagttggttgccggtggcagtcgcccagagggcctacccggctacttcgtccagcccacggtgttcgccgatgtccaggatgatatgaccattgcaagggaggagatctttggaccggttcagcagctgatccgcttcaagaagctggatgaggtcatcgagcgggctaacaactccgagtacggattggccgccgccgttttcaccaaggatctggacaaggccaactacattgtgggtggcctgcgtgccggaactgtgtgggtaaacacctacaatgtcctcgctgcccaggctccgttcggtggctacaagatgtccggccatggacgcgagaacggagagtatgctctgtccaactacacggaggtcaagagcgtcatcgtcaaggttgcccagaagaactcctaa

SEQ ID NO: 37890 - protein, 520 aa, Drosophila melanogaster
MLRVLKTGALLRSQAKNFAAAVANYSSLPQPQTTPDILYTGVFINNEWHKSKSGKIFETINPTTAEVIAEIQCADKEDIDIAVQAARNAFKLGSPWRRMDASERGRLLYRLADLMERDQVYLASLETLDNGKPYSMSYNVDLPTAIKNLRYFAGWADKNHGKTIPMDGDFFTYTRHEPVGVCGQIIPWNFPILMMAWKLGPALATGNTIVLKPAEQTSLTALYIAQLVKEAGFPEGVVNVVPGFGTAGAALANHCDVDKVAFTGSTDVGKLIQLASGNTNLKRVTLELGGKSPNIILSDTDMDYAVETAHFGLFFNMGQCCCAGSRTFVEDKIYDEFVERSAERAKKRTVGNPFDLNTEQGPQVNEEQMEKILGMIKTGKKQGAKLVAGGSRPEGLPGYFVQPTVFADVQDDMTIAREEIFGPVQQLIRFKKLDEVIERANNSEYGLAAAVFTKDLDKANYIVGGLRAGTVWVNTYNVLAAQAPFGGYKMSGHGRENGEYALSNYTEVKSVIVKVAQKNS

SEQ ID NO: 37891 - DNA, 1479 bp, Brucella suis 1330
  CDS (1)..(1479): transl_table=11
atgcaagacaagatcgaccgtctgcgccagcaagccgtaccgccgcagagcctgttcatcaacggtcgctggcaacctgctgccgacgggaatgtaatggcggtcatctcgcccatcgacgggacgcaactgaccacaatcgccgccgccacggccatcgatgtggaccgtgccgccgctgccgcgcggcacagttttgaaaaaggcacatgggcaaaagccgcaccggcggagcgcaggaaagtccttttgaaaattgccgaattgatcgagcggaacgcccttgagcttgccgtgctgggcgtgcgggacaatggaacggaaatttcgatggcgttgaaggcagagcccggcagtgctgccaattcgttccgctattacgcggaagccatcgacaaggtctatggcgagatcgcgcccacggctgaaaatattctgggtctcgtgcaccgcgcgccagtcggtgtcgttggcgctattgtgccatggaatttcccgatgatgatcggcgcatggaagatcgcacccgctctcgcggcgggcaattcgatcgtgttgaaacccgccgagggcgcttcgctatcgctgttgcggctggccgaactttgcgcggaagccggattgccggaaggtgtgctcaatgtcgtgacgggcgccgggcccgttaccggcgaggcgctggggctgcatcccgatatcgacgttctggccttcaccggctccggtttcgtgggccgcaaactgctcgaatattccgcccgctcgaacctcaagcgtgtccatctggaacttggcggcaaatcacccaacatcgtcttcgccgatgcgcccgatctggcgcaggcggcaaaagtttcggcctatggcatattccgcaattccggccaggtctgcgttgcgggctcgcgcctactggttgagcgttccatcgccggggaagtcgccgaaaaagtcagcaccatcgccgccgcgatcaagggtggcgacccgctgggccttacaaccgaagcaggcgccatctccagtgaggcgcaacttcggaaaaatctggatttcgccgaacaggcgctttcggaaggcgcagggctgcgcaccggcggcaagcgcatcctcgaagaaaccggcggtttctacatgcagccgaccgtcttcaatgtcgaacccggcatgacgctcgcccgcgaggaggttttcggccccatcctttcgatcattcccttcgacaatgaagaagatgcgctgaaaatcgccaatgacagcgattatggcttcgcttcggcggtctggaccagcaacctgtcccgcgcgcaccgcatggtgcggggcatccgcgccggggtggtccatgtgaacacctatggtggggccgacaacacggttccactcggcggcgtcaagcaatccggcaatggccacgacaaatcgctccatgcgctcgataaatatatcgacctgaaaacagcgtggattcagctctga

SEQ ID NO: 37892 - protein, 492 aa, Brucella suis 1330
MQDKIDRLRQQAVPPQSLFINGRWQPAADGNVMAVISPIDGTQLTTIAAATAIDVDRAAAAARHSFEKGTWAKAAPAERRKVLLKIAELIERNALELAVLGVRDNGTEISMALKAEPGSAANSFRYYAEAIDKVYGEIAPTAENILGLVHRAPVGVVGAIVPWNFPMMIGAWKIAPALAAGNSIVLKPAEGASLSLLRLAELCAEAGLPEGVLNVVTGAGPVTGEALGLHPDIDVLAFTGSGFVGRKLLEYSARSNLKRVHLELGGKSPNIVFADAPDLAQAAKVSAYGIFRNSGQVCVAGSRLLVERSIAGEVAEKVSTIAAAIKGGDPLGLTTEAGAISSEAQLRKNLDFAEQALSEGAGLRTGGKRILEETGGFYMQPTVFNVEPGMTLAREEVFGPILSIIPFDNEEDALKIANDSDYGFASAVWTSNLSRAHRMVRGIRAGVVHVNTYGGADNTVPLGGVKQSGNGHDKSLHALDKYIDLKTAWIQL

SEQ ID NO: 37893 - DNA, 1488 bp, Shigella flexneri 2a str. 301
  CDS (1)..(1488): transl_table=11
atgaattttcatcatctggcttactggcaggataaagcgttaagtctcgccattgaaaaccgcttatttattaacggtgaatatactgctgcggcggaaaatgaaacctttgaaaccgttgatccggtcacccaggcaccgctggcgaaaattgcccgcggcaagagcgtcgatatcgaccgtgcggtgagcgcagcacgcggcgtatttgaacgcggcgactggtcactctcttctccggctaaacgtaaagcggtactgaataaactcgccgatttaatggaagcccacgccgaagagctggcactgctggaaactctcgacaccggcaaaccgattcgtcacagtctgcgtgatgatattcccggcgcggcgcgcgccattcgctggtacgccgaagcgatcgacaaagtgtatggcgaagtggcgaccaccagtagccatgagctggcgatgatcgtgcgtgaaccggtcggcgtgattgccgccatcgtgccgtggaacttcccgctgttgctgacttgctggaaactcggcccggcgctggcggcgggaaacagcgtgattctaaaaccgtctgaaaaatcaccgctcagtgcgattcgtctcgcggggctggcgaaagaagcaggcttgccggatggtgtgttgaacgtggtgacgggttttggtcatgaagcggggcaggcgctttcgcgtcataacgatatcgatgccatcgcctttaccggctccacgcgtacgggtaaacaactgctgaaagacgcgggtgatagcaacatgaaacgtgtctggctggaagcgggcggcaaaagcgccaacatcgttttcgccgattgtccggatctgcaaaaagcggcaagcgccaccgccgcaggcatcttctacaaccagggccaggtgcgcatcgccggaacgcgtttgttactggaagagagcatcgccgatgaattcttagccctgttaaaacagcaggcgcaaaactggcagccgggccatccacttgatcccgcaaccaccatgggcaccttaatcgacagcgctcacgctgactcggtacacacctttattcgtgaaggcgaaggcaaggggcaactgctgctggatggtcgcaacgccgggctggcagcggccatcggcccgaccatcttcgtggatgtggacccgaatgcgtccttaagccgcgaagagattttcggtccggtgctggtggtcacccgtttcacatcagaagatcaggcgctgcagcttgccaacgacagccagtacggccttggcgcggcggtatggacgcgcgacctctcccgcgcgcaccgcatgagccgacgcctgaaagccggttccgtcttcgtcaataactacaacgacggcgatatgaccgtgccgtttggcggctataagcagagcggcaacggtcgcgacaaatccctgcatgcccttgaaaaattcactgaactgaaaaccatctggataagcctggaggcctga

SEQ ID NO: 37894 - protein, 495 aa, Shigella flexneri 2a str. 301
MNFHHLAYWQDKALSLAIENRLFINGEYTAAAENETFETVDPVTQAPLAKIARGKSVDIDRAVSAARGVFERGDWSLSSPAKRKAVLNKLADLMEAHAEELALLETLDTGKPIRHSLRDDIPGAARAIRWYAEAIDKVYGEVATTSSHELAMIVREPVGVIAAIVPWNFPLLLTCWKLGPALAAGNSVILKPSEKSPLSAIRLAGLAKEAGLPDGVLNVVTGFGHEAGQALSRHNDIDAIAFTGSTRTGKQLLKDAGDSNMKRVWLEAGGKSANIVFADCPDLQKAASATAAGIFYNQGQVRIAGTRLLLEESIADEFLALLKQQAQNWQPGHPLDPATTMGTLIDSAHADSVHTFIREGEGKGQLLLDGRNAGLAAAIGPTIFVDVDPNASLSREEIFGPVLVVTRFTSEDQALQLANDSQYGLGAAVWTRDLSRAHRMSRRLKAGSVFVNNYNDGDMTVPFGGYKQSGNGRDKSLHALEKFTELKTIWISLEA

SEQ ID NO: 37895 - DNA, 1536 bp, Drosophila melanogaster
  CDS (1)..(1536)
atggcccgccatctggcaaagaggtcctactcttcagccgctcccacaaccaagctcttcatcgacggcaagttcgttgagtcgaagacgaacgaatggattgacgtgcacgatccggccaccaaccaagtggtcacccgcgtgcccaaggccacacaggcggagatgcaggcggcccttgagtcgaacaagaaggcttttcgctcgtggagcaaccagtcgatcctcacccgccagcaggtgatgttcaagctgcaggctctcatcaaggagaacatgggtgagctggccaagaacattaccaaggagcagggcaaaaccttggccgacgcagagggcgacgtgctccgcggccttcaggtggtggaacattgctgcagcatcccatctctgcagatgggcgaaaccgtagccaacgtggccagggacatggatacgtactcactagtgctgcccctcggagtaaccgctggcgttgcgccgttcaatttcccggccatgataccgctgtggatgttcccggtggccatcaccaccggtaacactatgctgctgaagccatcggaacgtgtgcctggtgcaaccatgttgctgatggagcttcttaacgaagctggctgtccgccgggtgtcgtcaacgtaatccatggccaacatgacgctgtgaacttcatctgcgatgctcccgaaattaaggcagtgtcctttgtgggctccgaccaggcaggcaagtacatttacgagcgggctggcaagaatggcaagcgggtgcaatctaatatgggcgctaagaaccacggcatcatcctgggcgatgccaacaaggagaatactttgaaccagttggcaggtgccgcctttggagctgctggtcagcgttgcatggcattgtctacggctgtctttgtcggcgatgcccaggcatggattcccgatctggtggagcgtgcccagaagctgaaggtaaatgccggccatgtacctggaactgacgtgggtcccgtgatcagtgccgcctcacgccaacgcattaatgacctgattgagtctggggtcaaggagggagctaagcttatcctggacggcaggaagataaccgtgcccggatacgaggatggatactttgtgggaccaaccatcctaagcgatgttacgcccagcatgaagtgctacactgaggagatctttggccctgtgttggttatcctgaaggccgacaccttggacgatgccattggcattgtaaatgccaatccttatggaaatggtaccgccgtattcaccaccaatggagcggcagcccgcaagtttgtcaacgaaattgatgctggtcaggttggcgtgaatgtgccaattcccgtgcccctgcccatgttctcctttaccggaactcgtggctctttccgcggcgaccatcacttctatggcaaacagggtatcaaattctacacccagacgaagacggtcacccagttgtggcgcaaaacggatgtgacccacacccaggcggctgtggccatgcccaccatgaaatag

SEQ ID NO: 37896 - protein, 511 aa, Drosophila melanogaster
MARHLAKRSYSSAAPTTKLFIDGKFVESKTNEWIDVHDPATNQVVTRVPKATQAEMQAALESNKKAFRSWSNQSILTRQQVMFKLQALIKENMGELAKNITKEQGKTLADAEGDVLRGLQVVEHCCSIPSLQMGETVANVARDMDTYSLVLPLGVTAGVAPFNFPAMIPLWMFPVAITTGNTMLLKPSERVPGATMLLMELLNEAGCPPGVVNVIHGQHDAVNFICDAPEIKAVSFVGSDQAGKYIYERAGKNGKRVQSNMGAKNHGIILGDANKENTLNQLAGAAFGAAGQRCMALSTAVFVGDAQAWIPDLVERAQKLKVNAGHVPGTDVGPVISAASRQRINDLIESGVKEGAKLILDGRKITVPGYEDGYFVGPTILSDVTPSMKCYTEEIFGPVLVILKADTLDDAIGIVNANPYGNGTAVFTTNGAAARKFVNEIDAGQVGVNVPIPVPLPMFSFTGTRGSFRGDHHFYGKQGIKFYTQTKTVTQLWRKTDVTHTQAAVAMPTMK

SEQ ID NO: 37897 - DNA, 1458 bp, Drosophila melanogaster
  CDS (1)..(1458)
atggccgatcccaacgccaagcccaagtacacaaaacttttcatcaacaatgagttcgttgattcggtgtcgggcaagacctttgccaccttcaatccggctacatccaaggagattgtccaagtctccgagggagataaggctgatatcgacctggctgtgaaagcggccaagaaagccttccatcgcgactcggaatggcgcaaattgagtcctctgcagcgcaccaatttgatgaacaaactttgtgccctgatggatcgggacaaggcattcctggccagcttggagacccaggacaatggaaagccctacgctgaggccctcttcgatgtgacctactcgatcctgacgctgcagtactacgccggctggaccgacaagttcttcggcgacaccattcccgctggaggctttgtctccatgacccgcaaggaaccggtgggcgtggtgggccagatcataccctggaactatcccctgctgatgctggcctggaagtggggccccgctctggccgtcggatgcaccatcatcatgaaacccgcggagcaaactcctctgactgcccttcacatggctgctttggcgaaggaggcaggcttcccagccggtgtgatcaatgtggtcaacggatttggtcccactgccggtgctgctatcagtgctcatcctgatattgccaaggtggctttcaccggctccgtggaaatcggtcggattgtcatgcaggctgcagccacgtcgaacttgaagagggtctccctggaattgggcggcaagagccccgttgtggtcttcgatgatgcggacattgacttcgccgtggaaaccacccacgaggctctgttctccaatcacggccagagctgctgtgccggcagtcgcacctacgttcacgaaaagatctacgacgagttcgtggccaaggcagctgccaaggcaaaggcccgcaaggtgggcaatcctttcgagcagaatgtgcagcagggtccccagatcgacgatgacatgctgaccaaggtgttgggctacatcgagagtggcaagaaggagggtgccaagttgcaggctggtggcaagaggatcggcaatgtcggtttcttcgttgagcccactgtcttctcggacgtgaaggatgatatgcggattgcccaggaggagatctttggccccgttcagtcgatcttcaagttcagctccctggaggagatgatcgatcgggccaacaatgtgcaatatggcctggccgccggcgttattaccaatgacatcaacaaggcactgaaattcgccaacaatgtggatgccggctccgtgtggatcaactgctatgatgccgtgctgccctccaccccgttcggtggatacaagcactctggcattggcagggaattgggcaaggatggcctggataactatctggaaaccaagaccatcaccatgaaacttctttaa

SEQ ID NO: 37898 - protein, 485 aa, Drosophila melanogaster
MADPNAKPKYTKLFINNEFVDSVSGKTFATFNPATSKEIVQVSEGDKADIDLAVKAAKKAFHRDSEWRKLSPLQRTNLMNKLCALMDRDKAFLASLETQDNGKPYAEALFDVTYSILTLQYYAGWTDKFFGDTIPAGGFVSMTRKEPVGVVGQIIPWNYPLLMLAWKWGPALAVGCTIIMKPAEQTPLTALHMAALAKEAGFPAGVINVVNGFGPTAGAAISAHPDIAKVAFTGSVEIGRIVMQAAATSNLKRVSLELGGKSPVVVFDDADIDFAVETTHEALFSNHGQSCCAGSRTYVHEKIYDEFVAKAAAKAKARKVGNPFEQNVQQGPQIDDDMLTKVLGYIESGKKEGAKLQAGGKRIGNVGFFVEPTVFSDVKDDMRIAQEEIFGPVQSIFKFSSLEEMIDRANNVQYGLAAGVITNDINKALKFANNVDAGSVWINCYDAVLPSTPFGGYKHSGIGRELGKDGLDNYLETKTITMKLL

SEQ ID NO: 37899 - DNA, 1494 bp, Pseudomonas putida KT2440
  CDS (1)..(1494): transl_table=11
atgaccaccctgacccgtgcggactgggaacaacgtgcccagcaactgaagatcgaaggccgtgccttcatcaacggcgaatacaccgatgccgtatccggtgaaaccttcgagtgcctgagcccggtcgacggacgcttcctggccaaggttgccagctgcgacctggccgatgccaaccgcgctgttgaaaacgcccgtgccaccttcaactccggcgtgtggtcgcagctggcccccgccaagcgcaaggccaagctgatccgcttcgccgacctgctgcgcaagaacgtcgaagagctggcgctgttggaaacgctggacatgggcaagccgatcggcgactcctccagcatcgacatcccaggtgcggcccaagccattcactggactgccgaagccatcgacaaggtctacgacgaagttgccccgaccccgcatgaccagcttggcctggttacccgcgaacccgtgggtgtggttggtgccatcgtgccgtggaacttcccgttgctgatggcctgctggaaactcggccctgcactggccaccggtaactcggtcgtgctcaagccgtccgaaaaatcgccgctgaccgccatccgcatcgcccaactggcgatcgaggccggtatccccgctggcgtgctgaacgtgctgccaggctatggccacaccgtgggcaaggcactggccctgcacatggacgtggacaccctggtgttcaccggttcgaccaagatcgccaagcaactgatggtttacgcgggcgagtcgaacatgaaacgcatctggctggaagccggtggcaagagcccgaacatcgtctttgccgacgccccggacctgcaagcagccgccgaggccgcagccagcgccatcgccttcaaccagggcgaagtgtgcactgcaggctcccgcctgctggtcgagcgttcgatcaaggacaagttcctgccgatggtggtagaggccctgaagggctggaagccaggcaacccgctggacccgcagaccactgtcggtgccttggtcgatacccagcagatgaacaccgtgctgtcgtacatcgaggctggccacaaggacggcgccaagctgctggccggcggcaaacgcaccctggaagagaccggcggcacctacgtcgagccgaccatcttcgacggcgtgactaacgccatgcgcattgcccaggaagaaatcttcggcccggtgctgtcggtgattgccttcgacaccgccgaagaagccgtggccattgccaacgacaccccgtatggcctggccgctggtatctggacttcggacatttccaaggcccacaagaccgcccgtgccgtgcgtgcaggcagcgtctgggtcaaccagtacgatggtggcgacatgaccgcgccgttcggtggcttcaaacagtcgggcaacggccgtgacaagtcgctgcacgcactggagaagtacaccgagctgaaggcgacctggatcaagctgtaa

SEQ ID NO: 37900 - protein, 497 aa, Pseudomonas putida KT2440
MTTLTRADWEQRAQQLKIEGRAFINGEYTDAVSGETFECLSPVDGRFLAKVASCDLADANRAVENARATFNSGVWSQLAPAKRKAKLIRFADLLRKNVEELALLETLDMGKPIGDSSSIDIPGAAQAIHWTAEAIDKVYDEVAPTPHDQLGLVTREPVGVVGAIVPWNFPLLMACWKLGPALATGNSVVLKPSEKSPLTAIRIAQLAIEAGIPAGVLNVLPGYGHTVGKALALHMDVDTLVFTGSTKIAKQLMVYAGESNMKRIWLEAGGKSPNIVFADAPDLQAAAEAAASAIAFNQGEVCTAGSRLLVERSIKDKFLPMVVEALKGWKPGNPLDPQTTVGALVDTQQMNTVLSYIEAGHKDGAKLLAGGKRTLEETGGTYVEPTIFDGVTNAMRIAQEEIFGPVLSVIAFDTAEEAVAIANDTPYGLAAGIWTSDISKAHKTARAVRAGSVWVNQYDGGDMTAPFGGFKQSGNGRDKSLHALEKYTELKATWIKL

SEQ ID NO: 37901 - DNA, 1494 bp, Pseudomonas syringae pv. tomato str. DC3000
  CDS (1)..(1494): transl_table=11
atgaccaccctgacccgtgctgactgggaacaacgcgcccaaaatctgaagatcgaaggccgcgccttcattcaaggtgaatacaccgctgccgcctccggcgagacctttgactgcatcagcccggtcgatggccggttgcttgccaaggtcgccagttgcgatgccgccgacgcccagcgtgcggtagaaagcgctcgcagcgccttcgactcgggcgcctggtcacgactggccccggccaaacgcaaggccaccatgatccgtttcgccgggttgcttgagcagaatgctgaagaactggccttgcttgaaacgctggacatgggcaagccgatcagcgactcgctgggtgtcgacatacccggcggcgcccgggccctgagctggagcggcgaggcgatcgacaagctgtatgacgaagtcgccgcaacacctcatgaccaactgggcctggtaacccgcgagccggtcggtgttgtggctgctatcgtgccgtggaatttcccgctgatgatggcctgctggaagctcggccctgcgctgtccaccggcaactcggtggtgctcaaaccgtcggaaaaatccccgctgacggccattcgcatcgcgcaattggctatcgaggccggcattccggcgggcgtgctcaatgtgctgccgggttacggccacaccgttggcaaggcgctggcgttgcacatggatgtggacacggtggtgttcaccggctcgaccaaaatcgccaaacaactgatgatctatgcgggcgaatcgaacatgaagcgcgtctggctggaggccggcggcaaaagcccgaacatcgtctttgccgacgcccctgacctgcaggcagccgccgactccgccgccagcgcaattgccttcaatcagggcgaagtctgcacggcgggttcgcgcctgctggtcgaacgctccatcaaggatcgcttcctgccaatggtgatcgaagcccttggcacctggaaacccggcaatccgctggacccggcgaccaatgtcggcgcactggtcgatactcagcagatgaacacagtgctgtcttacatcgcagccgggcataccgatggcgccaggctggtcgcgggcggcaagcaaattctgcaggagactggcgggacttacgtcgagccaacgatttttgacggcgtgaacaatgccatgaggatcgcgcaggaagaaatcttcggcccggtgctttcggtgttgacgttcgacacagccgaagaagccatccagatcgccaacgacacgccatacggcctggccgctgcggtatggaccgcgaacctctccaaggcgcacctgaccgccagagcactgcgcgcgggcagtgtgtgggtcaaccagtacgacggcggcgacatgaccgcgccgttcggcggcttcaaacaatcgggcaacggccgcgacaaatcgctgcacgcgttcgacaaatacactgagctgaaatccacctggatcaagttgtaa

SEQ ID NO: 37902 - protein, 497 aa, Pseudomonas syringae pv. tomato str. DC3000
MTTLTRADWEQRAQNLKIEGRAFIQGEYTAAASGETFDCISPVDGRLLAKVASCDAADAQRAVESARSAFDSGAWSRLAPAKRKATMIRFAGLLEQNAEELALLETLDMGKPISDSLGVDIPGGARALSWSGEAIDKLYDEVAATPHDQLGLVTREPVGVVAAIVPWNFPLMMACWKLGPALSTGNSVVLKPSEKSPLTAIRIAQLAIEAGIPAGVLNVLPGYGHTVGKALALHMDVDTVVFTGSTKIAKQLMIYAGESNMKRVWLEAGGKSPNIVFADAPDLQAAADSAASAIAFNQGEVCTAGSRLLVERSIKDRFLPMVIEALGTWKPGNPLDPATNVGALVDTQQMNTVLSYIAAGHTDGARLVAGGKQILQETGGTYVEPTIFDGVNNAMRIAQEEIFGPVLSVLTFDTAEEAIQIANDTPYGLAAAVWTANLSKAHLTARALRAGSVWVNQYDGGDMTAPFGGFKQSGNGRDKSLHAFDKYTELKSTWIKL

SEQ ID NO: 37903 - DNA, 1488 bp, Shigella flexneri 2a str. 2457T
  CDS (1)..(1488): transl_table=11
atgaattttcatcatctggcttactggcaggataaagcgttaagtctcgccattgaaaaccgcttatttattaacggtgaatatactgctgcggcggaaaatgaaacctttgaaaccgttgaaccggtcacccaggcaccgctggcgaaaattgcccgcggcaagagcgtcgatatcgaccgtgcggtgagcgcagcacgcggcgtatttgaacgcggcgactggtcactctcttctccggctaaacgtaaagcggtactgaataaactcgccgatttaatggaagcccacgccgaagagctggcactgctggaaactctcgacaccggcaaaccgattcgtcacagtctgcgtgatgatattcccggcgcggcgcgcgccattcgctggtacgccgaagcgatcgacaaagtgtatggcgaagtggcgaccaccagtagccatgagctggcgatgatcgtgcgtgaaccggtcggcgtgattgccgccatcgtgccgtggaacttcccgctgttgctgacttgctggaaactcggcccggcgctggcggcgggaaacagcgtgattctaaaaccgtctgaaaaatcaccgctcagtgcgattcgtctcgcggggctggcgaaagaagcaggcttgccggatggtgtgttgaacgtggtgacgggttttggtcatgaagcggggcaggcgctttcgcgtcataacgatatcgatgccatcgcctttaccggctccacgcgtacgggtaaacaactgctgaaagacgcgggtgatagcaacatgaaacgtgtctggctggaagcgggcggcaaaagcgccaacatcgttttcgccgattgtccggatctgcaaaaagcggcaagcgccaccgccgcaggcatcttctacaaccagggccaggtgcgcatcgccggaacgcgtttgttactggaagagagcatcgccgatgaattcttagccctgttaaaacagcaggcgcaaaactggcagccgggccatccacttgatcccgcaaccaccatgggcaccttaatcgacagcgctcacgctgactcggtacacacctttattcgtgaaggcgaaggcaaggggcaactgctgctggatggtcgcaacgccgggctggcagcggccatcggcccgaccatcttcgtggatgtggacccgaatgcgtccttaagccgcgaagagattttcggtccggtgctggtggtcacccgtttcacatcagaagatcaggcgctgcagcttgccaacgacagccagtacggccttggcgcggcggtatggacgcgcgacctctcccgcgcgcaccgcatgagccgacgcctgaaagccggttccgtcttcgtcaataactacaacgacggcgatatgaccgtgccgtttggcggctataagcagagcggcaacggtcgcgacaaatccctgcatgcccttgaaaaattcactgaactgaaaaccatctggataagcctggaggcctga

SEQ ID NO: 37904 - protein, 495 aa, Shigella flexneri 2a str. 2457T
MNFHHLAYWQDKALSLAIENRLFINGEYTAAAENETFETVEPVTQAPLAKIARGKSVDIDRAVSAARGVFERGDWSLSSPAKRKAVLNKLADLMEAHAEELALLETLDTGKPIRHSLRDDIPGAARAIRWYAEAIDKVYGEVATTSSHELAMIVREPVGVIAAIVPWNFPLLLTCWKLGPALAAGNSVILKPSEKSPLSAIRLAGLAKEAGLPDGVLNVVTGFGHEAGQALSRHNDIDAIAFTGSTRTGKQLLKDAGDSNMKRVWLEAGGKSANIVFADCPDLQKAASATAAGIFYNQGQVRIAGTRLLLEESIADEFLALLKQQAQNWQPGHPLDPATTMGTLIDSAHADSVHTFIREGEGKGQLLLDGRNAGLAAAIGPTIFVDVDPNASLSREEIFGPVLVVTRFTSEDQALQLANDSQYGLGAAVWTRDLSRAHRMSRRLKAGSVFVNNYNDGDMTVPFGGYKQSGNGRDKSLHALEKFTELKTIWISLEA

SEQ ID NO: 37905 - DNA, 1497 bp, Bordetella bronchiseptica RB50
  CDS (1)..(1497): transl_table=11
atgaccctgcacgattccgcctactggcgcgcgcaagccgccgccctcgcccccgaaggccgcgcctatatcgacggcgcctattgcgacgccgccgatggcgccaccttcgccgcgcacagcccgatcgacggccgcaagctggccgatgtcgccgcctgcggcgcggccgacgtggaccgcgcggtggccgccgcgcgccgcgccttcgaggccggcgtctggagcggcctggccccgcgcgagcgcaagcaccgcctgctgcgcctggccgcgctgatcaccaaacaccaggaagagctggcgctgctcgaaacgctggacatgggcaagccgatccgcgacgccctggccttcgacctgcccgagaccgcccgctgctatgcgtggtacggcgaagccatcgacaagcgctacgacgagatcgcgcctaccggcgccgacgcgctggccaccatcacgcgcgagccgctgggcgtggtggccgccgtggtgccgtggaattaccccttgatgatggcggcctggaaagtggccccggcgctggccgtgggcaacagcgtcatcctcaagcctgccgagcaggcctcgctgtcggcgctgcggctggcggccctggccgaacaggccggcatcccgcccggcgtgttcagcgtggtgcccggcctgggcgcgcaggccggccaggcgctcggcctgcacccggacgtcgactgcatcgccttcaccggctcgacggcgaccggcaagcgcttcatgacctactcgggccaatccaatctcaagcgcgtctggctggagtgcggcggcaagtcgccccatatcgtgttcgccgactgccccgacctggaccgcgcggcccaggtcgccgcgctggcgatcttctccaaccagggcgaggtctgcatcgccggttcgcgcctgtacgtgcagcacggcatctacgacgccttcatggaaaaagtggccgccttcgccgccaccctgcgccccggcaatccgctggacccggacagcgcgctgggcgccatggtcgacgaacggcagacgcaggcggtcatggcccgcatcgccgccggcgcccaggaaggcgcgcggctgcgcctgggcggccggcaagtgctgaccaacagcggcggctactacatcgaaccgaccatcttcgattgtcccggccaggacaactcgctggtgcgcgaggaaatcttcgggccggtgctggccgcgcaaggcttcgccgacgaggacgaggccgtcgcgctggccaatgattccatctatgggctgggggccgggctgtggaccgccgacctcggccgcgcgcaccgcctgtcgcgccgcctgcgcgccgggctggtatgggtcaactgctatgccgacggcgacatcacggtgcccttcggcggcgtcaagcaatccggcttcgggcgcgacaagtcgctgcacgcgatggacaagtacagcgacctcaagaccacctggatcagcctgcgctga

SEQ ID NO: 37906 - protein, 498 aa, Bordetella bronchiseptica RB50
MTLHDSAYWRAQAAALAPEGRAYIDGAYCDAADGATFAAHSPIDGRKLADVAACGAADVDRAVAAARRAFEAGVWSGLAPRERKHRLLRLAALITKHQEELALLETLDMGKPIRDALAFDLPETARCYAWYGEAIDKRYDEIAPTGADALATITREPLGVVAAVVPWNYPLMMAAWKVAPALAVGNSVILKPAEQASLSALRLAALAEQAGIPPGVFSVVPGLGAQAGQALGLHPDVDCIAFTGSTATGKRFMTYSGQSNLKRVWLECGGKSPHIVFADCPDLDRAAQVAALAIFSNQGEVCIAGSRLYVQHGIYDAFMEKVAAFAATLRPGNPLDPDSALGAMVDERQTQAVMARIAAGAQEGARLRLGGRQVLTNSGGYYIEPTIFDCPGQDNSLVREEIFGPVLAAQGFADEDEAVALANDSIYGLGAGLWTADLGRAHRLSRRLRAGLVWVNCYADGDITVPFGGVKQSGFGRDKSLHAMDKYSDLKTTWISLR

SEQ ID NO: 37907 - DNA, 1488 bp, Chromobacterium violaceum ATCC 12472
  CDS (1)..(1488): transl_table=11
atggcccgcagtcacgccgaatggaagcaacttgcagcagaactgaaaattgaaggccgcgccttcatcaacggcgaataccgcgacgccgccgaaggcaagcgcttcgattgcgtcaaccccgccaacggcgccaaactggccgaaatcgcccactgcggcgaagccgaggtggaagccgcggtcaaggccgcccgccgcgcgttcgaatccggcgtctggtccgaactcgcgccgctcaagcgcgccgccgtgctcaagcgcttcgcggcgctgatccgagagcacgccgatgaactgtcgctgctggagacgctggacgtcggcaagcccatcggcgacaccaccgccgtcgacgtgcccgcttccgcctactgcgtggaatggttcgccgaagcgatcgacaaggtgggcggagaggtcgtgccggttgatcccaagctggtcggcctggtgacccgcgagccgatcggcgtggtagctgcggtggtgccgtggaacttccccatcctgatggcgagctggaagttcggcccggcgctggccgccggcaacgccgtcatcgtcaaaccgtcggaaaaatcgccgctgaccgcgatccgcatcgccgcgctggccaaacaggcgggcatccccgacggcatcttccaggtgctgcccggcgccggcgacgtcggccgcctgctggcgctgcacatggacgtcgactgcgtcgcctttaccggctccaccaacgtgggcaagctgatcgccggctacgccgcccagtccaatctgaagcgggcatggctggagctgggcggcaagtcgcccaacatcatcctgccggactgcccggacctggcccgcgccgcgcgcgccgccgccagcggcatcttctacaatatgggcgaggtctgcaccgccggctcgcgcgtgctggttcacaaggacatcaaggaacgcttccttgaggaattcaagaaggccgccgccggcttcttccccggcgatccgctcgatccagccaccagcatgggcgccatcgtcgacgacatccagtaccgcaaggtgctgaactacatcgacaagggcttgagcgaaggcgccaacctgctgctgggcggcaaagccgtgcacaccgacaagggcctgttcatcgaacccaccgccttcgactgccccagcgacgacctgaccatctgccgcgaggaaatcttcggcccggtgctgtcggtgatcaccttcagcgagctggacgacgccatccgcatcgccaacgacacgtcctacggcctggcggccgcggtgtggacctccaacgtcagcaccgcccaccaggtgtcgcgccgcctgcgcgccggcaccgtgtgggtgaactgctacgacgagggcggcgacatgaacttcccgttcggcggctacaagcaatccggcaacggccgcgacaaatcgctgcacgcgctggaaaaatacaccgagctgaagagcaccttgatcaagctgtaa

SEQ ID NO: 37908 - protein, 495 aa, Chromobacterium violaceum ATCC 12472
MARSHAEWKQLAAELKIEGRAFINGEYRDAAEGKRFDCVNPANGAKLAEIAHCGEAEVEAAVKAARRAFESGVWSELAPLKRAAVLKRFAALIREHADELSLLETLDVGKPIGDTTAVDVPASAYCVEWFAEAIDKVGGEVVPVDPKLVGLVTREPIGVVAAVVPWNFPILMASWKFGPALAAGNAVIVKPSEKSPLTAIRIAALAKQAGIPDGIFQVLPGAGDVGRLLALHMDVDCVAFTGSTNVGKLIAGYAAQSNLKRAWLELGGKSPNIILPDCPDLARAARAAASGIFYNMGEVCTAGSRVLVHKDIKERFLEEFKKAAAGFFPGDPLDPATSMGAIVDDIQYRKVLNYIDKGLSEGANLLLGGKAVHTDKGLFIEPTAFDCPSDDLTICREEIFGPVLSVITFSELDDAIRIANDTSYGLAAAVWTSNVSTAHQVSRRLRAGTVWVNCYDEGGDMNFPFGGYKQSGNGRDKSLHALEKYTELKSTLIKL

SEQ ID NO: 37909 - DNA, 1470 bp, Photorhabdus luminescens subsp. laumondii TTO1
  CDS (1)..(1470): transl_table=11
atgcgtatacagaacaaaatgctgataaacggtgactggatagatgcgtccgacggtcagactattgaagtcatgaatcctcatgatggctcacttattacccgggttgctgaagcaaaagaggccgatgtggattgtgcagtggctgctgcaaaagccgcctaccccgcttggggtaggttgcaggcatctgaaagaggggctttgttgctaaaactggctgataaaattgaagaacatgcagcagaactcgctcaactggaaactatggatacaggacatccgatccgcgatacgctgaatatagatgttccccgcacggcatactgtttccgctattttggtggaatggcagataaacttgaaggcagcgtaattccggtagaagaaggttttctgaactataccacacgtgagcccattggcgtggtgggtcaaatcgtcccctggaacttccctttgatgtttaccagttggaagatggcaccagctcttgctgccggtaacacgattgtgatcaagccttcggaaatcacgcctctgagtacgctgcgtattgctgaactgatgatggaagtgggctttcctcctggcgtgattaacgtggtggtgggatatgggaatagtgccggagcgagattgtcggagcatgaagatgtgggcaaaattgcttttaccggatcgacaatgaccgggcagagcattgttgccgcctcagcgggtaacctgaagaaagtacagttggagttgggcggcaaaggggccaatatcatttttgaagatgccgatctgaccaaagccgttggcggcagtgcttgggccatctttcataatcaggggcaggcgtgtattgccggatcgcgcattatcctacatgaaagtattgctgatgcttttctggagaagttcctaacgctggccggttccatccgtctgggcgatcctttgttaccggagacggaaatggggccggtgacctctttgcaacacagggagcgcgtgttggcttactgcgacgttgcccgttcacaagggtgtgagatcctgctgggcggtaagccgccagcggatcccgctcttgccaatggctgttacattgaaccaaccgtcgtcagggcgaaatattccgatcgcattgcacaggaggaggtgttcggcccctttgtgacggttattaccttcaagaatgatgaagaagcgctggcgattgccaacagcaccgaatatgggctgggttcagggctatggaccaaagacatcagccgtgctcacaggtttgcccgtgatatgcatgctggcatggtgtggatcaattgctacaagcgcgtcaacccggccagtccgtttggtggcgtggggcgttcaggctatggtcgtgagatggggtttgaagtgatgcgtgaatatactcaggtgaaatctgtgtgggtcaatgttgatgcaaaaatcccgcctttttaccagagataa

SEQ ID NO: 37910 - protein, 489 aa, Photorhabdus luminescens subsp. laumondii TTO1
MRIQNKMLINGDWIDASDGQTIEVMNPHDGSLITRVAEAKEADVDCAVAAAKAAYPAWGRLQASERGALLLKLADKIEEHAAELAQLETMDTGHPIRDTLNIDVPRTAYCFRYFGGMADKLEGSVIPVEEGFLNYTTREPIGVVGQIVPWNFPLMFTSWKMAPALAAGNTIVIKPSEITPLSTLRIAELMMEVGFPPGVINVVVGYGNSAGARLSEHEDVGKIAFTGSTMTGQSIVAASAGNLKKVQLELGGKGANIIFEDADLTKAVGGSAWAIFHNQGQACIAGSRIILHESIADAFLEKFLTLAGSIRLGDPLLPETEMGPVTSLQHRERVLAYCDVARSQGCEILLGGKPPADPALANGCYIEPTVVRAKYSDRIAQEEVFGPFVTVITFKNDEEALAIANSTEYGLGSGLWTKDISRAHRFARDMHAGMVWINCYKRVNPASPFGGVGRSGYGREMGFEVMREYTQVKSVWVNVDAKIPPFYQR

SEQ ID NO: 37911 - DNA, 1464 bp, Strongylocentrotus purpuratus
  CDS (1)..(1464)
atgttttctgttgggaaattgatctcggcgacgacatctgcccgtcagcatgcgggcaggacgctgatgaggacgtcccagtattcggtggcggccattccagcaccacaaaagaatccagatatccagcatcataagctcttcatcaacaatgagtgggtgaactcggttagtggtaagacgttccctaccatcaacccggcaacagaagaggtcatcgcagaggtcgcagaggctgataaggctgacgttgaacttgcacatgctgcggccagcgaagccttccgcctgggttccccttggcgtacaaccaacgcgtcccgaaggggtgcactgatcaacaaattggctgatttggtcgaacgagactgggcacatcttgccagcctcgaaacgctggacaatggaaaaccataccaagattcttacaccattgatgtaccaggggtattagcaacactcagatactttgcaggatgggcggacaagatcgaaggcaaaacgatccccgtagacggagacttcatgacatatacgaggcacgagccagtcggggtctgcggacaaatcatcccgtggaactttcctcttctgatgttggcatggaaatgggcccctgctctggcgtgtggaaataccatcataatgaagacggccgaacagactcccctcactgctctccatatggctgaactcgccaaagagatcggaagaattatcgcgcagtcagcaggcgcttcaaacctcaagaaagtgacccttgaacttggcgggaaaagcccaaatatcatcttggccgatgctgatcttgatcatgcggtggagcagagccattccgccattttctggaacatgggccaggcctgctgcgccggatccaggaccttcgttgaggacaagatctacgatgagttcgtggaacgcagcgtagaacgtgccaagtccaaggtggtcggtgatccattcgatatgtccaaggaccagggacctcagatcaacgacgagcaattcaagaagattttgggtttgatcgaaagcgggaagtcagatggagccaaattggcaacaggaggcggtcgtcatggtgataagggatactacatccaaccaacggtgttcacagacgtcaaggatgacatgaagatcgccagggaggagatctttggaccggtgcagagcatcttcaagttcagcgaaatgaacgaggtgatcaaccgagcaaacaacacagagtacggtcttgcagctgcagttttcaccaaggacatcgacaaggccctctacgtctcgaattcgctcagggcgggaaccgtctggatcaattgctacaacgtggttagccccatggctccattcggaggatacaagatgtcaggcacaggtcgtgaacttggagagtacggtctggaggcatacactgaagtcaaaactgtgactgtgaagatccctcagaagaacagttaa

SEQ ID NO: 37912 - protein, 487 aa, Strongylocentrotus purpuratus
MFSVGKLISATTSARQHAGRTLMRTSQYSVAAIPAPQKNPDIQHHKLFINNEWVNSVSGKTFPTINPATEEVIAEVAEADKADVELAHAAASEAFRLGSPWRTTNASRRGALINKLADLVERDWAHLASLETLDNGKPYQDSYTIDVPGVLATLRYFAGWADKIEGKTIPVDGDFMTYTRHEPVGVCGQIIPWNFPLLMLAWKWAPALACGNTIIMKTAEQTPLTALHMAELAKEIGRIIAQSAGASNLKKVTLELGGKSPNIILADADLDHAVEQSHSAIFWNMGQACCAGSRTFVEDKIYDEFVERSVERAKSKVVGDPFDMSKDQGPQINDEQFKKILGLIESGKSDGAKLATGGGRHGDKGYYIQPTVFTDVKDDMKIAREEIFGPVQSIFKFSEMNEVINRANNTEYGLAAAVFTKDIDKALYVSNSLRAGTVWINCYNVVSPMAPFGGYKMSGTGRELGEYGLEAYTEVKTVTVKIPQKNS

SEQ ID NO: 37913 - DNA, 2382 bp, Strongylocentrotus purpuratus
  CDS (1)..(2382)
atgaatgtgattgatgatcctaaacatggctctatcatctaccatccttcacttcttccaaggcatagaggagcttctgctatcaattggactctaatgagtggtgacaagcaggcaggtttcacagtattctgggctgatgatggacttgatacaggtcctattttacttcagaagtctgtcgatgtagacccaaatgaaacggtggatacactctacaacaggttcctctacccagaaggcatcaaagctatgggagaagcagtgcaacttatttatgaaggcaaggctcctcgtattgtacagccagaagagggcgccacatacgacaagctctggaaaaagaaagaagtcgctcagatcccatggggccagtcagcggaaactcttcacaactttgtgcgaggaaacgacatgatccctggtgcttgggctaggatagatggacagcaagtgacgatgtttggttcaaccctcctctcaggcagcacaccaaagggcacacctgttgaaatagaaggctgcgacacacccgccatcgttcataaaaacgggttggctctctttggcaatgacggcaaaatgctgaatgtgaagacccttcagtttgaagatggtcgtatgatccctgctggcaagtacggacagtctatggatgcagaggagaagctagagctcacaccggaggaacaagagatggctacaaccgtcaaggctatctgggctggcatcctatcaacaccagacatctcaggcgatacagacttcttcaagatgggagctgggtcaatggatgttgccaggctggtggaagagttgaaacagaagtgcagcgtggagctcaagaatgaggacgtatacatggctaccacctatgatgcctttgtacagaaggtggccaggaaaggaagagggttggatgaacaagtctttgaatttgatgcatttgagatgcacgtgaacaacatggacatctcgtttccccaccaactgttcattaacaatgagtttatggattcggagagtggcaataccttcaagaccatcaacccccatgatgagtccgtcatctgtgagatcgccaaggcatccgtagcagatacagatgtagctgtagctgctgctaaggcagctttctttgagggagaatggggcaagatgaacgccagagataggggcaagatgatgttcaagttagctgacttgatggaggagcacactgaagagttagccaccattgagagtatagactctggagcagtctacaccttggcactcaagactcatgttggcatgtcaatcgataccttcaggtactttgctggatggtgcgacaagatccagggagtgacgattccaatcaaccatgccagaccaaacaggaatcttacctataccaagaaggaacctctaggagtatgtgctatcatcgtaccctggaactaccccctcatgatgttggcctggaagatggccgcctgcctcgctgcaggaaacacagtggtcctcaagcctgcccaggtcacaccccttacagccctcaagtttgctgaactggtcgtcaaggctggattccctcctggtgtcataaacatcctaccaggctcaggttccgtctgtggtcagaggatggctgaccatcctgatgtcaggaagctgggtttcactggctcaacacccatcggtatgcagatcatgaaaagctgtgctgagagcaacctgaagaaggtgtccctggaactgggaggcaagtctcctctcgtcatctttgctgattgtgacatggctgcagcagtcagacagggactcggttcagtgttcttcaacaagggagagaactgcatcgctgccggaagattgttcgttgaagacaccatccacgacgaattcttagagagagtggttgcagaggttaagaagatgaagattggtgaccccttggacaggtcaacatcccacggacctcagaaccacagagctcatcttgagaagctggtggagtactgtgatatcggagtcaaagagggagctacactggttcacggtggaaagcaagctgataggccaggtctgtacatggagccgactgtgttcaccgatgtaaccgatgatatgatgatggccaaggaggaatcgttcggtcccatcatgatcatcaccaagttctcttccagtgatattgatggcatgctcaagagtgctaacggcacagagtttggtctggcctccggtgtcttcaccaaggatatcaacaaggccatgtacgtcagcgagaagcttgatgccggtaccgtcttcgtcaatacctacaacaagacggacgttgctgctcccttcggtggattcaagcagtctggatttggcaaggatctgggtgagtga

SEQ ID NO: 37914 - protein, 793 aa, Strongylocentrotus purpuratus
MNVIDDPKHGSIIYHPSLLPRHRGASAINWTLMSGDKQAGFTVFWADDGLDTGPILLQKSVDVDPNETVDTLYNRFLYPEGIKAMGEAVQLIYEGKAPRIVQPEEGATYDKLWKKKEVAQIPWGQSAETLHNFVRGNDMIPGAWARIDGQQVTMFGSTLLSGSTPKGTPVEIEGCDTPAIVHKNGLALFGNDGKMLNVKTLQFEDGRMIPAGKYGQSMDAEEKLELTPEEQEMATTVKAIWAGILSTPDISGDTDFFKMGAGSMDVARLVEELKQKCSVELKNEDVYMATTYDAFVQKVARKGRGLDEQVFEFDAFEMHVNNMDISFPHQLFINNEFMDSESGNTFKTINPHDESVICEIAKASVADTDVAVAAAKAAFFEGEWGKMNARDRGKMMFKLADLMEEHTEELATIESIDSGAVYTLALKTHVGMSIDTFRYFAGWCDKIQGVTIPINHARPNRNLTYTKKEPLGVCAIIVPWNYPLMMLAWKMAACLAAGNTVVLKPAQVTPLTALKFAELVVKAGFPPGVINILPGSGSVCGQRMADHPDVRKLGFTGSTPIGMQIMKSCAESNLKKVSLELGGKSPLVIFADCDMAAAVRQGLGSVFFNKGENCIAAGRLFVEDTIHDEFLERVVAEVKKMKIGDPLDRSTSHGPQNHRAHLEKLVEYCDIGVKEGATLVHGGKQADRPGLYMEPTVFTDVTDDMMMAKEESFGPIMIITKFSSSDIDGMLKSANGTEFGLASGVFTKDINKAMYVSEKLDAGTVFVNTYNKTDVAAPFGGFKQSGFGKDLGE

SEQ ID NO: 37915 - DNA, 1449 bp, Nasonia vitripennis
  CDS (1)..(1449)
  misc_feature (838)..(838): n is a, g, c or t
  misc_feature (839)..(839): n is a, g, c or t
  misc_feature (840)..(840): n is a, g, c or t
  misc_feature (841)..(841): n is a, g, c or t
  misc_feature (842)..(842): n is a, g, c or t
  misc_feature (843)..(843): n is a, g, c or t
  misc_feature (844)..(844): n is a, g, c or t
  misc_feature (845)..(845): n is a, g, c or t
  misc_feature (846)..(846): n is a, g, c or t
  misc_feature (847)..(847): n is a, g, c or t
  misc_feature (848)..(848): n is a, g, c or t
  misc_feature (849)..(849): n is a, g, c or t
  misc_feature (850)..(850): n is a, g, c or t
  misc_feature (851)..(851): n is a, g, c or t
  misc_feature (852)..(852): n is a, g, c or t
  misc_feature (853)..(853): n is a, g, c or t
  misc_feature (854)..(854): n is a, g, c or t
  misc_feature (855)..(855): n is a, g, c or t
  misc_feature (856)..(856): n is a, g, c or t
  misc_feature (857)..(857): n is a, g, c or t
  misc_feature (858)..(858): n is a, g, c or t
atgggcacgaacaagccggtcgtcaagtataccaagcttttcatcaacaatgaattcgtcgatgctgccagcggtaaaacttttccaaccatcaacccgtcaactggaacagtcataacccatgtatccgaaggagataaggcggacgtcgataaagcggttgcggcagcaaaaaaagcctttgcccgtaattcaccatggcgaaccatggatgcatctgccagagcaaagctcatgcacaagttcgccgatctaatggagcgcgacatcgactacctggcaagcatcgagactctcgacaacggcaaaaccttcgctgactcgaagggtgacatctccgcgagcatcgagtgcttgcgctactacgccggctggtgtgacaagattcacggccaaaccattccagctgacggcggattcttctcgatgacgcgcaaggagccggttggtgttgtcggccagatcatcccctggaactacccgatcatgatgaccgcctggaaatggggtccagctctagctgccggctgcacgatcgtcctgaaaccagctgagcagacacccctgagtgccctctgtcttgctgctctcaccaaggaggccggcttccctgccggtgtcatcaacgtggtgaacggattcggccccaccgctggcgcggctattgccgaacactttgacattcgcaaggtcgccttcaccggttccaccgagatcggtcacctcatcatgcaagcggctggaaggaccaacttgaagcgagttagccttgagcttggcggcaaaagtcctctaatcatctgtgaagatgcagacagtgagtataacttatctttgnnnnnnnnnnnnnnnnnnnnntgctgcgccggttcgcgcactttcgttcacgcaaaggtgtacgatcaattcgtcaaggaggccaaagaactggcgaccaagaggaaagtcggcgaccccttcagtgatggcaccgatcagggaccacaaatcgaccaggacatgtacgacaaagtcatgggattgattgcatccggaaaacaggagggagccactctggttacgggaggaaagcgcgttggtaacgcaggatacttcattgagcctacggtctttggtaatgtcaccgacgagatgaagatcgccagggaggaaattttcggacccgttcaatcgatcttcaagttcaacgatattgaagaagctattgaaagagcgaacaagacatcttatggtcttgcagctggtatcatcaccaaagatattgataaggctctggcctttgccaaagctgtggatgctggaagcatctggatcaacggttacgaccttttgacggctcacacgcctttcggaggattcaaaatgtctggaattggacgagaattgggcgaagaaggactgcacgaataccttgaggttaagacaataactatccgtacaaatgcataa

SEQ ID NO: 37916 - protein, 482 aa, Nasonia vitripennis
  misc_feature (280)..(280): The Xaa at location 280 stands for Stop, Ala, Arg, Asn, Asp, Cys, Gln, Glu, Gly, His, Ile, Leu, Lys, Met, Phe, Pro, Ser, Thr, Trp, Tyr, or Val.
  misc_feature (281)..(281): The Xaa at location 281 stands for Stop, Ala, Arg, Asn, Asp, Cys, Gln, Glu, Gly, His, Ile, Leu, Lys, Met, Phe, Pro, Ser, Thr, Trp, Tyr, or Val.
  misc_feature (282)..(282): The Xaa at location 282 stands for Stop, Ala, Arg, Asn, Asp, Cys, Gln, Glu, Gly, His, Ile, Leu, Lys, Met, Phe, Pro, Ser, Thr, Trp, Tyr, or Val.
  misc_feature (283)..(283): The Xaa at location 283 stands for Stop, Ala, Arg, Asn, Asp, Cys, Gln, Glu, Gly, His, Ile, Leu, Lys, Met, Phe, Pro, Ser, Thr, Trp, Tyr, or Val.
  misc_feature (284)..(284): The Xaa at location 284 stands for Stop, Ala, Arg, Asn, Asp, Cys, Gln, Glu, Gly, His, Ile, Leu, Lys, Met, Phe, Pro, Ser, Thr, Trp, Tyr, or Val.
  misc_feature (285)..(285): The Xaa at location 285 stands for Stop, Ala, Arg, Asn, Asp, Cys, Gln, Glu, Gly, His, Ile, Leu, Lys, Met, Phe, Pro, Ser, Thr, Trp, Tyr, or Val.
  misc_feature (286)..(286): The Xaa at location 286 stands for Stop, Ala, Arg, Asn, Asp, Cys, Gln, Glu, Gly, His, Ile, Leu, Lys, Met, Phe, Pro, Ser, Thr, Trp, Tyr, or Val.
MGTNKPVVKYTKLFINNEFVDAASGKTFPTINPSTGTVITHVSEGDKADVDKAVAAAKKAFARNSPWRTMDASARAKLMHKFADLMERDIDYLASIETLDNGKTFADSKGDISASIECLRYYAGWCDKIHGQTIPADGGFFSMTRKEPVGVVGQIIPWNYPIMMTAWKWGPALAAGCTIVLKPAEQTPLSALCLAALTKEAGFPAGVINVVNGFGPTAGAAIAEHFDIRKVAFTGSTEIGHLIMQAAGRTNLKRVSLELGGKSPLIICEDADSEYNLSLXXXXXXXCCAGSRTFVHAKVYDQFVKEAKELATKRKVGDPFSDGTDQGPQIDQDMYDKVMGLIASGKQEGATLVTGGKRVGNAGYFIEPTVFGNVTDEMKIAREEIFGPVQSIFKFNDIEEAIERANKTSYGLAAGIITKDIDKALAFAKAVDAGSIWINGYDLLTAHTPFGGFKMSGIGRELGEEGLHEYLEVKTITIRTNA

SEQ ID NO: 37917 - DNA, 1524 bp, Nasonia vitripennis
  CDS (1)..(1524)
atgttttctcgtctctgcacaattcaggggacaataactaagtcttccaaacttttgaatcaatccatgagtactaataaaaacttggcatacgtcaatggaaaatgggtgggtgccaccagtggcaaaacattcccagtcatgaacccagcggattgttcaacaattgattgtgtcccagacatgaatgtaacagatactcgactagccattgatgcagctgccaaatcatttgaaacctttcaaaaaactctagctaaagaacgcagtgaaatgttaagagcttggtataatttattggtaaaacactcagaagaattggcagaaatcatgaccaaagagaatggaaaatcattggaggaatctagagcagaagttagatatggcaattcttttgtcgagtggttttctgaagaagctagacggataaatggtgaggtcttacaatcaccattcaaaaatagagaattgtttttaattaagcgacctgttggagttgctgcttttataactccatggaattttccacatgccatgattacaagaaaggctggagcagctatagcagctggttgtacatgtgtgatcaagccttcagaagacactccacttactgctttagcccttgcacatttggctgaagaagctggatttcctgctggcgtaatgaatatcctaacaacgagtctagaaaattcagtggctgttggtcaggaactttgtcataatccaaaagttcgagcattgtccttcacaggttctacagctgtaggaaaaatcttataccaacagtgtgcttccacaatgaaacgcttgagtctagaattaggtggcaatgctccatacattgtattcgatacagctgatgttaacttagcggtcaccggagcaatggcaagtaaatttagaaattcagggcagacatgcatttcagcaaacagattctttatacactctaaagtgtatgacgaatttgtttgtaaatttttgactagaatagaaagtgaaataaaaatgggtgacggaagtaaaaaaggaaatactcatggacctttgattaaagagagtcagttaaaaatagttagcaatcttgtgaacgatgctaagacaaaaggagccactattcattgtggaggcaaacctttgccagatattggttctctcttttatgctccaacagtaataactgatgtcacaagagatatggaaatatatggtaaagaaatatttgggcctgttgctgtaatacataaatttgatgatgaggaagaagtattacaaagggcgaatgaaactccagtaggtttagctggatatttttactctggagatatctcacaaatctacagggtagcaagaaatttacaggtaggaatgattggcgtaaatgagggattaatttcatgcacagaagcagcttttggaggcattaaagagtctggaattggaagggaaggttctagccatggcattgatgagtatgttgatattaagtatgtttgcattggaaatgttcaacattga

SEQ ID NO: 37918 - protein, 507 aa, Nasonia vitripennis
MFSRLCTIQGTITKSSKLLNQSMSTNKNLAYVNGKWVGATSGKTFPVMNPADCSTIDCVPDMNVTDTRLAIDAAAKSFETFQKTLAKERSEMLRAWYNLLVKHSEELAEIMTKENGKSLEESRAEVRYGNSFVEWFSEEARRINGEVLQSPFKNRELFLIKRPVGVAAFITPWNFPHAMITRKAGAAIAAGCTCVIKPSEDTPLTALALAHLAEEAGFPAGVMNILTTSLENSVAVGQELCHNPKVRALSFTGSTAVGKILYQQCASTMKRLSLELGGNAPYIVFDTADVNLAVTGAMASKFRNSGQTCISANRFFIHSKVYDEFVCKFLTRIESEIKMGDGSKKGNTHGPLIKESQLKIVSNLVNDAKTKGATIHCGGKPLPDIGSLFYAPTVITDVTRDMEIYGKEIFGPVAVIHKFDDEEEVLQRANETPVGLAGYFYSGDISQIYRVARNLQVGMIGVNEGLISCTEAAFGGIKESGIGREGSSHGIDEYVDIKYVCIGNVQH

SEQ ID NO: 37919 - DNA, 2709 bp, Nasonia vitripennis
  CDS (1)..(2709)
atgaggaagttaaaggttgccattatcggccaaagcaacttcgcggctgaggtctacaagtcattgaaaagggacggacacgaggtcaccggagttttcacgataccggacaaggtcaatcgcgaggatccactggcgataacagcgaaggccgatggcactccggtcttcaagatcaaggcctggcgcagcaagggtctacctctgccggaggtcctcgacctctacaagagcatcgaggtcgacctgaacgtgttgcccttttgcacccaattcatacccatggaagtgatcaaccatcccaagcatcggagcatctgctaccatccgtcgattctgccaaggcatcgtggcgcgagtgccatcagctggactctgatcgaaggcgacgaggtggccggtttctcggtcttctgggctgacgacggcctggacaccggaccgatcctcctccaacgcagctgtcccgtgaagcccaacgatactctggacagtctgtacaacgggttcatgtacccggagggtatcaaggcgatggccgaggcagtgaacctcgtggctaagggtacagcgccgtgcgtacctcagaccgaggaaggcgcgacctacgacgctatgctgaacaaaaaggaactgcagaggctcgactggaagggaaaaagtgccaagcaggcgcacgattttatcagggctttggactcgacaccaggtgcttggacgcttatcgacggcgaggaggcgaggttgtacggcagcagtttgtggaaaggaaacgagacaataccctcgggaacagcagtggacatcgacggccggccagctgtggttcacgagacgggtctgctgatgcaggcagaggacggaaactggctgaacgtcgaggttctgaaaatcggtacgcgtacgataagcgcaagcaagtacggccaggctcagagcaacggcacctgtctcgagttcacggaggaggagcgacaagctgtcgagaccatccgtaaaatctggcaaagcatactgcgccgggatatcgacgacgataccgatttcttcgcttgtggtgccggcagcatggacgtcgtccgtctggtcgaggagatgaaggacagcctggacattcacttgcagaacaccgacgtgttcatggcgccggttttcatggaactggtaaactcggcgatactggccaaacgcggagcaagcgccagccagaacatcgcctacgaggcggtcgtgctccaagcgaacaacatggacctgagcttcccgagacagctgttcgtcaacggcaagttcgtcaacggtcgtggaaagccgatcgtctcggttaacccgcacgacgagagcgtcatctgctcggtggaaagcgcctcgatcgaggatgtcgacgaggcggtcaaggcggccaagaaggctttcgaggagggagagtggagcaagatcagcgcgagagaacgaggcgctctgcttttcaagctagccgacctgatggagcagcacaaggaggagctagccaccctggagagtctcgactccggcgcggtgtacaccctggccttgaaaacccacgtgggcatgtcgatcgagacatggcgctacttcgccggctggtgcgacaagattcaaggggctaccgtaccgatctctcacgcccggccgaatcggaacctgacgatgacgcggaaggaaccgatcggagtctgcggccttgtcacgccctggaactacccgctgatgatgctctcctggaagatggctgcttgtctggcggctggaaacactgttgtcatgaaacctgctcagacctcagcactgacggcgctcaagtttgccgagctgtccgccaaggccggcattccaccaggtgtgataaacatcgttcccggaagcggttcgatcaccgggaacgccatcgtcaatcaccacctcgtgagaaagctcggattcacaggatcgacggaaatcggccagatgataatgcgatcgtgcgccgacagtaatctgaagaaagtctcgctcgaactcggcggaaagagtccactggtgatattcgaagacgccgacatgcaacaagccgtcagacttgcaatgagcagtgtcttcttcaataaaggagagaactgcattgctgccggtcgaatcttcgtggaagagcgcatcctcgacgagttcctggatcgcgtggtcgccgagacgaagaagatcgcgatcggcgaccccttgaaccgtggcacctcccacggaccccagaaccacaaggcccacctcgacaaactcctggaattcgtcgagaagggagtgaaggaaggcgcgcgtctggtgtacggtggccgcagactcgacaggcccggtttctacttcgagcccacgatcttcgccgacgttcgcgacggcggcttcctagcgaccgaggagtccttcggacccatcatgatcgtctcgagcttcagctccaacgacctggacaaggtaatcgccagggctaacgcgaccgagtacggacttgcttctggagttctgaccaaggacatcagccgagcgttgaggttcgcggagaagatcgacgccggtacggtgttcgttaacacttacaataagaccgacgtggctgcgccgtttggagggttcaagaggtctggattcggaaaggatctgggacaggaggcgcttaacgagtatctgaagaccaagactatcactatcgagtactga

SEQ ID NO: 37920 - protein, 902 aa, Nasonia vitripennis
MRKLKVAIIGQSNFAAEVYKSLKRDGHEVTGVFTIPDKVNREDPLAITAKADGTPVFKIKAWRSKGLPLPEVLDLYKSIEVDLNVLPFCTQFIPMEVINHPKHRSICYHPSILPRHRGASAISWTLIEGDEVAGFSVFWADDGLDTGPILLQRSCPVKPNDTLDSLYNGFMYPEGIKAMAEAVNLVAKGTAPCVPQTEEGATYDAMLNKKELQRLDWKGKSAKQAHDFIRALDSTPGAWTLIDGEEARLYGSSLWKGNETIPSGTAVDIDGRPAVVHETGLLMQAEDGNWLNVEVLKIGTRTISASKYGQAQSNGTCLEFTEEERQAVETIRKIWQSILRRDIDDDTDFFACGAGSMDVVRLVEEMKDSLDIHLQNTDVFMAPVFMELVNSAILAKRGASASQNIAYEAVVLQANNMDLSFPRQLFVNGKFVNGRGKPIVSVNPHDESVICSVESASIEDVDEAVKAAKKAFEEGEWSKISARERGALLFKLADLMEQHKEELATLESLDSGAVYTLALKTHVGMSIETWRYFAGWCDKIQGATVPISHARPNRNLTMTRKEPIGVCGLVTPWNYPLMMLSWKMAACLAAGNTVVMKPAQTSALTALKFAELSAKAGIPPGVINIVPGSGSITGNAIVNHHLVRKLGFTGSTEIGQMIMRSCADSNLKKVSLELGGKSPLVIFEDADMQQAVRLAMSSVFFNKGENCIAAGRIFVEERILDEFLDRVVAETKKIAIGDPLNRGTSHGPQNHKAHLDKLLEFVEKGVKEGARLVYGGRRLDRPGFYFEPTIFADVRDGGFLATEESFGPIMIVSSFSSNDLDKVIARANATEYGLASGVLTKDISRALRFAEKIDAGTVFVNTYNKTDVAAPFGGFKRSGFGKDLGQEALNEYLKTKTITIEY

SEQ ID NO: 37921 - DNA, 1485 bp, Nasonia vitripennis
  CDS (1)..(1485)
atggctcctcaaccaaagccaacggcaaatccagaaattaaatatactaagttatttatcaacaatgaatgggtcgattcagtaagtggtaaaaaatttaccactattaatccagctaatgaaaaagtaatcgctgaagtatccgaagctgaaaaggctgacgtcgacaaagcagtaaaggtggctagagcagcttttgaaagaggttctgtctggcgtaatctcgacgcatctgctcgtggaagactcatttacaatttggcacaactcattgaagaccatgtgaacgaaatcgctagtttggaatctttggacaacggcaagcccttcaataactcttactaccagacgttagagtcaactaacgtcttacgatactttgctggatgtgccgacaaaatacacggattaaccattccttctgatggcaaagaattcgctttgaccagaaaagaaccagtcggagttgttggtgccattattccttggaactatccaataatccttttgagttttaaacttggaatggccttggcagctggatgcacagtcgtcgtcaagccagcagaacaaacaccgttgaccgctctgtacgtcgcgagtttagtgaaagaagccggatttcctccaggcgttgtcaatgttcttcccggctatggtccatctacaggtgcggctatttcctcacacccagacattgacaaagtcagctttactggctcctcagtggtaggaaaagctatattggaagcgtctgcaaagtccaatttgaaaaaagtcagcttggaactgggaggaaagagtccattagtcgtgtttaacgatgctaatttggaactcgcactcaagtatgcttccgatgctcttttcgtaaatgctggacaaacctgcatagcaccaaccagagtatttgttcagtctggagtatacgataaatttaccaagagattcgttgaaattgcatccaaagtcaaagttggagatgctttcgagccaggcgtatttcaaggtccccagattgatactaaaggtttcaacaaagttctgtcattaattgaaactgggaaaaaagaaggagccaagtgcgaaattggtggaaagcgtcgtggaaatgtaggatattttgtggaaccgaccgttttcactaatgtttctgacgatatgactattgcaaaggaagagatatttggaccagttcaaagcatcttcaaatttgaaactttagacgaggtgataaagcgggctaataatactccgtatggcttatcagctggcgttttcactgaaaatctaaacactgctttagaattttcaaaagctgtgcaagccggtactgtatgggttaaccaatggggcgctgtccatcctcaaacaccttttggtggatacaagacatccggtttaggcagagaaatgggtatcggttcgctggacgaatatctggaaactaaaaccataaacattagcttgccgagcaaccattaa

SEQ ID NO: 37922 - protein, 494 aa, Nasonia vitripennis
MAPQPKPTANPEIKYTKLFINNEWVDSVSGKKFTTINPANEKVIAEVSEAEKADVDKAVKVARAAFERGSVWRNLDASARGRLIYNLAQLIEDHVNEIASLESLDNGKPFNNSYYQTLESTNVLRYFAGCADKIHGLTIPSDGKEFALTRKEPVGVVGAIIPWNYPIILLSFKLGMALAAGCTVVVKPAEQTPLTALYVASLVKEAGFPPGVVNVLPGYGPSTGAAISSHPDIDKVSFTGSSVVGKAILEASAKSNLKKVSLELGGKSPLVVFNDANLELALKYASDALFVNAGQTCIAPTRVFVQSGVYDKFTKRFVEIASKVKVGDAFEPGVFQGPQIDTKGFNKVLSLIETGKKEGAKCEIGGKRRGNVGYFVEPTVFTNVSDDMTIAKEEIFGPVQSIFKFETLDEVIKRANNTPYGLSAGVFTENLNTALEFSKAVQAGTVWVNQWGAVHPQTPFGGYKTSGLGREMGIGSLDEYLETKTINISLPSNH

SEQ ID NO: 37923 - DNA, 1536 bp, Nasonia vitripennis
  CDS (1)..(1536)
atgcttcgtttgctttcgaagaacttaaattctgtgcgtggattcgcatctgcggccgtcccggcgccggaaaccaatccatctgtcctctacgctgggatttttattgataatgaatggcatcaatcaaaatctggcaaaaaatttgagactcgcaatccagcaacagaagaagttatcgctaatgtccaacaaggtgatgcttccgatattgatcaagcagtacaagcagcaagaagggcctttaaattgggttcaccatggaggacgatggatgcatcccagagaggagttttgttacacaggttggcagatttgatggaacgtgaccgcaagtatcttgcttccctggagaccttggacaatggaaaaccatactcgacagcctatggttttgatctaccagcaagtataggtacactcaggtactatgcaggatgggctgataaaaatcatggaaaagtcattcctatggatggtaaattcttcgcttatactagacatgaaccagtgggtgtttgtggacaaattattccctggaatttcccaattttgatggctgcatggaagctgggacctgcactagctacaggaaactgtattgttcttaaaccagctgaacaaactccactcactgccttgtacattgcacagcttacaaaagaagcaggattcccagctggagtagttaatgttgttcctggatttggtgatgctggtgccgctatagtcaaccatcctgatgttgataaagtagctttcactggttctactgaaattggacaactggtgaaggaaggtgctgccaaaagtaatttaaagaggaccacattagaattaggaggaaaatcacccaacatcatctttaaggatgcagatatggaccaagctgttgaaactgcccactttggtctattctttaacatgggtcagtgttgctgtgctggatctaggacctttgtcgaaagttctatttacgatgaattcgttgaaaggagtgccgctcgagctaaagctaggactgttggtgatccttttgatatgaatgtagagcatggtcctcagattgatgaagaccagatgaacaaaattttgtccatgattgattctggaaaatctgaaggtgccaaactagttcaaggaggtggaagagtaggtgaaaaaggttacttcgtagctccgactgtctttgctgacgttaaagataacatgaaaatcgcaagggaagagatctttggaccagttcaacaaattttgaaattcgacaaaatcagcgatgtgattcaaagagcaaacaaaactgattatggattagcagctgctgttttcacaaaagatattgataaagccaactatgttgtccaaggattacgagcgggtaccgtttgggtcaactcatacaatgcattatctactcaagttcctttcggtggttacaaaatgtctggtcatggtagggaactgggagagtatggattagaagcttacacagaagttaagagtgtaattgtcaaagtaactgaaaagaatagttaa

SEQ ID NO: 37924 - protein, 511 aa, Nasonia vitripennis
MLRLLSKNLNSVRGFASAAVPAPETNPSVLYAGIFIDNEWHQSKSGKKFETRNPATEEVIANVQQGDASDIDQAVQAARRAFKLGSPWRTMDASQRGVLLHRLADLMERDRKYLASLETLDNGKPYSTAYGFDLPASIGTLRYYAGWADKNHGKVIPMDGKFFAYTRHEPVGVCGQIIPWNFPILMAAWKLGPALATGNCIVLKPAEQTPLTALYIAQLTKEAGFPAGVVNVVPGFGDAGAAIVNHPDVDKVAFTGSTEIGQLVKEGAAKSNLKRTTLELGGKSPNIIFKDADMDQAVETAHFGLFFNMGQCCCAGSRTFVESSIYDEFVERSAARAKARTVGDPFDMNVEHGPQIDEDQMNKILSMIDSGKSEGAKLVQGGGRVGEKGYFVAPTVFADVKDNMKIAREEIFGPVQQILKFDKISDVIQRANKTDYGLAAAVFTKDIDKANYVVQGLRAGTVWVNSYNALSTQVPFGGYKMSGHGRELGEYGLEAYTEVKSVIVKVTEKNS

SEQ ID NO: 37925 - DNA, 1572 bp, Anopheles gambiae str. PEST
  CDS (1)..(1572)
atgattcgttcagttttgctcctgcgctccacgggcaagtggtactacggtcgatccggattgcgtttgagtttcaacagtgtgacggcttgcacaacgcgaacaatgcacagcaatccgctgaagcagagccaggcgtacgtcaatggcagctggattggggcccggtcgggcgccaccttcgacgtgcagaaccctgccaacggtgcggtgctgggagcggtaccggacatggcccgggatgacgtgcagctggccatcgatgctgcgtacgacgcgttctacgagccgcgatggcataacagcaccgccaaggagcgggccgccctgttgaagaactggcacgcactgatggagaagaaccggcaggagattgccagcatcatgacggccgagtcgggcaaaccgctggtggaatcgctcggggaggtcgcgtacggtaactcgttcgtcgaatggttcgcggaggaggctcgccgcatctacggcgagatcgtcccatcgccggtcgccaatcggcagattatgatgacgcgcaatccggtcggtgtggcgggcctgattacgccctggaactttccgcacgccatgatcacgcgcaaagcggccgcggccattgcggcgggctgtacggtggttataaagccggccgaagacacgccactgaccgcgctggcgttggctcggctcgctgaggaggccggctttccgaagggtgttatcaacgtgataacgagcagccgaacgcacgcggccgaaattgggcagctgctgtgcggtagcgataaggtggcggccatttcgtttaccggctcgaccgaggtcggcaagctgctgtaccggcagtgcgcggacggggtaaagcgcatcgggctcgaactgggcggcaatgcaccgttcatcgtgtttaagtcggccgacatggagaaagcactgaccggggccatgaactccaagttccggaactgcggccagacgtgcatttcggcgaaccggttcctgatacaggacgaggtgcacgatgagttcgtggcgaagctgatcgagcgcattcgcaagctggcgatcggcgatggcagtcgggatggcgtacagattggtccgctcatcaatcaggcccagctgaagaaggtggaccagttcgtgcaggatgcgaaggacaagggtgccaaagtgcacaccggtggcaaaacactgcccgagctgggtccgctctattacgagccaacggtcgtgacggatctgcgggacaacatgctgctgtacaacgaggaagtgttcggtccggtcgtgtcggtggtacggttcaagacggaagccgaagcactggccatcgctaacggtacgcggcgcggactggccggctatttcttctcgaacgatctgaaccaggtgttccgggtggcgcgccagctcgagacgggcatgatcggcatcaacgagggactcatctcggcgacggaggctgcattcggcggcataaaggagtcgggaattggacgcgaaggctcacgccacgggatcgatgaatatgtctacataaaatatctgtgctatggcaatctccagtaa

SEQ ID NO: 37926 - protein, 523 aa, Anopheles gambiae str. PEST
MIRSVLLLRSTGKWYYGRSGLRLSFNSVTACTTRTMHSNPLKQSQAYVNGSWIGARSGATFDVQNPANGAVLGAVPDMARDDVQLAIDAAYDAFYEPRWHNSTAKERAALLKNWHALMEKNRQEIASIMTAESGKPLVESLGEVAYGNSFVEWFAEEARRIYGEIVPSPVANRQIMMTRNPVGVAGLITPWNFPHAMITRKAAAAIAAGCTVVIKPAEDTPLTALALARLAEEAGFPKGVINVITSSRTHAAEIGQLLCGSDKVAAISFTGSTEVGKLLYRQCADGVKRIGLELGGNAPFIVFKSADMEKALTGAMNSKFRNCGQTCISANRFLIQDEVHDEFVAKLIERIRKLAIGDGSRDGVQIGPLINQAQLKKVDQFVQDAKDKGAKVHTGGKTLPELGPLYYEPTVVTDLRDNMLLYNEEVFGPVVSVVRFKTEAEALAIANGTRRGLAGYFFSNDLNQVFRVARQLETGMIGINEGLISATEAAFGGIKESGIGREGSRHGIDEYVYIKYLCYGNLQ

SEQ ID NO: 37927 - DNA, 1548 bp, Anopheles gambiae str. PEST
  CDS (1)..(1548)
atgtatcgtgcagtgaaactgtccagcgctttccgtgcactgtccgcacactgtcggaattactcggtgccggcaccaaagtcttctcccgagatcctctacaccgggatctttatcaacaatgagtggcacaaaagctcgaccggaaagaccttccccacagtgaacccgtccaacgagaaggtgatcgcggagatccagcagggcacgaaagcggacatcgatcaggcggtagtagcggcaagagatgcgttcaaactcggatcaccctggcgccggatggatgcatcgaagcggggtcaactgctgtaccggctggcggatttgatggagcgcgatcgggtgtacttagcgagcttggaaacgctggacaatggcaaaccgtacttcatgtcgtacaatgtggacgtgccgatggcgatcagcaacctgcgctactatgccggctgggcggacaagaaccacggcaaggtgataccgatggacggcgagttcttcgtctacacccgtcacgaaccggtcggtgtgtgcggccagatcatcccgtggaacttcccgatcctgatggcggcgtggaagttcggtccggcactggccaccggcaacaccatcatcctgaagccggccgaacagaccagcctgaccgcgctgtacatggcgcagctcacgaaggaggccggcttcccgcccggcgtggtgaacgtggtgcccggctacggtgatgccggtgccgccctggtcgaccatccggacgtcgacaaggtggcgtttaccggctcgaccgaggtgggcaaaaagatccagcagggctcggggctgagcaatctgaagcgcaccacgctcgagctcggcggcaaaagcccgaacatcatcctgtccgatgcggacatgaagcacgcggtggaaacgtcccacttcgggctgttctttaacatgggtcagtgctgctgtgccgggtcgcgcacctttatcgaggacaaaatctacgacgagtttgtggagcgcagcgcagagcgggcgaagaagcgcaccgtcggcaacccgttcgatctgaccaccgagcacggtccgcaggtggatcgggcccagtacgacaagatactggggctgatcgatacgggcaagcagcagggcgcccggttggtggcgggtggcagcaaggtaccggacctgcccggctacttcatccagccgaccgtgttcgcggacgtgcaggacgacatgacgatcgcgcaggaggaaatcttcggcccggtgcagcagctgatacgcttcaagtcgctcgacgaggtgatcgagcgggcgaacaaaaccgactacgggctggccgccgccgtcttctccaaggacatcgacaaggtgaactatctggtgcaggggctgcgggccggcaccgtctgggtcaacacgtacaacgtgctgtcggcgcaggccccgttcggtgggtacaaaatgtcgggccacgggcgcgagaacggtgagtatgggctgcaggcgtacacggaggtgaagagcgtcattacccgcattccggtaaagaattcgtaa

SEQ ID NO: 37928 - protein, 515 aa, Anopheles gambiae str. PEST
MYRAVKLSSAFRALSAHCRNYSVPAPKSSPEILYTGIFINNEWHKSSTGKTFPTVNPSNEKVIAEIQQGTKADIDQAVVAARDAFKLGSPWRRMDASKRGQLLYRLADLMERDRVYLASLETLDNGKPYFMSYNVDVPMAISNLRYYAGWADKNHGKVIPMDGEFFVYTRHEPVGVCGQIIPWNFPILMAAWKFGPALATGNTIILKPAEQTSLTALYMAQLTKEAGFPPGVVNVVPGYGDAGAALVDHPDVDKVAFTGSTEVGKKIQQGSGLSNLKRTTLELGGKSPNIILSDADMKHAVETSHFGLFFNMGQCCCAGSRTFIEDKIYDEFVERSAERAKKRTVGNPFDLTTEHGPQVDRAQYDKILGLIDTGKQQGARLVAGGSKVPDLPGYFIQPTVFADVQDDMTIAQEEIFGPVQQLIRFKSLDEVIERANKTDYGLAAAVFSKDIDKVNYLVQGLRAGTVWVNTYNVLSAQAPFGGYKMSGHGRENGEYGLQAYTEVKSVITRIPVKNS

SEQ ID NO: 37929 - DNA, 1494 bp, Magnaporthe grisea 70-15
  CDS (1)..(1494)
atgaatattcaactttccgcccccaacggcaagaaatggattcaacccacgggtctttttatcaacaatgaattcgtcaagagcagcaatggccagaaattgaccaccgtcaacgctgccaccgaggaggatattacctcggtctattccgccaccgaagaggacattgataaggccgtcaaggccgcacgtgctgctttcaagcacccatcatggaggaacctttccggaactgagcgtggcgagatgatgcacaagcttgctgaccttgttgtcaagaatgctgaaaccttggccaccattgaggctctcgacggcggcaagccctactctgtcgcccttggtgaggacgttgtcgagtttgaaaagaccatacgatattatgctggttttgcagacaagaactttggccagaccatcgacgtcggcccaaacaagtttgcgtacaccatcaaggagcccattggtgtctgcggccagatcattccctggaactatcccctttgtatggccgcctggaagctcggccctgcgcttgcttgcggcaacacggtcgtgctcaagcttgctgaacagactccattgtcgatgctctacgttgcaaccttgatcaaggaggccgggtttcctgcaggcgtagtcaatgttatcaacggccttggcggcgaggctggggcagccattgtgcagcacccagatatcgacaaggttgcctttaccggaagcacagcaactggcaagcaaatcatgaaggcatgcgcaggaacaatgaagaacatcacactcgagacgggcggcaagtcaccactacttgtttttgacgacgccgacctcgacctggccgccgagtggtctcacattggcatcatgagcaaccagggacagatctgtaccgcgacatctcgtattctggtacacgagtccgtctatgacaaattcgtcggtcgtttcaaggacaccgtcgaaaaggtgtcaatagtaggggatccctttgacgaaaagaccttccagggaccacaggtgaccaaggcacagtacgaaaaggtcctgggttatatcaagttggcacaagaagagggtgccaccattgctactggtggcaagccagccccgcaaaacggtaagggtttctacgtcgcccctaccgtgtttaccaacgtcaagacgtcgatgagggtctacaaggaggagatctttggaccatgcgtatccatcatctcgttcaaggacgaggaggaggcggtcgagttggccaacgacaccacctatggtttgggcgccgcagtctttactcgcaacctcaccagggcgcaccgggtcgcccgcgaaatccagtcgggtatggtttggatcaacagcagcaacgactccgactgccgtgttccttttggtggcgtcaagcagtctggtattggtcgcgaattgggtgaggctggccttgcctcttattgcaacatcaagagcgtacacgtgaacatggctgcgcatttgtag

SEQ ID NO: 37930 - protein, 497 aa, Magnaporthe grisea 70-15
MNIQLSAPNGKKWIQPTGLFINNEFVKSSNGQKLTTVNAATEEDITSVYSATEEDIDKAVKAARAAFKHPSWRNLSGTERGEMMHKLADLVVKNAETLATIEALDGGKPYSVALGEDVVEFEKTIRYYAGFADKNFGQTIDVGPNKFAYTIKEPIGVCGQIIPWNYPLCMAAWKLGPALACGNTVVLKLAEQTPLSMLYVATLIKEAGFPAGVVNVINGLGGEAGAAIVQHPDIDKVAFTGSTATGKQIMKACAGTMKNITLETGGKSPLLVFDDADLDLAAEWSHIGIMSNQGQICTATSRILVHESVYDKFVGRFKDTVEKVSIVGDPFDEKTFQGPQVTKAQYEKVLGYIKLAQEEGATIATGGKPAPQNGKGFYVAPTVFTNVKTSMRVYKEEIFGPCVSIISFKDEEEAVELANDTTYGLGAAVFTRNLTRAHRVAREIQSGMVWINSSNDSDCRVPFGGVKQSGIGRELGEAGLASYCNIKSVHVNMAAHL

SEQ ID NO: 37931 - DNA, 1503 bp, Gibberella zeae PH-1
  CDS (1)..(1503)
atgagtttagacatccaacttactgcccccaatgggcgcacttacaagcagcccaccggtttgttcatcaacaatgaatgggtcaagtcgtccaatggcgaaaagataacttctataaacccaaccaacgagcaagaaatcacatccgtctacgctggttcgtcagaagacgtcgacaaagccgtccgcgctgcccgccgtgccctccacaacccatcatggcgagatctcccaggtaccgagcgcggtaaactgctcagccgccttgctacacttgtcgaagaaaacaaagagatcctcgctacgatcgaaacatgggataatggaaagccttacactgtcgctttgaacgacgacgtcaatgaagtcgctgagacattgagatactatggtggctttgcggataaggtgtatggacaagtcatcgaaacaacaggtgacaagtttggatacaccattcgtgaacctattggcgtctgtggacaaatcattccgtggaacttcccacttgcaatggcagcttggaagctcggcccagctctagcatgcggcaacgcagtgatcctcaagcccgcagaacaaacacccctctcaatcctctaccttgccaatcttatcgtcgaagcaggctttccccctggtgttgtcaacatcatcaacggtctaggaaccgttgccggtgccgcacttgcttcacatatggacgtcgataagattgcctttacaggttctacacccacagcgcgcagcatcatgaagatggcaagcagcaatctgaagaacatcactttggagactggtggcaagagccctcttatcgtctttgatgatgccgatgttgacttggctgcgtactgggcccatgctggtatcatgtacaatcagggtcaagtgtgcactgctaccagtcgtatccttgtccaagagagcatctatgacaagttcatggctgctttcggagcccaagtcaagaacatctccaaggtgggcgatccctttgaggagagcaccttccaaggaccccaagtcaccaaggcccagtatgaaagaatcttatccttcgttgatgttggtaagaaagaaggtgccaaactggctcttggtggtcaaccattcaaggttggcgatggaaagggttactttgtcgaaccaacagtctttacagacgttacacccaagatgcgtgttttccaagaagaagtcttcggcccatttgtggttgttaccaagttctcttctgaagacgaggctattcacttggctaatgatacacaatatggccttggaagtgcgcttttcacaacaaatctgacaagggcgcatcaagttgccaagaggatcgaggcaggtatggtctgggtcaactcgagcaatgacagtgactggagaattccctttggcggagtaaagcagagtggtattggtcgggaattgggagaagctggtcttgcggcttattccaacatcaaggctgtgcatgtcaacattgcggcaaagctatag

SEQ ID NO: 37932 - protein, 500 aa, Gibberella zeae PH-1
MSLDIQLTAPNGRTYKQPTGLFINNEWVKSSNGEKITSINPTNEQEITSVYAGSSEDVDKAVRAARRALHNPSWRDLPGTERGKLLSRLATLVEENKEILATIETWDNGKPYTVALNDDVNEVAETLRYYGGFADKVYGQVIETTGDKFGYTIREPIGVCGQIIPWNFPLAMAAWKLGPALACGNAVILKPAEQTPLSILYLANLIVEAGFPPGVVNIINGLGTVAGAALASHMDVDKIAFTGSTPTARSIMKMASSNLKNITLETGGKSPLIVFDDADVDLAAYWAHAGIMYNQGQVCTATSRILVQESIYDKFMAAFGAQVKNISKVGDPFEESTFQGPQVTKAQYERILSFVDVGKKEGAKLALGGQPFKVGDGKGYFVEPTVFTDVTPKMRVFQEEVFGPFVVVTKFSSEDEAIHLANDTQYGLGSALFTTNLTRAHQVAKRIEAGMVWVNSSNDSDWRIPFGGVKQSGIGRELGEAGLAAYSNIKAVHVNIAAKL

SEQ ID NO: 37933 - DNA, 1350 bp, Apis mellifera
  CDS (1)..(1350)
atgaatcgtaaaattgatattaaatatactcagttatttattaataataactttgtggattcagtaagtggtaaaaagttttctactataaatccagctgatggtagtgttattgcagaaatttctgaaggtgataaggcagatgtagataaggcagttgcagctgcaaaagaagcatttagcagaaaatcaaaatggagaacaatggatgcatctgttcgtggaaatcttatgaataaatttgcagatcttattgcaagagatttggaatatattgctactcttgaaactttagataatggaaaaacatattcagatgcactttttgatatagaagcaagtatacaaacaattcgttattatgcttcatggtgtgataaaatctttggagatactattccagcagatggaaatcttatttcacttacccgtaaagaaccagtaggtgtagtgggacaaattattccttggaattatccttttcttatgttagcatggaagtggagtcctgctttagctactggatgtaccattgttttgaaaccagctgaacaaactcctttaagtgcactttatgctgcagcacttgctaaagaagttggtcatttaataatggcagcttctgctaaaagtaatcttaaacgggtttctcttgaattgggtggtaaaagtcctttagttatttttgatgatgttgacattaaagaagcggctgaaattgctttcaatgcaatatttgctaatcatggacaaaattgttgcgctggttcacgcacttttgtacatgctaaaatttatgatcagtttgttaatcatgctaaacaattagcatcacaaagaaaagttggtgatccttttaattctgagactcaacaaggaccccaaattgatgaggaaatgtttcataaggtcttaagtttaattaaatcaggacaggaagaaggagctgtattagaaactggaggagaacgtcatggcaatgttggttattttattaagccaactgttttttcaaatgtaactgatactatgagaattgctaaagaagaaatatttggacctgttcaatctattttaaaatttgaaacaatggatgaagttattgaacgtgcaaacaatacaaattatggtcttgctgctggagttgttactaaaaatattgataaagctttaatatttgcacaagcagtggaggctggaagcgtttggataaattgttatgatgctattacacctcaaactccatttggtggatttaaacagtcaggaataggccgtgaactcggtgcagaaggattaaaggaatatcttgaaactaaaacaatatccattaaagtatcaaataattaa

SEQ ID NO: 37934 - protein, 449 aa, Apis mellifera
MNRKIDIKYTQLFINNNFVDSVSGKKFSTINPADGSVIAEISEGDKADVDKAVAAAKEAFSRKSKWRTMDASVRGNLMNKFADLIARDLEYIATLETLDNGKTYSDALFDIEASIQTIRYYASWCDKIFGDTIPADGNLISLTRKEPVGVVGQIIPWNYPFLMLAWKWSPALATGCTIVLKPAEQTPLSALYAAALAKEVGHLIMAASAKSNLKRVSLELGGKSPLVIFDDVDIKEAAEIAFNAIFANHGQNCCAGSRTFVHAKIYDQFVNHAKQLASQRKVGDPFNSETQQGPQIDEEMFHKVLSLIKSGQEEGAVLETGGERHGNVGYFIKPTVFSNVTDTMRIAKEEIFGPVQSILKFETMDEVIERANNTNYGLAAGVVTKNIDKALIFAQAVEAGSVWINCYDAITPQTPFGGFKQSGIGRELGAEGLKEYLETKTISIKVSNN

SEQ ID NO: 37935 - DNA, 1563 bp, Apis mellifera
  CDS (1)..(1563)
atggcgctcctcgcgaaacttgttaagtgcgaggcgtatttcgctgcaaggacttacagcagtagcataccaacagttaagatgtacattgatggccaattcgtagaatcaaaggctacggaattcaccgacgttcacgacccagcaacaaatgaacttttatgtcgtaccccgaaatgcacgagagaggaaatggagacagccgtgaaaagtgcgaaagaagcttatgcaaaatggaaaaatacgagcgtacttacaagacaaacactgatgctcaaataccaagcccttattcgcgaacactcgaaagaaatcgcagagaacatggtaagggagaatgggaagacaatggcagatgccgaaggtgacgttctccgaggcttacaggtggtggacgcgtgtgccgcgattccttctcttcaaatgggggagagcacgccaaacatcgccacagatatggacataatttcctacaaacttccccttggcgtaactgcctccatctgtcccttcaatttcccggcgatgatacccctttggtcgtttccggtctcggtcgcctgtggaaacgccactattctcaaaccatcggaacgcgtgccaggcgcctcgatgatcctcgccgatctgttcaccagggcaggcgcgccaccaggattgttgaacgttatacacggccaacacgcggctgtcgatttcatctgcgagcatcctgacatcaaagcggtctcgttcgtcggttccgatcaagcggggaaatacatttacaagcaaagcagtgctcatggaaaacgggtgcagtgcaacatgggcgcgaagaaccattgcatagttctaccggatgcgaacaaaaataagagcatctcccaaatcgtgggtgcggcgtttggagcggcgggccaaagatgcatggcactctcggtggccatattcgtgggcaaatcgaaagagtggatcccagaattggttcgagcatcgaagaaattgaaagtgaacgccggacacgtgcctgggaccgatcttggaccggttatatcgcctcgatccaaggagaggatatgcgatctcgtcgagtcgggcgtgaaagatggcgccacgttagctctcgatggcagaggcctcgttgtccgtggtttcgaaaaggggaatttcgttggaccgaccgtgttgaccgatgtgaagcctaccatgaagtgttacaccgaggagatctttggacccgttctctcgtgcattttcaccgacactttggacgaggcgatcgatattattaacaaaagcccttacgggaacgggactgctgtattcacgtcgaacggtgcaacggcgagagcgttcgtaaataggatcgaagctggtcaagttggcgtaaatgttcctatcccagtgcctttgccaatgttcagtttcactggaaacaagggatcatttttgggtgataatcatttttacgggaagcacggtataaatttttacacacaagtgaaaacgataactcaattgtggagatccgaagatgctggtgatatcgcttcctcgacagctatgccgactatgcaataa

SEQ ID NO: 37936 - protein, 520 aa, Apis mellifera
MALLAKLVKCEAYFAARTYSSSIPTVKMYIDGQFVESKATEFTDVHDPATNELLCRTPKCTREEMETAVKSAKEAYAKWKNTSVLTRQTLMLKYQALIREHSKEIAENMVRENGKTMADAEGDVLRGLQVVDACAAIPSLQMGESTPNIATDMDIISYKLPLGVTASICPFNFPAMIPLWSFPVSVACGNATILKPSERVPGASMILADLFTRAGAPPGLLNVIHGQHAAVDFICEHPDIKAVSFVGSDQAGKYIYKQSSAHGKRVQCNMGAKNHCIVLPDANKNKSISQIVGAAFGAAGQRCMALSVAIFVGKSKEWIPELVRASKKLKVNAGHVPGTDLGPVISPRSKERICDLVESGVKDGATLALDGRGLVVRGFEKGNFVGPTVLTDVKPTMKCYTEEIFGPVLSCIFTDTLDEAIDIINKSPYGNGTAVFTSNGATARAFVNRIEAGQVGVNVPIPVPLPMFSFTGNKGSFLGDNHFYGKHGINFYTQVKTITQLWRSEDAGDIASSTAMPTMQ

SEQ ID NO: 37937 - DNA, 1458 bp, Apis mellifera
  CDS (1)..(1458)
atgcatcttttaaaagatttagcatatataaatggaaaatgggtatcagcaataaaacaacaaacatttcctgtttataatccaattgataaatctattattaaaaatgttcctgatatggatgttgaagatacaaagttagcaattaattcagcatttgaagcttttaaatcatttaagaaaacaacagcaaaggaacgaagtaatttacttagaaattggtacaatctaattgtgaaacattcagaagatttagcaaaaattttaaccaaagaaaatgggaagtctattgctgaatctaaagatgaaatcagatatggaaattcatatattgaatggttttcagaagaagctagaagaattgaaggagaaatattgcaagcaccaatatctaatagaaatcttttattgtggaaagaaccaattggcgttgctgctttaattacaccatggaattttccatttgctatgattacacgtaaagcagctgctgctcttgctgttggatgtacctgtataattaaaccatcagaagatacacctcttattgctttagcattagttgagcttgcagaaaaagcaggttttcctcaaggaacaataaatgtaattacaacaagtcaaaaaaattctcctattgttggtaaagaattatgtgaaaattctaatacaagagttttatcatttactggttcaacaaatgttggaaaaattttatatcaacaatgtgcttcaaatgtaaagcggctttgccttgaattaggaggtaatgcgtcatttattgtttttgattctgcagatatagatttagctataaaaggtgctatggcaagtaaatttcgtaattgtggtcagacatgtgtatctgcaaacagattttttgtacagaatagcaaatttgatcaatttgtagaaatgttgctatcaaaaattaaaactgaaattagaatgggtgatggtagcaagaaagacactacacatggtcctctgactaaaaaaagtcaattagatctaatacatgcattagttactgatgctgtaaaaaaaggagcaaaattacattgtggtggtacaccattgcctgaattaggaccattattttatgctcctacacttataacaggagttactaaggaaatggaaatatataatcgagaaatttttggtccagtagctgttatatataagtttgatactgaagatgaagttatacaaaaatccaataatgtatctgttggtttagctggatatttctattctcaagatctatcacaaatatttagggtagcaaaacaattagaagttggaatgattggtgtaaatgaaggattaatttctactgcagaagctgcttttggaggtataaaagaatcaggtttaggaagagaaggttctaaacatggtattgaagattttcttgagataaaatatgtatgtattggaaatcttaaatattaa

SEQ ID NO: 37938 - protein, 485 aa, Apis mellifera
MHLLKDLAYINGKWVSAIKQQTFPVYNPIDKSIIKNVPDMDVEDTKLAINSAFEAFKSFKKTTAKERSNLLRNWYNLIVKHSEDLAKILTKENGKSIAESKDEIRYGNSYIEWFSEEARRIEGEILQAPISNRNLLLWKEPIGVAALITPWNFPFAMITRKAAAALAVGCTCIIKPSEDTPLIALALVELAEKAGFPQGTINVITTSQKNSPIVGKELCENSNTRVLSFTGSTNVGKILYQQCASNVKRLCLELGGNASFIVFDSADIDLAIKGAMASKFRNCGQTCVSANRFFVQNSKFDQFVEMLLSKIKTEIRMGDGSKKDTTHGPLTKKSQLDLIHALVTDAVKKGAKLHCGGTPLPELGPLFYAPTLITGVTKEMEIYNREIFGPVAVIYKFDTEDEVIQKSNNVSVGLAGYFYSQDLSQIFRVAKQLEVGMIGVNEGLISTAEAAFGGIKESGLGREGSKHGIEDFLEIKYVCIGNLKY

SEQ ID NO: 37939 - DNA, 1575 bp, Candida glabrata CBS 138
  CDS (1)..(1575)
atgtttagatcaactacgtcaaatgtcttgacgagggctctgagaaccagaaatgctggtgtctcttctgtaatggtcctcagagcttactctcatttgcctctacatgttccaattaagttgcctaatggcttggagtatgagcaaccaactggtttgttcattaacaatcagtttgtcccttcaaagcaacacaagacttttgaagtgatcaacccaagcacagaagaagaaatttgtcacatctacgaaggtagagaagatgatgttgaatctgctgttcaagctgctgacacggctttcaaaaatggtagttggactgacatagacccatttgagagaggtcaagctttatacaagttagcagagttaattgagaaggacaaggaaatcgttgcatccattgaatccttagacaacggtaaagccatcaactctgctagaggcgatgtccagctagttatcaactacttgaagtcatctgcaggtgtcgctgataagattgatggcagactagtcaatactggttccaactacttcaactatgtcaagaaggagccattgggtgtctgtggtcaaattatcccatggaacttcccacttttgatgtgggcttggaagatcgcaccggctttggttactggtaacacagttgtattgaaaacagctgaatccaccccattgtccgctttatatgtttcaaaatacatccctaaagctggtatcccacctggtgtaattaacatcgtttctggttttggtaagatcgttggtgaagccttgactactcatccaaagattaaaaaaattgctttcactggttccactgctactggtaagcacatctattcttctgctgctcaaacattaaagaaggtaactttagaattaggaggtaagtctcctaatattgtcttcgccgatgctgatttaaagaaggctgttcaaaacattatattgggtatatactacaactcaggtgaagtttgttgtgcaggttcaagagtttatgtagaggaatctatctacgatgagtttgctcaagagttcaagacagcatccgaagcgctaaaagttggtaacccatttgatgaatctacattccaaggtgctcaaacttctcaaatgcaactagataagatcttgagttatgtggaaattggtaagaaggaaggggcaaccttgattactggtggtgaaagaatcggtgaaaagggttacttcattaaaccaactatttttggtgatgttactgaagatatgagaattgttaaagaagaaatttttggtcccgttgttactgttacaaagttcaaagatttggatcatgttgttcaaatggctaacgactccgaatatggtttggctgcaggaattcacacaaccaacataaacagtgccgttaaggttgctgatagattaaaggctggtacagtgtgggttaacacatataacgatttccaccaaaatattccatttggtggtttcaatgcttctggtttgggtcgtgaaatgtccaaggaggcattggacggatatctacaagcaaaggctgtccgtgttaaactggattaa

SEQ ID NO: 37940 - protein, 524 aa, Candida glabrata CBS 138
MFRSTTSNVLTRALRTRNAGVSSVMVLRAYSHLPLHVPIKLPNGLEYEQPTGLFINNQFVPSKQHKTFEVINPSTEEEICHIYEGREDDVESAVQAADTAFKNGSWTDIDPFERGQALYKLAELIEKDKEIVASIESLDNGKAINSARGDVQLVINYLKSSAGVADKIDGRLVNTGSNYFNYVKKEPLGVCGQIIPWNFPLLMWAWKIAPALVTGNTVVLKTAESTPLSALYVSKYIPKAGIPPGVINIVSGFGKIVGEALTTHPKIKKIAFTGSTATGKHIYSSAAQTLKKVTLELGGKSPNIVFADADLKKAVQNIILGIYYNSGEVCCAGSRVYVEESIYDEFAQEFKTASEALKVGNPFDESTFQGAQTSQMQLDKILSYVEIGKKEGATLITGGERIGEKGYFIKPTIFGDVTEDMRIVKEEIFGPVVTVTKFKDLDHVVQMANDSEYGLAAGIHTTNINSAVKVADRLKAGTVWVNTYNDFHQNIPFGGFNASGLGREMSKEALDGYLQAKAVRVKLD

SEQ ID NO: 37941 - DNA, 1545 bp, Kluyveromyces lactis NRRL Y-1140
  CDS (1)..(1545)
atgctaggacgtactcaagttacaaccctaagacgtttcatcagattatactcccaattaccattgaaggtcccagttcaacttccaaatggtatcacatacgagcaaccaactggtctattcatcaatggtgagtttgtgccatctagacaacacaagacttttgaagtgttgaacccttccaacgaagaagaaattacccatatttatgaagcacgtgaagatgacgtggatatcgctgtcgctgcagctaaaaaagccttcaacaacggttggtctactgctgaaccagaagatagagctaaatgtttgctgaagttggctgatttgattgaccaacatgcagagactttggcttctatcgaatctttggataacggtaaatccctattttgctcacgtggtgatgtggcgctagttgccaaatacttaaggtcatgtgccggttgggctgataagatttatggtaaggttatcgatactggcgctgaccatttctcatacaccaagagagaaccattgggtgtatgtggtcaaattatcccatggaatttcccactattgatgtggtcctggaaagttggtccagctttggctaccggtaacactgtggtgttgaaacctgctgaagcaactccattgtctgctctatatgcatgccaattggtgcaagaagctggtgtaccaaagggtgttgttaacatcatcccaggtttcggtaaaatcgtcggtgaaagaatttgtacccatcctgacatcaagaaggtcgctttcactggttccactgctactggtcgtcacattatgaaaacttgtgccgattccatcaagaaggtcactttagaacttggtggtaagtctccaaatatcgttttcggtgatgctgacttggataaagctgttaagaacattgcttttggtatcttctacaactccggtgaagtctgttgcgcaggttcaagaatttacgttcaagatactgtttacgaagaggtcttagaaaaattcaagcaatacgctgaatctctaaaggtcggtaatccattcgaagaaaacgttttccaaggtgctcaaacttctcaaatgcaaattgacaagatcttatcctatgttgatgtcggtacttctgaaggtgctcgtgtcatcactggtggtgaaagaatcggtaacaagggttactttatcaagccaactatctttgctgatgttaaagaagacatgcaaattgttaaggaagaaatctttggtcctgttgtaacagtctctaagttcactaccgttgacgaagtcgtcgctaaggctaacgactctgaatatggtcttgctgccggtattcacactaaggatgttaacaaggctattgacgtttccaacagagttaaggccggtaccgtctggattaacacctacaacaacttccatcaaaatgttccattcggtggtttcggccaatccggtatcggtagagagatgggtgctgaagctttagataactacacccaaacaaaggctgtcagaatggccattgaccacccaaactattaa

SEQ ID NO: 37942 - protein, 514 aa, Kluyveromyces lactis NRRL Y-1140
MLGRTQVTTLRRFIRLYSQLPLKVPVQLPNGITYEQPTGLFINGEFVPSRQHKTFEVLNPSNEEEITHIYEAREDDVDIAVAAAKKAFNNGWSTAEPEDRAKCLLKLADLIDQHAETLASIESLDNGKSLFCSRGDVALVAKYLRSCAGWADKIYGKVIDTGADHFSYTKREPLGVCGQIIPWNFPLLMWSWKVGPALATGNTVVLKPAEATPLSALYACQLVQEAGVPKGVVNIIPGFGKIVGERICTHPDIKKVAFTGSTATGRHIMKTCADSIKKVTLELGGKSPNIVFGDADLDKAVKNIAFGIFYNSGEVCCAGSRIYVQDTVYEEVLEKFKQYAESLKVGNPFEENVFQGAQTSQMQIDKILSYVDVGTSEGARVITGGERIGNKGYFIKPTIFADVKEDMQIVKEEIFGPVVTVSKFTTVDEVVAKANDSEYGLAAGIHTKDVNKAIDVSNRVKAGTVWINTYNNFHQNVPFGGFGQSGIGREMGAEALDNYTQTKAVRMAIDHPNY

SEQ ID NO: 37943 - DNA, 1539 bp, Debaryomyces hansenii CBS767
  CDS (1)..(1539)
atgttagttacacttaaaactcccactggtaacagtatttctttcaaaacaggtttatttatcaataacgaatttagacaagccaaaaatggaaatgaattgactactccaaatcctgccactggagaaccattggccactattagtgctgctactgctgaagatattgatgatgctgttaaagctgctagaaaagcttttgaaactacatggggtaagaaaagtacaccttcacaacgtagtgaagcccttcacaaatgggcagatttgatagatgccaatatcgacactcttgcagaactcgaaagtcttgataatggaaaaccggtatggatggctcgtgatgtcgatattaaagatagtattgcgtgccttcgttactatgctggtcttgctgataagattgaaggccgcactatcgagcaagaagaaggagtaaagttagcctttactagacctgaaccaattggtgtatgtggtcaaattattccgtggaattacccaatccagatgtttgcttggaaagtgggccctgccttggccgctggtaacactgttattatgaaaccggctgaacagactcctttaagtgctctcgttttagctgaattagcagccaaagcaggttttccccctggtgttattaatattgttaatggattgggtgctgtagctggaaaagctatctcatctcatatggatattgacaagattgccttcacgggctctaccgtcactggacgtaccattatggaagcggctgctaagagtaatctcaaaaaagttactcttgagcttggaggtaaatcacctgtagttgtcttcgacaatgctgatattgatcaagctgtaaactgggtcagtcaaggtattcttttcaaccatggtcaagattgctgtgctggttctcgattattcgttcaagacactattaaagatgtattccttgcaaaacttaaaacgaattttgaatcacacgttattggtgatccatttgacatcaaaactttccaaggaccccaagtatctaaacaacaacaagaaaaaattcaatcctatattaaatcgggtatagaagaaggtgctactctttttactggtggggaacaaagattggctcatttatcagctcaatttaaaaatggttattatgtttctccgacaattttcacagattgtaaaccgggcatgaaaatcgtcgatgaagaaatattcggacctgttcttactgttcaaagttttagtactgaggaagaagctgttgaaaaggcgaacaatacagaatatggtcttgccgctggtgtattctctcaaaatgcttcccaatgcatgcgcatggtacatgctctccgtggaggtactgtttggtgcaatcattatatggcattaagcaatgccgtcccatttggaggtatgaagcaatccggattcggccgtgaattaggtattgagggtttgaaggaatacacccaaaccaaagctgttcactggaattatggcgaagaagctgtctggccaattgatggaactaccgtttaa

SEQ ID NO: 37944 - protein, 512 aa, Debaryomyces hansenii CBS767
MLVTLKTPTGNSISFKTGLFINNEFRQAKNGNELTTPNPATGEPLATISAATAEDIDDAVKAARKAFETTWGKKSTPSQRSEALHKWADLIDANIDTLAELESLDNGKPVWMARDVDIKDSIACLRYYAGLADKIEGRTIEQEEGVKLAFTRPEPIGVCGQIIPWNYPIQMFAWKVGPALAAGNTVIMKPAEQTPLSALVLAELAAKAGFPPGVINIVNGLGAVAGKAISSHMDIDKIAFTGSTVTGRTIMEAAAKSNLKKVTLELGGKSPVVVFDNADIDQAVNWVSQGILFNHGQDCCAGSRLFVQDTIKDVFLAKLKTNFESHVIGDPFDIKTFQGPQVSKQQQEKIQSYIKSGIEEGATLFTGGEQRLAHLSAQFKNGYYVSPTIFTDCKPGMKIVDEEIFGPVLTVQSFSTEEEAVEKANNTEYGLAAGVFSQNASQCMRMVHALRGGTVWCNHYMALSNAVPFGGMKQSGFGRELGIEGLKEYTQTKAVHWNYGEEAVWPIDGTTV

SEQ ID NO: 37945 - DNA, 1491 bp, Yarrowia lipolytica CLIB122
  CDS (1)..(1491)
atgtctcttttcagcaaacttaccctagccaacggccttgaggtcgatcagcccactggccttttcattaacggcgaattcgttgccgcgaagtctggcaaaacgtttgaaaccatcaaccctaccaccgaggaagtgatttgttccgtttctgaggcagatgaggaagatgtgaatgctgctgttgacgctgctgctgctgctttcaagacctggggtttcaagactgctcccagtgctcgaggtgcggctctattcaagctggcggacctcattgagcgagacctcgatatcatcgctgcgattgaaacgactgacaacggtaaggtgtacgcccatgccaagggtgatgttgctctggttgtcaaggtcattcgattttatgcaggatatgctgacaagatctacggagacgttatccatggtaacgatggacacttttcctacactcgaaaggagcccattggagtttgtggacaaatcattccctggaacttccccttggtcatgtggtcctggaagattgctcctgctctggctaccggtaacactgtggttctcaagagtgccgagtctactcctctgtctgctctgtacgcggccaagctcgcccaggaagcaggtattcccgcaggcgtgctcaacattgtttcaggttacggaaaggtcggcgctttgatgactaaccaccccaagatccgaaaggtggctttcacaggctcgactgctaccggcaagcaggttctcaagggtgcagctctgtccaacctgaagaagatctcccttgagcttggaggaaagtctcccaacatcatctttgatgatgccaacctgcccaacgccatctcctgggctgctcttggtatcttcttcaactctggagaagtctgtgctgctgcctctcgtctctatgttcaggagggagtctaccacgaagtcgttgctgctctcaaacagcgagctgaggcattggttgtgggcgatccctttgaccagcagaccttccagggggcccagacctccaagattcagttcgaccgagtcatgagcttcattgaggccggaaaggccgagggagctactctgctgaccggaggctgccgagcaaaggacaagggctatttcatccggcccactgtcttcaccgacgttaaaaaggacatgaagattgtgcaggaagagatctttggccccgttgtcgttgtgaccaagttcaagactcttgaggaggtcattgagcttgccaacgactctgagtacggcctggctgcgggtgtgcacacccaggacatttctcgagcccactatttggcagagaacctccatgccggaactgtgtgggttaatacctacaactcgtttcacatctcgcttccttttggaggtttcaaccagagtggtttcggtaaggagatgggcaaggacggactggacagttatattcagaccaaggctgttcgaatcatgtttgaccaggccaagctgcagtaa

SEQ ID NO: 37946 - protein, 496 aa, Yarrowia lipolytica CLIB122
MSLFSKLTLANGLEVDQPTGLFINGEFVAAKSGKTFETINPTTEEVICSVSEADEEDVNAAVDAAAAAFKTWGFKTAPSARGAALFKLADLIERDLDIIAAIETTDNGKVYAHAKGDVALVVKVIRFYAGYADKIYGDVIHGNDGHFSYTRKEPIGVCGQIIPWNFPLVMWSWKIAPALATGNTVVLKSAESTPLSALYAAKLAQEAGIPAGVLNIVSGYGKVGALMTNHPKIRKVAFTGSTATGKQVLKGAALSNLKKISLELGGKSPNIIFDDANLPNAISWAALGIFFNSGEVCAAASRLYVQEGVYHEVVAALKQRAEALVVGDPFDQQTFQGAQTSKIQFDRVMSFIEAGKAEGATLLTGGCRAKDKGYFIRPTVFTDVKKDMKIVQEEIFGPVVVVTKFKTLEEVIELANDSEYGLAAGVHTQDISRAHYLAENLHAGTVWVNTYNSFHISLPFGGFNQSGFGKEMGKDGLDSYIQTKAVRIMFDQAKLQ

SEQ ID NO: 37947 - DNA, 1533 bp, Apis mellifera
  CDS (1)..(1533)
atgttacggttattaaaaaaagttcgattatcacgatatttttctacagctactagaccggagccagaaagaaacccagcaatcctctatacaggaatttttattgacaacgaatggcatcgatcaaagtcgggaaaaacatttcccacgataaatcctacaaccggtgaaacgattgccgaaatacaagaaggcgatgatgcagatatcgatctagcagtaaatgcagccaataaagcttttaaattaggatcgccatggagaactatggatgcttctcaacgtggtgtgctattgaacaatttagcttccttgatggaacgtcatcgagcctatcttgcggctttagaaactttagacaatggaaaaccttattcagatgcgtatgaattcgatgtacctagcagtatagccacattgcgatattatgcaggatgggctgataaaaatcacgggcaagttattcctatcgatggaaaatatttagcttatactcgccatgaaccagttggggtttgcgggcaaattattccgtggaattttcctatcttaatgatggcttggaaattagggcctgctctagctactggaaacgtcatagtattgaaacctgcagagcaaacatctttaacagctttatatatagctcaattatgtaaagatgctggttttcctcctggagtgattaatgttgttcctggttttggtaaaaccggcgcagcactagtcgctcataatttagtcgacaaaatagcatttactggttcgactgaagttggaaaattgataaaacaaggtgctgcaatgagtaatttgaaaaggactacattagaacttggtggaaaatctccgaatataattttatcagatgttaatcttgatcaagctgtagaagcagctcatttcggattattttacaatatgggtcaatgttgctgcgccggttcaagaacttttgtcgaagatagtatttatgatgaatttgtggagcgaagcgcagcacgtgctaaatctagggttgtcggcaatccatttgattcaaatgtagaacaaggtccacagattgatgaagaacaagtaaataaaattatgtccatgattgaatcaggcaaaaatgaaggagcagaattagtttctggtggtacaaggattggtgataaaggctattttgttgcacctacagtatttgccaatgttaaagattacatgacaattgctaaagaagaaatttttggaccagttcaacaaattctaaaatttagcagtttgaatgaagttattacgcgtgctaacaatactgattacggattagcagcagcagtatttacgaaagatatcgataaagcaaattatattatacaaggacttcgagctggcactgtatgggtaaatgcgtacaatgttctcacaccccaagtaccatttggtggttttaaaatgtcgggacatggaagggaacttgggcaatatggtctcgaagcatatactgaagttaaaagcgttatagttaaggttaatcaaaaaaatagttag

SEQ ID NO: 37948 - protein, 510 aa, Apis mellifera
MLRLLKKVRLSRYFSTATRPEPERNPAILYTGIFIDNEWHRSKSGKTFPTINPTTGETIAEIQEGDDADIDLAVNAANKAFKLGSPWRTMDASQRGVLLNNLASLMERHRAYLAALETLDNGKPYSDAYEFDVPSSIATLRYYAGWADKNHGQVIPIDGKYLAYTRHEPVGVCGQIIPWNFPILMMAWKLGPALATGNVIVLKPAEQTSLTALYIAQLCKDAGFPPGVINVVPGFGKTGAALVAHNLVDKIAFTGSTEVGKLIKQGAAMSNLKRTTLELGGKSPNIILSDVNLDQAVEAAHFGLFYNMGQCCCAGSRTFVEDSIYDEFVERSAARAKSRVVGNPFDSNVEQGPQIDEEQVNKIMSMIESGKNEGAELVSGGTRIGDKGYFVAPTVFANVKDYMTIAKEEIFGPVQQILKFSSLNEVITRANNTDYGLAAAVFTKDIDKANYIIQGLRAGTVWVNAYNVLTPQVPFGGFKMSGHGRELGQYGLEAYTEVKSVIVKVNQKNS

SEQ ID NO: 37949 - DNA, 2703 bp, Apis mellifera
  CDS (1)..(2703)
atggcgcaactcaaagtggcaataatcggtcaaagcaacttcgcagccgaggtttacaaacttctgaaactgaacggtcatcaaatcacaggggtctttaccattcctgacaaagggaatcgagaagatcctctggccataacagcaaaaatcgataatactccagtttttaagatcaaatcttggagaagcaaaggagtgaccttgccggaagtgcttcagttatataaaggaatcgaagttgatttaaatgttcttccattctgcagtcaattcattcccatggaggtcatcaatcatcctcgtcatcgtagtatatgttaccatccatctttactaccaagacatagaggagctagtgctattacctggactctgatagaaggagatgacacagcaggtttctctattttctgggccgatgatggtctcgatactggaccaatcttgctccaaagatcatgtaaagtaaactccaatgatactttggattctttgtacaataactttttgtatcccgaaggaattaaggccatggcggaggctgtaaatcttgtagctaaaggaaccgctcctatgattcctcaaacggaagagggagccacttacgatcctatgatgaataaaaaagaacttcaaaaaatagactggactaagcccgcaaaacaagttcatgatttcatacgtagtcttgatagcactccaggtgcctggactattatcgatggtgaagaagttcgtctatttggttctaccttatggaatgatgatcaaatacccgaacacgagattgaagtgaatgtagagaatagattgggcatcattcataaggatggactgttaattaaagctattgataatcactttgtcaatgtggaaagaatgaaagttggaactagaactattcttgcaagcaaatttggtcagaagagtgaagataccataattgaatttactgcagaggaacaaaaaatgatagaatccttgaagcggacttgggaaggtattctaaacatggacgttaacgaggatacagacttctttgcctgcggtgcaggaagtatggatgttataagattagtagaagaggtaaaagacaatttgggagtaattttgcaaaatatcgacgtcttcatgtctccggttttcattcaatttgtaaataaagtagttttaacagcacgaggtatttctacctctaaagaaatcaaatacgatgctgtggaagtacaaacgaacaatatgactttgaaattccctagacaattatttattaatggagaatttgtaaatggccatggaaatcctatagatacaattaatcctcatgacgaaacaattatttgttctgttgaaaccggcactgtggaggatgtggacaaggcagttaaggcagccaagaaagcttttgaagaaggagaatggagcaaaattagcgccagagagcgtggagttcttcttttcaaattagcagacctaatggaagaacataaagaagaattagcaactatagagagcatagattctggtgcggtatatacattagccttgaagacccatataggaatgtccatcgaaacttggagatatttcgctggttggtgtgataagattcaaggctctaccataccaataactcatgccagaccaaatcgtaatttaaccttcacccgaaaagagcctattggtgtctgtggcctggttactccttggaattatcctttgatgatgctttcttggaagatggcagcttgcttggcagcaggcaacactgtggtaatgaaaccagcacaagcttcacctttaacagctttgaaattcgcagaattaactgcaagagctggtttcccacctggagtggtgaatatcgtgccaggaaacggaactgagactggaaatgcaatttgtgaacatcttctaatcagaaaactgggttttactgggtctacgcaaattggacagtctataatgaaatcttgtgcaaatagtaatttgaagaaagtatccctagaattaggtggaaaaagtcctttagttattttcgaagatactgatttacagcaagcaattaaaattgcaatgagcagcgtgttcttcaacaaaggagaaaactgtatagctgctggtcggctatttgtggaagagacaattcatgatgaattcttgcaaaggatagtggaggagactaagaagatttccataggaaatcccctggatagaagcacagcccatgggccacagaaccataaagctcatttaaacaaacttttgaaatttgtggaacgtggcgttaaagaaggagctaaattaatttatggtgggaaaagattagatcgtccaggatggtattttgagccaacaatattcacagacgtgaaagatgacatgtacatagctaaagaggaatcttttggtcccatcatggttatttccaaattcagctcgaagaacatagatgatatgattgcaagagcgaataatacagaatatggattggcttctggtatcttgacaaaggatatcagtaaagctcttagatttgccgagaaaatagaagctggaacagtattcattaatacttataataagacagatgtggctgcaccttttggtggtttcaaaatgtctggttttggtaaagatctgggtcaagaagctttgaacgaatatctaaaaacaaaaactatcactgtagaatattag

SEQ ID NO: 37950 - protein, 900 aa, Apis mellifera
MAQLKVAIIGQSNFAAEVYKLLKLNGHQITGVFTIPDKGNREDPLAITAKIDNTPVFKIKSWRSKGVTLPEVLQLYKGIEVDLNVLPFCSQFIPMEVINHPRHRSICYHPSLLPRHRGASAITWTLIEGDDTAGFSIFWADDGLDTGPILLQRSCKVNSNDTLDSLYNNFLYPEGIKAMAEAVNLVAKGTAPMIPQTEEGATYDPMMNKKELQKIDWTKPAKQVHDFIRSLDSTPGAWTIIDGEEVRLFGSTLWNDDQIPEHEIEVNVENRLGIIHKDGLLIKAIDNHFVNVERMKVGTRTILASKFGQKSEDTIIEFTAEEQKMIESLKRTWEGILNMDVNEDTDFFACGAGSMDVIRLVEEVKDNLGVILQNIDVFMSPVFIQFVNKVVLTARGISTSKEIKYDAVEVQTNNMTLKFPRQLFINGEFVNGHGNPIDTINPHDETIICSVETGTVEDVDKAVKAAKKAFEEGEWSKISARERGVLLFKLADLMEEHKEELATIESIDSGAVYTLALKTHIGMSIETWRYFAGWCDKIQGSTIPITHARPNRNLTFTRKEPIGVCGLVTPWNYPLMMLSWKMAACLAAGNTVVMKPAQASPLTALKFAELTARAGFPPGVVNIVPGNGTETGNAICEHLLIRKLGFTGSTQIGQSIMKSCANSNLKKVSLELGGKSPLVIFEDTDLQQAIKIAMSSVFFNKGENCIAAGRLFVEETIHDEFLQRIVEETKKISIGNPLDRSTAHGPQNHKAHLNKLLKFVERGVKEGAKLIYGGKRLDRPGWYFEPTIFTDVKDDMYIAKEESFGPIMVISKFSSKNIDDMIARANNTEYGLASGILTKDISKALRFAEKIEAGTVFINTYNKTDVAAPFGGFKMSGFGKDLGQEALNEYLKTKTITVEY

SEQ ID NO: 37951 - DNA, 1506 bp, Aspergillus nidulans FGSC A4
  CDS (1)..(1506)
atggccaccgctgtcagcttaactgcccccaatgggcacaaatacgagcagcctattggtttatttataaacaacgagtttgttgcatccaagtctggcgagaaatttgccaccgtcaatcccagtgatgaagaggaaatcacccaagtttatgctgctggagaagaggacatcgatatcgcagtcaaggcagcaagaaaggccctcaaagatccctcatggaagcttcttaccgcaacagaccgaggcaatctgatgctcaaattggcggacctcattgaccagaacaaggaaaccttggccgtcattgaaacatgggacaacggcaagccgtaccaggtttccctaaacgatgacctctcggaggtcgttaacacaattcgctattgtgccggatgggccgataagatccacgggcagaccattagcacaacaccggccaagtttgcatacaccctacgtcaacctattggcgttgttggccaaattatcccatggaatttccccctagctatggctgcatggaagctgggtcctgcgttggcctgcggcaacaccgttgttctaaagcctgcagagcagactccgcttagcatcttgtaccttgccaaattcattaaggaagccggttttccaccaggtgtcgtcaacattgttaatggccttggtcgtgtggcaggatctgcattggttacccatccaggcgtggataaggttgcctttactggctcgaccatgactggtaaggaaatcatgaagatggctgcaggaaccatgaagaatgtgactttggaaactggcggcaagtcacctctgcttgtttttgacgatgcagacctcgagcaggcggccaagtgggcacatatcggtatcatgtacaaccaaggacaggtctgcacggctacgtcgcgtattcttgttcacgaaaaggttcacgatgaatttatcagacttttccgcgaggccgtggcgactaccagcaaggttggagacccattctcagatgacacgttccagggcccccaggttaccaaagcccaatacgagcgtgttctttcttacatcgagagcggcaagcaggagggcgccaccctggtcgacggcggtgtcccatacaagaacgtcaaggacggcaagggtttctttattgcgcccacaatcttcacaaacgtcaaggacaacatgcgcatttaccgcgaggaagtgttcggaccgttcgtcgccattgccagattctcaactgaagaggaagccatcgacagagccaacgacacaacctatggactgggagcagccgtcttcacgaaggacattgagcgagcccaccgtgttgcatctgaaattgaggctggaatggtgtggatcaacagcagcaacgacagcgacttccgcgtgccctttggtggtgtcaagcaaagcggtatagggcgcgaactcggcgaagctggcttagaggcgtacacccaaatcaaggctgtgcacgtcaatatgggaaccaagctgtaa

SEQ ID NO: 37952 - protein, 501 aa, Aspergillus nidulans FGSC A4
MATAVSLTAPNGHKYEQPIGLFINNEFVASKSGEKFATVNPSDEEEITQVYAAGEEDIDIAVKAARKALKDPSWKLLTATDRGNLMLKLADLIDQNKETLAVIETWDNGKPYQVSLNDDLSEVVNTIRYCAGWADKIHGQTISTTPAKFAYTLRQPIGVVGQIIPWNFPLAMAAWKLGPALACGNTVVLKPAEQTPLSILYLAKFIKEAGFPPGVVNIVNGLGRVAGSALVTHPGVDKVAFTGSTMTGKEIMKMAAGTMKNVTLETGGKSPLLVFDDADLEQAAKWAHIGIMYNQGQVCTATSRILVHEKVHDEFIRLFREAVATTSKVGDPFSDDTFQGPQVTKAQYERVLSYIESGKQEGATLVDGGVPYKNVKDGKGFFIAPTIFTNVKDNMRIYREEVFGPFVAIARFSTEEEAIDRANDTTYGLGAAVFTKDIERAHRVASEIEAGMVWINSSNDSDFRVPFGGVKQSGIGRELGEAGLEAYTQIKAVHVNMGTKL

SEQ ID NO: 37953 - DNA, 1494 bp, Ustilago maydis 521
  CDS (1)..(1494)
atgccaactctcaacctcgatctgcctaacggcatcaagtcgaccatccaggctgacttgttcatcaacaacaagtttgtgcccgctcttgacggcaagacttttgcgaccatcaacccttccaccggtaaggagattggtcaggtcgccgaggcttccgccaaggacgttgatctcgctgtcaaggctgcgcgcgaggcattcgagactacttggggcgagaacacacccggtgacgctcgtggcagacttctgatcaagctcgccgagctggtcgaggccaacattgacgagcttgctgccatcgagtcgctcgacaacggcaaggccttctcgatcgctaaaagctttgacgtcgctgccgtcgctgccaacttgcgatactatggtggctgggccgacaagaaccacggcaaggtcatggaggtcgacaccaagcgcctcaactacacgcgccacgagcccatcggcgtgtgtggtcagatcatcccttggaacttccccttgctcatgttcgcctggaagctcggccctgcgctcgccacaggtaacacgatcgtcctcaaaaccgccgagcagacaccactgtcagccatcaagatgtgtgagcttatcgtcgaggccggcttcccgcctggtgtggtcaacgtcatttccggtttcggtcccgtcgccggtgccgccatctcacagcacatggacattgacaagatcgccttcaccggctcaacactggtgggccgcaacattatgaaggctgctgcttcgaccaacctgaagaaggtgacgctcgagctcggcggcaagtcgcccaacattatctttaaggacgccgacctggaccaggcggttcgatggtcggcgttcggtatcatgttcaatcacggacaatgctgctgtgcgggctcgcgtgtctatgtggaggaatcgatctatgacgctttcatggagaagatgactgcccactgcaaggcgctccaggtgggtgaccccttttccgccaacacgttccaaggtcctcaggtttcgcagctccagtacgaccgtatcatggagtacatcgagtccggcaagaaggacgctaaccttgcgctcggtggtgtgcgcaagggtaacgaaggctactttatcgagcctaccatcttcaccgacgttcctcacgatgccaagattgccaaggaggagatcttcggccctgtcgtggtcgtctccaagttcaaagatgaaaaggacctcattcgcatcgccaacgactcgatctacggcctcgctgccgctgtcttcagccgcgacatcagccgtgccatcgagactgcccacaagctcaaggccggcaccgtctgggtcaactgctacaaccagctcatccctcaggttccgttcggcggttacaaggcgtccggtatcggtcgagagctcggcgagtatgcgctcagcaactacacaaacatcaaggcggtgcatgtgaacctcagccagcctgcccctatctaa

SEQ ID NO: 37954 - protein, 497 aa, Ustilago maydis 521
MPTLNLDLPNGIKSTIQADLFINNKFVPALDGKTFATINPSTGKEIGQVAEASAKDVDLAVKAAREAFETTWGENTPGDARGRLLIKLAELVEANIDELAAIESLDNGKAFSIAKSFDVAAVAANLRYYGGWADKNHGKVMEVDTKRLNYTRHEPIGVCGQIIPWNFPLLMFAWKLGPALATGNTIVLKTAEQTPLSAIKMCELIVEAGFPPGVVNVISGFGPVAGAAISQHMDIDKIAFTGSTLVGRNIMKAAASTNLKKVTLELGGKSPNIIFKDADLDQAVRWSAFGIMFNHGQCCCAGSRVYVEESIYDAFMEKMTAHCKALQVGDPFSANTFQGPQVSQLQYDRIMEYIESGKKDANLALGGVRKGNEGYFIEPTIFTDVPHDAKIAKEEIFGPVVVVSKFKDEKDLIRIANDSIYGLAAAVFSRDISRAIETAHKLKAGTVWVNCYNQLIPQVPFGGYKASGIGRELGEYALSNYTNIKAVHVNLSQPAPI

SEQ ID NO: 37955 - DNA, 1698 bp, Strongylocentrotus purpuratus
  CDS (1)..(1698)
atgctgacagatctaagagttattcctgccaagaacatgacatctagcgaatggagttttctgctgaccaatcctacagtaatgtccattgcagacggaataaaacataaaccttgccaggtcatcctcaaatgggccatgcaggatggaataggtgtgatacccatgtctaccaagcctgatcatatcattgataactgtgatccaactaccaaactgcttattgatggaaagatggtagagtcccagacgacagagtggattgatgtccataatcctgcaaccaatgaagtagtgacgagggttcccaaagctactgccagcgagatggaggcagccgtcaatgccgcacaggccgccttcccagcttggtctaagaccagcgtcctcaccagacaacagatcatgttcaaataccaagcacttatcaaggaaaacatgcaaagacttgctgaatccatcacattggaacaaggcaagacactggtagatgctgagggtgatgtactgagaggactccaggttgtggagcatgtatgcagcattacatcattacagcttggagagactctaccttctattaccaaagacatggatacttacacgatgcgtgtaccattgggagtctgcgctggaatcacaccattcaacttcccagcaatgattccactatggatgttccctgtagctgccgttgctggtaacacagtgattatgaagccatcagagagggaccccggagcatgtatgatcctggctgaactagctcaggaagctgggctaccggatggtgtcattaatatcattcatggtcaacatgattctgtgaacttcatctgtgaccatccctacatcagggctgtgtcgttcgttgggtcagatcaagccggcaactacatccatgagagggctagccgtaatggcaagcgtgtacagtgcaacatgggagctaagaaccacggtgttatcatgcctgatgcaaacaaagagaatacactcaaccagctttgtggagcagcctttggtgccgccggtcagaggtgtatggctttgtctactgcagtatttgtaggagaagccaaggaatggctacctgacctggtggaaagggccaaggccctcaaggtcaatgctggtgaccagcctggtacagatcttggtccattgatctcacctcaagctaaagatagagtatgtgagttaatccagtctggagccgatgagggcgctaaccttgtcctggatggcaggggcattgtcgttgacggctatgagaagggtaactttgtcggaccaaccatcattacagatgttgagacaaacatgacttgctacaaggaagagatctttgggcctgtcctggtagtggtcaatgtagataccctggatgaagccattgaactagtcaacagcaacccatatggtaatggaactgctatcttcaccacaaacggagcaacagccaggacatacacagagctgattgatgttggccaggttggtgtgaatgtaccaatccctgtgccactgcccatgttctccttcaccggatccaggggctccttcaagggagacaccaacttctacggcaagcagggtctccagttctacacccaggtcaagaccgtgacccagttatggagggccgaagatgtgacccactccagggcagccgttgccatgccagtcctcaagtaa

SEQ ID NO: 37956 - protein, 565 aa, Strongylocentrotus purpuratus
MLTDLRVIPAKNMTSSEWSFLLTNPTVMSIADGIKHKPCQVILKWAMQDGIGVIPMSTKPDHIIDNCDPTTKLLIDGKMVESQTTEWIDVHNPATNEVVTRVPKATASEMEAAVNAAQAAFPAWSKTSVLTRQQIMFKYQALIKENMQRLAESITLEQGKTLVDAEGDVLRGLQVVEHVCSITSLQLGETLPSITKDMDTYTMRVPLGVCAGITPFNFPAMIPLWMFPVAAVAGNTVIMKPSERDPGACMILAELAQEAGLPDGVINIIHGQHDSVNFICDHPYIRAVSFVGSDQAGNYIHERASRNGKRVQCNMGAKNHGVIMPDANKENTLNQLCGAAFGAAGQRCMALSTAVFVGEAKEWLPDLVERAKALKVNAGDQPGTDLGPLISPQAKDRVCELIQSGADEGANLVLDGRGIVVDGYEKGNFVGPTIITDVETNMTCYKEEIFGPVLVVVNVDTLDEAIELVNSNPYGNGTAIFTTNGATARTYTELIDVGQVGVNVPIPVPLPMFSFTGSRGSFKGDTNFYGKQGLQFYTQVKTVTQLWRAEDVTHSRAAVAMPVLK

SEQ ID NO: 37957 - DNA, 2655 bp, Strongylocentrotus purpuratus
  CDS (1)..(2655)
atgaagatagctattataggtcaaagtcagtttggagaggaggtctacaagctcctgaggaaagacggtcatgagatcgtaggggtcttcacaatcccagatgtcaaaggtcgtgctgatcctctagcttcttccgcggagggagatggcacaaaagtcttcaaattccctcgctggaggacgaaaggtcaacccatcgaggaggtcgtgaatgcgtacaaggagtgcggtgctgaactcaatgtgcttccattctgtagccagtttattcctatgaatgtgattgatgatcctaaacatggctctatcatctaccatccttcacttcttccaaggcatagaggagcttctgctatcaattggactctaatgagtggtgacaagcaggcaggtttcacagtattctgggctgatgatggacttgatacaggtcctattttacttcagaagtctgtcgatgtagacccaaatgaaacggtggatacactctacaacaggttcctctacccagaaggcatcaaagctatgggagaagcagtgcaacttatttatgaaggcaaggctcctcgtattgtacagccagaagagggcgccacatacgacaagctctggaaaaagaaagaagtcgctcagatcccatggggccagtcagcggaaactcttcacaactttgtgcgaggaaacgacatgatccctggtgcttgggctaggatagatggacagcaagtgacgatgtttggttcaaccctcctctcaggcagcacaccaaagggcacacctgttgaaatagaaggctgcgacacacccgccatcgttcataaaaacgggttggctctctttggcaatgacggcaaaatgctgaatgtgaagacccttcagtttgaagatggtcgtatgatccctgctggcaagtacggacagtctatggatgcagaggagaagctagagctcacaccggaggaacaagagatggctacaaccgtcaaggctatctgggctggcatcctatcaacaccagacatctcaggcgatacagacttcttcaagatgggagctgggtcaatggatgttgccaggctggtggaagagttgaaacagaagtgcagcgtggagctcaagaatgaggacgtatacatggctaccacctatgatgcctttgtacagaaggtggccaggaaaggaagagggttggatgaacaagtctttgaatttgatgcatttgagatgcacgtgaacaacatggacatctcgtttccccaccaactgttcattaacaatgagtttatggattcggagagtggcaataccttcaagaccatcaacccccatgatgagtccgtcatctgtgagatcgccaaggcatccgtagcagatacagatgtagctgtagctgctgctaaggcagctttctttgagggagaatggggcaagatgaacgccagagataggggcaagatgatgttcaagttagctgacttgatggaggagcacactgaagagttagccaccattgagagtatagactctggagcagtctacaccttggcactcaagactcatgttggcatgtcaatcgataccttcaggtactttgctggatggtgcgacaagatccagggagtgacgattccaatcaaccatgccagaccaaacaggaatcttacctataccaagaaggaacctctaggagtatgtgctatcatcgtaccctggaactaccccctcatgatgttggcctggaagatggccgcctgcctcgctgcaggaaacacagtggtcctcaagcctgcccaggtcacaccccttacagccctcaagtttgctgaactggtcgtcaaggctggattccctcctggtgtcataaacatcctaccaggctcaggttccgtctgtggtcagaggatggctgaccatcctgatgtcaggaagctgggtttcactggctcaacacccatcggtatgcagatcatgaaaagctgtgctgagagcaacctgaagaaggtgtccctggaactgggaggcaagtctcctctcgtcatctttgctgattgtgacatggctgcagcagtcagacagggactcggttcagtgttcttcaacaagggagagaactgcatcgctgccggaagattgttcgttgaagacaccatccacgacgaattcttagagagagtggttgcagaggttaagaagatgaagattggtgaccccttggacaggtcaacatcccacggacctcagaaccacagagctcatcttgagaagctggtggagtactgtgatatcggagtcaaagagggagctacactggttcacggtggaaagcaagctgataggccaggtctgtacatggagccgactgtgttcaccgatgtaaccgatgatatgatgatggccaaggaggaatcgttcggtcccatcatgatcatcaccaagttctcttccagtgatattgatggcatgctcaagagtgctaacggcacagagtttggtctggcctccggtgtcttcaccaaggatatcaacaaggccatgtacgtcagcgagaagcttgatgccggtaccgtcttcgtcaatacctacaacaagacggacgttgctgctcccttcggtggattcaagcagtctggatttggcaaggatctgggtgagtga

SEQ ID NO: 37958 - protein, 884 aa, Strongylocentrotus purpuratus
MKIAIIGQSQFGEEVYKLLRKDGHEIVGVFTIPDVKGRADPLASSAEGDGTKVFKFPRWRTKGQPIEEVVNAYKECGAELNVLPFCSQFIPMNVIDDPKHGSIIYHPSLLPRHRGASAINWTLMSGDKQAGFTVFWADDGLDTGPILLQKSVDVDPNETVDTLYNRFLYPEGIKAMGEAVQLIYEGKAPRIVQPEEGATYDKLWKKKEVAQIPWGQSAETLHNFVRGNDMIPGAWARIDGQQVTMFGSTLLSGSTPKGTPVEIEGCDTPAIVHKNGLALFGNDGKMLNVKTLQFEDGRMIPAGKYGQSMDAEEKLELTPEEQEMATTVKAIWAGILSTPDISGDTDFFKMGAGSMDVARLVEELKQKCSVELKNEDVYMATTYDAFVQKVARKGRGLDEQVFEFDAFEMHVNNMDISFPHQLFINNEFMDSESGNTFKTINPHDESVICEIAKASVADTDVAVAAAKAAFFEGEWGKMNARDRGKMMFKLADLMEEHTEELATIESIDSGAVYTLALKTHVGMSIDTFRYFAGWCDKIQGVTIPINHARPNRNLTYTKKEPLGVCAIIVPWNYPLMMLAWKMAACLAAGNTVVLKPAQVTPLTALKFAELVVKAGFPPGVINILPGSGSVCGQRMADHPDVRKLGFTGSTPIGMQIMKSCAESNLKKVSLELGGKSPLVIFADCDMAAAVRQGLGSVFFNKGENCIAAGRLFVEDTIHDEFLERVVAEVKKMKIGDPLDRSTSHGPQNHRAHLEKLVEYCDIGVKEGATLVHGGKQADRPGLYMEPTVFTDVTDDMMMAKEESFGPIMIITKFSSSDIDGMLKSANGTEFGLASGVFTKDINKAMYVSEKLDAGTVFVNTYNKTDVAAPFGGFKQSGFGKDLGE

SEQ ID NO: 37959 - DNA, 1578 bp, Strongylocentrotus purpuratus
  CDS (1)..(1578)
atgttttctgttgggaaattgatctcggcgacgacatctgcccgtcagcatgcgggcaggacgctgatgaggacgtcccagtattcggtggcggccattccagcaccacaaaagaatccagatatccagcatcataagctcttcatcaacaatgagtgggtgaactcggttagtggtaagacgttccctaccatcaacccggcaacagaagaggtcatcgcagaggtcgcagaggctgataaggctgacgttgaacttgcacatgctgcggccagcgaagccttccgcctgggttccccttggcgtacaaccaacgcgtcccgaaggggtgcactgatcaacaaattggctgatttggtcgaacgagactgggcacatcttgccagcctcgaaacgctggacaatggaaaaccataccaagattcttacaccattgatgtaccaggggtattagcaacactcagatactttgcaggatgggcggacaagatcgaaggcaaaacgatccccgtagacggagacttcatgacatatacgaggcacgagccagtcggggtctgcggacaaatcatcccgtggaactttcctcttctgatgttggcatggaaatgggcccctgctctggcgtgtggaaataccatcataatgaagacggccgaacagactcccctcactgctctccatatggctgaactcgccaaagaggccggctttccaccaggtgtgatcaacgtcttatcaggatatggacccacggcgggtgcagccatcgccagtcatccaggcattgacaaggtcgcgttcactggatctacagagatcggaagaattatcgcgcagtcagcaggcgcttcaaacctcaagaaagtgacccttgaacttggcgggaaaagcccaaatatcatcttggccgatgctgatcttgatcatgcggtggagcagagccattccgccattttctggaacatgggccaggcctgctgcgccggatccaggaccttcgttgaggacaagatctacgatgagttcgtggaacgcagcgtagaacgtgccaagtccaaggtggtcggtgatccattcgatatgtccaaggaccagggacctcagatcaacgacgagcaattcaagaagattttgggtttgatcgaaagcgggaagtcagatggagccaaattggcaacaggaggcggtcgtcatggtgataagggatactacatccaaccaacggtgttcacagacgtcaaggatgacatgaagatcgccagggaggagatctttggaccggtgcagagcatcttcaagttcagcgaaatgaacgaggtgatcaaccgagcaaacaacacagagtacggtcttgcagctgcagttttcaccaaggacatcgacaaggccctctacgtctcgaattcgctcagggcgggaaccgtctggatcaattgctacaacgtggttagccccatggctccattcggaggatacaagatgtcaggcacaggtcgtgaacttggagagtacggtctggaggcatacactgaagtcaaaactgtgactgtgaagatccctcagaagaacagttaa

SEQ ID NO: 37960 - protein, 525 aa, Strongylocentrotus purpuratus
MFSVGKLISATTSARQHAGRTLMRTSQYSVAAIPAPQKNPDIQHHKLFINNEWVNSVSGKTFPTINPATEEVIAEVAEADKADVELAHAAASEAFRLGSPWRTTNASRRGALINKLADLVERDWAHLASLETLDNGKPYQDSYTIDVPGVLATLRYFAGWADKIEGKTIPVDGDFMTYTRHEPVGVCGQIIPWNFPLLMLAWKWAPALACGNTIIMKTAEQTPLTALHMAELAKEAGFPPGVINVLSGYGPTAGAAIASHPGIDKVAFTGSTEIGRIIAQSAGASNLKKVTLELGGKSPNIILADADLDHAVEQSHSAIFWNMGQACCAGSRTFVEDKIYDEFVERSVERAKSKVVGDPFDMSKDQGPQINDEQFKKILGLIESGKSDGAKLATGGGRHGDKGYYIQPTVFTDVKDDMKIAREEIFGPVQSIFKFSEMNEVINRANNTEYGLAAAVFTKDIDKALYVSNSLRAGTVWINCYNVVSPMAPFGGYKMSGTGRELGEYGLEAYTEVKTVTVKIPQKNS

SEQ ID NO: 37961 - DNA, 1560 bp, Strongylocentrotus purpuratus
  CDS (1)..(1560)
atgttcgctttgaggggaatgttaaggccaagtcgtgccgctgccctggcgaagaccttgaggagcaccggtctgtactctactgcagctgcaccacaacctattgtgacgcccgacatccatttcaacaagctgttcatcaacaacgagtgggtggatgctcagagtgggaagacgttcccaaccatcaacccagctacagaggatgtcatcactcacgtagctgaagctgacaaggccgatgtggacattgcctaccatgctgcgaatgaggccttccgtcttggctcaccttggcgtaccatggatgcctccgatagggggcgctgtctcaataagctagccgatctgatcgagagagatcaagtctacctcgctagcttggagaccctggacaatggcaagcccttccaagtggccatggcgggagatgttgcgctcactatgaaatgctacagatttactggggtcagtgagaaaaatcacagcaaaataatacctgtgaagggatgtttctttgtctacctgaggaactgtatattttgtccgctttctttgtcgtggaacttccctctgctgatgcaagcctggaagctggccccagccctggccagtgggtgcaccgtggtcatgaaggttgctgagcagaccccactgacggccctctatatagctagcctcattaaagaggctggcttcccagaaggcgtggttaacattctaccgggatacggtcccacagctggggctgccgtggcaagccatccaggcatggagaaggttgccttcacaggatccacagaggttggtaagatcatccagactgctgcagctgacaacctcaagaaggtcacactcgagctgggaggcaagagtccaaacattgtcatggccgactgcgacttggaatatgctgttgagcagagtcactttgctctcttcttcaacatgggccaatgctgctgcgctggatcaaggacgttcgtcgaagacagcatctacgaccagttcgtggagatggcagcagcacgtgccaaaacacgaaccgttggaaatccatttgaggacatcaacgagcaaggaccacaggtggaccgagagcagatggataaggtccttggctacattgacagcgggaagtctgagggcgccaaactactctccggaggtcagagggtgggagacaagggattcttcatccagcctaccgtcttcggagacgtcactgataacatgaagatcgcaaaggaagagatctttggacctgtacagcagatcctgaagtttagtcagatggacgaagtgatcgaacgagccaatagcagcatttatggactagcagcttccgtcttcaccaaagacattgacaaggctctctacatctcaaacagcgtgagagctggaactgtttatgtcaactgctatgacgtcttcgcagcccaggctccattcggaggttacaaagcatcgggcagcggcagggagctgggagagtatggacttgacaactacacagaggtcaaaacggttattgtcaagattccacagaagaacacatag

SEQ ID NO: 37962 - protein, 519 aa, Strongylocentrotus purpuratus
MFALRGMLRPSRAAALAKTLRSTGLYSTAAAPQPIVTPDIHFNKLFINNEWVDAQSGKTFPTINPATEDVITHVAEADKADVDIAYHAANEAFRLGSPWRTMDASDRGRCLNKLADLIERDQVYLASLETLDNGKPFQVAMAGDVALTMKCYRFTGVSEKNHSKIIPVKGCFFVYLRNCIFCPLSLSWNFPLLMQAWKLAPALASGCTVVMKVAEQTPLTALYIASLIKEAGFPEGVVNILPGYGPTAGAAVASHPGMEKVAFTGSTEVGKIIQTAAADNLKKVTLELGGKSPNIVMADCDLEYAVEQSHFALFFNMGQCCCAGSRTFVEDSIYDQFVEMAAARAKTRTVGNPFEDINEQGPQVDREQMDKVLGYIDSGKSEGAKLLSGGQRVGDKGFFIQPTVFGDVTDNMKIAKEEIFGPVQQILKFSQMDEVIERANSSIYGLAASVFTKDIDKALYISNSVRAGTVYVNCYDVFAAQAPFGGYKASGSGRELGEYGLDNYTEVKTVIVKIPQKNT

SEQ ID NO: 37963 - DNA, 1470 bp, Strongylocentrotus purpuratus
  CDS (1)..(1470)
atgtcgacgtcttccagtcacggttcgctcttccacgacaaggccttcatcaacggtacttgggtagatgcaaagtcggaagcgacgttccaagtcacaaatccggccaatggatccaccatcgcgacggttgtcgatggcaatgcctctgatatggaggaagcgatcaaagtcgccaacgacacgttttatggaccttggagagacaccactgcaaaggagaggggcataattcttcgacgatgggcagaactaatgatgcagaatcaagaagagctagccaaactgttgacatcagaaaatggcaagcctttgtcggaagcaatgggtgagatcggctatgcagcatcttttaacgaatggttctcagaagaagctcgtcgatcctatggtgatgttgtctcatctcctgtcaagacgaaaaggatgatattcattcgacaacctgtaggggtagcagctatgattacaccttggaattttcccagtgcaatgattacgagaaaagctgccgcagcgatcgcagctggatgcacggtggtcgtcaaaccagcagaagatacgcctctgtcggcgcttgccttgtgtgagttggccaaccaagcgggactacctgctggtgtgttcaacgtggttccatgttctcgatcccatgctgcagacgtgggaagggttatgtgtgagagtcctctggtggctaagatatccttcacaggttcaactcaaactggaaagatcttactaaagcagtcggcagatacagtcaaacgggtttccatggaactcggtggcaacgcaccatttattgtgttcaactcggctgatgtagacgccgccgtctctggcgccatggtctgcaaattccgcgggtcaggacagacatgcgtatgtgccaaccgaatctttgtgcaagaggaggtgtacgacgagttttgtcaaaaaatggcggctgaagtcgaaaaattggtcgtcggtgacggcatggactctaaaacaacacaaggtcctcttatcaacgtgaaaggggtggataaggtcgagcaccatgtacaagacgcagtttcacatggtgggaaggttctggtaggaggcaaacggcatgctctaggcggtagcttcttcgaacctacacttatccgagatgtaccaaccgatgctctagtttgtaaagaagaaacattcggacccctagctgcaatcattaagtttaaaacagaagcggaggtcctggcgatcgccaatagcacgcgtgtcggactcgccggctacttctactccaacaacatcggtcaaatctggcgagtcgccgagaagctcgaagtcggtatggtaggcgtgaacgaaggccttatctcaacggacatagcagccttcggtggcgttaaggaatcaggaatgggtagggaggggtcgaagtatggaatggacgagtatcaggaaatcaaatacgtctgctttggtggaatctaa

SEQ ID NO: 37964 - protein, 489 aa, Strongylocentrotus purpuratus
MSTSSSHGSLFHDKAFINGTWVDAKSEATFQVTNPANGSTIATVVDGNASDMEEAIKVANDTFYGPWRDTTAKERGIILRRWAELMMQNQEELAKLLTSENGKPLSEAMGEIGYAASFNEWFSEEARRSYGDVVSSPVKTKRMIFIRQPVGVAAMITPWNFPSAMITRKAAAAIAAGCTVVVKPAEDTPLSALALCELANQAGLPAGVFNVVPCSRSHAADVGRVMCESPLVAKISFTGSTQTGKILLKQSADTVKRVSMELGGNAPFIVFNSADVDAAVSGAMVCKFRGSGQTCVCANRIFVQEEVYDEFCQKMAAEVEKLVVGDGMDSKTTQGPLINVKGVDKVEHHVQDAVSHGGKVLVGGKRHALGGSFFEPTLIRDVPTDALVCKEETFGPLAAIIKFKTEAEVLAIANSTRVGLAGYFYSNNIGQIWRVAEKLEVGMVGVNEGLISTDIAAFGGVKESGMGREGSKYGMDEYQEIKYVCFGGI

SEQ ID NO: 37965 - DNA, 1458 bp, Strongylocentrotus purpuratus
  CDS (1)..(1458)
atggcacctgcaaatcctcttatccgtgacaaatcttacattggaggtgcatgggtacctgccaagtcaggagcgacctttgcagtgaccaaccctgcaacaggtgaattgatagctaacgtgacggacagtggtgctgcggacactgaccgtgccatcgacgtcgctcatacagccttcaagacatggaagaagaccaccgcaacggaaagagctgcaatcctcaaccgctttgcacaactgatggatgaaaacgtagaaaatctggccaagatcatcattgcggaaaatgggaagaaaatggccgaggcccaggttgaagctcagggtgcggcaagttgcctccgatactatgccgaagaggcgacaaggactaccggtgacgtcctggtgccccatgccaggggcaagagggtcctggttatcagacaaccagtgggcgtggctggtcttattaccccttggaacttcccattggagatgataaccaggaaagctggagcggctttggcagttgggtgtaccatggtgatcaaaccgtcagaagacactccattgtctgctttagctctctgtgacatggctaagaaagcgggtgtcccagacggtgtcttcaacgtcgtaccctgttcccgacctaacgctccagctgtgggcaaggtcatgtgcgagagcctgctggtatccaagatatccttcactggttctacagccgtaggaaagattctgttgagtcaggctgctagcaccgtcaagaaggtctccctggagctaggaggaaattctcctctcatcgtcttcgattcagcaaatctcgaggctgcagtcatgggggccttctttctcaggttctacggcgcgggccaggtgtgtgtcagtgcaaatcgcatcttggtgcaagaaggcatctacgataagttctgtgagaagatgaaacagcatgtatcaggtatggtggtcggtaatgggatggacccaaagacgtcgatgggacccctcatcaaccaacgaggtgtggagaaggtggaaagacatgtccaggacgccgtgaagcaaggcgctcgtatcctgacgggaggtaaccggtcgaaactaggagggaacttctttgagccaaccgtcatctgcgatgtgcccacaactgcactaccatgtacagaagagacttttggtcccttggcttccatagtcaagttcaagaccgaagaggaggcgatcaccatcgccaataacacccgtatgggactagcgggttacttctattccaacgacatgagtcagatctggcgcgtcgccgaggagatggaagtcggtcaggttggcatcaacgacactttcttcttcaataacgccgccccgtttggaggtgtcaaggagtctggtctgggtgtggaaagttccaagtacgggctacacgagttccagaacatcaagaccatgggctttggcctcctctga

SEQ ID NO: 37966 - protein, 485 aa, Strongylocentrotus purpuratus
MAPANPLIRDKSYIGGAWVPAKSGATFAVTNPATGELIANVTDSGAADTDRAIDVAHTAFKTWKKTTATERAAILNRFAQLMDENVENLAKIIIAENGKKMAEAQVEAQGAASCLRYYAEEATRTTGDVLVPHARGKRVLVIRQPVGVAGLITPWNFPLEMITRKAGAALAVGCTMVIKPSEDTPLSALALCDMAKKAGVPDGVFNVVPCSRPNAPAVGKVMCESLLVSKISFTGSTAVGKILLSQAASTVKKVSLELGGNSPLIVFDSANLEAAVMGAFFLRFYGAGQVCVSANRILVQEGIYDKFCEKMKQHVSGMVVGNGMDPKTSMGPLINQRGVEKVERHVQDAVKQGARILTGGNRSKLGGNFFEPTVICDVPTTALPCTEETFGPLASIVKFKTEEEAITIANNTRMGLAGYFYSNDMSQIWRVAEEMEVGQVGINDTFFFNNAAPFGGVKESGLGVESSKYGLHEFQNIKTMGFGLL

SEQ ID NO: 37967 - DNA, 2496 bp, Strongylocentrotus purpuratus
  CDS (1)..(2496)
atggcggcatcaacagcaccaagtggccaaggctcatctgcaccgaattctgtggaatctatctttgagagcatggaatacggaccaaatccggaagcaccaagctctgctcaggcatggcttgaaagtcacgaccgaaaactcggccacttcatcaacaacaagtgggtgcggccggagaaccgcaagacctacaccacccgtgggcccgcggcaggtgaacctctggcaaccactgtccaaggggaggaagaggatgttgagctggccgtgagctcagcagagaaggcatacgagtcgtggagtaagcttccgtgccatgttagggcaagacacatctacagcattgcgcgtcatgtccagaagcaccaccgcctgattgccgtagtagaggccctcgacaacggcaagcccattagagagacgcgtgatgccgatatcccgattgttatccgccacctctaccatcatgccggatgggcggagcttatggacacagagatggccaattggaaaccagttggtgtggtcggtgccattgtcccctggaacttccccctcatgctcctcatctggaaggtgtgccccgcccttgccatgggtaacacggtggtcctcaagccggctacctacacccgcctaagcgccctcctcttcgcccagatctgcgccgaggccggtctacctcccggcgttctcaacatcgtgacgggcaatggagccttcgggagcaagctcgccctgcacccacgcgtcgataaagtggccttcaccggatccacagaggtcggtcagatcttgagaagggctactgccggaacaggcaagaagctgtccttggagctcggagggaaatctccctttgtcgtctttgagtcagctgacctagattcggctgtagagggcatcgtcgatgctatctggttcaaccaaggccaggtatgcagtgcaggttcgaggctcatcgtccaggagaccgttatgtccaagatggttgccaaactccgggagcgcctcatgcacctcagagttggcgactccctggataaatcggtagacatgggtgcgatggtggacccctcccatctgaagacggtgacggagtatgtggaggatgcgaggagagaaggagcagagatcattcaaaaccctgactgtatacctaagaaaggttgcttctacccaccgacgctcatcaccaacgtccagacatcgtctagagtggtcatggaggaaatatttggacctgttcttgttgtcctgcccttccgcaccgccaaggaagccgttgcccttgccaacaactccaactacggtctagccggcagcgtctggaccgagaacgttagtcttggtctagaggtggctctgagcatcaaggctggggccatctggatcaacgctcataacatgtttgacgcagcggctggattcggaggctacaggcacagcggttatgggagagacggaggaaaagagggtctgtatgaatacgtagtcccttcatggatggaaaagaagaagcctggtaatgtcgacatggaactcaaactgttcggcagccacgtacccaacattcccaccaacaacccgccagcgccatctacagttcaagtcgacggcttctccatgccgagcatcgaccgcacctacaagctctactacggtggagctcagaagaggcccgacggcatgtactccaggcccgtcatggatgcggagaaacaggtggtggcgctggttgccgacggcaacaggaaggacgtgaggaacgctgtggaagcagcacacaaggctgcaccagggtggggcaagagagcagcgcacaaccgagcccagattgtctactacatggcagagaatctagagcagaggagagacgaggtagcacagggtatcgccaggctgacgggcagagacatgaagagtgccctcaacgaggtcgatctgtccattcagaggctcttctattggggagcgtatgctgacaagtatggtggaactgttcaggaaaccactctctacggagcaacggtgaagattcatgaacctgtcggtgtcgtcggaatcatctgccccgaggagagccctctattgggctttgtctccctctttgccccggccgtggtcaggggcaacgttgtggtagcagtgcctagtgagaagtatccacttccagctcttggcttctaccaggtctttgaaacatcagacctaccgggaggcgtggtcaacatcctgacgggagacagcagtcacctgaccaagtacctctccgagcatcaagacatccaggccatgtggtacttcgggtcgcccgaggggtcaaagttcgtggagcacacgtcggcggagaacctcaagaggacgtgggtgaactacggtgcgagcagggattggtcggacagagcccagggtcaaggggaggagtttctctaccactctgtggaggtcaagaacatctggatacccatgggagacatctatgcaaattag

SEQ ID NO: 37968 - protein, 831 aa, Strongylocentrotus purpuratus
MAASTAPSGQGSSAPNSVESIFESMEYGPNPEAPSSAQAWLESHDRKLGHFINNKWVRPENRKTYTTRGPAAGEPLATTVQGEEEDVELAVSSAEKAYESWSKLPCHVRARHIYSIARHVQKHHRLIAVVEALDNGKPIRETRDADIPIVIRHLYHHAGWAELMDTEMANWKPVGVVGAIVPWNFPLMLLIWKVCPALAMGNTVVLKPATYTRLSALLFAQICAEAGLPPGVLNIVTGNGAFGSKLALHPRVDKVAFTGSTEVGQILRRATAGTGKKLSLELGGKSPFVVFESADLDSAVEGIVDAIWFNQGQVCSAGSRLIVQETVMSKMVAKLRERLMHLRVGDSLDKSVDMGAMVDPSHLKTVTEYVEDARREGAEIIQNPDCIPKKGCFYPPTLITNVQTSSRVVMEEIFGPVLVVLPFRTAKEAVALANNSNYGLAGSVWTENVSLGLEVALSIKAGAIWINAHNMFDAAAGFGGYRHSGYGRDGGKEGLYEYVVPSWMEKKKPGNVDMELKLFGSHVPNIPTNNPPAPSTVQVDGFSMPSIDRTYKLYYGGAQKRPDGMYSRPVMDAEKQVVALVADGNRKDVRNAVEAAHKAAPGWGKRAAHNRAQIVYYMAENLEQRRDEVAQGIARLTGRDMKSALNEVDLSIQRLFYWGAYADKYGGTVQETTLYGATVKIHEPVGVVGIICPEESPLLGFVSLFAPAVVRGNVVVAVPSEKYPLPALGFYQVFETSDLPGGVVNILTGDSSHLTKYLSEHQDIQAMWYFGSPEGSKFVEHTSAENLKRTWVNYGASRDWSDRAQGQGEEFLYHSVEVKNIWIPMGDIYAN

SEQ ID NO: 37969 - DNA, 1608 bp, Tribolium castaneum
  CDS (1)..(1608)
atgacggctgtaggtgtaggcaaccaacgttcatttggtgccgaagcgtcgaacgatctcaacaagatgctccgtttagcaagatcagcctttggcagggtccagaaatgtaatttctcggcagcggcggtcccggcgcctcaagagagccccaatgtgatgtactcggggatttttatcaataacgaatggcacaaatcgaaatcgggcaaaaccttccccaccgtgaaccccaccaccggtgaaatcatcaccgaggtgcagcaaggggccaaggaagacatcgacttggctgttgatgccgccaatgaggccttccgcttcaactccccctggcgcaccatggacgcctccgaccgggggctgctcctgaaccgcctggcggacctgatggagcgcgacgccgcgtacttggcgagtctcgaaaccttagacaacggtaaaccgtaccatgtggcctaccctgtcgacatcatgggcagtatcaaagtgataaggtacatggccggctgggctgacaaaaaccacggcagggtcatacccctggacggccccttcatgtgctacacgcgccacgagcccgtcggagtctgcgggcaaatcatcccctggaacttccccctgctgatgatggcgtggaagatcggccctgccttgagcatggggaacacggtggtgctcaagcccgccgagcaaacccccctgacagccctctacacggcgcagttgatcaaagaggccgggttccccccaggcgtcttcaatctagtgcccgggttcggcgacgcgggggccgcacttgtctccaaccccaaagtcgataaaatcgcatttacgggatcgaccgaagtggggctgaaaatccagcaaatgtcaggcgttggtaacttgaaacggaccaccttggaattggggggcaaaagccccaacattatcctggccgatgttgatatcgagaaggccgtggaacaagcccacttcgggctgttcttcaatcaaggacaagtgtgctgtgcgggctcacggaccttcatcgaggacaaaatctacgacgagtttgtcgaaaggtcggtcgaacgggcgaaaaagcgcaccgttggcaacccctttgaccccaaaacggagcaagggccccagattgatgaaacccaaatgacgaaaatcctgggtttggttaaagaaggggtgaaccaaggggcaaaattgttggttgggggtaagagagttggggataagggatatttcgttgaaccgacagttttcgccaatgttgaggataaccacgtgattgccaaagaagaaatttttgggccagtgcaacaattgatgcggttcaaggacttggatgagattatagaacgggcgaataataccaattatgggcttgcggcagctgttttctcgaaagatttggataaagtcaattatctggttcaagggataagggctgggactgtctgggtcaacacgtacaatattttgggggcgcaaacgccgtttggagggttcaaggattcgggacatgggcgtgagatgggaatttatggcttgaatcaatacactgaagttaaaagtattattacatcggttgcacgaaaaaactcgtaa

SEQ ID NO: 37970 - protein, 535 aa, Tribolium castaneum
MTAVGVGNQRSFGAEASNDLNKMLRLARSAFGRVQKCNFSAAAVPAPQESPNVMYSGIFINNEWHKSKSGKTFPTVNPTTGEIITEVQQGAKEDIDLAVDAANEAFRFNSPWRTMDASDRGLLLNRLADLMERDAAYLASLETLDNGKPYHVAYPVDIMGSIKVIRYMAGWADKNHGRVIPLDGPFMCYTRHEPVGVCGQIIPWNFPLLMMAWKIGPALSMGNTVVLKPAEQTPLTALYTAQLIKEAGFPPGVFNLVPGFGDAGAALVSNPKVDKIAFTGSTEVGLKIQQMSGVGNLKRTTLELGGKSPNIILADVDIEKAVEQAHFGLFFNQGQVCCAGSRTFIEDKIYDEFVERSVERAKKRTVGNPFDPKTEQGPQIDETQMTKILGLVKEGVNQGAKLLVGGKRVGDKGYFVEPTVFANVEDNHVIAKEEIFGPVQQLMRFKDLDEIIERANNTNYGLAAAVFSKDLDKVNYLVQGIRAGTVWVNTYNILGAQTPFGGFKDSGHGREMGIYGLNQYTEVKSIITSVARKNS

SEQ ID NO: 37971 - DNA, 2748 bp, Tribolium castaneum
  CDS (1)..(2748)
atgccaccaaatcaaagcacagtcaccaacacgccatccctgcgcattgcgatcatagggcagagccctttcgccgtcgacgtcctgaaacggctacggcaacacgggcacgtcatcgtgggggtgttcacaatccctgacaagggcacccgggaagatcccttagctaaaatcgcccacgagtgcgacatccccttattcaaggtcaaggcgtggcgtaaatcgggcacgcccctccccgaagtcctagccaattaccgcagcgtcaacgccgacttgaacgtcctcccctactgctcgcaattcatcccaatggaagtcataaactatccccgcctcaaaacgatatgctaccacccgtcgctcctcccacgccaccgcggcgccagttccatcaactggacgctcatttccggcgataaaaaggcggggtttagcattttctgggcggacgatgggctggacaccggaccaatcctgctacaggaggagtgtgacgtttacgaggacgacaccgttgattcgctctataaccggtttttgtacccggccggagtgaccgcccttgctagggccgttgaccttgtagctgacggtaccgcccccagggaaccccagagtgagaaaggcgccacctatgaccccatgttaaacaaaccggaactttgccaaatcgattgggggaaaaccgggccggagttgcacgattttatccgagggatggattcggtcccgggggcgtcatgtcgggtcaaagtcaatgataagtaccacgaagttgcactttttgggtcaagtgtttggaaaggggggaagccccaaggactggacgttgggattgaaggtggtcccaatggtaccatacacgaggatgggttaattttgacgggttctgatggtaccatggtcaatgtcaagcgggtcaaaattgagggacgggtcaagcttgcctcaaacttgctccaaaccggtcaacaagtcacaattgagttgacggaggatgagaaaagtcaaattgagtcaatgaggggcatttggaagtcaatcctcaatacggaaattgaggatgagaccgattttttcgcctcaggggccgggtcaatggacgtcgtccgattggttgaggaaattaaggatttactcaaacttgaggattatcaaaatgaggatgttttcctcaatccggttttcaccgaattttcgttgaacgccgttttgaaaaaaaggggcggggaaacccccaaagaaatcaactataagggcgttgaaatcgaagctaatggactcaaaatcaaagttccgtgccaacttttcatcaatggggagtttgttgacgcggaaaatggaaaaaccctaccaactgtcaacccaaccaccgaagaaaccatctgtcaggtccaatgtggctcagccaaggacgtggacagggccgtccaagcggccaaaaaggccttttacgagggagaatggagcaaaatcagcgcacgtgaccgcggccaactccttttcaagttggcagacctgatgcaccaacaccgcgaagagttggccacgatcgagtcaatcgactcgggggcggtttacaccctagccctgaagacgcacgtcgggatgagcatcgaaacgtggcgatacttcgccggatgggcggacaaaatccacggatcgaccatcccagtttcgcacgcccgccccaataaaaacctctcctttacgaagagagaaccgattggagtctgcggcctgatcacgccctggaactacccacttatgatgctatcgtggaaaatggcagcgtgccttgcggccggtaatacagttatcatcaaaccggcacaagtgtgccctctaaccgcacttaaattcgccgaattggcggtcaaggcggggattcccccgggtgtgatcaacgtcgtgccgggcacggggtcaacgaccggccaagcgatcgcgacgcatcccgaagtacgcaagttgggttttacgggaagtaccggaatcgggcaagtcattatgaagtcgtgcgcggaatcaaacttgaagaaagtgtcgcttgaactgggggggaagtccccactggttattttcgccgactgcgatctggacaaggccgtccgattgggaatgcaaagtgtttttttcaacaagggcgagaattgcatagctgccgggcgacttttcgtggaggaaagcatccacgacgagtttattcgacgcgtggtcaccgaaaccaaaaaaataacaattggggatcccctgaacaaatcaacagcgcacggcccacaaaatcaccaagcacacttgaccaaactactcgattatattaaaatgggggtcaaagagggggcgaaattggaatatggaggggagcggttaaaccgaaagggttacttcctccaaccgaccattttcagccacgtggaggaccacatgtacatcgccaaggaggaatcgtttgggcccatcatggttattagtaaatttagcaatggggacattgacggtgttttaaaacgtgcaaacgcgactgaatatgggctcgcctccggggtttttacccgagatttgtccaaagcgctcaaatttgcggaaaaagtcgaagccgggactgtttttgtcaacacttataataaaacggacgtcgcggcgccgtttggggggttcaagcagtcgggatttggcaaagatttaggacaagacgctctgaacgaatatttgaaaacgaaatgcgtcacaattgagtattaa

SEQ ID NO: 37972 - protein, 915 aa, Tribolium castaneum
MPPNQSTVTNTPSLRIAIIGQSPFAVDVLKRLRQHGHVIVGVFTIPDKGTREDPLAKIAHECDIPLFKVKAWRKSGTPLPEVLANYRSVNADLNVLPYCSQFIPMEVINYPRLKTICYHPSLLPRHRGASSINWTLISGDKKAGFSIFWADDGLDTGPILLQEECDVYEDDTVDSLYNRFLYPAGVTALARAVDLVADGTAPREPQSEKGATYDPMLNKPELCQIDWGKTGPELHDFIRGMDSVPGASCRVKVNDKYHEVALFGSSVWKGGKPQGLDVGIEGGPNGTIHEDGLILTGSDGTMVNVKRVKIEGRVKLASNLLQTGQQVTIELTEDEKSQIESMRGIWKSILNTEIEDETDFFASGAGSMDVVRLVEEIKDLLKLEDYQNEDVFLNPVFTEFSLNAVLKKRGGETPKEINYKGVEIEANGLKIKVPCQLFINGEFVDAENGKTLPTVNPTTEETICQVQCGSAKDVDRAVQAAKKAFYEGEWSKISARDRGQLLFKLADLMHQHREELATIESIDSGAVYTLALKTHVGMSIETWRYFAGWADKIHGSTIPVSHARPNKNLSFTKREPIGVCGLITPWNYPLMMLSWKMAACLAAGNTVIIKPAQVCPLTALKFAELAVKAGIPPGVINVVPGTGSTTGQAIATHPEVRKLGFTGSTGIGQVIMKSCAESNLKKVSLELGGKSPLVIFADCDLDKAVRLGMQSVFFNKGENCIAAGRLFVEESIHDEFIRRVVTETKKITIGDPLNKSTAHGPQNHQAHLTKLLDYIKMGVKEGAKLEYGGERLNRKGYFLQPTIFSHVEDHMYIAKEESFGPIMVISKFSNGDIDGVLKRANATEYGLASGVFTRDLSKALKFAEKVEAGTVFVNTYNKTDVAAPFGGFKQSGFGKDLGQDALNEYLKTKCVTIEY

SEQ ID NO: 37973 - DNA, 1470 bp, Tribolium castaneum
  CDS (1)..(1470)
atggcttccgcagcgtctttaattaaatacacaaagttgtttataaacaacgaatttgtggactctgtgagtaaaaaaaccttcccaactctgaaccccacaaatggggccaaaatcatcgacatttccgagggggacaaggaagacattgacaaggcggtccaagcggctaaagcagccttttccagaggcgccccatggcgcaaaatggatgcctcaacccgaggcaaactcataatcaagctcgccgacttgatcgaacgcgatattaacacgctcgcaaagctggaaacccttgataacggcaaacccttatcagactcaacgctcgatatccagtgcagcatcgacgtcttgcgctactatgggggctattgcgacaaaatccacggtaacacaatccccgcagacggcgattgtctctccctcacccgcaaggagccggtcggcgtcgtgggccagatcatcccctggaactaccccatcatgatgcagatctggaaatggggccccgccctggccgctggctgcaccatggtgctgaagccggccgagcagacccccatcacggccctcgcgttggcggccctggtcaaagaggcggggtttcccccgggggtggtgaacgtggtccccgggtacgggcccacggcgggggcggccctagccctccacaaagacgtcaataaagtggctttcaccggatccacaattgtcggcaaaaaaatcatggagtatagcgcgcagtcgaacttgaaacgtgtgagtctcgagctggggggcaagagcccccttgtggtcttcaatgacgctgatttggatgaggcggtggaaatcgcccataatgcgatttttggcaaccacggccagaattgttgtgccggttcccgtacttttgttcaatctggaatttacgatgcttttgtacaaaaagcggtccaaaaggccaagctgcgtaaagttggcgatccatttgaccccaatgtgcaacaagggcctcaaattgataagccatcgcttgataaaatcttgcgtttgattgattcggggaagaaggaaggggcgaaattggaaatcgggggttcccggatcgggactgaggggtatttcgtcgaaccgactgtcttttcgaatgttactgatgctatgagcattgccaaagaagagatttttggccctgtgcaaagcattttgaaatttgagaccctggaggaggttattgaaagggccaatgacacgtattacggtttggcggctggggttatcaccaaaaatattgatacggccctgacattcgcccaagcggtccaagccggttctgtttgggtgaactgttacgactacatcacgccacaaacgccgttcgggggctacaaaatgtccggaatcgggcgtgaaatgggggccgagtcactagacgcgtacgtggaaaccaaaacaatttccatcaaactgccaactaaggtctaa

SEQ ID NO: 37974 - protein, 489 aa, Tribolium castaneum
MASAASLIKYTKLFINNEFVDSVSKKTFPTLNPTNGAKIIDISEGDKEDIDKAVQAAKAAFSRGAPWRKMDASTRGKLIIKLADLIERDINTLAKLETLDNGKPLSDSTLDIQCSIDVLRYYGGYCDKIHGNTIPADGDCLSLTRKEPVGVVGQIIPWNYPIMMQIWKWGPALAAGCTMVLKPAEQTPITALALAALVKEAGFPPGVVNVVPGYGPTAGAALALHKDVNKVAFTGSTIVGKKIMEYSAQSNLKRVSLELGGKSPLVVFNDADLDEAVEIAHNAIFGNHGQNCCAGSRTFVQSGIYDAFVQKAVQKAKLRKVGDPFDPNVQQGPQIDKPSLDKILRLIDSGKKEGAKLEIGGSRIGTEGYFVEPTVFSNVTDAMSIAKEEIFGPVQSILKFETLEEVIERANDTYYGLAAGVITKNIDTALTFAQAVQAGSVWVNCYDYITPQTPFGGYKMSGIGREMGAESLDAYVETKTISIKLPTKV

SEQ ID NO: 37975 - DNA, 1491 bp, Tribolium castaneum
  CDS (1)..(1491)
atgttcaaaattccctggattcgaactttgcaaacgcgatcgatgcacctcctcaaagacaaggcttatatcaacggccagtggctgggggcccagtcgggcaaagtcttccaagtaaccaaccccgcaacgggcgaagtcatcggcacggcccccgacatggacacctccgacacgcagagagccatcgagggggcccatgccgccttccaaacctggcaagacaccaccgccaaagaccgctcccactacctccgtaaatggtacgacctaatggcccaaaaccacgaagacctcgccaaaatcataaccctggaagcggggaagcccctggtggaggcccgcggcgaagtcgcttacggcaactccttcatagagtttttctccgaagaggcgcgccgtatccacggcgaaattattccaagccccatcccaaccaaaaaaatcctagtcgagagacaaccaatcggagtcgccgggctcatagccccctggaacttcccccatgcgatgatcacacgcaaagcaggcgctgcgttagcctccggctgcacttgcgtgatcaagccggccgaggacacacccttcacagcgcttgctttgatggaactggcccatcaagcggggattcccagtggggttgttaacgtggtgaccagcagtcgcgaaaatgcgccagcaatcgggaatttgctatgcgagagccctctagtggcggggatttcgttcacgggctcgacgcaagtcgggaaactactttaccgacagtgttcctctggtgttaagagactggggcttgagttaggtggcaatgccccgttcattgtttttaattctgccaatgttggtcatgctgttaagggggccatggcctccaagtttcggaattgtggccaaacgtgcgtctcctctaaccgctttctcgtccaaggcaaagtttacgattcgttcgttggtagtttagttaaggaaatcaaaagtttgaagattgggaatgggcaagaatgtggggtgaatgtgggaccgttgataaaccaggcccagtttggcaaagtctcagatttggtcgaggatgcggttagtaagggggcgaaggttttgacagggggcaaagccgcaagacagtttggcgagttgttttacgaaccaaccgttttaaccgatattaaggaaaatatgagggtttacacagaggaggtgtttgggcccattgttaccatatttaggttcgagacggaagaagagggcctccagatcgccaatagtaccgagagaggtctcgcgggttatttctattccgaggatgtgtcccaaatttttagggtggctaggaaactcgaagtggggatgtgtggggttaatgaagggattatctcaacggcggaggctcctttcggagggattaaggagtcggggctggggagggaagggtcccaccatgggatcgacgattttacgtatattaagtacatttgcgttggtaatttatga

SEQ ID NO: 37976 - protein, 496 aa, Tribolium castaneum
MFKIPWIRTLQTRSMHLLKDKAYINGQWLGAQSGKVFQVTNPATGEVIGTAPDMDTSDTQRAIEGAHAAFQTWQDTTAKDRSHYLRKWYDLMAQNHEDLAKIITLEAGKPLVEARGEVAYGNSFIEFFSEEARRIHGEIIPSPIPTKKILVERQPIGVAGLIAPWNFPHAMITRKAGAALASGCTCVIKPAEDTPFTALALMELAHQAGIPSGVVNVVTSSRENAPAIGNLLCESPLVAGISFTGSTQVGKLLYRQCSSGVKRLGLELGGNAPFIVFNSANVGHAVKGAMASKFRNCGQTCVSSNRFLVQGKVYDSFVGSLVKEIKSLKIGNGQECGVNVGPLINQAQFGKVSDLVEDAVSKGAKVLTGGKAARQFGELFYEPTVLTDIKENMRVYTEEVFGPIVTIFRFETEEEGLQIANSTERGLAGYFYSEDVSQIFRVARKLEVGMCGVNEGIISTAEAPFGGIKESGLGREGSHHGIDDFTYIKYICVGNL

SEQ ID NO: 37977 - DNA, 1557 bp, Tribolium castaneum
  CDS (1)..(1557)
atggcaatgcaacggacctctaccccttttctcaccctcctcaaacggcactactctaatgtagcccccacaacgaaactcttcatcgatggcaaattcctcgattcgcaagccaccgactgggtggagctccacgaccccgccaccaacgaactggtcacgaaagtgccccaaagtaccagaagtgagatggaggctgcggtagaatcgtcaaaaaaagcgtacgaaacgtggaagaatacttcagtattaacgcgacagcaagtcatgcttaaacttcagcacgttatcagacgcgatattaaaaaaatcgcggcaaatatcaccacagaacaggggaaaaccctggcagacgccgaaggcgatgtcatgcggggcttgcaggttgttgagcacagttgtgccgcaggaaccctcctccaaggagagtcgctacaaaacatagcaagggacatggacatagtctcgtacaaggtcccaatcggggtcactgccgggatcgcccccttcaacttccctgccatgatccccttgtggatgttccctctagccctaatcgccggcaacaccatgataatcaaaccctccgaacgcgatcctggagcgaccatgctcctgatggagctcctcaacgaagtgggctgtcccccaggtgtcgtcaacgtgatccacggcacccatgacgctgttaacttcatttgcgacaataaagacatcaaggctattagtttcgtggggtcggacacagccgggaaatatatttacgggcgtgggggcgccaacggcaaacgggtgcagtccaacatgggggctaaaaaccacgctgttgtgcttccagacgctgacaagagcgcgacgattgatcagctgattggcgccgcttatggggccgccggccagaggtgcatggccctaagtgtggcgattttagtcggggaaacccgcgactggatcccggagattatcgaacgggcgaaaaaactcaaagtgacagcagggcatgagccgggggctgatttaggcccggtgatttcgcccaaagccaaggagagaatttttagtttgattgagtctgggattaagcaaggggccaagtgtccgctggatgggagagggattgttgtggagaagtaccctaaagggaatttcgtggggcctacacttttaacccatgtccagccatcgtttgagtgctacaaagaggagattttcgggccggttttaagtgtcatgttcgccgatactttagacgaggccattaaaatgattaactcgaatccttatggtaatggtactgcaattttcacgagtaatggcagtcatgccagacagtttgttaatgagattgatgttgggcaagtcggggttaatgttccaatcccggtgccgttgcccatgttcagtttcaccgggtccaggggtagttttcacggagatttgcatttctacgggaagcagggcttgaacttttacaccgaaaccaagaccataacgtcgttgtggcgcaaaggccaggcggcgtccaacaagtctgtctcaatgcctgtgcataattaa

SEQ ID NO: 37978 - protein, 518 aa, Tribolium castaneum
MAMQRTSTPFLTLLKRHYSNVAPTTKLFIDGKFLDSQATDWVELHDPATNELVTKVPQSTRSEMEAAVESSKKAYETWKNTSVLTRQQVMLKLQHVIRRDIKKIAANITTEQGKTLADAEGDVMRGLQVVEHSCAAGTLLQGESLQNIARDMDIVSYKVPIGVTAGIAPFNFPAMIPLWMFPLALIAGNTMIIKPSERDPGATMLLMELLNEVGCPPGVVNVIHGTHDAVNFICDNKDIKAISFVGSDTAGKYIYGRGGANGKRVQSNMGAKNHAVVLPDADKSATIDQLIGAAYGAAGQRCMALSVAILVGETRDWIPEIIERAKKLKVTAGHEPGADLGPVISPKAKERIFSLIESGIKQGAKCPLDGRGIVVEKYPKGNFVGPTLLTHVQPSFECYKEEIFGPVLSVMFADTLDEAIKMINSNPYGNGTAIFTSNGSHARQFVNEIDVGQVGVNVPIPVPLPMFSFTGSRGSFHGDLHFYGKQGLNFYTETKTITSLWRKGQAASNKSVSMPVHN

SEQ ID NO: 37979 - DNA, 1467 bp, Acinetobacter sp. ADP1
  CDS (1)..(1467): transl_table=11
atgcaacaatttcagctgtatattaatggaaaatttgaggatggcgctgcgcaatttgacagcatcaatcctgccacaggtgaaatctgggcaaaaatgccagaagcacgtacagatcaggtcaatcgtgctgtagatgccgctgagcaggcattttatgattcaagctggtctggattgacagcttcccagcgtggcaaattactgtataaacttgctgacctcgttgaaaaatctgcgccacgacttgcggctttagaaaccacagataccggcaagattattcgtgaaacctccagccagattgcctatgtggcagagtattatcgctattatgcaggactcgccgacaagattgaaggcagctttattcctgtcgataagccagatatgcaggcatggctggtacgtgagccagtgggtgtggttgcggcgattgtaccgtggaacagtcaattatttttgtctgcggttaaagttggcccggcactggctgcaggttgcaccgtcgtgcttaaagcttctgaagaagcaccagcccctttgcttgaatttgccaaattgattgatgaagcaggctttcctgctggtgtggtcaatgtgattacaggctttgggccagaatgcggtgcagtattaagtgcacatcctaaagttgcccatattgcatttacgggtggcccagaaacagccaaacatattgtgcgtaacagtgcagaaaatctggcaaaggtttcacttgagcttggtggtaaatctccgtttattgtgtttgcagatacggatattaatagtgcattgaatgcgcagattgcagcaatttttgccgcaacaggccaaagttgtgtagcgggttcacgtcttttgattgaagaaagtatcaaagatgaatttttacagcgtttggctgaacgtgttcaaagtatcaagatgggcttacccgatgatatgcaaaccgaatacggcccactgtgtaccctcaagcaacgtgaaaaaatccagcaagtggtgcagcgttcagttgaacaaggtgcaaaactgatcactggtggtcaggtttgtgacggtgcaggttactactatccaccgaccattctggattgcagtggtgtttctgatgctcaaagcattcataccgagctatttggtccggtgttatcggttgatacttttagtactgaagcagaagcaattcagaaagccaatagtacgccttatggtttagcgtctggtgtgtttaccagtaatttgacccgtgcacatcgtatgacccgtgccattcgatcaggaattgtctggctcaatacttatcgggtcgtttctccattggcgccatttggtggctatggactttcagggcatggacgtgaaggtggtttgagtgctgcacttgaatataccaccacaaaaacagtttggcttcgaatgtcagatcagccaattgatgacccttttgttatgagatag

SEQ ID NO: 37980 - protein, 488 aa, Acinetobacter sp. ADP1
MQQFQLYINGKFEDGAAQFDSINPATGEIWAKMPEARTDQVNRAVDAAEQAFYDSSWSGLTASQRGKLLYKLADLVEKSAPRLAALETTDTGKIIRETSSQIAYVAEYYRYYAGLADKIEGSFIPVDKPDMQAWLVREPVGVVAAIVPWNSQLFLSAVKVGPALAAGCTVVLKASEEAPAPLLEFAKLIDEAGFPAGVVNVITGFGPECGAVLSAHPKVAHIAFTGGPETAKHIVRNSAENLAKVSLELGGKSPFIVFADTDINSALNAQIAAIFAATGQSCVAGSRLLIEESIKDEFLQRLAERVQSIKMGLPDDMQTEYGPLCTLKQREKIQQVVQRSVEQGAKLITGGQVCDGAGYYYPPTILDCSGVSDAQSIHTELFGPVLSVDTFSTEAEAIQKANSTPYGLASGVFTSNLTRAHRMTRAIRSGIVWLNTYRVVSPLAPFGGYGLSGHGREGGLSAALEYTTTKTVWLRMSDQPIDDPFVMR

SEQ ID NO: 37981 - DNA, 1500 bp, Pseudomonas syringae pv. syringae B728a
  CDS (1)..(1500): transl_table=11
atgcaaatgaccaccctgactcgtgctgactgggagcaacgcgcccggaatttgaagatcgaaggccgtgccttcattcaaggtgaatacaccgcagcctcctccggcgagacgtttgactgcatcagtccggtcgatggccggatgcttgccaaggttgccagttgcgatgccgctgacgcgcaacgcgccgtcgacagcgcgcgcagcgccttcaactccggcgtctggtcacgactggccccggcgaaacgcaaggccaccatgatccgtttcgcggggttgcttgagcagaatgctgaagaactggccctgcttgaaacgctggacatgggcaagccgatcagcgactcgctgggtgtcgacatacccggcggcgcccgggccctgagctggagcggcgaggccatcgacaagctgtatgacgaagtcgcggcaacgccgcatgaccaactgggcctggtaacgcgcgagccggtgggtgtcgtggccgccatcgtgccgtggaattttccgctgatgatggcctgctggaagctgggccctgcgctgtccactggcaactcggtcatcctcaagccctcggaaaaatctccgctgacggccattcgtatcgcacaactggccatcgaggctggcattccagcgggcgtgctcaacgtactgcctggctatggccacaccgtcggcaaggcgcttgccctgcatatggatgtggacaccgtggtgttcaccggctcgaccaagatcgccaagcaactgatgatctatgcgggcgaatcgaacatgaagcgcgtctggctggaagccggcggcaagagcccgaatatcgtctttgccgacgcgcctgatctgcaggccgccgccagcgcagccgccagcgcgattgccttcaatcagggcgaagtctgcaccgccggttcacgcctgttggtcgagcgctccatcaaggatcgcttcctgccgatggtgatcgaggcgctcagtgcctggaagcccggcaacccgcttgaccctgcgaccactgtgggcgcgctggtcgatacccagcagatgaataccgtgttgtcttatatcgaagcgggccatagcgatggcgccaaactggttgcgggcggcaagcgcattctgcaggagaccggcggcacctatgtcgagccgaccattttcgacggcgtgaacaacgcgatgaaaatcgctcaggaagaaatcttcggcccggtgctttcggtgctgacgttcgatactgccgaagaggcgatccagatcgccaacgacacgcagtatggcctggcggctgccgtatggaccgcgaacatctccaaggcgcacctgaccgccaaggctttgcgcgcaggcagcgtatgggtcaaccagtacgacggcggcgacatgaccgcaccgttcggcggcttcaaacagtcgggcaacggtcgtgacaagtcgctgcatgcgttcgacaaatacaccgagctgaagtcgacctggatcaagctgtag

SEQ ID NO: 37982 - protein, 499 aa, Pseudomonas syringae pv. syringae B728a
MQMTTLTRADWEQRARNLKIEGRAFIQGEYTAASSGETFDCISPVDGRMLAKVASCDAADAQRAVDSARSAFNSGVWSRLAPAKRKATMIRFAGLLEQNAEELALLETLDMGKPISDSLGVDIPGGARALSWSGEAIDKLYDEVAATPHDQLGLVTREPVGVVAAIVPWNFPLMMACWKLGPALSTGNSVILKPSEKSPLTAIRIAQLAIEAGIPAGVLNVLPGYGHTVGKALALHMDVDTVVFTGSTKIAKQLMIYAGESNMKRVWLEAGGKSPNIVFADAPDLQAAASAAASAIAFNQGEVCTAGSRLLVERSIKDRFLPMVIEALSAWKPGNPLDPATTVGALVDTQQMNTVLSYIEAGHSDGAKLVAGGKRILQETGGTYVEPTIFDGVNNAMKIAQEEIFGPVLSVLTFDTAEEAIQIANDTQYGLAAAVWTANISKAHLTAKALRAGSVWVNQYDGGDMTAPFGGFKQSGNGRDKSLHAFDKYTELKSTWIKL

SEQ ID NO: 37983 - DNA, 1500 bp, Colwellia psychrerythraea 34H
  CDS (1)..(1500): transl_table=11
atggaaaacttaaattcagcctattggcaaaaattatcgcaaaatattaaatttcgtaaccaggcctttatcaatggtacttttactgatagcacgtcaaatgaaagctatcaagtaattaatccagcgacagaggaagtacttgcatctgtcacagcttgcaattcacaagatgtagatagtgcggtagcttgcgcaagagaaacttttgaatcaggtgtttgggctgataaatcaccttcagagcgtaaagcggttatcttaaaattagcgcaactcatccaagataataaagaagaacttgctctgcttgaaacattagatatgggcaaaccagtgatggatgcgcttaatatcgatatcggtggcgcatcggctattctagcttggtatggtgaagcagcagataaaattaatgatgaaatagcaccaacaggtccaggctcacttgccacgattacaaaagaagcaataggtgttgttgctgctattgttccatggaactttcctcttgatttagctatttggaagttaggacctgcacttgctgcgggtaatagcgtcatcgtaaaaccagcagaacagtcaccacactctgtactgcgtttagctgaacttgctattgaagcaggtgtacctgcaggcgtgtttaatgtagtaacgggtcacggcgcagttgtaggtaaagccttaggtttacatgaagatattgatgttcttacttttactggctcaacaggaataggtaaactatttttacagtacagcgcacaatcaaacatgaaaagcgtttggttagaaactggcggtaaaagccctaaccttgtttttgctgattgcgaagatttagacaaagctgctgatggcgcagccatggggattttctttaaccaaggtgaagtttgttctgctaattctagattgttagttgaaagctcaattaaagatgtctttgtagaaaaaatgataacccgtgccaagcaagttattatgggtcatccgcttaatactaataccactatgggtcctattgttagtgatttacaagcgagccgaatcttctcaaaaattgaaaaagctcagcaagaaggtgcaacattagttactggtggtaaacgagtaacaattgatggatcgtctttatatattgaaccaactatttttgataacgtcgataacagcatgtcaattgcacaagatgaagtttttggtcctgtactgtcagtgatcagcttcgataccgaagctgaagctatagctattgccaatgatacaccatatggtttggcagcttccatttggacggataatttgagccgagctcatcgagttgcccgcaagattaaagccggtactatttcagtaaatactgtagatgctttaagcccaatgacaccttttggtggctacaaacaatcgggtattggacgagatttatcaattcatgcctttgataaatatacagaaactaaaaccacttggataaaattttctgaataa

SEQ ID NO: 37984 - protein, 499 aa, Colwellia psychrerythraea 34H
MENLNSAYWQKLSQNIKFRNQAFINGTFTDSTSNESYQVINPATEEVLASVTACNSQDVDSAVACARETFESGVWADKSPSERKAVILKLAQLIQDNKEELALLETLDMGKPVMDALNIDIGGASAILAWYGEAADKINDEIAPTGPGSLATITKEAIGVVAAIVPWNFPLDLAIWKLGPALAAGNSVIVKPAEQSPHSVLRLAELAIEAGVPAGVFNVVTGHGAVVGKALGLHEDIDVLTFTGSTGIGKLFLQYSAQSNMKSVWLETGGKSPNLVFADCEDLDKAADGAAMGIFFNQGEVCSANSRLLVESSIKDVFVEKMITRAKQVIMGHPLNTNTTMGPIVSDLQASRIFSKIEKAQQEGATLVTGGKRVTIDGSSLYIEPTIFDNVDNSMSIAQDEVFGPVLSVISFDTEAEAIAIANDTPYGLAASIWTDNLSRAHRVARKIKAGTISVNTVDALSPMTPFGGYKQSGIGRDLSIHAFDKYTETKTTWIKFSE

SEQ ID NO: 37985 - DNA, 1488 bp, Rhodobacter sphaeroides 2.4.1
  CDS (1)..(1488): transl_table=11
atgctgcaagagatcgactggcacgcccgcgccaaagccgtggcccttccgaaccgtcccttcatcgacggccagtatgtcgacagcctgtcgggcgagaccttcgcctgcatctatcccggcgacgggcggccgctgaccgatgtggcctcgtgcaatgcggcggatgtggatgtcgcggtgcggtcggcccgcaaggcgttcgaggcgggggtctggtcgcggatggccccggccgaccggcgccgcatcctgctgcgcttctccgagctgatcctcgccaaccgggaggagctggcgctcctcgagacgctgaacgtgggcaagcccatcgccaatgcctacaacggcgacgtggtgagcgctgccgcctgcatcgcctggtatgccgaggcgatcgacaaggtctatggcgaggtggcggccacggcttacgacatgacgacgctcgtcatgcgcgagcccttggggatcgtggcggccgtggtgccgtggaactatccgatgtcgatggccgcctggaagctcgggcctgcgcttgccaccggcaattcggtgatcctgaagcccgccgaacaatcgcccttcaccgcgctgaagttcggcgagctcgccatcgaggcggggatgcctccgggggtgctgaacgtggtgccgggcctcggccatatcgcgggcaaggcgctcgggctgcatatggatgtcgattgcgtgggcttcaccggctcgaccgaggtcggcaagtatttcatgcagtattccggccagtcgaacatcaagcggatcgggctcgaactcggcggcaagtcacctcaggtcgtgctggcggattgcgatgatctcgatgcggcggcggccgggattgcggccggcatcttcgccaacaccgggcaggtctgcaacgcgggctcgcgcctgatcgtggacgagaagatccacgaccagctcctcgagaagatcgcggctcaggccaaggtcttcgcgcccggcgatccgctcgacaccgccacccgcatgggctcgatggtgagcgaagagcagatggaccgcgtgctgggctacatcgacgccggccgcgcggacggtgcacgtccggtcatcggcggcggccgggtgaagaccgaaaccggcggcttctacatcgaacccacgatcttcgagggcgtgcgcaacgacatgaagatcgcgcaggaagagatcttcgggccggtgctgtcggccatcccggtgaagggcttcgacgaggcgatggcgacggccaatgacacggtctacgggctcgcgggcgcggtctggaccgggtcggtgaagaacgcgcaccgggcggccaagtcgctccgcgcgggcgtggtctgggtcaactgcttcgaccgcggctcgctcgccgtgccgttcggcggcttcaagcaatcgggcttcggccgggacaagtcgctgcatgcgatggataaatacaccgacctgaaggccgtctggttcgcccactga

SEQ ID NO: 37986 - protein, 495 aa, Rhodobacter sphaeroides 2.4.1
MLQEIDWHARAKAVALPNRPFIDGQYVDSLSGETFACIYPGDGRPLTDVASCNAADVDVAVRSARKAFEAGVWSRMAPADRRRILLRFSELILANREELALLETLNVGKPIANAYNGDVVSAAACIAWYAEAIDKVYGEVAATAYDMTTLVMREPLGIVAAVVPWNYPMSMAAWKLGPALATGNSVILKPAEQSPFTALKFGELAIEAGMPPGVLNVVPGLGHIAGKALGLHMDVDCVGFTGSTEVGKYFMQYSGQSNIKRIGLELGGKSPQVVLADCDDLDAAAAGIAAGIFANTGQVCNAGSRLIVDEKIHDQLLEKIAAQAKVFAPGDPLDTATRMGSMVSEEQMDRVLGYIDAGRADGARPVIGGGRVKTETGGFYIEPTIFEGVRNDMKIAQEEIFGPVLSAIPVKGFDEAMATANDTVYGLAGAVWTGSVKNAHRAAKSLRAGVVWVNCFDRGSLAVPFGGFKQSGFGRDKSLHAMDKYTDLKAVWFAH

SEQ ID NO: 37987 - DNA, 1500 bp, Rhodospirillum rubrum ATCC 11170
  CDS (1)..(1500): transl_table=11
atgacccaagccgcccccccgatcgactggaccgcccgcgcccgggccctgcggttgcccaaccacgccctcatcgacggcgccccggcaagcgcgggcgatggcgccaccttcgattgcgtcagcccgatcgatggcagggtgctgacccgggtcgccgcctgtggcgcggccgatgtcgaccgcgccgtggccgccggtcgcgccgcctttgaagaccgccgctggtgcggcctgtccccggcggcgcgcaaaaagatcctgctggccttcgccgagcggatcgaggctcatcgcgacgaattggcgctgctggaaaccctcgacatgggcaagccgatcgccgacagcctcgccgtcgacgtgccggccacggcgcgctgtctgcgctggtatgccgaggcgctcgacaaggtttatggcgaagtggcgccgaccggcgacgacgtgctggcgacgatcacccgcgagcctttgggcgtcgtcggcgtcgtcgtgccgtggaacttcccgatgatcatggccgcctggaagatcgccccggccttggcggcgggcaattcggtggtgctgaagccggccgagcaaagcccgctgaccgccatccgtctgggcgaactggccctggaggccgggttaccggccggcgtgctcaacgtcgtgcccggcctggggccggtgaccgggcgggccatcggcctgcatcccgatatcgacggcgccttcttcaccggctcgacggcggtgggcaagctgttcctcagctattccagccagtcgaacatgaagcgccttggcctcgaatgcggcggcaaaagcgcccatatcgtgctggcctcgtgcaagaacaccacggcggccgcccaggcggcggcctcggcgatcttctttaatcagggcgagatgtgcacggcgggctcccggctgatcgtcgagcgcgccatcgccgacgaggtgatcgaaaaagtcgtggccgaagccgccttctggcgccccggcccgccgcttgaccccgcgacccgcatgggcgccctggtcgatgccgagcagaccgagcgggtgcttggctatatcgcccttggccaagacgagggcgcgcggctggcgaccggcggcagccgggccatggccgaaagcggcggctgctatgtggagccgacgattttcaccggggtcgccccgaccatgcgcatcgcccgcgaggagatcttcggaccggtgctttcggtgatcaccgtcgagtcggccgatgaggcggtgcgagtcgccaatgacagcgactatggcctggcggcggcggtatggagcgacgatgtgacgacccttcaccgcgtcgccaaacgcctgcgcgccggcatggtctatgccaattgctatgacgccgacgatatcaccgtacccttcggcggcttcaagcaatcgggcatcggccgcgacaagtccttgcatgccatcgacaaatatacggagctgaaaacaacatggttgcgcctggggtaa

SEQ ID NO: 37988 - protein, 499 aa, Rhodospirillum rubrum ATCC 11170
MTQAAPPIDWTARARALRLPNHALIDGAPASAGDGATFDCVSPIDGRVLTRVAACGAADVDRAVAAGRAAFEDRRWCGLSPAARKKILLAFAERIEAHRDELALLETLDMGKPIADSLAVDVPATARCLRWYAEALDKVYGEVAPTGDDVLATITREPLGVVGVVVPWNFPMIMAAWKIAPALAAGNSVVLKPAEQSPLTAIRLGELALEAGLPAGVLNVVPGLGPVTGRAIGLHPDIDGAFFTGSTAVGKLFLSYSSQSNMKRLGLECGGKSAHIVLASCKNTTAAAQAAASAIFFNQGEMCTAGSRLIVERAIADEVIEKVVAEAAFWRPGPPLDPATRMGALVDAEQTERVLGYIALGQDEGARLATGGSRAMAESGGCYVEPTIFTGVAPTMRIAREEIFGPVLSVITVESADEAVRVANDSDYGLAAAVWSDDVTTLHRVAKRLRAGMVYANCYDADDITVPFGGFKQSGIGRDKSLHAIDKYTELKTTWLRLG

SEQ ID NO: 37989 - DNA, 1500 bp, Ralstonia metallidurans CH34
  CDS (1)..(1500): transl_table=11
atgagcgaactcaaggatctcgaatactggcggggccgggcgcgggcgctgccgattccggcacacgcttatatcgacggccagtggaccagcgcggccgatggcgcgacgttcgactgcatcaacccggccacgggcgaacaactggcgcgtgtggcggcctgcggcgcagcggacgtcgaccgtgccgtggctgcggcccggcgcgcgttcgaggccggagtctggtcggcgatgccccggcgcgagcgcaaggccgtgctattgcgtctggcggccctgatcgagacgcaccgggaagaactggcgctgctggagacgctggacatgggcaagccgatcggcgacaccatgctttatgacatccccgaagcggctcgcacctatgcgtggtatgccgaggcgatcgacaaggtctatgacgagatcgcgccgaccgatgcgggcgtgctggccacgatcacgcgcgagccgcttggcgtcgtggcggccgtggtgccgtggaactatccgctgctgatggcgagctggaaggtggcgccggcgctggccgcgggcaacagcgtggtgctgaagccggccgagcaatcgccgctgaccgcgatccgcctggccgcgctggcggaagaggctggcgtgccgcccggcgtcttcaacgtggtgcccgggttaggcgcagaggcagggcaggcgttgggccgccatcccgatgtcgactgcctggcgttcacgggttccacggctaccggcaagcggtttatggaatatagcggccagtcgaatctcaagcgcgtctggctcgaatgcggtggcaagtcaccgcatatcgtgttcgacgactgcccggacctcgaccgcgccgcgctggccgccgccatcggcatcttcaacaaccagggggagatttgcatcgcgggctcgcggctctacgtgcagcgcggcatctacgacacgttcatggcgaagctggaggcgcatgcggcggccatgcagccgggggatccgctcgacccgcgctccgcgatgggcgcgatcgtcgacgggcggcagttcgaccgtgtgatgtcgtatgtggaagccggccagagggagggggcaaggctgcgtgcgggcggtcaggccgcgcgcgccgattccgggggctggtttgtgcagccgacgatcttcgagtgcccgacgcagtcgctgtcgatcgtcaaggaggagattttcggcccggtgctggccgtgaccgtgttcgacaccgaggccgaagccgtggcgatggccaacgactcggcgtacgggctaggcgcggggctgtggacgtcggacctgtcgcgcgcgcatcgtgtctcgcgccggctgcgtagcgggctggtctgggtcaactgctacatggacggcgacatcaccgtgccgttcggcggcgtcaagcagtcggggttcgggcgcgacaagtcgttgcacgcgctggagaagtaccaggacctgaagacgacctggatccggctcgagtag

SEQ ID NO: 37990 - protein, 499 aa, Ralstonia metallidurans CH34
MSELKDLEYWRGRARALPIPAHAYIDGQWTSAADGATFDCINPATGEQLARVAACGAADVDRAVAAARRAFEAGVWSAMPRRERKAVLLRLAALIETHREELALLETLDMGKPIGDTMLYDIPEAARTYAWYAEAIDKVYDEIAPTDAGVLATITREPLGVVAAVVPWNYPLLMASWKVAPALAAGNSVVLKPAEQSPLTAIRLAALAEEAGVPPGVFNVVPGLGAEAGQALGRHPDVDCLAFTGSTATGKRFMEYSGQSNLKRVWLECGGKSPHIVFDDCPDLDRAALAAAIGIFNNQGEICIAGSRLYVQRGIYDTFMAKLEAHAAAMQPGDPLDPRSAMGAIVDGRQFDRVMSYVEAGQREGARLRAGGQAARADSGGWFVQPTIFECPTQSLSIVKEEIFGPVLAVTVFDTEAEAVAMANDSAYGLGAGLWTSDLSRAHRVSRRLRSGLVWVNCYMDGDITVPFGGVKQSGFGRDKSLHALEKYQDLKTTWIRLE

SEQ ID NO: 37991 - DNA, 1515 bp, Mesorhizobium sp. BNC1
  CDS (1)..(1515): transl_table=11
atggctgacataacagatacgaacagagacgaatggaaggcagccgcccagaaagcctccatcgaaggccgagcctttataggtggcagatatattgacgcggcggacggagacagcttcgattgcataaatcctgcaaccgggcgggttcttgggaagattgcctcttgcaaatctaccgacatcgacctggccgtgagatcagcaagacgcgcctttgatggcggcgcctggtcctgctgtgatccgagcgaacgtcggaaggttctcattcggcttgccgatctcatcgaagcagcgagggacgaactcgcgctgcttgagactctagataccggaaagctcatcagggattccgtaaccctggatattccttcttcggcggccgtttttcgcttttatggggaagcctgcgacaagctgcttcacgaggtggttccagtaggcccttatgcctttgcctcgattacaaaagagcctgtcggcgtagtcggcgctgtgatcccctggaattttcccttgaagatggcagcatggaaatgcgcgcctgctctcgccgtaggcaacagcgtggtgctgaaaccggcagaacaatcacccttaacggcgttaaaactggcccagctcgcggtagaggcgggagttccggaaggcgttttcaatgtcgtcccgggctttggcccggaagccggagctgcgattggacttcattcaggaattgattgcgtaggcttcacgggctcgactgaaattggaaaacgatttctcgcctatgccgggcagtcaaacatgaagcgtgtctggctggagtgcggtggaaaaagtgcctgcatcgtatttccggacgcaaaaaatctcgaggcggctgcgaaagccgcggcgctgggcatttttttcaatcagggcgaagtctgttcggcgacgtcgcgattgttcgttcatcgagacctgctcgacgattttacaaccctgttagtagaagcgagcaattccttcaaacccggcgatccgctggaagtcagttccggcatgggttcgatgatcagtgaagagcagacgacaagggtcatgtcgtatatcgaaaagggcaaggaggaggcagacctgatcgccggtggcagtcgggttctccaggagaccggagggtatttcatcgagcccacgatcttccggaatgtggatccgcgaagcgtaatcgcatgcgaagaaatcttcggccccgtcttgtccatcattcctttcgggtcggagtctgaggctgtggagctggcgaatgcgtcaatctacgggctgggcgcttccgtttggacaggcgatcttgatcgcgcgttccgcctttcgcgcagactgcatgcgggcagtatcagcataaacgcggtcgaccatgttgatttacggacgccgttcggaggcgtgaagcaatctggaaacggccgggatctttcgctccatgcgctcgacaaatattgcgacttaaagacgacgtggatggccgttcaagggagtgccgcatga

SEQ ID NO: 37992 - protein, 504 aa, Mesorhizobium sp. BNC1
MADITDTNRDEWKAAAQKASIEGRAFIGGRYIDAADGDSFDCINPATGRVLGKIASCKSTDIDLAVRSARRAFDGGAWSCCDPSERRKVLIRLADLIEAARDELALLETLDTGKLIRDSVTLDIPSSAAVFRFYGEACDKLLHEVVPVGPYAFASITKEPVGVVGAVIPWNFPLKMAAWKCAPALAVGNSVVLKPAEQSPLTALKLAQLAVEAGVPEGVFNVVPGFGPEAGAAIGLHSGIDCVGFTGSTEIGKRFLAYAGQSNMKRVWLECGGKSACIVFPDAKNLEAAAKAAALGIFFNQGEVCSATSRLFVHRDLLDDFTTLLVEASNSFKPGDPLEVSSGMGSMISEEQTTRVMSYIEKGKEEADLIAGGSRVLQETGGYFIEPTIFRNVDPRSVIACEEIFGPVLSIIPFGSESEAVELANASIYGLGASVWTGDLDRAFRLSRRLHAGSISINAVDHVDLRTPFGGVKQSGNGRDLSLHALDKYCDLKTTWMAVQGSAA

SEQ ID NO: 37993 - DNA, 1497 bp, Rhodococcus sp. RHA1
  CDS (1)..(1497): transl_table=11
atgcctgacccgaccacactcgacgactggacccggctcgccgcgacgatcacgccgcgccgggagctcttcatcgacggcgcgttccgtcccgccaagtccgatgagacgttcgactcgatcaacccggccaccggtgagctgctcgcacgggtggcggccgcggacgccccggacgtcgacgccgcggtgcggtctgcgcgcgaggcgttcgactcgggcgtctggtcgcggagcccggcgtcgcaccgcaagcgggtcctgctccggctcgccgagctgatcctcgaacaccggcacgagctcgccctgctcgactccctcgacatgggcaagctcgtggtggaggcactgaccgtcgacgtcccctcggccgctgatcttttcaggttctacgccgaagccctcgacaagatcggcggggagatcgcgcccaccgatcctgggagtctcgcgctcgtctcccgcgaacccctcggggtcgtcggggcggtggtcccgtggaacttcccactcgacctcgcggtgtggaagctggcgccggccctcgccgcgggcaacagcgtcgtcctcaaacccgccgagcaggctcccctgtcggtgctgcggctggccgagctcgccgccgaggcgggcctgcccgacggcgtcctgggcgtcgtcccggggttcggcgccaccgccggggcggcgctgggcctgcatcccgacctcgacgtcctcgccttcaccggctcgaccgcgaccgggaagcggttcctccggtatgcggcggactcgaatctgaagcaggtctggctcgaatgcggaggcaagagccccaacctggtgtttgcggacgccgatctcgacgaggcggtggagaaggcggtcttcggcgcgttctacaaccagggcgcggtgtgctcggccaactcccggttgctggtcgaggagtcggtggccgaacaggtgaccgaggccctcgtccgccgggcgtcgtcgatccgccccggcaatccgctcgatcccgcctccacactgggcgcgatcgtcgacgagaaccacgctcgcaccgttacggggttcatcgaccgcgcccggtccgagggccgggtgttgctgggcggcaacaagaccaccgtggacgcccggggatccttcgtcgaaccgacgatcttcgcggacgtcgcacccaccgccgaggtggtgacccgggaggtgttcggacccgtcctcaccgtccagacgttcaccgacgaggccgaggccgtccggatgggcaacgacagcatctacggcctggccgcctcggtgtggaccgagaacctgaaccgggcgcaccgcgtctccgcggcgctgcgggcggggaccgtctccgtcaacaccgtcgacgccatcagcgcgcagaccccgttcggcgggttcaaacagtccgggttcggccgcgacctctccctgcacgcgacggacaagtacaccgggctgaagacgacgtggatccggctgcggcagtga

SEQ ID NO: 37994 - protein, 498 aa, Rhodococcus sp. RHA1
MPDPTTLDDWTRLAATITPRRELFIDGAFRPAKSDETFDSINPATGELLARVAAADAPDVDAAVRSAREAFDSGVWSRSPASHRKRVLLRLAELILEHRHELALLDSLDMGKLVVEALTVDVPSAADLFRFYAEALDKIGGEIAPTDPGSLALVSREPLGVVGAVVPWNFPLDLAVWKLAPALAAGNSVVLKPAEQAPLSVLRLAELAAEAGLPDGVLGVVPGFGATAGAALGLHPDLDVLAFTGSTATGKRFLRYAADSNLKQVWLECGGKSPNLVFADADLDEAVEKAVFGAFYNQGAVCSANSRLLVEESVAEQVTEALVRRASSIRPGNPLDPASTLGAIVDENHARTVTGFIDRARSEGRVLLGGNKTTVDARGSFVEPTIFADVAPTAEVVTREVFGPVLTVQTFTDEAEAVRMGNDSIYGLAASVWTENLNRAHRVSAALRAGTVSVNTVDAISAQTPFGGFKQSGFGRDLSLHATDKYTGLKTTWIRLRQ

SEQ ID NO: 37995 - DNA, 1497 bp, Shewanella sp. MR-4
  CDS (1)..(1497): transl_table=11
atgagtacacctaaaaaacggagtgattgggaaagcctcgctgctagcctagcaatcaatggcaaggcttatatcaatggcgaataccgcgatgcggcagcgggcagcacctttgattgtgtcagcccaatcgacggacgcgtattagccaaggtcgccagttgcgatctgatggacgccaatattgccgtcgctaatgcccgtgaggtgtttgaatctggcgtatggtcaaagacagctcccgttaaacgtaagcaagtgatgatccgttttgccgagttattggaagaaaacgccaatgaactcgccctgttagaaaccttggacatgggtaagccaatccgtttttcaaaggcggtagatattgccggcgccgcccgtgctatccgttggtcgggtgaggctgttgataaactctacgatgagctggcacctacggcacataatgaaatcggcatgatcacccgcgaacccgtaggcgtggtggcggcgattgtgccttggaacttcccgttattgatggcctgttggaagctggggccagcgctggcgacgggcaacagcgttattcttaaaccctctgagaaatcccccttaacggccattcgtatcgctgaacttgcggtacaggccgggatccctaagggcgtgctaaacgtactgccaggttatgggcatacggtcggtaaggcactggcgctgcatatggatgtcgataccttagtctttactggctcaacaaaaatcgctaagcaattaatgatttatgcgggcgaatcgaatatgaagcgggtgtggctcgaggctggtggtaagagcccgaacattgtatttaacgatgcgcccgatcttaaagcggcggcggtggcggccgccgaagccattgcctttaaccaaggtgaagtctgtaccgcaggctcgcgtttgctggtggaatctggggttaaagagcaattgattgcgctgattgctgaagaactcgcctcgtggcagcccgggcatccgctggatcccgctaccgttagcggcgctgtggtcgataagcaacaactagataccatcttaagctatatcaaggcgggtcaagatgaaggcgccagtttagtccatggtggacagcaagtgctggccgaaacgggcggcgtgtatgtgcagcccactatctttagccaagtacacaacaagatgaaaatcgccagcgaggaaatctttggcccagtgttatctgtcattgaattcaatggcatggacgaggcgattgcgatagccaatgacaccatttacggcttagctgctggcgtgtggacggcggatatcagcaaggcgcacaaaaccgccaaggcactgcgttcgggtatggtgtggattaaccattatgatggtggcgatatgacggcgcctttcggtggttacaaacagtcgggcaatggccgcgataaatccatgcactccttcgataaatacaccgaaatcaaggcgacttggatagtcctctaa

SEQ ID NO: 37996 - protein, 498 aa, Shewanella sp. MR-4
MSTPKKRSDWESLAASLAINGKAYINGEYRDAAAGSTFDCVSPIDGRVLAKVASCDLMDANIAVANAREVFESGVWSKTAPVKRKQVMIRFAELLEENANELALLETLDMGKPIRFSKAVDIAGAARAIRWSGEAVDKLYDELAPTAHNEIGMITREPVGVVAAIVPWNFPLLMACWKLGPALATGNSVILKPSEKSPLTAIRIAELAVQAGIPKGVLNVLPGYGHTVGKALALHMDVDTLVFTGSTKIAKQLMIYAGESNMKRVWLEAGGKSPNIVFNDAPDLKAAAVAAAEAIAFNQGEVCTAGSRLLVESGVKEQLIALIAEELASWQPGHPLDPATVSGAVVDKQQLDTILSYIKAGQDEGASLVHGGQQVLAETGGVYVQPTIFSQVHNKMKIASEEIFGPVLSVIEFNGMDEAIAIANDTIYGLAAGVWTADISKAHKTAKALRSGMVWINHYDGGDMTAPFGGYKQSGNGRDKSMHSFDKYTEIKATWIVL

SEQ ID NO: 37997 - DNA, 1491 bp, Burkholderia vietnamiensis G4
  CDS (1)..(1491): transl_table=11
atgaacaagttgactttggctgactggcaggacaaggcggcgtcgctccggatcgaagggcgcgcattcatcgacggcgcgtcgcgcgacgcgcacggcggcaagacgttcgactgcgtgagcccgatcgacggccgcgtgctcgcgaaggtggctgactgcggcgaagccgacgtgaacgcggcggtcgcggccgcgcggcgtgcgttcgacgccggcgtgtgggccgggctgaacccgcgcgcgcgcaaggccgtgctgctgcgctgggccgcgctgatgcgcacgcatctcgacgaactcgcgctgctcgagacgctcgatgcgggcaagccgatcggcgacacgacgacggtcgacgtgccgggcgccgcgtattgcgtcgagtggttcgccgaagcgatcgacaaggtcggcggcgaagtcgcgccggccgatcatcatctggtgggcctcgtcacgcgcgagccggtcggcgtggtcgcggcggtcgtgccgtggaacttcccgatcctgatggccgcgtggaagttcgggccggcgctcgcggccggcaacagcgtcgtgctgaagccgtcggagaaatcgccgctgaccgcgatccgggtcgcgcagctcgcgtacgaggccggcatcccggccggcgtgttcaacgtcgtgccgggcgcgggcgagccgggcaagctgctcgcgctgcatcgcgacgtcgactgcatcgcgttcaccggttcgaccgcggtgggcaagctgatcatgcagtacgccgcgcagtcgaacctcaagcgcgcgtggctcgagctcggcggcaagtcgccgaacatcgtgctgcccgattgtccggatctcgagcgcgccgcgcaggccgccgcgggcgcgatcttctacaacatgggcgagatgtgcacggccggctcgcgcctgctcgtgcatcgcgacatcaaggacgcgttcatcgcgaagctggtcgcggccgcgcgtgcgtacgtgccgggcaatccgctcgatccgtcggtgtcgatgggcgcgatcgtcgacggcatccagctcgagcgcgtgctcggctacatcgaagcggggcgcagcgagggcacgctggtcaccggcggcgcgcgcgtgcggcaggagacgggcggcttctacgtcgagccgaccgtgttcgaagtgaagcccgacgcgaagatcgcgcgcgaggagatcttcgggccggtgctgtcggtgatcgtgttcgacgatgtcgacgaggccgtgcggatcgcgaacgacaccgaatacgggctcgcggccgccgtctggacgtcggacctgacgaccgcgcacgacgtgtcgcgccggctgcgcgcgggcacggtgtgggtgaactgctacgacgaaggcggcgacatgaacttcccgttcggcggctacaagcagtcgggcaacggccgcgacaagtcgctgcatgcgctcgagaagtacaccgagctgaagtcgacgctgatccggttgcggtga

SEQ ID NO: 37998 - protein, 496 aa, Burkholderia vietnamiensis G4
MNKLTLADWQDKAASLRIEGRAFIDGASRDAHGGKTFDCVSPIDGRVLAKVADCGEADVNAAVAAARRAFDAGVWAGLNPRARKAVLLRWAALMRTHLDELALLETLDAGKPIGDTTTVDVPGAAYCVEWFAEAIDKVGGEVAPADHHLVGLVTREPVGVVAAVVPWNFPILMAAWKFGPALAAGNSVVLKPSEKSPLTAIRVAQLAYEAGIPAGVFNVVPGAGEPGKLLALHRDVDCIAFTGSTAVGKLIMQYAAQSNLKRAWLELGGKSPNIVLPDCPDLERAAQAAAGAIFYNMGEMCTAGSRLLVHRDIKDAFIAKLVAAARAYVPGNPLDPSVSMGAIVDGIQLERVLGYIEAGRSEGTLVTGGARVRQETGGFYVEPTVFEVKPDAKIAREEIFGPVLSVIVFDDVDEAVRIANDTEYGLAAAVWTSDLTTAHDVSRRLRAGTVWVNCYDEGGDMNFPFGGYKQSGNGRDKSLHALEKYTELKSTLIRLR

SEQ ID NO: 37999 - DNA, 1473 bp, Crocosphaera watsonii WH 8501
  CDS (1)..(1473): transl_table=11
atggtcacagcaacacgaccagaaaacaaagttaaaattggcccaacccaactattaatcaataacaaatgggtcgaaagtgcatcaggaaaacgctttgaaaccatcaaccccagcacaggagaagtgatctgtgatgtggcagaagcagatgcagccgacgtagataaagccgtcatcgctgccagaaacgcctttaaccagggggactggcccaaactatcagccactcaacggggacaactgttatacaagttagctgatttaatcgaagctaacatcgaagaattagcccgtctagaaactttagataacggaaaaccctatcaagactccttaaacgcagatttacagcttgtcattgcctgttaccgttactatgcagggtgggctgacaaaattcaaggaaaaactattcccatcaacggaccctatttttgttatactcgtcacgaaccagtgggagtggtgggccaaatcattccttggaactttcccttactaatgcaagcatggaaactcgcccccgctttggctgccgggaacactgttgtcatgaaaaccgccgaacaaacccccctatccgctttgaggttaggagagttgatcctagaagcagggttccctccaggggtagttaacttactgtccggttatggccccacggccggacaagcgatcgcccgtcatcacgatatcgataaagttgcctttacgggatcgacagaagtgggccatttgatcatggaggcggccgcccaaactaacttaaagcgcgttaccttggaattaggtggtaaaagccctaatattgtctttgccgatgctaacctggaacaagccatcgaaggggcgcattttggcttattctttaaccagggtcaatgttgttgtgcaggatctcgtctgtttgtagaagagaagtgttatgacgagtttgtggctaaaagcgttgaacgggcaaaacaacggatagtaggtgatccttttgatgataacaccgctcaaggatcccaagtggatcgcactcagtttgataaggtgatggagtatattgagtcgggacaaagggaaggggcaaaactgttgtgtggtggaggccgtgtgggcgatcggggttactttattgaacccactgtcttcgctgaggtaaaagataatatgaaaattgcccaagaagagattttcggtccggtgatgagtattatcaagttcaaagatatggatgaggtgatccaacggaccaatgatactgtgtatggtttagcggccgctgtttggacccaggatattagtaaaggtcatgcgatcgctaatgctttacgtgcagggactgtctgggttaactgttacgatgtctttgatgcggctgctccctttggtggctttaaacagtcgggtatgggtcgagaattaggggaatatggcttacaacaatacacggaaattaaaacagtaaccgtcaaactttaa

SEQ ID NO: 38000 - protein, 490 aa, Crocosphaera watsonii WH 8501
MVTATRPENKVKIGPTQLLINNKWVESASGKRFETINPSTGEVICDVAEADAADVDKAVIAARNAFNQGDWPKLSATQRGQLLYKLADLIEANIEELARLETLDNGKPYQDSLNADLQLVIACYRYYAGWADKIQGKTIPINGPYFCYTRHEPVGVVGQIIPWNFPLLMQAWKLAPALAAGNTVVMKTAEQTPLSALRLGELILEAGFPPGVVNLLSGYGPTAGQAIARHHDIDKVAFTGSTEVGHLIMEAAAQTNLKRVTLELGGKSPNIVFADANLEQAIEGAHFGLFFNQGQCCCAGSRLFVEEKCYDEFVAKSVERAKQRIVGDPFDDNTAQGSQVDRTQFDKVMEYIESGQREGAKLLCGGGRVGDRGYFIEPTVFAEVKDNMKIAQEEIFGPVMSIIKFKDMDEVIQRTNDTVYGLAAAVWTQDISKGHAIANALRAGTVWVNCYDVFDAAAPFGGFKQSGMGRELGEYGLQQYTEIKTVTVKL

SEQ ID NO: 38001 - DNA, 1452 bp, Roseovarius nubinhibens ISM
  CDS (1)..(1452): transl_table=11
atgacctttcgcgacaaggccttcatcaacggccagtttgtcgccgcccaatcgggcgagaccttcgacagcatcaaccccgccaccggcgaggttctggcacaggtggcgtcctgcgatgccgccgatgtcgaccgcgccgtggccgccgcgcgcacggcctttgacgcgggccactggtcgcgcagcgatcccggccaccgcaaatccgtgctgctcaaactcgccgatctgatccgcgacaacctcgccgaatttgccctgctcgacagtctcgacatgggcaagctggtccaggacgcggtgaccgtggatgcccccggctcggcgcatttcttccaatggtatgccgaagccatcgacaagatctatgacgaggtggccccgaccggccccggcgatctggctctggtgcgccgcgtgccgctcggcgtggtgggggcggtgaccccgtggaacttcccgctcgacatggcgacatggaaggccgccgcagccctcgccgccggcaattccgtggtgctgaaaccggccgaacaatcgcctctctcggcgctgcgcctagcagaactggcgatggaggcgggccttcccgaaggcgtcttcaacgtggtcccgggcatgggcgccacggcgggccgcgcgctcgggctgcacaatgatgtcgattgccttgccttcaccggctccaccgccgtcggcaaaatgttcatgcaatattcgggccagtccaacctcaaacccgtctggcccgaaaccggcggcaagagccccaatctcatcttcgccgattgcgccgatctcgaccgcgcggcggacatggcggcctttggcatcttcttcaaccaagggcaggtctgctcggccaattctcggctctatgtcgaacgcgccatccatgccgaattcgtcgagcgcatgatcgcccgcgccgaggccaccccgccgggcgatccgctcgacccggcgtcgaaactcggcgccatcgtcgatgaaaaacagacccgttccatcgaggccgccatcgccgcaggccgcaacagcgccaatctcgtcgcaggcggcaaccgggtgacgcttaacggcaagggctgtttcatcgagcccacgatctttgacgatgtgcgccacgatgatgcgctggcgcgcgacgaaatctttggcccggtgctgtcgatcatccccttcgacaccgaggccgaagccgtcgccatggccaatgacagcatctatggcctcgccgcctcggtctggaccgacaatctgagccgcgcccaccgcgtttccgaggcgatccacgccggaaccgtttcggtcaacaccgtcgatgcgctctcggcccagaccccctttggcgggatgaagcaatcgggctttggccgggatctgtcgctgcacagcttcgacaaatataccgcgctgaaaaccacctggatcaagtatcaggcttga

SEQ ID NO: 38002 - protein, 483 aa, Roseovarius nubinhibens ISM
MTFRDKAFINGQFVAAQSGETFDSINPATGEVLAQVASCDAADVDRAVAAARTAFDAGHWSRSDPGHRKSVLLKLADLIRDNLAEFALLDSLDMGKLVQDAVTVDAPGSAHFFQWYAEAIDKIYDEVAPTGPGDLALVRRVPLGVVGAVTPWNFPLDMATWKAAAALAAGNSVVLKPAEQSPLSALRLAELAMEAGLPEGVFNVVPGMGATAGRALGLHNDVDCLAFTGSTAVGKMFMQYSGQSNLKPVWPETGGKSPNLIFADCADLDRAADMAAFGIFFNQGQVCSANSRLYVERAIHAEFVERMIARAEATPPGDPLDPASKLGAIVDEKQTRSIEAAIAAGRNSANLVAGGNRVTLNGKGCFIEPTIFDDVRHDDALARDEIFGPVLSIIPFDTEAEAVAMANDSIYGLAASVWTDNLSRAHRVSEAIHAGTVSVNTVDALSAQTPFGGMKQSGFGRDLSLHSFDKYTALKTTWIKYQA

SEQ ID NO: 38003 - DNA, 1482 bp, Xanthobacter autotrophicus Py2
  CDS (1)..(1482): transl_table=11
atggcggcggcggaacggacggcggaccattacccttccttccgcacgcaggcgctgatcgacggcgtgttcgcgccggccgcctcgggccgcaccttcgatgccgtcaatccggccaccggcaaggtcctcgcgcaagtggcggcctgcgacagcgccgatgtggaccgcgccgtgaaggccgcccgtgccgcgttcgaggatcgccgctgggcggggctgcggccggtggagaggaagcgcatcctccagcgcttcgccgagctgatccgcgcccatcgcgacgagctggcgctcaccgaaaccctcaacatgggcaagcccatcgccgatgcgcgctccatcgacgtgcgtgcggcggcggactgcttcgcctattacggggagtgctgcgacaaggtctatggcgaggtggcgcccaccaccgccgataacctcgccctcgtgctgcgcgagcccttgggcgtggtgggctgcgtgacgccgtggaacttccccatgatcatggctgcctggaaggtggctcccgctctggcaatgggcaattccgtggtgctgaagccggcggaggaaagccccctcaccgcgctgcgcctcggcgagctggcgctggaggcgggggtgccggccggggtgttcaacgtggtgccgggcctcggcgtggaggccggcaaggcgctgggcctgcacatggacgtggacgccatcgccttcaccggctccaccgaggtggggcgctacttcctgcgttattcctccgacagcaacctgaagcgggtgtttcttgagctgggcggcaagaccgccttcgtggtggcccacgacgtgcccgacctcgacgaggtggcgcaggcggtggcctccggcatcttcttcaatcagggcgagatgtgcacggcggcctcgcggttgctggtggacaatcgcatccgcgaggaccttgtcgcccgcgtggcggcgctggcgccgcgctggatgccgggcgatccgcaggaccccgcggcccgcgccggcgcggtggtgagcttcgagcatcagggacggattctttccgccatcgaggagggcgttgcctccggagcgctgctggtcaccggcggcacggcggtgcggcaggagaccggaggcgccttcgtggcgcccaccgtgttcgatggcgtggtaccctcatccgcgctggcgcagaaggagatcttcggccccgtgctctcggtgatcggcttcgacgggctggaggaggcggtggcgatcgccaacggcaccgtctatggcctcggcgcggcggtgtggagcggcgatctttccgccgcgcacaaggtcgcccggcgtttcaaggccggcatcgtctatgtgaactgcttcgatgccgacgacatcaccaccccgttcggcggcgtgaagcagtccggcttcgggcgcgacaagtccctgcacgcgctggataagtattgcgatctgaagacggtatggacgcggctttag

SEQ ID NO: 38004 - protein, 493 aa, Xanthobacter autotrophicus Py2
MAAAERTADHYPSFRTQALIDGVFAPAASGRTFDAVNPATGKVLAQVAACDSADVDRAVKAARAAFEDRRWAGLRPVERKRILQRFAELIRAHRDELALTETLNMGKPIADARSIDVRAAADCFAYYGECCDKVYGEVAPTTADNLALVLREPLGVVGCVTPWNFPMIMAAWKVAPALAMGNSVVLKPAEESPLTALRLGELALEAGVPAGVFNVVPGLGVEAGKALGLHMDVDAIAFTGSTEVGRYFLRYSSDSNLKRVFLELGGKTAFVVAHDVPDLDEVAQAVASGIFFNQGEMCTAASRLLVDNRIREDLVARVAALAPRWMPGDPQDPAARAGAVVSFEHQGRILSAIEEGVASGALLVTGGTAVRQETGGAFVAPTVFDGVVPSSALAQKEIFGPVLSVIGFDGLEEAVAIANGTVYGLGAAVWSGDLSAAHKVARRFKAGIVYVNCFDADDITTPFGGVKQSGFGRDKSLHALDKYCDLKTVWTRL

SEQ ID NO: 38005 - DNA, 1497 bp, Oceanobacter sp. RED65
  CDS (1)..(1497): transl_table=11
atgtccagtcagcgcactttcgagtattggaaagaacaagcagcaagcctttctattaatggtcaggcctttattaatggtcagtcggtggatgcaaaaagtggtgagacttttgaaaccattagccccatagacggccgtgtactagcaaatgttgcaagttgtgatgaagctgatgtgaatgaagcggtgaaacttgcccgagcagcctttgatagtggggtttggtcgcaaaaagcgccagcggagcgcaagcaagtattgctaaagtttgctgatctaatcgaagctaaccaagaagagctggctttattggaaactctcgatatgggcaagccgattagtgacgcactgtcagccgacattggtggtactttgcgagcggtacgttggacagctgaggccgtggataaagtttacgatgaaattgcgccaacgtcagaaaatgaaatcggtatgatcacccgcgaacccgttggtgtggttgcggccattgtaccttggaactttccaatgatcatggcctcttggaagttttcccctgcgctggcaatggggaattcggttattctaaaaccttcagagaaatccccgcttaccgctattaagcttggtcaattagccaaagaagcaggcattcccgatggtgtgttcaatattcttccgggctttggtcatacggctgggaaggcgttagccttgcacatggatgtcgataccctggtattcacgggatcaaccaatgttgctaaacagctaatgatttacgctggtcaatcgaacatgaaacgtatttggtcggaagctggtggtaagtcaccgcatgtggtgttcgcagacgcgccagacttagacctagcggcggatgctgctgctgctgccatttgttttaaccaaggtgaagtttgtacggcgggttctcgtctattggttgaagacagcatttatgacgagtttatggaaaaggttcgtcagtctctaggtaaatggaaagcaggtaatccgctggatccagaaaccaatgtcggtgctattgtcgatgaagatcaattgaatcgtgtgctttcttttattgaaaaaggtaaagaagagggtgcaaacctaactgtaggcggtaatcgtgttgaactagccgaaggcggttatttcttagagccaactattttcgaagatgcacagccacacatgagcatcgttaaggaagaaatctttggccctgtactttcggtgattcgttttaaaaccgatgaagaagcattgcagctatgtaatgacagtatttatggtttagcttctggagtgtggacgaataaccttactcgagcccatcgctttgcaaaaggtatcaaagctggcatggtctggatcaatgagtacgatcagggcgatatgacggcaccatttggtggctacaagcaaagtggtaatggtcgagataaatcactgcatgcgtttgagaaatacagtgaagtgaaagcgacttggattaagatttaa

SEQ ID NO: 38006 - protein, 498 aa, Oceanobacter sp. RED65
MSSQRTFEYWKEQAASLSINGQAFINGQSVDAKSGETFETISPIDGRVLANVASCDEADVNEAVKLARAAFDSGVWSQKAPAERKQVLLKFADLIEANQEELALLETLDMGKPISDALSADIGGTLRAVRWTAEAVDKVYDEIAPTSENEIGMITREPVGVVAAIVPWNFPMIMASWKFSPALAMGNSVILKPSEKSPLTAIKLGQLAKEAGIPDGVFNILPGFGHTAGKALALHMDVDTLVFTGSTNVAKQLMIYAGQSNMKRIWSEAGGKSPHVVFADAPDLDLAADAAAAAICFNQGEVCTAGSRLLVEDSIYDEFMEKVRQSLGKWKAGNPLDPETNVGAIVDEDQLNRVLSFIEKGKEEGANLTVGGNRVELAEGGYFLEPTIFEDAQPHMSIVKEEIFGPVLSVIRFKTDEEALQLCNDSIYGLASGVWTNNLTRAHRFAKGIKAGMVWINEYDQGDMTAPFGGYKQSGNGRDKSLHAFEKYSEVKATWIKI

SEQ ID NO: 38007 - DNA, 1494 bp, Pseudomonas putida GB-1
  CDS (1)..(1494): transl_table=11
atgtacaccctcgaattctggcaacaacgcgcctcggacctgtacctgccgtcccaggcgttgatcaacggcaaacccgtcaacgcacaggacggcgccaccttcgccgccatcaaccccgccaccaacaaggtattggcacaggtggctgcctgcggccaaaccgaggtcgacctggctgtcgccagtgcccgccgagctttcgagcaaggcccgtggccacgcatggcccctggggagcgcaagaaggtgctgctgcgcttggccgagctgatcatggcccatcgcgaagaactggccttgctggactcgctgaacatgggcaagccggtgatggatgcctacaacatcgacgtgccgggctcggcacatgtgttcgcctggtacggtgaggcgctggacaagctttacgaccaggtggcgcccacggcgccgaatgcgctggccaccatcacccgcgaagcactgggtgtggtcgcggccgtggtgccgtggaacttccccctcgacatggccgcctggaaacttgccccggcgttggccgccggcaacagcgtggtgctcaaacccgccgaacagtcaccgttctcggccttgcgcctggcccaactggcgctggaagcgggcttgccggaaggcgtgctgaacgtggtgccggggctgggcgagcaggccgggcaggcgctgggcctgcacccggatgtggactgcctggtgttcaccggctctacccaggtgggcaagtacttcatgcagtattcggcgcagtccaacctcaagcaggtgtggctggagtgcggcggcaagagccccaacctggtgttcgaaaactgtcaggacctggacctggctgcggaaaaggccgccttcggcattttcttcaaccagggtgaggtgtgctcggccaactcgcggctgtacgtgcagcgcgccatccatgatgaatttgtcgagcgtctgcaggccaaggcccgccagtggttgccgggtaacccgctgaacccggcgagccgcgccggggccattgtcgatgccgagcagactgggcgcatcgaggccgccattgcgcgtgccgggcaagagggcgcgcggttggtgtgtggtggccggcgcctgaccctcgacggttcggacaactacatcgagccgactatctttgccggtgtcgagggccgcatgaagctggcgcgcgaagaggtgttcgggcccgtgctggccgtcagcgccttcgacacggaagaagaagcggtgcacctggccaacgacagcatctatggcctggcggcctcggtgtggagcgatgacttcaaccaggtacaccgggtcgcgcgggcgttgaaggccggcaccgtgtcggtgaacacggttgatgcactggatgtgacggtgccgttcggcgggggcaagcagtcgggctttggccgcgacctgtcgctgcattcgttcgacaagtattcacaactcaagaccacctggtaccagttgcgcgcctaa

SEQ ID NO: 38008 - protein, 497 aa, Pseudomonas putida GB-1
MYTLEFWQQRASDLYLPSQALINGKPVNAQDGATFAAINPATNKVLAQVAACGQTEVDLAVASARRAFEQGPWPRMAPGERKKVLLRLAELIMAHREELALLDSLNMGKPVMDAYNIDVPGSAHVFAWYGEALDKLYDQVAPTAPNALATITREALGVVAAVVPWNFPLDMAAWKLAPALAAGNSVVLKPAEQSPFSALRLAQLALEAGLPEGVLNVVPGLGEQAGQALGLHPDVDCLVFTGSTQVGKYFMQYSAQSNLKQVWLECGGKSPNLVFENCQDLDLAAEKAAFGIFFNQGEVCSANSRLYVQRAIHDEFVERLQAKARQWLPGNPLNPASRAGAIVDAEQTGRIEAAIARAGQEGARLVCGGRRLTLDGSDNYIEPTIFAGVEGRMKLAREEVFGPVLAVSAFDTEEEAVHLANDSIYGLAASVWSDDFNQVHRVARALKAGTVSVNTVDALDVTVPFGGGKQSGFGRDLSLHSFDKYSQLKTTWYQLRA

SEQ ID NO: 38009 - DNA, 1509 bp, Pseudomonas putida GB-1
  CDS (1)..(1509): transl_table=11
gtggacaacaaggttaaagcctacttgcaggcctttggcgtttccgaggcgacccagcgttttctcagcaagccgcagcgcatgttcatcggcggtgcctggctggaggccagcgacggaggtaccgccgaggtcatcgagccctccaccgaaggggtactgacacgcatccccatgggcaccgcagatgacctcgaccgtgccgtgtgcgccgcgcgcgcgcagttcgacggtggtgcctggcgccagctgaagccgctggagcgcgagcgcctgattcatcgcctggccgacttgatagaaacccacggcgacgaattggcgcagatcgaagccatcgacatgggcaagtcggtggtgcaggcgcgcgcagtcgacatccagggcacggtcgataccctgcgctatttcgccggctgggccagcaagatccacggccgcacggtcgagccttcgctgcctggcaattacctggcgtatacccgcaaggaggcggtgggggtggtcggcgccatcgtgccgtggaacttccccctgcagaccatggcctggaaactgggcgcggcgctggccaccggctgcaccgtggtggtcaaaccggcggagctgacctcgctgtcggcactgcgctttgccgagctggtacaggcggcaggtattcccgatggtgtggtgaacatcgtgaccgggcgcggcagcgtggtcggccaggcgatgtccagccacccaggcatcgacaagctgagctttaccggctctaccccagtggggtgtgcggtgggcaagacggcgatggaccagatgaagcgccttaccctcgaactgggtggcaagtcaccggtgatcgtgtttgccgacgcggacatcgaggcggcggcgcaagccgtggccaatggggtgttcttcaactctgggcaggtgtgtgatgccggtacccgtgcgtatgtagagcgcagtgtctatccggcatttctcgacgcgttggcacgctacacggcgacgttgaagattgccccagggcttgaccccgattgcttcatcagcccgatggtgtcgcagcaacagcagcggcgcgtgctggactatatcgccctgggtaaggccgaaggcgcgcaggtgcactatggtggcgagctgctcgacggccccggcttctacgtgcagccgacgatcttcgcccattgccgcaatgacatgcgcatcgtcagcgaggagatcttcggccctgtgctggtcactcagccgttcgacagccaggaggaggcactgcagcttgccaacgactcgctgtttggcctggcagcggcgatctactccaacgacctgggcaaggtgcatgggctgatcccgcagcttcgcgccggcaccgtatacgtcaatgcccacagtaccctcgacccggccatgccgttcggtggctacaaacagtccggctacggcaaggacctgggcgcggaacaactggagtttctgctggagaccaaggcggtgtggatcaccttgccctga

SEQ ID NO: 38010 - protein, 502 aa, Pseudomonas putida GB-1
MDNKVKAYLQAFGVSEATQRFLSKPQRMFIGGAWLEASDGGTAEVIEPSTEGVLTRIPMGTADDLDRAVCAARAQFDGGAWRQLKPLERERLIHRLADLIETHGDELAQIEAIDMGKSVVQARAVDIQGTVDTLRYFAGWASKIHGRTVEPSLPGNYLAYTRKEAVGVVGAIVPWNFPLQTMAWKLGAALATGCTVVVKPAELTSLSALRFAELVQAAGIPDGVVNIVTGRGSVVGQAMSSHPGIDKLSFTGSTPVGCAVGKTAMDQMKRLTLELGGKSPVIVFADADIEAAAQAVANGVFFNSGQVCDAGTRAYVERSVYPAFLDALARYTATLKIAPGLDPDCFISPMVSQQQQRRVLDYIALGKAEGAQVHYGGELLDGPGFYVQPTIFAHCRNDMRIVSEEIFGPVLVTQPFDSQEEALQLANDSLFGLAAAIYSNDLGKVHGLIPQLRAGTVYVNAHSTLDPAMPFGGYKQSGYGKDLGAEQLEFLLETKAVWITLP

SEQ ID NO: 38011 - DNA, 1815 bp, Pseudomonas putida GB-1
  CDS (1)..(1815): transl_table=11
atgtgctgtaaaagcgttgcctttcaaccttttaggcagtttccggggcttggccagcagcacggatggccaattgcagcgtgccatttcgcgacagggtgtttcaggttgagacaacacctgacatgccggctgctggccctgagagccgctgtttcaccaccgtctcacaccgtctcattgtgcaacagcgcacctttgcaaaccgaaccttgcgtcacggcaaaacccagtcagctcaaggccttgccgccatctgcccaggttggcacggccattgcgccggtgcccgccacatccaatgacaagaggcaccgtcccatgctttccgaactgcccatcctgcccgccacccgcgcctttctcgaacgcaagctaaagatgcgcatcggcgccgagtggcaggacgccgccagcggtcgcaccctgtcgttccgcaacccggccaccggcgaagtgctgggtgaagtgcccgccgccgaggccgaggatgtcgaccgcgccgtgcgcgccgcccgtcaagccttcgatgattcgccctggagccgcctgcgtccgcgcgagcggcaaaacctgttgtggcgcctggccgacctgatggagcgcgacgcccgccagctggccgaactggaatgcctgaacaacggcaagagcgccgccgtcgcccaggtgatggacgtgcaactggccatcgacttcctgcgctacatggccggttgggccaccaagatcgagggtagcaccgtcgaagcctccatgccgctgatgcccaacgaccagttccatggtttcgtgcgccgcgaggcggtgggtgtggtcggcgccatcgtcgcctggaacttcccgctgctgctggcctgctggaaactcggcccagccctggccaccggttgcaccgtggtgctcaagcccgccgatgaaaccccactgagcgtgctcaagctggcagaactggtagacgaagccggctacccggcaggcgttttcaatgtaatcaccggtacaggcctgaacgcgggcgctgcgctcagtcgccaccctggggtggacaagctgaccttcaccggctcgaccgaagtcggcaagctgatcggcaaggcggccatggacaacatgacccgcgtcaccctggagctgggcggcaagtcgccgaccatcgtcatgcccgacgccaacctgcaggaagccgcagccggtgcggccacggcaatcttcttcaaccagggccaggtgtgctgcgcgggttcgcggctgtatgtgcaccgcaagcacttcgacaacgtggtggccgacatcgccggcatcgccaatggcatgaaactgggcaacgggctggacccagcggtgcagatgggcccgctgatctcggccaagcagcaggaccgcgtcaccggctacatcgagcttggccgcgaactgggcgcgaccatcgcctgtggcggtgaaggcttcgggccgggttacttcgtcaagccgacggtgattgtcgatgtcgaccagcgccaccgcctggtacaagaagaaatcttcgggccggtgctggtggcaatgccgttcgatgacatcgacgaagtgatcggcatggccaacgacaacccctatggcctgggcgcaagcatctggtccaacgacctggccgccgtgcaccgcatgatcccgcgcatcaagtcgggttcggtttgggtcaactgccacagcgcactggacccggcactgccgttcggcggctacaagatgtctggcgttggtcgcgagatgggcgcagcagccatcgagcattacaccgagctcaaatcggtgctgatcaagctctga

SEQ ID NO: 38012 - protein, 604 aa, Pseudomonas putida GB-1
MCCKSVAFQPFRQFPGLGQQHGWPIAACHFATGCFRLRQHLTCRLLALRAAVSPPSHTVSLCNSAPLQTEPCVTAKPSQLKALPPSAQVGTAIAPVPATSNDKRHRPMLSELPILPATRAFLERKLKMRIGAEWQDAASGRTLSFRNPATGEVLGEVPAAEAEDVDRAVRAARQAFDDSPWSRLRPRERQNLLWRLADLMERDARQLAELECLNNGKSAAVAQVMDVQLAIDFLRYMAGWATKIEGSTVEASMPLMPNDQFHGFVRREAVGVVGAIVAWNFPLLLACWKLGPALATGCTVVLKPADETPLSVLKLAELVDEAGYPAGVFNVITGTGLNAGAALSRHPGVDKLTFTGSTEVGKLIGKAAMDNMTRVTLELGGKSPTIVMPDANLQEAAAGAATAIFFNQGQVCCAGSRLYVHRKHFDNVVADIAGIANGMKLGNGLDPAVQMGPLISAKQQDRVTGYIELGRELGATIACGGEGFGPGYFVKPTVIVDVDQRHRLVQEEIFGPVLVAMPFDDIDEVIGMANDNPYGLGASIWSNDLAAVHRMIPRIKSGSVWVNCHSALDPALPFGGYKMSGVGREMGAAAIEHYTELKSVLIKL

SEQ ID NO: 38013 - DNA, 1581 bp, Pseudomonas putida GB-1
  CDS (1)..(1581): transl_table=11
gtgtgcgctcgtcgcccggccagaattctgacaacgcctgtgagtcctcagtgcggcgttgcacctaaacaagaggaggagtttcgtatgaccaccctgacccgtgcggactgggaacaacgtgcccagcaactgaagatcgaaggccgtgccttcatcaacggcgaatacaccgatgccgcatccggtgaaaccttcgagtgcctgagcccggtcgacggacgcttcctggccaaggttgccagctgcgacctggccgatgccaatcgcgctgtggaaaacgcccgtgccaccttcaactccggcgtctggtcgcaactggctccggccaagcgcaaggccaagctgattcgcttcgccgacctgctgcgcaagaacgtcgaagagctggcgctgctggaaaccctggacatgggcaagccgatcggcgactcctccagcatcgacatcccaggtgcggcccaagccatccactggactgccgaagccatcgacaaggtctacgacgaagtcgccccgaccccgcacgaccagcttggcctggttacccgcgaaccggtgggcgtggtgggtgccatcgtgccgtggaacttcccgctgctgatggcttgctggaaactcggccctgcgctggccaccggtaactcggtggtgctcaagccgtccgaaaaatcgccgctgacggccattcgcatcgcccagctggccatcgaggccggcatcccggctggtgtgctgaacgtgctgccaggttacggccacaccgtgggcaaggctttggccctgcacatggacgtcgacaccctggtgttcaccggttccaccaagatcgccaagcagttgatggtttacgcgggcgaatcgaacatgaagcgcatctggctggaagccggcggcaagagcccgaacatcgtcttcgccgatgcgccggacctgcaagctgccgctgaggccgctgccagcgccatcgccttcaaccaaggcgaagtgtgcaccgcaggctcgcgtctgctggtcgagcgttcgatcaaggacaaattcctgccgatggtggtcgaggccctcaaaggctggaagccaggcaacccgctggacccacagaccacggtcggtgccctggtcgacacccagcagatgaacaccgtgctgtcgtacatcgaggctggccaccaggacggcgccaagctgctggccggcggcaagcgcaccctggaagagactggcggcacctacgtcgagccgaccatcttcgacggcgtgaccaacgccatgcgcattgcccaggaagaaatctttggccctgtgctgtcggtgatcgccttcgacaccgccgaagaagccatcgccattgccaacgacacgccgtatggcctggcggctggtatctggacctcggacatttccaaggcccacaagaccgcccgtgccgtgcgcgctggcagcgtctgggtcaaccagtacgacggcggcgatatgaccgcgccgttcggtggcttcaaacagtcgggtaacggccgtgacaagtcgctgcatgcgctggagaaatacaccgagctgaaggcgacctggatcaagctgtaa

SEQ ID NO: 38014 - protein, 526 aa, Pseudomonas putida GB-1
MCARRPARILTTPVSPQCGVAPKQEEEFRMTTLTRADWEQRAQQLKIEGRAFINGEYTDAASGETFECLSPVDGRFLAKVASCDLADANRAVENARATFNSGVWSQLAPAKRKAKLIRFADLLRKNVEELALLETLDMGKPIGDSSSIDIPGAAQAIHWTAEAIDKVYDEVAPTPHDQLGLVTREPVGVVGAIVPWNFPLLMACWKLGPALATGNSVVLKPSEKSPLTAIRIAQLAIEAGIPAGVLNVLPGYGHTVGKALALHMDVDTLVFTGSTKIAKQLMVYAGESNMKRIWLEAGGKSPNIVFADAPDLQAAAEAAASAIAFNQGEVCTAGSRLLVERSIKDKFLPMVVEALKGWKPGNPLDPQTTVGALVDTQQMNTVLSYIEAGHQDGAKLLAGGKRTLEETGGTYVEPTIFDGVTNAMRIAQEEIFGPVLSVIAFDTAEEAIAIANDTPYGLAAGIWTSDISKAHKTARAVRAGSVWVNQYDGGDMTAPFGGFKQSGNGRDKSLHALEKYTELKATWIKL

SEQ ID NO: 38015 - DNA, 1491 bp, Pseudomonas putida GB-1
  CDS (1)..(1491): transl_table=11
atgccgcaactcagagatgccgtctattggcgtggacgaagcaccgacctggtggtggaggcgcgtgcgttcatcgccggtgcctatgtgggggccagcgaaggcgagacgtttgctgtgtgcagcccgattgatggccgcgagctggcgcaggttgcgttgtgccgtgggactgacgtagaacgcgccgtggctgccgcccgcggggcattcgagcgcggtggctgggccgacctggtaccacgccagcgcaaggccgttctgctgcgctgggctgcgttgatgagggagcacgccgaggagctggcgctgctggaaaccctggacactggcaaacccatcgccgataccacggcggtggatattcccagttccatctactgcctggaatggttcgccgagctggtcgacaaggtcaccggcgaggtgcccgcctgcgatccgcagttcctcggcaccgtgacccgcgagccggtcggcgtggtggcggcaatagtgccctggaactacccgctgctgatggcgacctggaagttcgccccagccctggccgccggcaacagcctaatcctcaagccttcggagaagagcccgctgagcgccttgcgcattgccggccttgcccgcgcggcgggtattcccgagggcgttttcaacgtggtgccgggcgatggcgagaccggtcgcctgctcagcctgcacccgcagatcgactgcctggccttcaccggctccggcgctgttggccggcagatcagccgcaatgcggcggacagcaatctcaagcgcgtctggctggagctgggcggcaaatcggcgaacatcgtcatggccgactgcccggacctgcgccgtgcggctgaggctgccgcggctgcggtgttcagcaacatgggccaggtgtgcagcgcaggttcgcgcctgttggtgcaacgccctatcgccggggccttcatcgccgaactgctggaggccgcgcgcgcctacctgcccggcgacccgttggacccgaccagcgtcaccggcagcctgatcgatgaagcccagtaccagcgtgtacgccaatacatcgagctgggcaagcgtgaagcgcgcctgctgctggggggcgaggactgcgcggcggtccccggcggccactatctgcaaccgaccatcttcgccactgacgccacctcgcgcatcgcccgcgaagaggtcttcgggccggtgctgagcgtcatcgaattcgatgggctggacgacgccatcgctgtcgccaatgccagcgaatacggcctggcggcggccttctggtcggccgacctcggcgccatccgccgtgcctcgcgacgcctgcgtgccggcaccgtgtgggtgaactgctacgacgagctgctcgacatgaacttcccgttcggtggcttcaaggagtccggcaatggccgggacaactccgtgcacgccctggacaagtacagcgaactcaagtcgaccatcatccgctgctga

SEQ ID NO: 38016 - protein, 496 aa, Pseudomonas putida GB-1
MPQLRDAVYWRGRSTDLVVEARAFIAGAYVGASEGETFAVCSPIDGRELAQVALCRGTDVERAVAAARGAFERGGWADLVPRQRKAVLLRWAALMREHAEELALLETLDTGKPIADTTAVDIPSSIYCLEWFAELVDKVTGEVPACDPQFLGTVTREPVGVVAAIVPWNYPLLMATWKFAPALAAGNSLILKPSEKSPLSALRIAGLARAAGIPEGVFNVVPGDGETGRLLSLHPQIDCLAFTGSGAVGRQISRNAADSNLKRVWLELGGKSANIVMADCPDLRRAAEAAAAAVFSNMGQVCSAGSRLLVQRPIAGAFIAELLEAARAYLPGDPLDPTSVTGSLIDEAQYQRVRQYIELGKREARLLLGGEDCAAVPGGHYLQPTIFATDATSRIAREEVFGPVLSVIEFDGLDDAIAVANASEYGLAAAFWSADLGAIRRASRRLRAGTVWVNCYDELLDMNFPFGGFKESGNGRDNSVHALDKYSELKSTIIRC

SEQ ID NO: 38017 - DNA, 1473 bp, Dermatophagoides farinae
  CDS (1)..(1473)
atggcccaagtggaagtaaaatatactcagattttcatcaacaatgaatggcacgattcgattagtggtaaaacattcgaaacaatcaatccatttactgaggaaaaattggccaatgtacaagagggtgataaagccgatatagatcgtgctgttgttgcggctgttgatgcatttcgttttgattcaccatggcgacagatggatgcatcacaacgtggtcatctgctatatcgtcttgctgatcttattgaaagagatcaagattatattgctagcctggaaagtatggataatggtaaaccaaaaacaatggcattgttcgatgttgatttggccatcaaagtttttcgttattatgccggttatgctgataaaattcatggtaaaaccattccagcagatggcaaagtgttcgcttttacacgaattgaacctgttggtatttgtggtcaaatcgttccgtggaattttccgtttttaatggctagttggaaatttggaccagcattgtgtgccggaaataccgtcgtattgaaaccagctgaacagacaccgttaagcgctctatatttggccagtttaactaaagaaggtggatttccacccggtgtggtcaatgtggtacctggtttcggtgaaacagccggtgcagctttagttgataatccaaaagtcgataaaattgctttcactggttcaacggaaatcggtaaattaatcatgcgaaatggttcacattcaatgaaacgaatcacactggaattgggtggtaaatcaccattggtagtaactgaaaatgttgaagatattgcacaagctgcacgtacagcacaagattcatgtttcctgaatatgggccaatgttgttgtgccggtacccgaacatttgttcatgaatcaatctatgatgaatttgttaaacattcagtggaatattgtcagtcacatgtatttggcaatccattcgattcaaaaactgcattcggtccacaagtggataaaatccagatgaatcgaatacttgaaatgattgaatctggtaaacaggaaggtgcccgttgtgttgccggtggtaatcgtatggataaacgtggatatttcgttgaaccaactgtttttgccgatgttaccgatgggatgcgaattgcacgtgaagaaatttttggtccagtacaacagattcttaaatataaaacactggatgaagttattgaacgttgtaatgatacaaattatggtctaggatcggctatactcaccaatgatattaatgaagcaatgaaattttcacgtagtattcgtgctggttccgtttggatcaatataccatacatgataccggttagtgtacaaacaccattcggtggtttcaaagaaagtggtgttggccgcgaacttggtgaagatggtcttcgtggttatggtgaaattaaaactgttgtcattatggatcgtgaaaagaaaatgtaa

SEQ ID NO: 38018 - protein, 490 aa, Dermatophagoides farinae
MAQVEVKYTQIFINNEWHDSISGKTFETINPFTEEKLANVQEGDKADIDRAVVAAVDAFRFDSPWRQMDASQRGHLLYRLADLIERDQDYIASLESMDNGKPKTMALFDVDLAIKVFRYYAGYADKIHGKTIPADGKVFAFTRIEPVGICGQIVPWNFPFLMASWKFGPALCAGNTVVLKPAEQTPLSALYLASLTKEGGFPPGVVNVVPGFGETAGAALVDNPKVDKIAFTGSTEIGKLIMRNGSHSMKRITLELGGKSPLVVTENVEDIAQAARTAQDSCFLNMGQCCCAGTRTFVHESIYDEFVKHSVEYCQSHVFGNPFDSKTAFGPQVDKIQMNRILEMIESGKQEGARCVAGGNRMDKRGYFVEPTVFADVTDGMRIAREEIFGPVQQILKYKTLDEVIERCNDTNYGLGSAILTNDINEAMKFSRSIRAGSVWINIPYMIPVSVQTPFGGFKESGVGRELGEDGLRGYGEIKTVVIMDREKKM

SEQ ID NO: 38019 - DNA, 1509 bp, Aspergillus niger
  CDS (1)..(1509)
atgagcgatctgtccgtgcagctgacagccccgaatgggcgcacatacgcccagccggttggtttgttcatcaacaatgaatttgtcgcttccaagtccggcgagaagttcgccaccatcaacccttcaaatgaagcggaaatcacctcggtctatgctgcgggtgaagaagacgtggatattgctgtgaaggctgcccggaaagccctcaaccacccgtcatggaagttgttgcctccgactgaacggggcaccctgatgttgaagctggccgacttggtcgagcagcacaaggagacgcttgccaccattgaaacgtgggacaatggcaagccatactccgtttcgttgaacgatgacctgggagaggttgttggctgcctccggtactatgctggatacgccgacaaggtccatggtcagactattagcaccaccccggccaagtttgcctatactcttcgtcagccaattggtgtcgtgggtcagattatcccctggaacttccctctcgcgatggctgcctggaagttgggtcctgccttggcctgcggaaacaccgtggttctgaaaccggctgagcagactccgctcagtgttctctatcttgccaacctcatcaaggaggccggtttcccgccaggtgttgtcaacatcctgaacggccttggacgcgtagctggaagtgcgctcgtgacccaccccggggtggacaaggttgccttcacaggttcgacgttgactggccgcgaagttatgaagttggctgcaggcaccctgaagaacattacgctcgagacaggtggcaaatctcccctggtcgtcttcagtgatgccgatatcgaccaggctgccaagtgggcgcatgcgggtatcatgtacaaccaaggacaggtttgcaccgccacctctcgtatcctggtgcacgagtccgtctatgacaagttcgtggcgctcttcaaggaagccgtggccaacaccagcaaggtgggcgatccctttgccgacgacaccttccagggtccccaggtcaccaaggcccaatacgaccgcgtgctctcctatatcgaagctggaaagtccgaaggagcgaccctggtggccggtggcgagccgttcaagaacgtcggcgacggcaagggtttctttatcgcgcccaccatcttcaccaacgtcaaggataacatgcggatctaccgggaggaggttttcggaccatttgtcgtgatttccagcttctcagaggaggacgaggctgtgagacgggccaacgatacgacctatggactgggcgctgccctgttcaccaaggacattgagcgtgcacaccgggttgcgtcggagatcgaagcgggcatggtctggatcaacagcagcaacgacagcgatatccgggtgcctttcgggggtgtgaagcagagcggaattgggcgcgaacttggcgaggccggtctggaggcctactcacagatcaaagcggtccatgtcaacttgggaacgaagctgtag

SEQ ID NO: 38020 - protein, 502 aa, Aspergillus niger
MSDLSVQLTAPNGRTYAQPVGLFINNEFVASKSGEKFATINPSNEAEITSVYAAGEEDVDIAVKAARKALNHPSWKLLPPTERGTLMLKLADLVEQHKETLATIETWDNGKPYSVSLNDDLGEVVGCLRYYAGYADKVHGQTISTTPAKFAYTLRQPIGVVGQIIPWNFPLAMAAWKLGPALACGNTVVLKPAEQTPLSVLYLANLIKEAGFPPGVVNILNGLGRVAGSALVTHPGVDKVAFTGSTLTGREVMKLAAGTLKNITLETGGKSPLVVFSDADIDQAAKWAHAGIMYNQGQVCTATSRILVHESVYDKFVALFKEAVANTSKVGDPFADDTFQGPQVTKAQYDRVLSYIEAGKSEGATLVAGGEPFKNVGDGKGFFIAPTIFTNVKDNMRIYREEVFGPFVVISSFSEEDEAVRRANDTTYGLGAALFTKDIERAHRVASEIEAGMVWINSSNDSDIRVPFGGVKQSGIGRELGEAGLEAYSQIKAVHVNLGTKL

SEQ ID NO: 38021 - DNA, 1560 bp, Bacillus amyloliquefaciens
  CDS (1)..(1560): transl_table=11
atgcgcttacttcgcgcggacatcaagatgctcaaaacagaccataaaaaaatttcgggaggtttgttacgaatgagttctttaacgatgcagatcacaaaaaggctggaaacatttttacagggtacgaagaaactttatattgacggaaaatttgttccgagcacttcaggatcaacatttgtcacaccgaatccggcaaccggagaaacgctgatgacgctttacgaggcacagtcagaagacattgacagtgcagtgaaagcggcacgcaaagcctttgatcacggcgaatggcgcactatgccggccgcttccagaagcaggctgatgtataagcttgccgatttaatggaagagcacaaaacggaactcgcgcagcttgaaacacttgataacggaaaaccgattaatgaaacaacaaatggggatatcccgctcgcaattgagcatatgcgttattatgccgggtggtctacaaagataaccggacaaacgattccggtcgccggctcatattttaattacacccgccatgagcctgtcggcgtcgtggggcagatcatcccttggaacttcccgctccttatggcgatgtggaaaatgggcgccgcccttgccacaggctgcacaatcgttttgaaaccggcggaacagacaccgctgaccgccctctatttagcggagttaatagatcaggcgggcttccctgacggcgtcatcaatattgtcccagggttcggcgagacggccggggaagcgctgaccaaccatgacgatgtcgataaactcgcttttaccggttctacagaaatcggcaaaaaaatcatggaaaaagccgcaaaaaaaattaaacgcgtgacactggagcttggcggaaagtcacctaacatcattttgcctgacgccaatttgaagaaagccattcccggcgctttaaacggggtcatgtttaatcaggggcaggtatgctgcgcaggctcccgtgtcttcattcacaaagacaaatatgatgaggtcgtcagcgaaatggtttcatatgcgaaatcgcttcagcaaggcgccggccttcaccaagatacacaaatcggcccgctcgtcagtcaggaacagcatgagcgcgtgctttcatatattgaaaaaggaaaagcggaaggagccaaagctgtcgcgggcggcagctgcccgtttgaagaagggtattttgtctccccgactgtatttgcggatgtggatgacagcatgaccatcgcaaaagaagaaattttcggccctgttttagccgccattccgtatgatacggtagatgaagtcattgagcgggcgaaccgctcggaatacggccttgcagccggactttggactgagaatgtgaaaaacgcccattacattgctgaccgtctccaagccggcaccgtttgggtcaactgctacaatgttttcgatgcggcatctcctttcggcggctataagcaatccggcctcgggcgggaaatgggctcttacgcgctgaataattatacagaagtgaaaagcgtctggatcaatctggaagattaa

SEQ ID NO: 38022 - protein, 519 aa, Bacillus amyloliquefaciens
MRLLRADIKMLKTDHKKISGGLLRMSSLTMQITKRLETFLQGTKKLYIDGKFVPSTSGSTFVTPNPATGETLMTLYEAQSEDIDSAVKAARKAFDHGEWRTMPAASRSRLMYKLADLMEEHKTELAQLETLDNGKPINETTNGDIPLAIEHMRYYAGWSTKITGQTIPVAGSYFNYTRHEPVGVVGQIIPWNFPLLMAMWKMGAALATGCTIVLKPAEQTPLTALYLAELIDQAGFPDGVINIVPGFGETAGEALTNHDDVDKLAFTGSTEIGKKIMEKAAKKIKRVTLELGGKSPNIILPDANLKKAIPGALNGVMFNQGQVCCAGSRVFIHKDKYDEVVSEMVSYAKSLQQGAGLHQDTQIGPLVSQEQHERVLSYIEKGKAEGAKAVAGGSCPFEEGYFVSPTVFADVDDSMTIAKEEIFGPVLAAIPYDTVDEVIERANRSEYGLAAGLWTENVKNAHYIADRLQAGTVWVNCYNVFDAASPFGGYKQSGLGREMGSYALNNYTEVKSVWINLED

SEQ ID NO: 38023 - DNA, 2071 bp, Nicotiana tabacum
  CDS (55)..(1683)
ggttcttcaattcattacagtgagaaactttcatttgctctactgttcatattaatggcggctcgtgtgtttacctctcgtctctctcgctctttgacatcctcttctcatctgctctcaagaggtttgatcattgtggataagcaaaaatcccatctgggcagaatagctgcttatcaatacagcacggcggctgctattgaggaaccgatcaaaccagctgtcaatgtggaacatactaaactttttatcaatggccaatttgttgatgctgcatcaggaaaaacattccctacccttgaccccaggacaggggaggtaattgcacatgttgctgaaggtgatgcagaagatattaatcgggcagtagctgctgctcgtaaggcttttgacgaaggaccatggcctaaaatgaatgcttatgaaaggtcaaagatattcgtacgccttgctgatctgattgaaaaacataacgatcaaattgcaacgctcgagacttgggatactgggaagccgtatgaacaggctgctaagattgaagtaccaatggttgtacgtctactccgttattatgctggctgggcagataaaattcatggtatgactattcctgcagatggaccatatcatgttcagacattgcacgaaccaattggggttgctggtcagattatcccatggaactttcctcttctcatgttttcttggaagattggacctgctttagcttgtgggaacactgtcgtgctaaagacagctgagcagacaccattatctgcattctacgtagcacatctgttacaggaggctgggctgcctgaaggtgttttgaacatcatttctggttttggtccaacagctggtgctcctctttgtagtcatatggatgtcgataagcttgcttttactggatcgacagatacaggaaaagctatactttcactggctgctaagagcaatcttaagccggtgactttggaacttggagggaaatccccttttattgtttgtgaggatgctgatattgatacggccgttgaacaagctcactttgctctcttctttaatcaggggcaatgttgctgtgctggatctcggacttttgttcacgagaaagtttatgatgaatttcttgagaaggcaaaggcacgtgccttgaaacgaacagttggtgatccgtttaaatcaggcactgagcagggtcctcagattgattcaaaacagtttgataagatcatgaattacattagatctggtatcgatagtggagcaactcttgaaactggaggtgagcgacttggtgaacggggatactatattaagcccacagttttctctaacgttaaggacgatatgctgattgcacaagatgaaatatttggtccagtgcagtccatcttaaaatttaaggatgttgatgatgtgatacggagagctaataacagtcggtatggtctagctgctggagtatttacacagaacattgacactgcaaacacattgacacgagccttgagagttggaacggtatgggttaattgctttgataccttcgatgctacaattccttttggtgggtataaaatgagtggacacggaagagaaaagggagaatacagtctcaagaattacttgcaagtaaaggcagttgtgaccccattgaagaatcctgcatggttataaacatgatcctcctcagcaatttttacaaataaaactatatcaagttgctttattttatgatgctgatgacgattaagtgttggttttctttaaaacttgctactataagcaaactgcaattaattttaacaggcagcagggtttattgaaagctgccaaattgccaaatttgccatcctttccataccctttttttaagattagtcttcttgttttttctactcctctgcaaggagttgttctctttttaaatttttattgctcaaaatatgctgcctccgaatagtttgggagtgaggcatgattgttggttgtattcatttgtttaaaatataaagactagaacaaaaagaaacactaaggaattctatgtttactattatgtttt

SEQ ID NO: 38024 - protein, 542 aa, Nicotiana tabacum
MAARVFTSRLSRSLTSSSHLLSRGLIIVDKQKSHLGRIAAYQYSTAAAIEEPIKPAVNVEHTKLFINGQFVDAASGKTFPTLDPRTGEVIAHVAEGDAEDINRAVAAARKAFDEGPWPKMNAYERSKIFVRLADLIEKHNDQIATLETWDTGKPYEQAAKIEVPMVVRLLRYYAGWADKIHGMTIPADGPYHVQTLHEPIGVAGQIIPWNFPLLMFSWKIGPALACGNTVVLKTAEQTPLSAFYVAHLLQEAGLPEGVLNIISGFGPTAGAPLCSHMDVDKLAFTGSTDTGKAILSLAAKSNLKPVTLELGGKSPFIVCEDADIDTAVEQAHFALFFNQGQCCCAGSRTFVHEKVYDEFLEKAKARALKRTVGDPFKSGTEQGPQIDSKQFDKIMNYIRSGIDSGATLETGGERLGERGYYIKPTVFSNVKDDMLIAQDEIFGPVQSILKFKDVDDVIRRANNSRYGLAAGVFTQNIDTANTLTRALRVGTVWVNCFDTFDATIPFGGYKMSGHGREKGEYSLKNYLQVKAVVTPLKNPAWL

SEQ ID NO: 38025 - DNA, 1521 bp, Ostreococcus tauri
  CDS (1)..(1521)
atggacgttcgcggtggtgcgctcggacgcgcgggcgcgctcatcgataacgcgtggacgacgacgcggcggtcgttaccggtggtgaatccgcacgacggcgccgtcgtcggtgcgatcgcgcgagggagcgtcgcggacgtggacgatgcggtgcgaagcgcgaggaaagggttcgtgacgtggtcgacgcggaacggacgagaacgggcgaaaacgctgcgcgcggtcgcggatgggttgcgacgacggcgggagacgttggcgagactggagacgacggattgcgggaaaccgttggatgagagcgcgtgggacgtggatgacgcgattggatgctttgaatactatgccgatcggtgcgaacgggtttttggggaacgggcgtacgcggaggaggtggtggagctgccggacgaggactttgcgggacgcgtgagacgcgagccgctcggggtgatcgggttgatcacgccgtggaattatccgctgttgatggcgacgtggaaagtggcgcctgcgctcgcgagtgggtgcgctgtggtgttgaagccgagcgaggaggcgagtctgacgtgccaggtgttgggagacgtgtgcgtcgaggcgggtctgcccccaggggcgctgtgcgtcgtcaccggtcgcggagacgaggctggagcggcgctgtgcgcgcatcgaggcgttgataagatttcattcaccggttcttttcgcacgggacaaacgataatgcgggcgtgcgcgcaggacgtcaagcccgtgtcgctcgaactcggaggaaaatccgccttggtcatcttcgacgactgcgatttggagaaggcggtcgagtgggccatgttcggatgtttctggacgaacgggcagatttgtagcgccacgtcacgtgtgctcgtacacgaaaacattcgtgagaggtttttggctcgattgaaggaggcgtcggaggctattcccgtcggcgatccgctcgcggagggatgtcgactcggtccgctcgcgtccgctgcgcagtataaaaaggtgacgagcatggtgaacaggattaaacgcacgaaaatacatctgctcaccggtggaaacagaccgcgcgcgcgcggatgcgagaagggcttctacattgagccgacggttttcgtcgatccacccctcgactcagaggcgtggcgtgaagagattttcggtcccgtgatgtgcgtgcgctccttcaggacggaagaagaggtcatcgcgatcacgaatgattccgagtacgccctcgccgcggcggtgatcacggacgacgtcgctaggagagaacgcatggcgtccgcgttcgacgtcggcattgtctggattcagtgttcgcaacctgcgttcacgcaactcccctggggcggtcgacgcaggagtggtttcgggagggatctcggcgtgaacggcatggataagtacatgcatcaaaagcagatcgtcgagtacacgtccggcgcacaattcgaatggtatccgatgttcaagaagagtaaactttga

SEQ ID NO: 38026 - protein, 506 aa, Ostreococcus tauri
MDVRGGALGRAGALIDNAWTTTRRSLPVVNPHDGAVVGAIARGSVADVDDAVRSARKGFVTWSTRNGRERAKTLRAVADGLRRRRETLARLETTDCGKPLDESAWDVDDAIGCFEYYADRCERVFGERAYAEEVVELPDEDFAGRVRREPLGVIGLITPWNYPLLMATWKVAPALASGCAVVLKPSEEASLTCQVLGDVCVEAGLPPGALCVVTGRGDEAGAALCAHRGVDKISFTGSFRTGQTIMRACAQDVKPVSLELGGKSALVIFDDCDLEKAVEWAMFGCFWTNGQICSATSRVLVHENIRERFLARLKEASEAIPVGDPLAEGCRLGPLASAAQYKKVTSMVNRIKRTKIHLLTGGNRPRARGCEKGFYIEPTVFVDPPLDSEAWREEIFGPVMCVRSFRTEEEVIAITNDSEYALAAAVITDDVARRERMASAFDVGIVWIQCSQPAFTQLPWGGRRRSGFGRDLGVNGMDKYMHQKQIVEYTSGAQFEWYPMFKKSKL

SEQ ID NO: 38027 - DNA, 1578 bp, Glossina morsitans morsitans
  CDS (1)..(1578)
atgttgcgttttataaagtccataaatgtcgttcagaatacgaataagattttggccagtagcttacaacaacaacgtacagccaattactctgctatgccagagccgcaaacaacgcctgatatattgtacactggtctatttattaataatgaatggcacaaaagcgcaacaggtaaaacgttccccagcataaatcctacaactgagaaggccattgctgaagtgcaacgtgctggaaaagaagatgtagatttggccgttcaagctgccagagatgcatttcgactcggttctcgttggcgtcgcatggatgcctcggaccgcggtgatttaatcagacgtttggccgatcttatagaacgtgatcgtgtttacttggctagtctggaaactttggataatggtaaaccgtattctatgtcatataacgttgatctccccatgtccataaagaacttccgctattttgctggctgggctgataaaaatcacggtaaaaccataccaatggatggtgatttctttgcctatacacgtcatgaaccggtaggcgtatgtgggcaaattataccttggaatttccccatattaatgatggcttggaaattgggtccagctttagcggctggtaatacggttgtcttgaaaccggccgaacagacccctttaaccgccctgtacattgctcagttgattaaggaggcaggttttccagagggtgttgtaaatgtcttgcctggctacggcgatgccggtgctgctttggctaatcactttaatgtggataaagtggcttttactggatccacggaagtcggtaaattgatacaacaagcctcaggtaatacaaacttgaaacgcgtaactttggaattgggcggcaagagcccaaatatcgttttggccgatacggatatggattatgctgtggagacttcgcatttcggtttatttttcaatatgggtcaatgctgctgtgccggttcacgtacgtttgtggaagagaaaatttataacgaatttgttgagcgcagtgctgaaagagcacgaaaacgtcgttttggaaatcccttcgatttaaatgttgaacagggtccccaagtggatcaggaacaattacaaaaaattctgcaattaattgatagcggtaagcagcaaggtgctaaactgattgcaggcggtgcacgtccggaagaaatgcccggctattttgtgcagccaactgtttttgctgatgttcaagacgacatgagaattgcccgtgaagaaatctttggtcctgttcaacaaataatacgtttcaaaaaactggatgaagttatagaaagagcgaacaatactgattacggcttagctgcggccgttttcaccaaagatatcgataaagcgaattatattgttcagggccttcgggccggcaccgtatgggttaatacatataatagcttggctgcgcaggtaccatttggtggcttcaaaatgtcgggtcatggccgggaaaatggtgaatatgctttgcgtaattacaccgaagtgaaaagtgttattgttaagcttgctcagaaaaattcttaa

SEQ ID NO: 38028 - protein, 525 aa, Glossina morsitans morsitans
MLRFIKSINVVQNTNKILASSLQQQRTANYSAMPEPQTTPDILYTGLFINNEWHKSATGKTFPSINPTTEKAIAEVQRAGKEDVDLAVQAARDAFRLGSRWRRMDASDRGDLIRRLADLIERDRVYLASLETLDNGKPYSMSYNVDLPMSIKNFRYFAGWADKNHGKTIPMDGDFFAYTRHEPVGVCGQIIPWNFPILMMAWKLGPALAAGNTVVLKPAEQTPLTALYIAQLIKEAGFPEGVVNVLPGYGDAGAALANHFNVDKVAFTGSTEVGKLIQQASGNTNLKRVTLELGGKSPNIVLADTDMDYAVETSHFGLFFNMGQCCCAGSRTFVEEKIYNEFVERSAERARKRRFGNPFDLNVEQGPQVDQEQLQKILQLIDSGKQQGAKLIAGGARPEEMPGYFVQPTVFADVQDDMRIAREEIFGPVQQIIRFKKLDEVIERANNTDYGLAAAVFTKDIDKANYIVQGLRAGTVWVNTYNSLAAQVPFGGFKMSGHGRENGEYALRNYTEVKSVIVKLAQKNS

SEQ ID NO: 38029 - DNA, 1479 bp, Glossina morsitans morsitans
  CDS (1)..(1479)
atggcaaaaaatccaacagccgaacctaaatacactttgctttttatcaacaatgaatttgttccttctgtatcaaataagaaattcgcgactgtgaacccagccaccaacaatgttatcacctatgttgctgaaggtgataaagctgacgttgataaggcagtagcagccgcgaaaaaggcattccaacgtaactcaccatggcgtaaaatgagtcctttgcaacgcactgacttaatgatcaaactttgtgaactcatggctcgcgacaaacctactttggccagtttggaaacccaagataatggcaaaccgtacactgaagcttgtctggatgttgattattcgattgacactttgaaatattatgccggctggactgataaattctgtggcgatacagtgccggttggctatgatcttgttaccataacgcgcaaagaaccggtgggtgttgtaggccaaataataccctggaattatcctctattgatgctagcctggaaatggggtcctgctttggctgtaggctgtacaattgttctgaaacctgcggagcaaactccgttgactgccttgcatatggctgcattggccaaggaagctggttttccggctggtgttattaatgttgttactggtttcggacccactgctggtgcagccatttctgaacatcccgacgtgcaaaaggtggcctttactggttccgttcctgtgggacgccttgtcatggaagctgccgctaagtcgaatcttaaacgtgtttccttggaattgggcggcaaaagtcctttggtaatatttgatgatgctgatgttgactttgctgtgaatgttgcacacgaggctttgttctctaatcatggccaaagttgttgcgctggaagtcgcacttatgtccatgaaaaaatttatgatgaatttgtatcaaaggctgtcgctaaagcaaaatcgcgcactgtcggcgatccgttcgatgacaaagtgttacagggccctcagattgacaatgatatgttcactcaagttttgagttatatagatagtggaaaagaagaaggcgctaagttgcaatgtggcggaaaacgtgttggtgaaaaaggtttctttatagaaccaactgtattctcagatgtcaccgataatatgagaatagctcaagaagagatattcggtcctgttcagtccatatttaaattcagcaccgttgaagagataattgaacgcgctaataatgtaaaatatggcttagctgctggcgtgattactaatgatttgaataaagcgatgcaatatgctcaaagtgttgatgctggttctgtttggatcaattgttatgacgccgtgttaccgcaaactccattcggtggttacaaaaactcgggtatgggtcgtgaactgggcaaagatggtctcgaaaactatttggagactaaaactataacaatgaaagtgtttaaccaaacttcggattaa

SEQ ID NO: 38030 - protein, 492 aa, Glossina morsitans morsitans
MAKNPTAEPKYTLLFINNEFVPSVSNKKFATVNPATNNVITYVAEGDKADVDKAVAAAKKAFQRNSPWRKMSPLQRTDLMIKLCELMARDKPTLASLETQDNGKPYTEACLDVDYSIDTLKYYAGWTDKFCGDTVPVGYDLVTITRKEPVGVVGQIIPWNYPLLMLAWKWGPALAVGCTIVLKPAEQTPLTALHMAALAKEAGFPAGVINVVTGFGPTAGAAISEHPDVQKVAFTGSVPVGRLVMEAAAKSNLKRVSLELGGKSPLVIFDDADVDFAVNVAHEALFSNHGQSCCAGSRTYVHEKIYDEFVSKAVAKAKSRTVGDPFDDKVLQGPQIDNDMFTQVLSYIDSGKEEGAKLQCGGKRVGEKGFFIEPTVFSDVTDNMRIAQEEIFGPVQSIFKFSTVEEIIERANNVKYGLAAGVITNDLNKAMQYAQSVDAGSVWINCYDAVLPQTPFGGYKNSGMGRELGKDGLENYLETKTITMKVFNQTSD

SEQ ID NO: 38031 - DNA, 1557 bp, Pichia angusta
  CDS (1)..(1557)
atgctcagaacctctcttagatctttggccaagccagcctccagagttagcctaagatactattcttcttacccgctgtccaccactgtgacgctgcctaacggaaagtcctatgagcagcctaccggtttgtttatcaacaacgagtttgttccttccaaacagcacaaaacgtttgaggtgatcaaccccgccaccgaggaggagatctgccacgtttacgaggccagaaaggaggacgtcgatgttgctgtcgacgccgcagagaaggccttcaagggttcttggagcaccgccgaccctgctattcgtggcaaggccctgtggaacctggccgagctgctcgaggctcacaaggataccctcgccgcaattgagtctctcgacaacggtaaggctctgcagctggcccagggtgacgtggcgctcgtgatcaactacatcagatcgtgcgctggctgggccgacaagctgaccggccagtacatcgacacgggcgatacccaccacacttacaccaagagagagcctattggagtgtgtggccagatcatcccatggaacttccctcttttgatgtggtcctggaaggttggtcctgctctggctgcaggtaacactgtggtgctgaagacggccgagagcacgccattgtctgccctgtacgcttcgcagctcgtcaaggaggccggaatcccagccggagtggtgaacatcgtgtccggattcggtaagatcacgggagatgccattgccagccaccctaagatcaagaagcttgccttcaccggctccaccgccactggaagacacatcatgaaggttgctgccgactccaacctcaagaaggtgaccctggagcttggaggaaagtctgccaacattgtgtttgacgacgctgacgtcaagaccgccatcagcgccctcgttgccggtatcttctacaactccggagaggtgtgctctgccggatccagagtgtttgtccaggagggtatttacgaggagatcctcagggaattcaaagctgctgcagagacgctcaaggtgggtgacccattcgatctgtccactttccaaggtgcccaaacttcccagatgcaattgaacaagattctcggctacgtcgacatcgcccaccaggaaggaggtagactcatcaccggaggtgagagactgggcaacaagggattcttcgtcaagccaacgatctttgccgacgtgaccccagacatgagagcatacaaggaggagatctttggaccatttgccgtgatcacgccattcaagaccgccgacgaggtgatcgagttggctaacgactccgaatacggacttgctgcaggtgtccacaccaagtcgctcgacaccgccacctacgtctccaacaagcttgaggccggctctgtctggatcaacacttacaacgacttccaccagatggtgccattcggaggatacaagcagtccggtattggccgtgaaatgggtgcccaggctctggacaactacacccagtggaaggctgtgagaattggtcttcagaagccaacttaa

SEQ ID NO: 38032 - protein, 518 aa, Pichia angusta
MLRTSLRSLAKPASRVSLRYYSSYPLSTTVTLPNGKSYEQPTGLFINNEFVPSKQHKTFEVINPATEEEICHVYEARKEDVDVAVDAAEKAFKGSWSTADPAIRGKALWNLAELLEAHKDTLAAIESLDNGKALQLAQGDVALVINYIRSCAGWADKLTGQYIDTGDTHHTYTKREPIGVCGQIIPWNFPLLMWSWKVGPALAAGNTVVLKTAESTPLSALYASQLVKEAGIPAGVVNIVSGFGKITGDAIASHPKIKKLAFTGSTATGRHIMKVAADSNLKKVTLELGGKSANIVFDDADVKTAISALVAGIFYNSGEVCSAGSRVFVQEGIYEEILREFKAAAETLKVGDPFDLSTFQGAQTSQMQLNKILGYVDIAHQEGGRLITGGERLGNKGFFVKPTIFADVTPDMRAYKEEIFGPFAVITPFKTADEVIELANDSEYGLAAGVHTKSLDTATYVSNKLEAGSVWINTYNDFHQMVPFGGYKQSGIGREMGAQALDNYTQWKAVRIGLQKPT

SEQ ID NO: 38033 - DNA, 1887 bp, Vitis pseudoreticulata
  CDS (37)..(1650)
atcataaagttttggagctcatctctgcatctagccatggcggctaggaggatctcctcgttgctctctcgttctctctctgtctcttctgctttttctctttctctaggcaaaaatttcaacagagggaaaagcatccatcgctttagcactgcagcagcagcagttgaagaactcatcactccaactgttcagataaattacactcaacttctaattaatgggcaatttgtagatgcagcatctggaaaaacattccccacctttgaccctcgcacgggagaagtgattgctaatgttgcagaaggtgatgcagaagatatcaatcgggcagtgtctgctgctcgaaaggcgtttgatgaaggaccatggccaaggatgagcccctatgaaaggtcgcggatattgttgcggtttgctgatttagccgagaaacacaatgatgagcttgcagctctagagacatggaataatgggaagccatatgaacaggctgccaaagctgaattgccactgtttgttcgtctatttcgctattatgcaggttgggcagataaaatccatggtttaacagttcaggctgatggcccacaccatgttcagatattgcacgagccaattggtgttgcgggacagattattccctggaattttcctcttatgatgtttgcttggaaagttggacctgcactagcatgtggtaataccattgtcctaaagacagcagagcaaacacctttgactgctctctttgcggcaaagctatttcatgaggctggtcttcctcccggtgttttaaatatcgtgtccggctatggtccgactgctggtgctgctcttgctagtcatatggatgtggacaagattgctttcacggggtcgactgatactggtaagattgtacaagaattggctgcaaaaagcaatcttaaaccagtaacgctagagcttggaggtaaatcacctttcattgtatgtgaggatgctgacattgatcaagctgtagagctagcacactttgctctgttctttaatcagggacaatgctgctgtgctgggtctcggacatttgttcatgagagtgtatacgatgagtttattgagaaagcaaaggcacgtgctctgagtcgcacggtcggtgatcctttcaagaagggcatcgagcaaggtcctcagatcgacccagagcaatttgcaaaggttctcagatacataaaatctggtgttgaaagcaatgccacccttgaatgtggaggtggaagaattggctcaaaaggctactttgtccaacccactgttttctcaaatgttcaggatgatatgctgattgcaaaggatgagatctttggccctgtacaatccatcttgaaatacaaggaccttgatgaagtgattaggagggcaaattcaacgcgatacggtctagcagcaggggtgttcacaaagaacatcaacactgccaacaccttgacaagagcattgagagtggggactgtatgggtgaattgcttcgatgtgtttgatgctgcaatcccatttggtgggtacaagatgagtggagtaggaagggaaaagggaatctacaacctcaataactacttgcaggtgaaggctgtgattactccactgaggaatccagcttggctgtgagtctgtcccagcgtcgcccattacaaataaagatgatcatagatgcatcactgtaattgcgcccatatcatcagaccccctttgcttgttttcactttgactgcctccagagaatatagcaccaactctatcaaacttcagctctgcctcctgccttgtgttatcaagtggtttgcatatgatatattcttgatgagtgaagtctatttttctgccaaaaaaaaaaaaaaaaaaaaa

SEQ ID NO: 38034 - protein, 537 aa, Vitis pseudoreticulata
MAARRISSLLSRSLSVSSAFSLSLGKNFNRGKSIHRFSTAAAAVEELITPTVQINYTQLLINGQFVDAASGKTFPTFDPRTGEVIANVAEGDAEDINRAVSAARKAFDEGPWPRMSPYERSRILLRFADLAEKHNDELAALETWNNGKPYEQAAKAELPLFVRLFRYYAGWADKIHGLTVQADGPHHVQILHEPIGVAGQIIPWNFPLMMFAWKVGPALACGNTIVLKTAEQTPLTALFAAKLFHEAGLPPGVLNIVSGYGPTAGAALASHMDVDKIAFTGSTDTGKIVQELAAKSNLKPVTLELGGKSPFIVCEDADIDQAVELAHFALFFNQGQCCCAGSRTFVHESVYDEFIEKAKARALSRTVGDPFKKGIEQGPQIDPEQFAKVLRYIKSGVESNATLECGGGRIGSKGYFVQPTVFSNVQDDMLIAKDEIFGPVQSILKYKDLDEVIRRANSTRYGLAAGVFTKNINTANTLTRALRVGTVWVNCFDVFDAAIPFGGYKMSGVGREKGIYNLNNYLQVKAVITPLRNPAWL

SEQ ID NO: 38035 - DNA, 1509 bp, Aspergillus oryzae
  CDS (1)..(1509)
atgtcggacgtcactgtacaattgacggcccccaatgggcgtaagtacgctcagcccattggtctgtttatcaacaacgagtttgttccgtccaaatcgggcgagaagtttgccacgatcaaccctgcagatgagaaagagattgcctctgtatatgctgcgggcgaggaagatattgacatcgccgtcaaggctgcccgcaaggcattcaaggatccatcatggaagctacttccaccaacggaccggggcgctttgatgctgaagctggcagatctcattgaacagcacagggagattctggctaccattgaaacgtgggataatggcaagccttactctgtctccttgagctcggacctgggtgaggtcatcaacactcttcggtattatgctggctgggccgacaaggttcatggccaaaccattagcaccacgccggacaagcttgcctacacccttcgtcagccaattggtgtagtgggccagatcatcccatggaactttccccttgccatggctgcatggaaacttggccctgcgctggcttgcggtaataccattgtcatgaagccagctgagcagacacccctcagcattctctacctcgccacgctcatcaaggaagccggattccccccgggtgttatcaatatcgtcaacggcctcggaagagttgccggcagcgccctggtgacccaccctgatgtcgataaggttgcctttaccggctcaaccttgactggccgagaggtcatgaagttggccgccggtactttgaaaaacatcacccttgaaaccggcggtaaatctcccttggtcgtctttggcgacgcagatattgagcaggctgctaaatgggcgcacatcggcatcatgtacaatcaaggacaggtctgcacagcaacttctcgtatcttggtccacgaatcaatctatgacaagtttatcgagcttttcaagcaagaagtggcctcggtcagcaaagttggtgatcccttcgccgacgacaccttccagggccctcaggtcaccaaggcacagtacgaccgagtcctttcgtacatcgaggctggcaaatccgaaggagcaactctcgtcgctggcggcgagccttacaagaacgtcggcgacggcaagggcttcttcatcgcgccaaccatcttcacgaacgtcaaggacaacatgcgtatctatcgcgaggaggtcttcggcccgttcgtcgttatttccagctttgctgctgaggatgaggccgtgacccgcgccaacgacacgacctacggactgggagcagccatcttcaccaaagatattgagcgggcgcaccgcgtggcctctgagatcgaagcgggcatggtctggattaacagcagcaacgacagcgacttccgcgttcccttcggtggcatcaagcagagcggtatcggccgtgagctcggcgaagccggattggaagcatactcgcaggtcaaggccattcacgtcaacctcggatccaagctgtaa

SEQ ID NO: 38036 - protein, 502 aa, Aspergillus oryzae
MSDVTVQLTAPNGRKYAQPIGLFINNEFVPSKSGEKFATINPADEKEIASVYAAGEEDIDIAVKAARKAFKDPSWKLLPPTDRGALMLKLADLIEQHREILATIETWDNGKPYSVSLSSDLGEVINTLRYYAGWADKVHGQTISTTPDKLAYTLRQPIGVVGQIIPWNFPLAMAAWKLGPALACGNTIVMKPAEQTPLSILYLATLIKEAGFPPGVINIVNGLGRVAGSALVTHPDVDKVAFTGSTLTGREVMKLAAGTLKNITLETGGKSPLVVFGDADIEQAAKWAHIGIMYNQGQVCTATSRILVHESIYDKFIELFKQEVASVSKVGDPFADDTFQGPQVTKAQYDRVLSYIEAGKSEGATLVAGGEPYKNVGDGKGFFIAPTIFTNVKDNMRIYREEVFGPFVVISSFAAEDEAVTRANDTTYGLGAAIFTKDIERAHRVASEIEAGMVWINSSNDSDFRVPFGGIKQSGIGRELGEAGLEAYSQVKAIHVNLGSKL

SEQ ID NO: 38037 - DNA, 1494 bp, Aspergillus oryzae
  CDS (1)..(1494)
atggctgaccttttcaccaccatcgagaccccctcggccaaatacgagcagcccttgggcctgttcatcaacaatgagttcgtcaaggctaagagtggccgcacttttgagaccatcaaccccaccaacgagaagccgattgtagccgtccaggaggcggacgagaatgatgtcgaagatgccgtcaaggcagcacgcgccgccttcgagggtgagtggagcaaggtcactccctccgaacgtggccgcctcctcgtcaagctggccgacctcttcgagcgtgatagcgacatcctggctgctattgaagcccttgacaacggcaaggccttcaccatggctaagggcgatgttgccgccgccgccggctgccttcgctactacggtggctgggccgataagattcacggccagaccattgacaccaaccctgagtctcttacctacacccgccacgagcccattggtgtctgtggtcagatcatcccctggaacttccctcttctgatgtggtcctggaagattggacctgccatcgctgccggtaacgtcgttgtcctcaagactgctgagcagacccccctgtctggtctctatgccgccaagctcatcaaggaagctggcttccccgctggtgtggttaacatcctctctggcttcggccgtgtcgccggtgctgctatctctagccacatggatatcgacaagattgccttcaccggttcgaccctggttggtcgtatgattctccaggccgccgccaagagcaacctgaagaaggtcactctggagctgggtggcaagtcccctaacattgtcttcgacgacgccgacatcgataacgctatctcttggtccaacttcggtatcttcttcaaccacggccagtgctgctgcgccggttcccgtatcctggtccaggagggcatccacgacaagttcgttgcccgcttcaaggagcgcgccgctgccaacaagctcggcaaccccttcactgccgacaccttccagggccctcaggtctcgcagctgcagtttgaccgcatcatggagtacatcaaccacggtaagcaggagggtgctaccgttgccaccggtggtgagcgtcacggaaccgagggttacttcatccagcctaccgtcttcaccgatgtccacagcgacatgaagatcgccaaggaggagatcttcggccccgtcgtcaccatccagaagttcaaggatgaggaggaggccatcaagattggtaacagctcctcgtacggtcttgccgccgccgtccacaccaagaacgttaacactgccatccgcgtctccaactctctccgggctggaaccgtctggatcaactgctacaacatgatcaactaccaggctcccttcggtggcttcaaggagtcgggtcttggccgtgaactgggctcctacgcccttgagaactacacccaggtcaagactgtgcactaccgcctgggcgacgctctctttgcttaa

SEQ ID NO: 38038 - protein, 497 aa, Aspergillus oryzae
MADLFTTIETPSAKYEQPLGLFINNEFVKAKSGRTFETINPTNEKPIVAVQEADENDVEDAVKAARAAFEGEWSKVTPSERGRLLVKLADLFERDSDILAAIEALDNGKAFTMAKGDVAAAAGCLRYYGGWADKIHGQTIDTNPESLTYTRHEPIGVCGQIIPWNFPLLMWSWKIGPAIAAGNVVVLKTAEQTPLSGLYAAKLIKEAGFPAGVVNILSGFGRVAGAAISSHMDIDKIAFTGSTLVGRMILQAAAKSNLKKVTLELGGKSPNIVFDDADIDNAISWSNFGIFFNHGQCCCAGSRILVQEGIHDKFVARFKERAAANKLGNPFTADTFQGPQVSQLQFDRIMEYINHGKQEGATVATGGERHGTEGYFIQPTVFTDVHSDMKIAKEEIFGPVVTIQKFKDEEEAIKIGNSSSYGLAAAVHTKNVNTAIRVSNSLRAGTVWINCYNMINYQAPFGGFKESGLGRELGSYALENYTQVKTVHYRLGDALFA

SEQ ID NO: 38039 - DNA, 1575 bp, Cryptococcus neoformans
  CDS (1)..(1575)
atgagaccaacaattacccttagacaccttctcccattaggtataagatccaaacatatcatgcccacccatgcgaagctcaatgtcccctctctcggcgaagtcgaagttcctgtaggattgttcatcaacaatgaatgggtagagtcgactagcagggaaaccttctccactgtaaaccccgcgactggccagaagctcttggactttgcacatgccaagaaggaggatatagacaaggccgtcatcgccgcccggaaagccttcaagaccacttggggaaacaatatcctcgccgctgaacgaggagttttgctaaataaactggctgatctgatggagagggacagtgataagcttgctgccctcgaaagtatcaactctggaaagggtatcaggattgcccgtgaagctgatgtcgccgactctgtcgcctgtatccggtactatgctggtcttgccgataagatccacggtcaaaccgtttcttcatttggtaaggagaaatttgtttacacgctccaccagcctatcggtgtctgtggccagatcatcccatggaattaccctatcatgatgtgggcctggaagattgcgcccgcccttgcagccggctgtactgtcgtcatgaagccttctgaacttacccccctttctgctctggcactatgtgacctggtcaaggaagccggcattccagctggtgtcatcaacactgttcctggcctcggcgcaactgcaggtgatgccatttcccgccacatggatatcgataaggttgctttcacaggttctgtctctactggccgaaggatctctatcgcagctgccgaatcgaaccttaaaaaggtgactttggagcttggcggcaagtcacctgtcattgtgtttgattcagccgatgtggaggaggcggcggactgggctgcgttggctatttggttcaattctggccaagactgctgcgctggtagcagactatatgtccaagagggcatctttgacaagttccttgcagctatgaagaagcgtgcagaggcctgtgccattggtcagccccatgacgaaaagacctcttttggccccctgatttccgaaggtcaacgtgataaggttttgaactacatcgtctcaggaaaggagcaaggtgctcgagtggtcacaggtggtcagaaatggccggaatctaatgatggttattggattgagcctactatccttgccgataccactccggatatgacaatagtgaaggaagaaatcttcggccctgtggtcgtcgctgctcctttcaagaccgaggaagaagtccttgaagtagcgaacgacacttcttatggcctcgcggctgcagttttcaccaatgatacccgtcaagccactcgagtctcagccgcgttggacgctggaaccgtctggatcaaccaatacgctttgctgcaccccggagtgcctttcggtggcttcaagcagagcggtatcggtcgagagctcggaacctatgggttagaggcgtatatgcagatcaaggcggtccacaataacttgacccagacttctccttggccagtgtaa

SEQ ID NO: 38040 - protein, 524 aa, Cryptococcus neoformans
MRPTITLRHLLPLGIRSKHIMPTHAKLNVPSLGEVEVPVGLFINNEWVESTSRETFSTVNPATGQKLLDFAHAKKEDIDKAVIAARKAFKTTWGNNILAAERGVLLNKLADLMERDSDKLAALESINSGKGIRIAREADVADSVACIRYYAGLADKIHGQTVSSFGKEKFVYTLHQPIGVCGQIIPWNYPIMMWAWKIAPALAAGCTVVMKPSELTPLSALALCDLVKEAGIPAGVINTVPGLGATAGDAISRHMDIDKVAFTGSVSTGRRISIAAAESNLKKVTLELGGKSPVIVFDSADVEEAADWAALAIWFNSGQDCCAGSRLYVQEGIFDKFLAAMKKRAEACAIGQPHDEKTSFGPLISEGQRDKVLNYIVSGKEQGARVVTGGQKWPESNDGYWIEPTILADTTPDMTIVKEEIFGPVVVAAPFKTEEEVLEVANDTSYGLAAAVFTNDTRQATRVSAALDAGTVWINQYALLHPGVPFGGFKQSGIGRELGTYGLEAYMQIKAVHNNLTQTSPWPV

SEQ ID NO: 38041 - DNA, 2742 bp, Drosophila melanogaster
  CDS (1)..(2742)
atggctctaaaaatgagaatcgcaattataggacagagcaattttgctgctgatgttctggagcttctgttggatcgctcaaatatccaaattgtaggagtcttcactattccagataaaggcagtcgagaggatattttggctactactgctaccatccacaatatacctgtttttaagttcgcatgctggcgtcgcaagggcgtggcactacctgaggtcttggaacaatacaagtccgtgggggctaccctgaatgtgttgcccttctgttctcaattcattcccatggaggtgattaacggggcgctattgggcagcatttgttaccacccttctatcctcccacgtcaccgcggagcgagtgccatatcgtggacactgatcgagggggacgaggtggccggcttcagcatcttttgggcagatgacggtcttgacacaggacccctactgctaacccgacaaacaaacgtggaatccacggacactctggacaccatatacaagcgctttttgtaccccgaaggtgtgaaggcgatgggcgtcgccgtggacatggtggctagtggtacagctcccaagataattcagccggaagtgggggcaacctacgacccggctatgtttaaaacagaaaatcaggttatcaatcttcaggctacagcagaaaaaatttggaactttgttcgtggtctggactcagttcctggagccatagcaacggttctgcacgggaatggcacagaggagcaaattcgactctttggtgctcatttgtactctgctggccccgtgtcgaatggaaaggttcttcgtctaagaggcttaacaaagaccgcctggatacacagcggtggtcttcttatagagggaacagacggtgcctttgtcaacattcgccgcattaagcgtggcacaagggtaatcagtgccagcgagtggtttaagcaagctgaggaccagtctatcactgacttcagcgaggacgaattggtaaagcgatcgttgctggctggaatttggaaggcaatacttaaggaagatgtcgagtcatcgactgatttctttgcatccggagctggttcaatggacgtggtgcgcttagtcgaggaagttaaagaagcctttgacgtgcccctgcagaacgagcaagttttcatggcgcctgtgtttgaagagttctttagcctgctggttaggttccttcgacagggaagtgccggtttcggtaaccagcagctcgattttgaggcattcacgctgaaagccaacaaaagagagattcgagtgcccacacaactttttatcaacggagagtttgttgacgccgaggctcaacgcactttggaaattgtaaaccctactaatgaggaagtgctttgcaaagtggcatgcgcttcggccaccgacgtggacaaggcagtgcgagcagcgcattctgccttttatggatcttggaggcaaataacacccagacaacgaggccagttgatgctgaacttggctgatctgatggaacgaaataaggaggagctggccacaattgagtcagtcgattcgggagcggtttacacgctagcccttaaaacccatgttggaatgtccatcgaagcgtggcgctactttgccggatggtgcgacaagatccagggcaacacaatccctgttaaccctgcgagacccaacaacgtactgaccttcacccgtaaggagccaattggtgtatgcggtttaataacgccttggaactaccccctgatgatgctttcctggaaaatggccgcctgcattgccgccgggaatacctgtctcataaagcctgctcagacctgtcccctgaccgctctaaagtttgcagagctaactgtccgagccggattcccccccggcgttatcaatgtcctgcctggaaaaggttcagatgcaggccaggcagtggcagaccatgagctggtccgcaaactggggtttaccgggtccacacccattggcaagcacattatgaagtcatgcgcagactccaaccttaaaaagtgctccctagagctgggcggcaagagcccgctaattatctttgcagattgtgatatggacaaagccgtcaaacacggcatgtcctcggtgttttttaataaaggagaggactgcatcgccgctggacggcttttcgtggaggatcggatacacgacgaatttatccgacgcgtccttaaggatttgcgcaccatgacaatcggggacccacttgaccgctcgacggcccacgggcctcagaaccacaaggcgcactttgacaaactgctggagttttgtagacgtggggtcgacgagggcgcaaagctggtgtacggaggatgtcgagtcccaaacctcaagggatattttttcactcccacagtgtttacgaacgttacggacgatatgtttattgcccaagaggagtcctttggaccgatcatgataatatccaagttcaatggcagcgacatagattcattgatgcagcgagctaatcgcacagagtatggcctggccagtggcgtttttacaaaggatattggcaaagcgcttaactttgcggatcgcatcgaggccggcactgtgttcgtcaatgtatataataagactgatgtggctgctccatttgggggctttaagcagagcggttatggcaaggacttgggtcaggaggcgcttaacgagtatcttaagaccaagtgtgtcacagttgaatattag

SEQ ID NO: 38042 - protein, 913 aa, Drosophila melanogaster
MALKMRIAIIGQSNFAADVLELLLDRSNIQIVGVFTIPDKGSREDILATTATIHNIPVFKFACWRRKGVALPEVLEQYKSVGATLNVLPFCSQFIPMEVINGALLGSICYHPSILPRHRGASAISWTLIEGDEVAGFSIFWADDGLDTGPLLLTRQTNVESTDTLDTIYKRFLYPEGVKAMGVAVDMVASGTAPKIIQPEVGATYDPAMFKTENQVINLQATAEKIWNFVRGLDSVPGAIATVLHGNGTEEQIRLFGAHLYSAGPVSNGKVLRLRGLTKTAWIHSGGLLIEGTDGAFVNIRRIKRGTRVISASEWFKQAEDQSITDFSEDELVKRSLLAGIWKAILKEDVESSTDFFASGAGSMDVVRLVEEVKEAFDVPLQNEQVFMAPVFEEFFSLLVRFLRQGSAGFGNQQLDFEAFTLKANKREIRVPTQLFINGEFVDAEAQRTLEIVNPTNEEVLCKVACASATDVDKAVRAAHSAFYGSWRQITPRQRGQLMLNLADLMERNKEELATIESVDSGAVYTLALKTHVGMSIEAWRYFAGWCDKIQGNTIPVNPARPNNVLTFTRKEPIGVCGLITPWNYPLMMLSWKMAACIAAGNTCLIKPAQTCPLTALKFAELTVRAGFPPGVINVLPGKGSDAGQAVADHELVRKLGFTGSTPIGKHIMKSCADSNLKKCSLELGGKSPLIIFADCDMDKAVKHGMSSVFFNKGEDCIAAGRLFVEDRIHDEFIRRVLKDLRTMTIGDPLDRSTAHGPQNHKAHFDKLLEFCRRGVDEGAKLVYGGCRVPNLKGYFFTPTVFTNVTDDMFIAQEESFGPIMIISKFNGSDIDSLMQRANRTEYGLASGVFTKDIGKALNFADRIEAGTVFVNVYNKTDVAAPFGGFKQSGYGKDLGQEALNEYLKTKCVTVEY

SEQ ID NO: 38043 - DNA, 1521 bp, Crocus sativus
  CDS (1)..(1521)
atggtgagcaccggatgtagcggcaatggtgcaaagggcaccaacggcggtatcgtggtaccggagatcaagttcaccaagcttttcatcaacggagaattcgtcgattccgtctccgggagcacatttgagacaagggacccacgcaatggcgacgttatagccaacatcgcagaaggagataaggaggacgtggatttggcggtgaaggcagccagagaagccttcgaccacggaaaatggcctagaatgtctggttatgaaagggggaggatcatgatgaagtttgcagatttgattgaagcattcatagaagaattggcagcacttgacaccttagatgcaggaaaactgctctctatgggtaaggctgtagacatcccagcagcagtacacatcatccgctactacgctggagcagcagacaagatacatgggtatacactaaagttgtcgagcgagttgcaaggatacacattaaaggagcctatcggcgtcgtcggcgtgatcatcccctggaacttccccaccacaatgttcttcctcaaggttagccccgctctcgccgccggctgcactatggtcgtcaagcccgccgagcagacacccctctccgctctgtactacgctcacctcgctaagctggctggagtgccggatggagtgatcaacgtcgttccgggattcgggccgacagcgggcgcagcgctctcctcccacatggatgtcgacagtgttgctttcactggatctgctgaaatcggccgtgcgatcatggagtcggcggcgaagagcaacctgaagaatgtgtctcctgagctcggcggcaagtccccgatgatagtcttcgacgacgccgatgtcgacatggctgtcagtctgaactcccttgcagttttcttcaacaagggagaggtgtgcgtggcgggctcgcgcgtttacgtgcaggaagggatctatgacgaattcgtgaagagggccgtggaagccgcgaggagctggaaggttggagacccgttcgatcagagcaggaacatgggccctcaggttgataaggaccagtttgagagcgtcctaaagtacattgagcatggcaagagtgagggggcgactctgctcaccggcggcaagcctgccgccgacaaggggtattacattgagcccaccatctttgtcgatgtcactgaagacatgaagatcgcgcaggaggaaattttcggaccagttatgtcactgatgaaattcaagacggttgaggaagggatcgactgtgcaaacaacacgaaatacggacttgcagcaggaatactaagccaagacttggacttgataaacacggtttcgaggtcaatcaaagctggaatcatttgggtcaattgctacttcgggtttgatcttgattgtccttatggtggctacaagatgagtggtaattgtcgtgagagtggcatggatgctctcgataactatctacaaaccaaatccgtcgttatgcctcttcacaattccccttggttgtag

SEQ ID NO: 38044 - protein, 506 aa, Crocus sativus
MVSTGCSGNGAKGTNGGIVVPEIKFTKLFINGEFVDSVSGSTFETRDPRNGDVIANIAEGDKEDVDLAVKAAREAFDHGKWPRMSGYERGRIMMKFADLIEAFIEELAALDTLDAGKLLSMGKAVDIPAAVHIIRYYAGAADKIHGYTLKLSSELQGYTLKEPIGVVGVIIPWNFPTTMFFLKVSPALAAGCTMVVKPAEQTPLSALYYAHLAKLAGVPDGVINVVPGFGPTAGAALSSHMDVDSVAFTGSAEIGRAIMESAAKSNLKNVSPELGGKSPMIVFDDADVDMAVSLNSLAVFFNKGEVCVAGSRVYVQEGIYDEFVKRAVEAARSWKVGDPFDQSRNMGPQVDKDQFESVLKYIEHGKSEGATLLTGGKPAADKGYYIEPTIFVDVTEDMKIAQEEIFGPVMSLMKFKTVEEGIDCANNTKYGLAAGILSQDLDLINTVSRSIKAGIIWVNCYFGFDLDCPYGGYKMSGNCRESGMDALDNYLQTKSVVMPLHNSPWL

SEQ ID NO: 38045 - DNA, 1548 bp, Bixa orellana
  CDS (1)..(1515)
atggagagcaccggacgcgcaccactgggaaatggtaggataggtaatcctggaggtctcgtggtacccgaaattaagtttaccaaactatttatcaacggaagattcgtcgataacgtctccgggcagacatttgacacaagggacccacgcactggcgacgttctagccaccatcgcagaagcagataaggacgacttggatttggcggtgaagaatgccagagaagcctttgaccacgggccttggccacgaatgtcaggctatgaaagggcgaggatcatgacaaagtttgcagacttggtcgaagcattcatcgaggaactcgcagcactggatactgccgatgcgggcaaaacgctatctatgggtaaggctgtagatattccagcagcagtacaaatcatgcgctactacgctggagcagcagacaagttacatgggcaaccactaaaaatgaaccaagatacgcagggatatacattaaaggaccccattggcgtcgtgggccacatcattccgtggaactacccaaccatgatgttcttccttaaaaacgccccagcgctcgctgcaggctgcacaatggtcgtcaaaccagctgagcagactccactctccgcactgttctacgctcacctcgccagaatggctggagtccccgacggggtggtcaacgtcgtacccggatttggaccgacagccggagctgcagtctccagccacatggatgtagactcggttagtttcactgggtcacaagaagtgggaagggcgataatgcgtgccgcagctcaaagtaatctcaaaaacgttagcctcgagttaggcgggaaatcgccagttattatttttgacgacgcggatgtcgatatggccgttagcctgtcccagcttgcctgctttaccaataagggagagatttgcgtagcgacctcaagagtgtatgttcaagaaggtatatacgatgcacttgtgaagaagatagtagaggcggctagagaatggaggttcgacactaaagccaacatgggtccgcaggtcgacaagaaacaattcgagagggttctcaaatacattgatttagggaagagggaaggagcgaccttattaactggaggaaaaaccaatggagacaagggctattacatccaaccaaccatcttcctagatgtcagggaggatatgaatatagcccaggatgagctcttcggtccggtaatggccctcatgaaattcaagacggttgatgaggcgatccagaaggccaactgcaccaagtatggactcgccgccgggatcgtgaccaaggagctgaacttagcgaacaccgtatcccggtcgatccgcgccggcgctgtgtgggtgaactgctacttcggctttgatccggacgcaccgttcggtggctacaagatgtccgggttcggtaaggacaggggggtactcgccatcgaccagtacctgaaggccaagacggtcaacaccgcaatccctaacagcccctggtattaagcagcaccttcactagtaatgagttaaaatatc

SEQ ID NO: 38046 - protein, 504 aa, Bixa orellana
MESTGRAPLGNGRIGNPGGLVVPEIKFTKLFINGRFVDNVSGQTFDTRDPRTGDVLATIAEADKDDLDLAVKNAREAFDHGPWPRMSGYERARIMTKFADLVEAFIEELAALDTADAGKTLSMGKAVDIPAAVQIMRYYAGAADKLHGQPLKMNQDTQGYTLKDPIGVVGHIIPWNYPTMMFFLKNAPALAAGCTMVVKPAEQTPLSALFYAHLARMAGVPDGVVNVVPGFGPTAGAAVSSHMDVDSVSFTGSQEVGRAIMRAAAQSNLKNVSLELGGKSPVIIFDDADVDMAVSLSQLACFTNKGEICVATSRVYVQEGIYDALVKKIVEAAREWRFDTKANMGPQVDKKQFERVLKYIDLGKREGATLLTGGKTNGDKGYYIQPTIFLDVREDMNIAQDELFGPVMALMKFKTVDEAIQKANCTKYGLAAGIVTKELNLANTVSRSIRAGAVWVNCYFGFDPDAPFGGYKMSGFGKDRGVLAIDQYLKAKTVNTAIPNSPWY

SEQ ID NO: 38047 - DNA, 1653 bp, Zea mays
  CDS (1)..(1653)
atggctgcaaccgtgaggagggctgcttcctccgtcctctctcgcttcctcctcacaaagccttcgccttcgcctgcttctgccgccggcaataagtccgctctcctcggagcaggggctgctgctcttcacaggttcagcaccgcaccggcatccgcggccgcggccgcagaggagccgatccagcccgcggtggaggtgaagcacacccagctcctcatcaatggcaacttcgtcgacgctgcttctgggaagacgttcccgacgctggacccgcgcaccggcgaggtcatcgcgcgcgtcgccgagggcgacagcgaggacatcgaccgcgccgtggccgccgcccgcagggccttcgacgagggcccgtggccgaggatgaccgcctacgagcggtgccgcgtgctgctgcgcttcgcggacctgatcgagcggcacgcggaggaggtcgcggcgctggagacgtgggacaacggcaagacgctggcgcaggcggcgggggccgaggtgcccatggtggcgcggtgcgtccggtactacgccgggtgggcggacaagatccacggcctggtggcgccggccgacggcgcgcaccacgtgcaggtgctgcacgagccggtcggcgtggccggccagatcatcccctggaacttcccgctgctcatgttcgcctggaaggtcggcccggcgctcgcctgcggcaacaccgtcgtcctcaagaccgccgagcagacgccgctctccgcgctctacgtggccaacctcctccacgaggctgggctccccgagggcgttctgaacgtggtgtccggcttcggcccgacggccggcgcagcgctctgcagccacatgggtgtcgacaagcttgcgttcacgggatcgacgggcacggggcagatcgtgctcgagctggcggcgaggagcaaccttaagccggtgacgctggagctcggtggcaagtcccctttcatcgtcatggacgacgccgacgtcgaccaggccgtcgagctcgcgcaccaggcggtcttcttcaaccagggccaatgctgctgcgccgggtcgcggacgttcgtgcacgagcgcgtgtacgacgagttcgtggagaagtccaaggcccgcgccctgaagcgcgtcgtcggcgaccccttcagggacggggtcgaacaggggcctcagatcgacggcgagcaattcaacaagatcttgcggtacgtccagtccggcgtcgacagcggtgccaccctcgtcgccggcggcgacagggtaggcgacaggggcttctacatacagccgacggtgtttgccgacgccaaggacgaaatgaagatcgctcgggaggagatattcgggccggtgcaaaccattctcaagttcagcggcgtggaggaggtgatccggcgcgcgaacgcgacgccctacgggctggcggcgggggtgttcacgcggagcctggacgcggccaacaccctgtcgcgggcgctgcgggcgggcaccgtgtgggtgaactgctacgacgtgttcgacgccaccatcccgttcggcggctacaagatgagcggcgtcgggcgggagaagggcatctacgccctccgcaactacctccagacaaaggccgtcgtcacacccatcaagaaccccgcatggctgtaa

SEQ ID NO: 38048 - protein, 550 aa, Zea mays
MAATVRRAASSVLSRFLLTKPSPSPASAAGNKSALLGAGAAALHRFSTAPASAAAAAEEPIQPAVEVKHTQLLINGNFVDAASGKTFPTLDPRTGEVIARVAEGDSEDIDRAVAAARRAFDEGPWPRMTAYERCRVLLRFADLIERHAEEVAALETWDNGKTLAQAAGAEVPMVARCVRYYAGWADKIHGLVAPADGAHHVQVLHEPVGVAGQIIPWNFPLLMFAWKVGPALACGNTVVLKTAEQTPLSALYVANLLHEAGLPEGVLNVVSGFGPTAGAALCSHMGVDKLAFTGSTGTGQIVLELAARSNLKPVTLELGGKSPFIVMDDADVDQAVELAHQAVFFNQGQCCCAGSRTFVHERVYDEFVEKSKARALKRVVGDPFRDGVEQGPQIDGEQFNKILRYVQSGVDSGATLVAGGDRVGDRGFYIQPTVFADAKDEMKIAREEIFGPVQTILKFSGVEEVIRRANATPYGLAAGVFTRSLDAANTLSRALRAGTVWVNCYDVFDATIPFGGYKMSGVGREKGIYALRNYLQTKAVVTPIKNPAWL

SEQ ID NO: 38049 - DNA, 1830 bp, Lotus corniculatus
  CDS (7)..(1635)
  misc_feature (1398)..(1398): s is g or c
  misc_feature (1566)..(1566): y is t or c
gtgatcatggctgctcgcactctttcttatctgctttctcgctctcgctctctttcttcttcttctggagctgcttctctgcttccctcacttggaggaaaatctggagggtggagaaacagtaacaacagatatagtactgcagcagtagtagaggaattgatcactccacaagtttcaatcaattacacacagcatctcataaatgggaaattcgtggatgctgcatcagggaaaacttttccagcctatgacccgcgcacaggggatgtgattgctcatgttgctgaaggcgatgctgaagatgtcaaccgtgcggtggcagcagctcgcaaggcctttgatgaaggcccttggccaagaatgactgcttatgaaagaagtcggatattgctgcgcttcgctgatttggttgagaagcacaacgatgagattgcagctctggagacatggaacaatggaaagccttatgaacaggcagccaaggctgaagtgccaacgttcgtgcgtttatttcgctattatgctggctgggcagataaaattcatgggttgactgtccctgctgatggaaattatcatgtccagacattgcatgaaccaattggtgtagcaggacaaattataccttggaactttcctctacttatgtttgcttggaaagttggaccagctctagcatgtggtaacaccattgtccttaagactgctgagcaaacaccgctaacggctcttgttgtggcaaaattacttcatgaggctggtcttcccccaggtgttctgaacatagtttccgggtatggtccaactgctggtgcacctcttgcaagtcacatggatgtggacaagctagcattcactggatcaactgatactggaaaagttgtacttggattggctgcaaaaagtaatcttaagccagtgacattggagcttggagggaaatcacctttcatagtatgtgaggatgctgatgttgacaaggctgttgagcttgcacacttcgctctgttctttaatcaggggcaatgttgctgtgctgggtctcgaacctttgtacatgagcgtgtctatgatgagttcttggagaaatcaaagaaacgggctttgaggcgtgttgttggtgatccgttcaaaaagggtgttgaacaaggtcctcagattgatacagaacaattcgagaaaattcttaggtacatcaaatctggaattgaaagcaatgccacccttgagtgtggcggtgatcgattggggtcaaaaggcttctatgtccagccaaccgtcttctcaaatgttcaggatgatatgctgatagcacaagatgaaatctttggtcctgttcagaccatcttcaaattcaaggaaattgatgaagtaattcgacgggcaaattcaacscgatatggtctagcggctggtgtgttcacccagaacttggccactgccaacactttgatgagggcactgagagctggaactgtgtggatcaattgctttgatgtgtttgatgctgcaattccttttggtggttacaagatgagtgggattggaagggagaaagggatytacagtcttcacaactaccttcaggtgaaagctgttgtcacaccattgaagaatcctgcgtggctgtaaataaactcagctttgtatcttgtccgttgaacaataaaaagtgacagtaccaaagtaccccatttgtaattgtgaaaggttttggatactctcacatcacatactaaattgtcatgttataacataaaggactaaaaaacagctatataatatgacaaactattatggagttcaaaaaaaaaaaaaaaaaaaaaa

SEQ ID NO: 38050 - protein, 542 aa, Lotus corniculatus
MAARTLSYLLSRSRSLSSSSGAASLLPSLGGKSGGWRNSNNRYSTAAVVEELITPQVSINYTQHLINGKFVDAASGKTFPAYDPRTGDVIAHVAEGDAEDVNRAVAAARKAFDEGPWPRMTAYERSRILLRFADLVEKHNDEIAALETWNNGKPYEQAAKAEVPTFVRLFRYYAGWADKIHGLTVPADGNYHVQTLHEPIGVAGQIIPWNFPLLMFAWKVGPALACGNTIVLKTAEQTPLTALVVAKLLHEAGLPPGVLNIVSGYGPTAGAPLASHMDVDKLAFTGSTDTGKVVLGLAAKSNLKPVTLELGGKSPFIVCEDADVDKAVELAHFALFFNQGQCCCAGSRTFVHERVYDEFLEKSKKRALRRVVGDPFKKGVEQGPQIDTEQFEKILRYIKSGIESNATLECGGDRLGSKGFYVQPTVFSNVQDDMLIAQDEIFGPVQTIFKFKEIDEVIRRANSTRYGLAAGVFTQNLATANTLMRALRAGTVWINCFDVFDAAIPFGGYKMSGIGREKGIYSLHNYLQVKAVVTPLKNPAWL

SEQ ID NO: 38051 - DNA, 2159 bp, Sorghum bicolor
  CDS (223)..(1866)
agagagagagaggcacccggcagccattactcgtcctcactcccacaccaacaacctccatccagtgcctgccgcagccgcttctgctgcagcggggacgcgtgcaagtacaggaggatatccgcttccattactgcgctgcgccgcggcggaaacagcagcagcagaggggttcttcgattcggggggttcggccggcgggcgcaataaattttgcccgggatggctcggagggccgcgtcctcgctcgtctcccgctgcctcttggccagggcctctgcccccgccgcgccacccgctgtcccctctgcgctgcgcaggccagatgggatgcgcggactgttgccaggcgtccttcagaggttcagcactgcagcagcagtagaggagcccatcacgccctcagtccaagtgaactatacaaagctcctcattaatggcaactttgttgatgctgcatccggcaagaccttcccaactctggaccctcgtacaggggaggtgattgctcatgtggctgagggtgatgcagaggacattaaccgtgcagtagctgctgcccgcaaggcttttgatgaagggccatggccgaagatgactgcctatgagaggtcccgtatcctactgcggtttgctgatttgattgagaagcacaatgatgagcttgctgctttggagacgtgggacaacggaaagccatatgagcaagcagcccatattgaagtaccaatggtggcccgtcttatgcgttactatgctggttgggctgataagatccatgggctcgttgtgccagctgatggcccacaccatgtacagatcttgcatgagccaatcggtgttgcaggtcagatcatcccatggaacttccctcttctgatgtttgcctggaaagttggccctgctttggcatgtggaaacactctcgtgctcaagactgctgagcaaactcctctatcggctttgtatatctccaagctgttgcatgaggctggactacctgagggtgttgtgaatgtcgtttctggttttggccctactgctggtgctgctcttgctagtcacatggatgttgataagcttgcatttacgggatctaccgataccggcaaagttgttcttgagttggctgcaaggagcaaccttaagacagtgacactggagttaggaggcaagtctccttttatcatcatggatgatgctgacattgaccatgctgttgagcttgcgcactttgccctgttctttaaccaggggcaatgctgttgtgctggatctcgcacatttgtacatgagcgtgtttatgatgagtttgtggagaaagccaaggctcgtgcattgaagcgcgtcgttggtgatccattcaggaaaggtgttgaacagggcccgcagattgacgacgagcaattcaacaagatcttgcgctacattaggtctggtgttgacagtggagctaaccttgtgacgggtggtgataggttgggtgagaaaggttactacatccagccaacgattttctcagatgtccaggatggcatgaagattgctcaggaggagatatttgggcctgttcagtcaatcctcaagttcaaggatctcaatgaggttattaagagggcaaatgcgagcccatatggattggccgctggtgtgttcaccaatagcttggacacagccaacaccctgacgcgtgcgctcagggctgggaccgtctggattaactgcttcgacatcttcgatgctgcaattccctttggtgggtacaagatgagcggcattgggagggagaagggcattgacagcctgaagaactacctgcaagtgaaggcagtcgtcacccctatcaagaacgccgcgtggttgtagatgctgcaagtatggccttctggataagaactacggatattcatttcctcatcacatcccgcacaataatatgaaggcgataatcagttagatgacgatgaagaacgaacagctataataagatttgccctttggttgtcagttatatctctaataagccttttggttggtgccatattgtgcaatttggctgcaccctttttcttttggataagactatattgtagcaacggattttgcagagttcattatgaaaaaacatttgttagaagagcaaaaaaaaaaaaaaaaaa

SEQ ID NO: 38052 - protein, 547 aa, Sorghum bicolor
MARRAASSLVSRCLLARASAPAAPPAVPSALRRPDGMRGLLPGVLQRFSTAAAVEEPITPSVQVNYTKLLINGNFVDAASGKTFPTLDPRTGEVIAHVAEGDAEDINRAVAAARKAFDEGPWPKMTAYERSRILLRFADLIEKHNDELAALETWDNGKPYEQAAHIEVPMVARLMRYYAGWADKIHGLVVPADGPHHVQILHEPIGVAGQIIPWNFPLLMFAWKVGPALACGNTLVLKTAEQTPLSALYISKLLHEAGLPEGVVNVVSGFGPTAGAALASHMDVDKLAFTGSTDTGKVVLELAARSNLKTVTLELGGKSPFIIMDDADIDHAVELAHFALFFNQGQCCCAGSRTFVHERVYDEFVEKAKARALKRVVGDPFRKGVEQGPQIDDEQFNKILRYIRSGVDSGANLVTGGDRLGEKGYYIQPTIFSDVQDGMKIAQEEIFGPVQSILKFKDLNEVIKRANASPYGLAAGVFTNSLDTANTLTRALRAGTVWINCFDIFDAAIPFGGYKMSGIGREKGIDSLKNYLQVKAVVTPIKNAAWL

SEQ ID NO: 38053 - DNA, 1862 bp, Sorghum bicolor
  CDS (116)..(1771)
gagcaaggggaggccagtgctctcctgtattggcctcagagacttgcctggcatacatatcccacagaggccggagctgatcctgatcgcgcacgctcagcacctgcttgagggcatggctgcaaggagggctgcttcctccgtcctctctcgcttcctcctcacaaggccttcgccttcgccttcgcctgcttctgctgcttctcccgccggcaaatccgccctcctaggagcagggggccctcttcacaggttcagcactgcaccggcagccgctgctgccaccgcagaggagccaatccagcccgccgtggaggtgaagcacacccagctcctcatcaatggcaacttcgttgacgccgcttctgggaagacgttcccgacgctggacccccgcaccggcgaggtcatcgcgcgcgtcgccgagggcgacagcgaggacatcgaccgcgccgtcgccgccgcccgcagggccttcgacgagggcccgtggccgaggatgaccgcctacgagcggtgccgggtgctgctgcgcttcgcggacctgatcgagcggcacgcggaggagatcgcggcgctggagacgtgggacaacgggaagacgctggcgcaggcggcgggcgccgaggtgcccatggtggcgcggtgcatccggtactacgccgggtgggcggacaagatccacggcctggtggtgccgggcgacggcgcgcaccacgtgcaggtgctgcacgagcccgtcggcgtggccgggcagatcatcccctggaacttcccgctgctcatgttcgcctggaaggtcggcccggcgctggcctgcggcaacaccgtcgtcctcaagaccgccgagcagacgccgctctccgcgctctacgtcgccaacctcctccacgaggctgggctccccgagggcgttctgaacgtcgtgtccggcttcggtccgacggccggcgccgcgctctgtagccacatgggtgttgacaagcttgcgttcacgggatcgacgggcacggggcagatcgtgctcgaactggcggcgaggagcaacctgaagccggtgacgctggagctcggtggcaagtcccctttcgtcgtcatggacgacgccgacgtcgaccaggccgtcgagctcgcgcaccaagcggtcttcttcaaccagggccaatgctgctgcgccgggtcgcggacgttcgtgcacgagcgcgtgtacgacgagttcgtggagaagtccaaggcccgcgccctgaagcgcgtggtcggcgaccccttcaggaacggggtcgaacaggggcctcagatcgacggcgatcagttcaacaagatcttgcggtacgtccagtccggtgtcgacagcggcgccaccctcgtcaccggcggcgacagggtaggcagcaggggcttctacatacagccgacggtgtttgccgacgccaaggacgacatgaagatcgctcgggaggagatattcgggccggtgcagaccatcctcaagttcagcggcatggaggaggtgatccggcgcgcgaacgcgacgcactacgggctggcggcgggggtgttcacgcggagcctggacgcggccaacacgctgtcccgggcgctgcgggcgggcacggtgtgggtgaactgctacgacgtgttcgacgccaccatcccgttcggcggctacaagatgagcggcgtcgggcgagagaagggcgtctacgccctccgcaactacctccagaccaaggccgtcgtcacgcccatcaaggaccccgcctggctgtaatcacacccgtccctcaccggcgctgcgccgattctcgcagagaatgtgaccaataaaacaaccgtttataaacaaaaaaaaaaaaaaaaaa

SEQ ID NO: 38054 - protein, 551 aa, Sorghum bicolor
MAARRAASSVLSRFLLTRPSPSPSPASAASPAGKSALLGAGGPLHRFSTAPAAAAATAEEPIQPAVEVKHTQLLINGNFVDAASGKTFPTLDPRTGEVIARVAEGDSEDIDRAVAAARRAFDEGPWPRMTAYERCRVLLRFADLIERHAEEIAALETWDNGKTLAQAAGAEVPMVARCIRYYAGWADKIHGLVVPGDGAHHVQVLHEPVGVAGQIIPWNFPLLMFAWKVGPALACGNTVVLKTAEQTPLSALYVANLLHEAGLPEGVLNVVSGFGPTAGAALCSHMGVDKLAFTGSTGTGQIVLELAARSNLKPVTLELGGKSPFVVMDDADVDQAVELAHQAVFFNQGQCCCAGSRTFVHERVYDEFVEKSKARALKRVVGDPFRNGVEQGPQIDGDQFNKILRYVQSGVDSGATLVTGGDRVGSRGFYIQPTVFADAKDDMKIAREEIFGPVQTILKFSGMEEVIRRANATHYGLAAGVFTRSLDAANTLSRALRAGTVWVNCYDVFDATIPFGGYKMSGVGREKGVYALRNYLQTKAVVTPIKDPAWL

SEQ ID NO: 38055 - DNA, 2162 bp, Secale cereale
  CDS (175)..(1824)
cgccaccatcactgctcctccctcctcagtccccagtactcttccccgcacgcagctggggacgccctcccatttactgagcctctgaaccaagaggaggaggaggaggaggagaagaattgattgctgatccggcgcagccaataaattctccctgcctccgccgaggtcatcatggctgctgccgccacgaggagggccgcctcctcgctcgcctcccgctgcctgctctccaggcccgcagcgtcgcccgccgctgtcccctctgcgctccgcagggcagatggggcacgtggattgctgccgggactccttcagaggttcggcactgcggcagcagcagaggagcccatttcgccttctgtccaagtgagcgagacacagctcctcatcaacggcaaattcgttgatgctgcatctggcaagactttcccgactctggaccctcgcactggggaggtgattgcccgtgtgtctgaaggagatgccgaagacgttgaccgtgcggttatcgcagcccgcaaggcattcgatcatgggccatggccaaagatgactgcctatgagagatcccgcattcttctgcggtttgctgatttgatagagaaacacaatgacgatattgctgcactggagacgtgggacaacgggaagccttatgagcaagctgctcaaatcgaagtgccaatgcttgctcggcttatgcggtactatgcaggctggactgacaagatccatggcctcatcgtaccggctgatggcccgcaccatgtacaggtgctgcacgagccgattggtgtcgtgggtcagatcatcccgtggaacttcccacttttgatgtatggctggaaagttggccctgctttggcctgtgggaacactattgttctcaagacggctgaacaaactcctctatctgccctctatgtttctaagctgttgcatgaggctggactacccgaaggtgtcctgaacatcgtatctggtttcggtcctaccgctggggctgctcttgctagccacatggatgttgacaagattgcattcactggatcaactgatactgggaaagttattcttgagttatctgcacggagcaatcttaagccagtgacactggagctaggaggcaagtctccttttatcgtcatggatgacgcagatattgaccaagccgttgagcttgcgcattttgcgctgtttttcaaccagggacaatgctgctgcgctgggtctcgcacgttcgtacatgagcgtgtttatgatgagtttgttgagaagtccaaagctcgtgctttgaagcgtgtagttggtgatccattcaggaaaggtgttgagcagggtcctcagattgatgatgagcaattcaagaagatcttgcgctacattaagtcgggtgtcgacagtggagccacccttgtgacgggtggtgacaagttaggtgacaaaggttactacatccagccaacaattttctcagatgtgcaggatggcatgaagattgcccaagaggagatatttgggcctgttcagtcaatcttcaagttcaatgacctcaatgaggtgatcaagagagcgaacgcaagccagtacgggttggctgccggcgttttcaccaacaacctggacacggccaacaccttgacgcgtgccctcagggccgggacaatctgggtgaactgcttcgacatcttcgacgcggcgatccccttcggcgggtacaagatgagcggcatcggtagggagaagggcatcgacagcctgaagaactacctgcaagtcaaggcggtcgtcaccgcgctcaagaaccccgcatggttgtgagcattgcacacctatggtcctcttgacactccggagaacgtgaagacttgcgacaattggatgagaagaggaagaagaagaggatgatgatgatgacaccaacgaggatcactaataagccgctgccttcatgggcagccagccaccgtctctaataaatatcacatgtgatttggtttcctttgtcaaccgcggcaagacatatatgttgtagcaacattatgtttattaacattatgtttattatcgcttgttggaagaattctctggttgcagtaaatctgattggaagaaaaaaaaaaaaaaaaaaaaaaaaaaaaaaaaaaaaaaaaaaaaaa

SEQ ID NO: 38056 - protein, 549 aa, Secale cereale
MAAAATRRAASSLASRCLLSRPAASPAAVPSALRRADGARGLLPGLLQRFGTAAAAEEPISPSVQVSETQLLINGKFVDAASGKTFPTLDPRTGEVIARVSEGDAEDVDRAVIAARKAFDHGPWPKMTAYERSRILLRFADLIEKHNDDIAALETWDNGKPYEQAAQIEVPMLARLMRYYAGWTDKIHGLIVPADGPHHVQVLHEPIGVVGQIIPWNFPLLMYGWKVGPALACGNTIVLKTAEQTPLSALYVSKLLHEAGLPEGVLNIVSGFGPTAGAALASHMDVDKIAFTGSTDTGKVILELSARSNLKPVTLELGGKSPFIVMDDADIDQAVELAHFALFFNQGQCCCAGSRTFVHERVYDEFVEKSKARALKRVVGDPFRKGVEQGPQIDDEQFKKILRYIKSGVDSGATLVTGGDKLGDKGYYIQPTIFSDVQDGMKIAQEEIFGPVQSIFKFNDLNEVIKRANASQYGLAAGVFTNNLDTANTLTRALRAGTIWVNCFDIFDAAIPFGGYKMSGIGREKGIDSLKNYLQVKAVVTALKNPAWL

SEQ ID NO: 38057 - DNA, 1881 bp, Zea mays
  CDS (108)..(1760)
aaggccatcgctctcctagcctcggagacttgcctttgcatacacatccccccggagggcggtggccggagctgacccctgatcggacgcgcttagcgcctgagggcatggctgcaaccgtgaggagggctgcttcctccgtcctctctcgcttcctcctcacaaagccttcgccttcgcctgcttctgccgccggcaataattccgctctcctcggatcaggggctgctgctcttcacaggttcagcaccgcaccggcatccgcggccgcggccgcagaggagccgatccagcccgcggtggaggtgaagcacacccagctcctcatcaatggcaacttcgtcgacgctgcttctgggaagacgttcccgacgctggacccgcgcaccggcgaggtcatcgcgcgcgtcgccgagggcgacagcgaggacatcgaccgcgccgtggccgccgcccgcagggccttcgacgagggcccgtggccgaggatgaccgcctacgatcggtgccgcgtgctgctgcgcttcgcggacctgatcgagcggcacgcggaggaggtcgcggcgctggagacgtgggacaacggcaagacgctggcgcaggcggcgggggccgaggtgcccatggtggcgcggtgcgtccggtactacgccggctgggcggacaagatccacggcctggtggcgccggccgacggcgcgcaccacgtgcaggtgctgcacgagccggtcggcgtggccggccagatcatcccctggaacttcccgctgctcatgttcgcctggaaggtcggcccggcgctcgcctgcggcaacaccgtcgtcctcaagaccgccgagcagacgccgctctccgcgctctacgtggccaacctcctccacgaggctgggctccccgagggtgttctgaacgtggtgtccggcttcggcccgacggccggcgcagcgctctccagccacatgggtgtcgacaagcttgcgttcacgggatcgacgggcacggggcagatcgtgctcgagctggcggcgaggagcaaccttaagccggtgacgctggagctcggtggcaagtcccctttcatcgtcatggacgacgccgacgtcgaccaggccgtcgagctcgcgcaccaggcggtcttcttcaaccagggccaatgctgctgcgccgggtcgcggacgttcgtgcacgagcgcgtgtacgacgagttcgtggagaagtccaaggcccgcgccctgaagcgcgtcgtcggcgaccccttcagggacggggtcgaacaggggcctcagatcgacggcgagcaattcaacaagatcttgcggtacgtccagtccggcgtcgacagcggtgccaccctcgtcgccggcggcgacagggtaggcgacaggggcttctacatacagccgacggtgtttgccgacgccaaggacgaaatgaagatcgctcgggaggagatattcgggccggtgcaaaccattctcaagttcagcggcgtggaggaggtgatccggcgcgcgaacgcgacgccctacgggctggcggcgggggtgttcacgcggagcctggacgcggccaacaccctgtcgcgggcgctgcgggcgggcaccgtgtgggtgaactgctacgacgtgttcgacgccaccatcccgttcggcggctacaagatgagcggcgtcgggcgggagaagggcatctacgccctccgcaactacctccagacaaaggccgtcgtcacacccatcaagaaccccgcatggctgtaaatcacatcctccgtccttgcccgcacggcgctgcgccggttctcggagaacgtgacgaataaaacaaacggtttggttaaaaagacaaggacgacggaaaaaaaaaaaaaaaaaaaaaaaa

SEQ ID NO: 38058 - protein, 550 aa, Zea mays
MAATVRRAASSVLSRFLLTKPSPSPASAAGNNSALLGSGAAALHRFSTAPASAAAAAEEPIQPAVEVKHTQLLINGNFVDAASGKTFPTLDPRTGEVIARVAEGDSEDIDRAVAAARRAFDEGPWPRMTAYDRCRVLLRFADLIERHAEEVAALETWDNGKTLAQAAGAEVPMVARCVRYYAGWADKIHGLVAPADGAHHVQVLHEPVGVAGQIIPWNFPLLMFAWKVGPALACGNTVVLKTAEQTPLSALYVANLLHEAGLPEGVLNVVSGFGPTAGAALSSHMGVDKLAFTGSTGTGQIVLELAARSNLKPVTLELGGKSPFIVMDDADVDQAVELAHQAVFFNQGQCCCAGSRTFVHERVYDEFVEKSKARALKRVVGDPFRDGVEQGPQIDGEQFNKILRYVQSGVDSGATLVAGGDRVGDRGFYIQPTVFADAKDEMKIAREEIFGPVQTILKFSGVEEVIRRANATPYGLAAGVFTRSLDAANTLSRALRAGTVWVNCYDVFDATIPFGGYKMSGVGREKGIYALRNYLQTKAVVTPIKNPAWL

SEQ ID NO: 38059 - DNA, 1901 bp, Zea mays
  CDS (111)..(1646)
gagacgagtcgagtgagggggcagaggccacaaaacagagagtacccaaacgatcgatctgtgcatctccccgtccgtcccgcaaccatctaattcagaagcagacatcaatggcgagcaacggctgcaacggcaacggcaacggcaacggcaacggcaaggcggctccggcgggtgtggtggtaccggagatcaagttcaccaagctcttcatcaacggcgagttcgtcgacgccgcctccggcaagacattcgataccagggacccacggaccggcgacgtgctggcccacgtagcagaggcagacaaagctgatgtggacctggcggtgaagtccgcccgggacgccttcgagcacggcaagtggccccgcatgtcaggctacgagcgcgggcggatcatgagcaagctggcggacctggtggagcagcacacggaggagctggcggcgctggacggtgccgacgccgggaagctgctgctgctgggcaagatcatcgacatccccgcggccacgcagatgctgcgctactacgccggcgccgccgacaagatccacggcgacgtcctgcgcgtctccggcaggtaccagggctacacgctcaaggagcctatcggcgtcgtgggcgtcatcatcccctggaacttccccaccatgatgttcttcctcaaggtcagcccggcgctcgccgcgggctgcaccgtcgtcgtcaagcccgccgagcagacgccgctttccgcgctctactacgcgcacctcgcaaagatggccggcgtccccgacggagtgatcaacgtcgtccccgggttcggccccaccgccggcgccgcgctcgcctcccacatggacgtcgacagcgtggccttcaccggctccacagaggtgggtcgcctcatcatggagtcggccgcgcggagcaacctcaagacggtctcgctggagctcggcggcaagtcgccgctcatcatcttcgacgacgccgacgtcgacatggccgttaacctgtcgaggcttgccgtcttcttcaacaagggagaggtttgcgtggcgggatcgcgcgtgtacgtgcaggaagggatctatgacgagttcgtcaagaaggccgtggaggccgcgcggagctggaaggttggagacccgttcgatgtcaccagcaacatgggccctcaggttgacaaggaccagtttgagagggtcctaaagtacattgagcatggcaagagcgagggagcgactctgctcaccggcggcaagcctgccgccgacaaagggtactacattgagcccaccatctttgtcgatgtcactgaggacatgaagatcgcgcaggaagagatcttcggccccgtcatgtccctcatgaagttcaagacggttgatgaggtgatcgagaaggccaactgcaccaggtacgggctcgccgccgggatcgtgaccaagagcctggacgtcgccaaccgggtgtcccggtcggtgcgcgccggcaccgtgtgggtgaactgctacttcgccttcgacccggacgcgcccttcggcgggtacaagatgagcggcttcggccgggaccaggggctggcagccatggacaagtacctgcaggtcaagagcgtcatcaccgcgctcccggactcgccatggtactgagttgagccagggaccgatggaaccccatcgatctcttcttgtgcagtgtacatgcgtcatgcgtgcgtgctcacacagctgggttgctgctttgtgcttgtgttcgtctctggtttgtggctcatgtgtgttagtctgcaccctatccttctgtacgtagctgccggacatgcaaatagtatgttaagtacaccatataaactcttgttttataaattcaagtttagcttggagccttcactcccttcagccttg

SEQ ID NO: 38060 - protein, 511 aa, Zea mays
MASNGCNGNGNGNGNGKAAPAGVVVPEIKFTKLFINGEFVDAASGKTFDTRDPRTGDVLAHVAEADKADVDLAVKSARDAFEHGKWPRMSGYERGRIMSKLADLVEQHTEELAALDGADAGKLLLLGKIIDIPAATQMLRYYAGAADKIHGDVLRVSGRYQGYTLKEPIGVVGVIIPWNFPTMMFFLKVSPALAAGCTVVVKPAEQTPLSALYYAHLAKMAGVPDGVINVVPGFGPTAGAALASHMDVDSVAFTGSTEVGRLIMESAARSNLKTVSLELGGKSPLIIFDDADVDMAVNLSRLAVFFNKGEVCVAGSRVYVQEGIYDEFVKKAVEAARSWKVGDPFDVTSNMGPQVDKDQFERVLKYIEHGKSEGATLLTGGKPAADKGYYIEPTIFVDVTEDMKIAQEEIFGPVMSLMKFKTVDEVIEKANCTRYGLAAGIVTKSLDVANRVSRSVRAGTVWVNCYFAFDPDAPFGGYKMSGFGRDQGLAAMDKYLQVKSVITALPDSPWY

SEQ ID NO: 38061 - DNA, 2128 bp, Hordeum vulgare
  CDS (82)..(1731)
tgaacccggaggacgagaagaattgattgctgatccggcgcaaaccaacagattcttcctgcctccgccgagatcatcatcatggctgctgccgccacgaggagggccgcctcctcgctcgtctcccgctgcctgctctccaggcccgcagcttcccccgccgctgtcccctctgcgctccgcagggcagatggggcacgtggattgttgcctggactccttcagaggttcggcactgcagcagcagcagaggaacccatctcgccttctgtccaagtgggcgagacacagctcctcatcaacggcaaattcgttgatgctgcatctggcaagactttcccgactctggaccctcgcaccggggaggtgattgcccgtgtgtctgaaggagatgccgaagatgtggaccgtgcagttgttgcggcccgcaaggcattcgatgaagggccatggccaaagatgactgcctatgagaggtcccggattcttttgcgatttgctgatttgatagagaaacacaatgatgaaattgctgcactggagacgtgggacaacgggaagccctatgagcaagctgcccacatcgaagtgccaatgcttgctcggcttatgcggtactatgcaggctggactgacaagatccatggcctcatcgtaccggctgatggcccgcaccatgtacaggtgctgcatgagccgattggtgtcgtgggtcagatcatcccgtggaacttcccacttttgatgtatggctggaaagttggccctgctttggcctgtgggaacactattgttctcaagaccgctgaacaaactcctctatctgccctctatgtttctaagctgttgcatgaggctggactacccgaaggtgtcctgaacatcatatctggttttggtcctaccgctggggctgctcttgctggccacatggacgttgacaagattgcattcactggatcaaccgatactgggaaagttattcttgagttatctgcacggagcaatcttaaggcagtgacactggagctaggaggcaagtctccttttatcgtcatggatgatgcagatattgaccaagctgttgagcttgcgcattttgcgctgtttttcaaccaggggcaatgctgctgcgctgggtctcgcacgttcgtacatgagcgtgtttatgatgagtttgttgagaagtcaaaggctcgtgctttgaagcgtgtagttggtgatccattcaggaaaggtgttgagcagggtcctcagattgatgatgagcaattcaagaagatcttgcgctacattaagtcgggtgtcgacagtggagccacccttgtgacgggtggtgacaagttgggtgacaaaggttactacatccagccaacaattttctcagatgtgcaggatgacatgaagatagcccaggaggagatattcgggcctgttcagtcaatcttcaagttcaatgacctcaacgaggtgatcaagagggcgaacgcaagccagtacggattggccgccggcgtttttaccaacaacctggacacggccaacaccttgacgcgtgccctcagggccggcacgatctgggtgaactgctttgacatcttcgatgccgcgatccccttcggcgggtacaagatgagcggcatcggtagggagaagggcatcgacagcctgaagaactacctgcaagtcaaggcggtcgtcaccgcgcttaagaaccctgcgtggttgtgagcatagcacacctatggtcttctgagtctgagataccggacaacgtgaagacgcagggacaattggatgagaaaaaaagaagatgatgatgataacaccgatgaggatctctaataagccattccttcatgggcagccagccaccgtctctaattagtatcatatgtgatttggtttcctttgtcaaccgcggcaagacatatatgttgtatgttgtagcaacattatgttgattatagcttgttggaaaaattctctggttgcagttaatcaacttcttttgatcagttgttgttctgcgacacatatgaagctaatggtgtttcctatcctagttaatccatgtccttgttgatcatcaaaaaaaaaaaaaaaaaaaaaaaaaaaaaaaaaaaaa

SEQ ID NO: 38062 - protein, 549 aa, Hordeum vulgare
MAAAATRRAASSLVSRCLLSRPAASPAAVPSALRRADGARGLLPGLLQRFGTAAAAEEPISPSVQVGETQLLINGKFVDAASGKTFPTLDPRTGEVIARVSEGDAEDVDRAVVAARKAFDEGPWPKMTAYERSRILLRFADLIEKHNDEIAALETWDNGKPYEQAAHIEVPMLARLMRYYAGWTDKIHGLIVPADGPHHVQVLHEPIGVVGQIIPWNFPLLMYGWKVGPALACGNTIVLKTAEQTPLSALYVSKLLHEAGLPEGVLNIISGFGPTAGAALAGHMDVDKIAFTGSTDTGKVILELSARSNLKAVTLELGGKSPFIVMDDADIDQAVELAHFALFFNQGQCCCAGSRTFVHERVYDEFVEKSKARALKRVVGDPFRKGVEQGPQIDDEQFKKILRYIKSGVDSGATLVTGGDKLGDKGYYIQPTIFSDVQDDMKIAQEEIFGPVQSIFKFNDLNEVIKRANASQYGLAAGVFTNNLDTANTLTRALRAGTIWVNCFDIFDAAIPFGGYKMSGIGREKGIDSLKNYLQVKAVVTALKNPAWL

SEQ ID NO: 38063 - DNA, 2135 bp, Oryza sativa
  CDS (188)..(1837)
ccacgcgtccgattcaaagcaaagccgccattactgctcctcttccattccactggggacgtacgagctccgcgcatcccttccattccattactgaccttggctgctgcggctgcagtgcagagggggtttggtggtgcggttgatttgagcaataaattctctaggggggagggaggtatcggtcatggctgccgctgctgcaaggaggggctcatcgctgctctctcgctgcctgctgtccaggcccgccgccgccgcctcgcctgctgtcccctctgcgctccgcagggcagatgggacacaaggattgttgccgggaatccttcagaggttcagcactgcagcagtagcagaggagcccatatcacccccagtccaagtgaactacactcagctcctcattgatggaaaattcgttgattcagcatctggcaaaactttcccaactctggaccctcgtaccggggagctgattgcccatgtggctgaaggcgatgcggaggatattaaccgtgcggttcatgcggcccgcaaggctttcgatgaagggccatggccaaagatgactgcctatgagagatcccggattctgttgcggtttgctgacttgattgagaagcacaacgatgaaattgctgcattggagacatgggacaacggcaagccgtatgcgcaagctgcccagattgaagtaccaatggtggcacggctgatgcggtactatgctggttgggctgacaagatccatgggcttgtcgtgccggctgacggcccacaccatgtacaggtgctgcacgagcccattggtgtcgcaggtcagatcatcccatggaactttccgcttctgatgtttgcgtggaaagttggccctgctttggcttgtggaaacactgttgtgctcaagacggctgagcaaactcctctgtctgctctatttgcttctaagctgttgcatgaggctggactcccagacggtgttgttaacgtggtatctggttttggacctactgctggtgctgctcttgctagtcacatggatgtcgataagattgcattcactggatcgaccgatactggaaaagtcgtccttgagttggctgcaaggagcaaccttaagtcagtgacactggagctaggaggcaagtctcctttcatcatcatggatgatgctgatgttgaccatgctgttgagcttgcgcattttgcactgttctttaaccagggacaatgttgctgtgctgggtctcgtacatttgtgcatgagcgtatctatgatgagttcgtggagaaggccaaggctcgtgctctcaagcgtgtggttggtgatccattcaagaatggtgttgaacagggccctcagattgatgacgagcaattcaacaagatcttgcgctacatcaagtatggtgttgacagtggagccaaccttgtgactggtggcgacagattaggtgacaaaggttactacatccagccaacaattttctcggatgtacaggataacatgaggattgctcaagaagagatatttggccctgtgcagtccattctgaagttcaatgatctgaacgaggtcatcaagagggcaaatgcaagccagtacgggctggctgctggggtcttcaccaacaacctgaacacggccaacaccctgacccgcgcgctcagggtcgggaccgtgtgggtgaactgcttcgacgtcttcgacgccgcgatcccgttcggcggatacaagcagagcggcatcgggagggagaagggcatcgacagcctgaagaactacctgcaggtcaaggccgtcgtcacgccgatcaagaacgccgcgtggttgtaaacacatagatgtttggacatttcagaactggggaagaaataggtataatcttatggacggatgcgaaaatggcgataaattatggcgataagattatgatgatgatgatgaagaagaagaagaggaggaggaagaacagctgaaataagcttgtcctagcatggggctggcattgtctctaataaaccttgtggttggtgctcatgttactgatggagtatattgtagaagcagatttatgttcattatgaaatatatatcgcttgtttgggataattctaaaaaaaaaaaaaaaaaa

SEQ ID NO: 38064 - protein, 549 aa, Oryza sativa
MAAAAARRGSSLLSRCLLSRPAAAASPAVPSALRRADGTQGLLPGILQRFSTAAVAEEPISPPVQVNYTQLLIDGKFVDSASGKTFPTLDPRTGELIAHVAEGDAEDINRAVHAARKAFDEGPWPKMTAYERSRILLRFADLIEKHNDEIAALETWDNGKPYAQAAQIEVPMVARLMRYYAGWADKIHGLVVPADGPHHVQVLHEPIGVAGQIIPWNFPLLMFAWKVGPALACGNTVVLKTAEQTPLSALFASKLLHEAGLPDGVVNVVSGFGPTAGAALASHMDVDKIAFTGSTDTGKVVLELAARSNLKSVTLELGGKSPFIIMDDADVDHAVELAHFALFFNQGQCCCAGSRTFVHERIYDEFVEKAKARALKRVVGDPFKNGVEQGPQIDDEQFNKILRYIKYGVDSGANLVTGGDRLGDKGYYIQPTIFSDVQDNMRIAQEEIFGPVQSILKFNDLNEVIKRANASQYGLAAGVFTNNLNTANTLTRALRVGTVWVNCFDVFDAAIPFGGYKQSGIGREKGIDSLKNYLQVKAVVTPIKNAAWL

SEQ ID NO: 38065 - DNA, 1479 bp, Placopecten magellanicus
  CDS (1)..(1479)
atgagtacgcctatcaaaaaccccgagatcagatataaacaactgttcatcaacaatgagtgggtaaacgctgctagcggaaagacatttcctgtcattaacccggccactggaaagaagattgtcgacatacaggaaggggacaaggccgatgtggacaaggctgtggccgcggcaaaaagggcattcgagcctggatctgtgtggcgcaatacggatgccagcgaccgtggccgactgctgaacaagctggccgatttgatagagcgggatagacaatacattgcaagccttgagagtctcgataatggtaaacccttctccgactccttcaacgtggacatggtcttggtttgtaagtgcctgaggtactatgccggatggaccgacaagatctgtggcaagaccattcctatggacggcaactttttctgctataccaagcttgaacctgttggagtatgtggtcagatcatcccttggaacttcccgctgctgatgctggcctggaagattggccctgccatcgcctgtggtaacgtggtcgtcctcaaaccggccgagcagacaccactcactgctctctacaccgccgctctcacgaaggaggctggttttcccccgggtgtggtgaacatgattccaggctacggaccaacggcaggtgctgctatctccgaacattatgacgtcgacaaggttgcttttactggatctacggaggttggacagattgtgatgcaggccgctgcacgtaccaatctgaagagagtaactctggaacttggcgggaaaagtcccaacgttgtattttcagacgctgatttggacatagcagtagaggcgtgccacaacggactcttcttcaacatgggccagtgctgctgtgccgcctcgaggacctacgttcaggaggacatctacgatgtcttcaccaagaaactggtagagaaggccaaaacgcgagtagtcggggatcctttcgactctcggtccatgtctgggccccaggtggaccaggaacagttcgacaagatcctggccctgatagacagtggagtacagcagggagccaagctggagtgtggtggcaagcgtcacggaaacgtgggctacttcgtacagccgacagtgttctctggcgttacagaagacatgcgcattggcaaggaggagatctttggtcccgtacagcaaatcatcaaatttaaaaccatggaagaagtggtacagcgggcaaataaaacaacttacgggttagcggccgccatttgcaccaaagacattgacaaggtcatgacctacagcagccaggtgaaggctgggacagtctgggtcaactccttcaatgtgtttggcgcccagtgtccttttggtggatttaagatgtctggtatcggacgggaacttggcgaatctggtttacagcaatactcggaagtcaaaacgatcataatcaaaactccaaccaaagtctag

SEQ ID NO: 38066 - protein, 492 aa, Placopecten magellanicus
MSTPIKNPEIRYKQLFINNEWVNAASGKTFPVINPATGKKIVDIQEGDKADVDKAVAAAKRAFEPGSVWRNTDASDRGRLLNKLADLIERDRQYIASLESLDNGKPFSDSFNVDMVLVCKCLRYYAGWTDKICGKTIPMDGNFFCYTKLEPVGVCGQIIPWNFPLLMLAWKIGPAIACGNVVVLKPAEQTPLTALYTAALTKEAGFPPGVVNMIPGYGPTAGAAISEHYDVDKVAFTGSTEVGQIVMQAAARTNLKRVTLELGGKSPNVVFSDADLDIAVEACHNGLFFNMGQCCCAASRTYVQEDIYDVFTKKLVEKAKTRVVGDPFDSRSMSGPQVDQEQFDKILALIDSGVQQGAKLECGGKRHGNVGYFVQPTVFSGVTEDMRIGKEEIFGPVQQIIKFKTMEEVVQRANKTTYGLAAAICTKDIDKVMTYSSQVKAGTVWVNSFNVFGAQCPFGGFKMSGIGRELGESGLQQYSEVKTIIIKTPTKV

SEQ ID NO: 38067 - DNA, 1617 bp, Arabidopsis thaliana
  CDS (1)..(1617)
atggcggctcgtagagtgtcttctcttttatctcgatctttttcagcttcctctcccttactgtttcgttctcaagggagaaattgttacaatggagggatcttaaggagatttggaacctcttctgctgctgctgaggaaatcataaacccatctgttcaagtttctcacacacagctcctcatcaatgggaactttgttgactctgcttctggtaagacgtttccgactcttgatccgaggacaggcgaagtcattgctcatgtagctgaaggcgatgctgaagatatcaatcgagctgtgaaagctgcaaggacggcctttgatgaaggaccttggcctaaaatgagtgcttatgaaaggtcaagagttttgttgaggtttgcagatttggttgagaaacacagcgaagagctcgcgtctctagagacatgggacaatggcaagccttaccaacaatccttgaccgcagagattcccatgtttgcaagattgttccgttactatgctggatgggcggataagattcatggactaacaattccagctgatggaaactatcaagttcacacattacatgaaccgataggtgtagctggacagatcataccgtggaattttccacttttgatgtttgcttggaaagttggtcctgctcttgcttgtggtaacaccattgtcctcaaaaccgctgagcaaacacctctcacggctttctatgctggaaagcttttccttgaagcgggtcttcctcctggtgttctgaatattgtttcgggattcggtgcaacagcaggtgctgccctcgcgagtcatatggatgtagacaagcttgcttttacaggatcgactgatacggggaaagttatacttggattggctgctaacagcaatcttaagcccgtaactctggaacttggagggaaatcaccgttcatcgtattcgaagatgctgatattgataaagctgtagagcttgcacactttgccctcttcttcaaccaggggcaatgttgctgcgcggggtctcggacatttgttcatgagaaagtgtatgatgagtttgttgagaaatcaaaggcacgcgcattgaaacgtgttgttggtgatcctttcaggaaaggcattgaacagggtcctcagatcgatttgaagcaatttgagaaagtgatgaagtacataaagtcaggtatcgaaagcaatgctactcttgaatgtggtggtgatcagattggagacaaaggttacttcatccaacctactgtcttctctaatgttaaggatgacatgcttatcgctcaagacgagattttcggtccagtccaatcgatcttgaagttcagtgatgtggatgaggtgataaagagggcgaacgagacgaagtacgggctagcggcaggggttttcacgaagaatctggacacggcaaacagggtttcaagggctttgaaagctggtaccgtatgggttaactgcttcgacgtatttgatgcagccataccatttggtggttacaagatgagtgggaatgggagagagaaaggcatatacagtctcaataattacttgcagatcaaggcagtcgtcactgctctaaataagcctgcctggatctga

SEQ ID NO: 38068 - protein, 538 aa, Arabidopsis thaliana
MAARRVSSLLSRSFSASSPLLFRSQGRNCYNGGILRRFGTSSAAAEEIINPSVQVSHTQLLINGNFVDSASGKTFPTLDPRTGEVIAHVAEGDAEDINRAVKAARTAFDEGPWPKMSAYERSRVLLRFADLVEKHSEELASLETWDNGKPYQQSLTAEIPMFARLFRYYAGWADKIHGLTIPADGNYQVHTLHEPIGVAGQIIPWNFPLLMFAWKVGPALACGNTIVLKTAEQTPLTAFYAGKLFLEAGLPPGVLNIVSGFGATAGAALASHMDVDKLAFTGSTDTGKVILGLAANSNLKPVTLELGGKSPFIVFEDADIDKAVELAHFALFFNQGQCCCAGSRTFVHEKVYDEFVEKSKARALKRVVGDPFRKGIEQGPQIDLKQFEKVMKYIKSGIESNATLECGGDQIGDKGYFIQPTVFSNVKDDMLIAQDEIFGPVQSILKFSDVDEVIKRANETKYGLAAGVFTKNLDTANRVSRALKAGTVWVNCFDVFDAAIPFGGYKMSGNGREKGIYSLNNYLQIKAVVTALNKPAWI

SEQ ID NO: 38069 - DNA, 1521 bp, Saccharomyces cerevisiae
  CDS (1)..(1521)
atgcctaccttgtatactgatatcgaaatcccacaattgaaaatctctttaaagcaaccgctagggttgtttatcaacaatgagttttgtccatcatcagatggaaagaccatcgaaactgtgaacccagctactggcgaaccgataacatccttccaagcagctaacgaaaaggatgtagacaaagctgtgaaagctgccagggctgcttttgataacgtttggtcgaagacatcttctgagcaacgtggtatttatctttcaaacttattaaaacttattgaggaggagcaagacacacttgccgcattagagactttagacgctggaaagccttaccattcaaatgccaaaggtgatttggcacaaattttacagcttaccagatattttgctgggtccgctgataagtttgacaaaggtgcaaccataccattgacttttaacaagtttgcatatactctaaaagttccttttggcgttgttgctcaaatcgttccatggaattatcctctagctatggcttgttggaaattgcaaggtgccttagcagccggtaacacggttatcatcaaacctgctgagaatacctctctatctctactttattttgctactttaattaaaaaagcaggttttccacctggtgttgtcaatatcgttcctggttatggatcacttgtaggccaagccctagcatctcacatggatatcgacaaaatatcttttacgggaagcaccaaggtcggtggatttgtgttggaagcttccggccaatcgaaccttaaagacgttacactagaatgcggtggtaagtctcctgctctcgtatttgaagatgcagaccttgataaggctatcgattggatagcagctggcattttctacaattcaggacagaattgtaccgcaaactcaagagtttatgttcaaagttcgatctacgacaagtttgttgaaaagtttaaagaaactgcaaagaaggagtgggatgttgcaggaaaatttgatccgtttgatgagaaatgcatcgttggtccagttatatcaagtacacagtatgaccgcatcaaaagttacatagaacgtggtaaaagggaggaaaagttggacatgttccagacctctgaatttcctattggtggagctaaaggctacttcattcccccaaccatcttcactgatgtcccgcaaacatcgaaactgttacaggatgagatatttggcccggttgtggttgttagcaagttcacaaattatgatgacgctctgaagctggctaatgatacttgctacgggctcgcctctgcggtcttcacaaaagatgtcaagaaagcgcacatgtttgctcgcgatattaaagcaggaactgtttggatcaactcatctaacgatgaagatgttaccgttccttttggcgggtttaaaatgagtggtattggtagagaactggggcaaagtggtgttgatacctatcttcaaacaaaagcagttcacataaatctctctttggacaactaa

SEQ ID NO: 38070 - protein, 506 aa, Saccharomyces cerevisiae
MPTLYTDIEIPQLKISLKQPLGLFINNEFCPSSDGKTIETVNPATGEPITSFQAANEKDVDKAVKAARAAFDNVWSKTSSEQRGIYLSNLLKLIEEEQDTLAALETLDAGKPYHSNAKGDLAQILQLTRYFAGSADKFDKGATIPLTFNKFAYTLKVPFGVVAQIVPWNYPLAMACWKLQGALAAGNTVIIKPAENTSLSLLYFATLIKKAGFPPGVVNIVPGYGSLVGQALASHMDIDKISFTGSTKVGGFVLEASGQSNLKDVTLECGGKSPALVFEDADLDKAIDWIAAGIFYNSGQNCTANSRVYVQSSIYDKFVEKFKETAKKEWDVAGKFDPFDEKCIVGPVISSTQYDRIKSYIERGKREEKLDMFQTSEFPIGGAKGYFIPPTIFTDVPQTSKLLQDEIFGPVVVVSKFTNYDDALKLANDTCYGLASAVFTKDVKKAHMFARDIKAGTVWINSSNDEDVTVPFGGFKMSGIGRELGQSGVDTYLQTKAVHINLSLDN

SEQ ID NO: 38071 - DNA, 1653 bp, Alternaria alternata
  CDS (59)..(1552)
ggcacgaggagaactagtctcgagttttcttcatataccccaatttgttttcacagctatgacatctgtaaagctctcaacccctcagacgggcgagttcgagcagcccaccggactcttcatcaacaatgagttcgtaaaggctgttgacggcaagacctttgatgttatcaacccctccactgaggaggtcatctgcagtgttcaggaggccaccgagaaggatgttgacattgctgttgctgccgcccgcaaagccttcaacggcccatggcgaaaggagacaccagagaacaggggaaagctgcttaacaagcttgccgatctgttcgagaagaatgccgacctcattgctgctgtcgaggctctcgacaacggcaaggccttcagcatggccaagaacgtcgatgttcccgccgccgctggttgcctgaggtactacggaggatgggccgacaagattgagggcaaggtcgtcgacacagcacccgacagcttcaactacatccgcaaggagcctattggtgtttgcggtcagatcatcccatggaacttccctattctcatgtggtcatggaagattggtcctgccatcgccactggtaacaccgtcgtcctgaagactgctgagcagacacctctctccgcatacattgcctgcaagctgatccaggaggccggtttcccaccaggtgtcatcaacgtcatcactggtttcggaaagatcgccggtgctgccatgtccgctcacatggacattgacaagattgcctttactggttcaaccgttgtcggccgtcaaatcatgaagtctgccgctggctccaacttgaagaaggtcactcttgagctcggaggcaagagccccaacattgtcttcgccgacgcagatcttgacgaggctatccactgggtcaactttggtatttacttcaaccacggacaggcttgttgtgctggttcgcgtatctacgtccaagaagagatctacgacaagttcatccagcgcttcaaggagcgggctgctcagaacgctgttggtgacccattcgccgcggacaccttccagggtcctcaagtctcgcagctccagttcgaccgtatcatgggctacatcgaggagggcaagaagtctggcgcgaccatcgagactggtggcaaccgtaagggtgacaagggttacttcatcgagcccacaatcttctccaacgtaaccgaggacatgaagattcagcaagaagagatcttcggccccgtctgcacaatctccaagttcaagacaaaggccgacgtcatcaagattggcaacaacaccacatacggtcttgctgccgctgtacacacatccaacctcaccactgccatcgaagttgccaacgcgctccgtgcaggaactgtctgggtcaactcctacaacactcttcactggcagcttcccttcggagggtacaaggagtctggtattgggcgcgagttgggagaggcggcgctggacaactacatccagaccaagaccgtgtctattcgtcttggcgatgttctgttcggttaagcgctatgctggttttttagcgaaggatctcataagtactatgtatagctcaagtagtcatgaggatctaaatgaatgtaaagaattatcaacaaaaaaaa

SEQ ID NO: 38072 - protein, 497 aa, Alternaria alternata
MTSVKLSTPQTGEFEQPTGLFINNEFVKAVDGKTFDVINPSTEEVICSVQEATEKDVDIAVAAARKAFNGPWRKETPENRGKLLNKLADLFEKNADLIAAVEALDNGKAFSMAKNVDVPAAAGCLRYYGGWADKIEGKVVDTAPDSFNYIRKEPIGVCGQIIPWNFPILMWSWKIGPAIATGNTVVLKTAEQTPLSAYIACKLIQEAGFPPGVINVITGFGKIAGAAMSAHMDIDKIAFTGSTVVGRQIMKSAAGSNLKKVTLELGGKSPNIVFADADLDEAIHWVNFGIYFNHGQACCAGSRIYVQEEIYDKFIQRFKERAAQNAVGDPFAADTFQGPQVSQLQFDRIMGYIEEGKKSGATIETGGNRKGDKGYFIEPTIFSNVTEDMKIQQEEIFGPVCTISKFKTKADVIKIGNNTTYGLAAAVHTSNLTTAIEVANALRAGTVWVNSYNTLHWQLPFGGYKESGIGRELGEAALDNYIQTKTVSIRLGDVLFG

SEQ ID NO: 38073 - DNA, 1660 bp, Cladosporium herbarum
  CDS (70)..(1560)
cacgaggttgaggttgtgccattgccttcctgtttgatacccccaacaaacgagacacatcacttcaatatgacttccgtccagcttgagacgccgcactccggcaagtacgagcagccgaccggcctcttcatcaacaacgagttcgtcaagggccaagaaggcaagaccttcgatgtcatcaacccctccgacgagagcgtgatcacccaggtccacgaggccaccgagaaggatgtcgacatcgccgtcgccgccgcccgcaaggccttcgagggctcatggagacaggagacacccgagaaccgtggcaagctgctcaacaacctcgccaacctgttcgagaagaacatcgacctccttgctgccgttgagtcgctcgacaacggcaaggccatctccatggccaagggtgacatcagcatgtgcgtcggctgcctcagatactacggtggttgggcggacaagatcaccggcaaggtcatcgacactacgcccgacactttcaactacgtcaagaaggagcccattggtgtttgcggtcagatcattccctggaacttcccccttctcatgtgggcatggaagatcggcccggccattgcttgcggtaacactgtcgtcctgaagactgctgagcagacccctcttggtggtctcgtcgctgccagcctcgtcaaggaggccggtttccctcctggtgtcatcaacgtcatttccggtttcggcaaggtcgctggtgccgctctctcttctcacatggacgtcgacaaggtggccttcaccggttccaccgttgtcggccgcacaatcctcaaggctgctgcctcttccaacttgaagaaggtcaccctcgagctcggtggcaagtcaccaaacattgtcttcgaggacgccgatattgacaacgccatctcatgggtcaacttcggtatcttcttcaaccacggccagtgctgctgtgctggttcgcgtgtgtacgttcaggagagcatctacgacaagttcgtccagaagttcaaggagcgcgcacagaagaacgttgttggcgaccccttcgccgccgacacattccagggtcctcaggtttccaaggttcagttcgaccgcattatggagtacatccaggccggcaaggacgccggtgccaccgtcgagaccggtggcaagcgtaagggtgacaagggctacttcattgagcccaccatcttctccaacgtcacagaggacatgaagatcgtgaaagaggagatcttcggccccgtctgctcgatcgccaagttcaagaccaaggaggacgccatcaagctcggcaacgccagcacatacggtctcgccgccgccgtccacaccaagaacctcaacaccgccatcgaggtctccaacgctctcaaggcgggcaccgtctgggtcaacacttacaacaccctccaccaccagatgccgttcggtggctacaaggagtccggtattggccgtgagctcggcgaggatgcgttggccaactacactcagaccaagactgttagcattcgtctcggtgacgccctcttcggttaggcgtgttgaggagagatggattaatgggttgttgaagcggttgaagatcgtttcggtgtaattacgtatgacgttatgaaatgaataacaatgtgtactg

SEQ ID NO: 38074 - protein, 496 aa, Cladosporium herbarum
MTSVQLETPHSGKYEQPTGLFINNEFVKGQEGKTFDVINPSDESVITQVHEATEKDVDIAVAAARKAFEGSWRQETPENRGKLLNNLANLFEKNIDLLAAVESLDNGKAISMAKGDISMCVGCLRYYGGWADKITGKVIDTTPDTFNYVKKEPIGVCGQIIPWNFPLLMWAWKIGPAIACGNTVVLKTAEQTPLGGLVAASLVKEAGFPPGVINVISGFGKVAGAALSSHMDVDKVAFTGSTVVGRTILKAAASSNLKKVTLELGGKSPNIVFEDADIDNAISWVNFGIFFNHGQCCCAGSRVYVQESIYDKFVQKFKERAQKNVVGDPFAADTFQGPQVSKVQFDRIMEYIQAGKDAGATVETGGKRKGDKGYFIEPTIFSNVTEDMKIVKEEIFGPVCSIAKFKTKEDAIKLGNASTYGLAAAVHTKNLNTAIEVSNALKAGTVWVNTYNTLHHQMPFGGYKESGIGRELGEDALANYTQTKTVSIRLGDALFG

SEQ ID NO: 38075 - DNA, 1494 bp, Enchytraeus buchholzi
  CDS (1)..(1494)
atgtccgctcctaagattcccgagcccgtgaaagatcttaaagtggaatttacgaagatattcataaacaacgagtttgtggactcggtgagcggcaagacattcgccactatcaacccgtcgacaggagagaagcttgctgaggttcaggagggcgacaaggcagatatagacaaggcagtggcggccgctagggcagccttcaagagagatgctgagtacaggaagcacgacgcttctgacagagggcgcctcttgttcaagctcgctgatctcatcgaggctcacagagttcagctacgtacgctcgagacactggacaatggcaagccattcgccatgtcgtacctgggtgacactctgatggcacagaaggttctgaggtactacgctgggtttgctgataagatcgtagggcagactattccagctgatggtaacgtgttctgctacacaagacacgagcctgtgggcgtggtcggagctatcacaccctggaactttcccctgcacttggcggcctctaagattgctccagccattgctgcgggctgtacgcttgtgctcaaacctgctgaacagacaccgctaactgctctctatctcgcctcactcgtcaaacaggcggggtttccagcaggtgttattaacatagtgccaggtctgggtcacacagcaggtgctgctctcaccaaccatcctgacatcaacaagataaccttcactggctccactgaggtgggacagttgatcatccagggatcaggcaagacaaacctgaagagagtgactctggagctgggtggaaagagtcccaatatcatcttcccggactctgacttggactatgcggtggaggtgtcccaccaggctatcatggctaacatgggtcaggtctgctgcgctgggtcgagaacattcgtgcacgaggacatctacgaggaatttgtgcgtaggagcgtggagcgagccaagaagagaactgtcggtgaccccttcgatcccaagaacgagaatggaccccaggttgatgagactcagttgaaaaagattctggagctgatagagtccggtaagacggagggggctaagctggagtgtggagggaagagactcggagacaagggatacttcgtcgagcccaccgtgttcactgacgtcaccagcagcatgagggtcgccaaggaggagatctttggcccagttcagctgatcttcaagttcaaggacgtggacgaggtcatagagagagccaacgacacaagctacgggctggctgcggctgtcttcaccaagaacatcgacacagccctcaaagtggccaacagtctggaggcaggcaccgtctgggtgaacacgtacaaccactttgctttccaggctccattcggtggatacaagatgtcaggacagggccgtgaattcggacattacggactcgaagccttcctagaagtaaagactgtgtacgtgcgcactcctaccaaactgtga

SEQ ID NO: 38076 - protein, 497 aa, Enchytraeus buchholzi
MSAPKIPEPVKDLKVEFTKIFINNEFVDSVSGKTFATINPSTGEKLAEVQEGDKADIDKAVAAARAAFKRDAEYRKHDASDRGRLLFKLADLIEAHRVQLRTLETLDNGKPFAMSYLGDTLMAQKVLRYYAGFADKIVGQTIPADGNVFCYTRHEPVGVVGAITPWNFPLHLAASKIAPAIAAGCTLVLKPAEQTPLTALYLASLVKQAGFPAGVINIVPGLGHTAGAALTNHPDINKITFTGSTEVGQLIIQGSGKTNLKRVTLELGGKSPNIIFPDSDLDYAVEVSHQAIMANMGQVCCAGSRTFVHEDIYEEFVRRSVERAKKRTVGDPFDPKNENGPQVDETQLKKILELIESGKTEGAKLECGGKRLGDKGYFVEPTVFTDVTSSMRVAKEEIFGPVQLIFKFKDVDEVIERANDTSYGLAAAVFTKNIDTALKVANSLEAGTVWVNTYNHFAFQAPFGGYKMSGQGREFGHYGLEAFLEVKTVYVRTPTKL

SEQ ID NO: 38077 - DNA, 1491 bp, Octopus dofleini
  CDS (1)..(1491)
atggcaggacttccacctcccaataagaccccagagattaagtttactaagattttcattaacaaccaattcgttgattctgtcaatggcaaggcttactctgttattaacccctgcacaacgaagaagatctgtgacgttcaggaagggagcaaggctgacatcgataaagctgtccaggcatgcaagttagcattcaagcgtggaaccccttggagacgcatggacgccagtcgccgtggccacctcttatatcgtctggctgacctttttgagagagatatagcatacttgtcaagtttggaaactttgaatacaggcaaaccgtacaagagtgcttaccaagatattgtacactgcatccaggtactgcgttattatgctggttgggcggataaaaatatgggacagaacattcccgttgatggtgacttctttagttttaccaaacatgaaccagttggtatctgtggccttattataccttggaactacccaatgttgatgatgacttggaaaatggctcctgccttgtcttgtggtaactgcattgttgtcaaacccgccgaacaaacaccacttacagcactgtattgtgcatctctcatggaagaggctggtttccctccaggtgttgtaaatgtagtaccaggatacggtactatttgtgggcagtcgatttcttcccatcttgacattaacaaagtatctttcactggatcaactgaggttggcaagttggtaatgcaagctgcaggaagcagtaacttgaaacgttgttctctggaactcagtggaaaatgtcctgttgtcgtctttcctgatactgatcttgattttgctgtgcaacaggctcacgaagctgcttttcagaacatgggtcaatgtcgctggtctggatctcgagcctacgtccatgagagtatttatgaggagtttgtaaagcgatcagtggaacaggccacccgaaggaaaattggggatccttacgaactggacactgaacatggacctcagattgatgaggaacaatacaccaaggttttagactatataaagagcgcccaggagcaaggtgcgaagctgaaatatggtggtaacaagcatggagataaaggaggttactatattgaaccaactgtcttctctgaagtttctgacaacatgaagatcgctaaggaagagatctttggtccggtacagctgctgatgaaattccgtgatcttgacgatgtaattgatcgttgtaacaacagcgactacggaatggctgctgccatctttaccaatgatatcaacagaattatgactttcacgaacgccgtcaatactggtactatttgggttaatactttccaccactggttcccacaagcaccatttggaggtttcaagacatctggaatatccagagagatgggcaaatatgcacttcgtgaatacacagaagttaaaagcgtcatctacagaattccacagaaagactcttaa

SEQ ID NO: 38078 - protein, 496 aa, Octopus dofleini
MAGLPPPNKTPEIKFTKIFINNQFVDSVNGKAYSVINPCTTKKICDVQEGSKADIDKAVQACKLAFKRGTPWRRMDASRRGHLLYRLADLFERDIAYLSSLETLNTGKPYKSAYQDIVHCIQVLRYYAGWADKNMGQNIPVDGDFFSFTKHEPVGICGLIIPWNYPMLMMTWKMAPALSCGNCIVVKPAEQTPLTALYCASLMEEAGFPPGVVNVVPGYGTICGQSISSHLDINKVSFTGSTEVGKLVMQAAGSSNLKRCSLELSGKCPVVVFPDTDLDFAVQQAHEAAFQNMGQCRWSGSRAYVHESIYEEFVKRSVEQATRRKIGDPYELDTEHGPQIDEEQYTKVLDYIKSAQEQGAKLKYGGNKHGDKGGYYIEPTVFSEVSDNMKIAKEEIFGPVQLLMKFRDLDDVIDRCNNSDYGMAAAIFTNDINRIMTFTNAVNTGTIWVNTFHHWFPQAPFGGFKTSGISREMGKYALREYTEVKSVIYRIPQKDS

SEQ ID NO: 38079 - DNA, 1488 bp, Ommastrephes sloanei
  CDS (1)..(1488)
atggcaggaattccaccaccaaccaggaaccctgaaatcaagcacaacaaaattttcattaacaatcagtttgtgaactccaccagcaataaagcctacccagtttacaacccttgtgataatgaaaaggtctgtgaagtccaggaaggcgacaagagtgacattgacaaggctgtgcaagcatgcaaagctgctttcaaacgcggtacaccatggcgccgaatggatgccagcagacttggtcatctgttgtaccgtcttgctgatctgatggagagagatatcgcttatatggctagcttggaaacaatggacactggcaaaccatacaagaactcttaccaagacatggtccactgtattcaggttttgcgttatttcgccggatgggccgataagaacatgggagaaagcattcctgtcgatggtgacttcttttgctataccagaaatgaacccgttggcgtctgtggtcttctcattccttataattatccgatgttgatgatgacttggaaaatggcccctgctcttgcctgtggtaattgtatgattgtgaaacccgctgaacaaacaccactgacagccctttactgcgcttcactcatcaaggaggctggtttcccaccaggtgttgtcaatgttgttcctggttttggcaaaatctgtggccaatacatttcatcccaccaggagatcaacaaagtctctttcacaggttcaactgaggttggaatgttagtgatgcaagatgctggaaagagcaacctgaagagatgctctatgcaactcagtggaaaatgccccttggttgtctttgaagatacagaacttgattttgccgtgcaacaagcacatgaagcagctttccagaatatgggtcaatgtcgttggtctggcagccgcacttacgttcacgaaaacatctacgatgaatttgtaaaacgtgccgttgaaaaagccaccagcaggaagaccggagatccctacgaaatggacactgaacatggaccccagatcgacgaggagcaatacaaaaagataatggaattcattaagaaaggcaaagataaaggagcacaactgaagtgcggtggaaaccgacatggggacaagggcttctacgttgagccaactgttttctctgatgtgactgatgaaatgaaattctcccaggaagaaatctttggtcccgtccaattgatcatgaaattcaaagatatggatgaagtaattgatcgatgcaacaacactgactatggaatggctgctgccatctttaccaatgatatcaacagatccattacatttacccatgccatgtattgtggaacagtctgggtgaatacatacaatcattggttccctcaggctccattcggcggttacaagaaatctggattgtaccgagaaatgggaaaatacaccttgcaagaatacactgaagtcaagaatattgtctacaggattccccagaagaactcttaa

SEQ ID NO: 38080 - protein, 495 aa, Ommastrephes sloanei
MAGIPPPTRNPEIKHNKIFINNQFVNSTSNKAYPVYNPCDNEKVCEVQEGDKSDIDKAVQACKAAFKRGTPWRRMDASRLGHLLYRLADLMERDIAYMASLETMDTGKPYKNSYQDMVHCIQVLRYFAGWADKNMGESIPVDGDFFCYTRNEPVGVCGLLIPYNYPMLMMTWKMAPALACGNCMIVKPAEQTPLTALYCASLIKEAGFPPGVVNVVPGFGKICGQYISSHQEINKVSFTGSTEVGMLVMQDAGKSNLKRCSMQLSGKCPLVVFEDTELDFAVQQAHEAAFQNMGQCRWSGSRTYVHENIYDEFVKRAVEKATSRKTGDPYEMDTEHGPQIDEEQYKKIMEFIKKGKDKGAQLKCGGNRHGDKGFYVEPTVFSDVTDEMKFSQEEIFGPVQLIMKFKDMDEVIDRCNNTDYGMAAAIFTNDINRSITFTHAMYCGTVWVNTYNHWFPQAPFGGYKKSGLYREMGKYTLQEYTEVKNIVYRIPQKNS

SEQ ID NO: 38081 - DNA, 1563 bp, Drosophila melanogaster
  CDS (1)..(1563)
atgtccctagtgcgattgatcggagcagaggcccgccatctggcaaagaggtcctactcttcagccgctcccacaaccaagctcttcatcgacggcaagttcgttgagtcgaagacgaacgaatggattgacgtgcacgatccggccaccaaccaagtggtcacccgcgtgcccaaggccacacaggcggagatgcaggcggcccttgagtcgaacaagaaggcttttcgctcgtggagcaaccagtcgatcctcacccgccagcaggtgatgttcaagctgcaggctctcatcaaggagaacatgggtgagctggccaagaacattaccaaggagcagggcaaaaccttggccgacgcagagggcgacgtgctccgcggccttcaggtggtggaacattgctgcagcatcccatctctgcagatgggcgaaaccgtagccaacgtggccagggacatggatacgtactcactagtgctgcccctcggagtaaccgctggcgttgcgccgttcaatttcccggccatgataccgctgtggatgttcccggtggccatcaccaccggtaacactatgctgctgaagccatcggaacgtgtgcctggtgcaaccatgttgctgatggagcttcttaacgaagctggctgtccgccgggtgtcgtcaacgtaatccatggccaacatgacgctgtgaacttcatctgcgatgctcccgaaattaaggcagtgtcctttgtgggctccgaccaggcaggcaagtacatttacgagcgggctggcaagaatggcaagcgggtgcaatctaatatgggcgctaagaaccacggcatcatcctgggcgatgccaacaaggagaatactttgaaccagttggcaggtgccgcctttggagctgctggtcagcgttgcatggcattgtctacggctgtctttgtcggcgatgcccaggcatggattcccgatctggtggagcgtgcccagaagctgaaggtaaatgccggccatgtacctggaactgacgtgggtcccgtgatcagtgccgcctcacgccaacgcattaatgacctgattgagtctggggtcaaggagggagctaagcttatcctggacggcaggaagataaccgtgcccggatacgaggatggatactttgtgggaccaaccatcctaagcgatgttacgcccagcatgaagtgctacactgaggagatctttggccctgtgttggttatcctgaaggccgacaccttggacgatgccattggcattgtaaatgccaatccttatggaaatggtaccgccgtattcaccaccaatggagcggcagcccgcaagtttgtcaacgaaattgatgctggtcaggttggcgtgaatgtgccaattcccgtgcccctgcccatgttctcctttaccggaactcgtggctctttccgcggcgaccatcacttctatggcaaacagggtatcaaattctacacccagacgaagacggtcacccagttgtggcgcaaaacggatgtgacccacacccaggcggctgtggccatgcccaccatgaaatag

SEQ ID NO: 38082 - protein, 520 aa, Drosophila melanogaster
MSLVRLIGAEARHLAKRSYSSAAPTTKLFIDGKFVESKTNEWIDVHDPATNQVVTRVPKATQAEMQAALESNKKAFRSWSNQSILTRQQVMFKLQALIKENMGELAKNITKEQGKTLADAEGDVLRGLQVVEHCCSIPSLQMGETVANVARDMDTYSLVLPLGVTAGVAPFNFPAMIPLWMFPVAITTGNTMLLKPSERVPGATMLLMELLNEAGCPPGVVNVIHGQHDAVNFICDAPEIKAVSFVGSDQAGKYIYERAGKNGKRVQSNMGAKNHGIILGDANKENTLNQLAGAAFGAAGQRCMALSTAVFVGDAQAWIPDLVERAQKLKVNAGHVPGTDVGPVISAASRQRINDLIESGVKEGAKLILDGRKITVPGYEDGYFVGPTILSDVTPSMKCYTEEIFGPVLVILKADTLDDAIGIVNANPYGNGTAVFTTNGAAARKFVNEIDAGQVGVNVPIPVPLPMFSFTGTRGSFRGDHHFYGKQGIKFYTQTKTVTQLWRKTDVTHTQAAVAMPTMK

SEQ ID NO: 38083 - DNA, 1509 bp, Oryza sativa
  CDS (1)..(1509)
atggcggcggcgaacggcggcgacagcaaggggttcgaggtgccgaagctggagatcaagttcaccaagctcttcatcaatggccgcttcgtcgacgccgtctccggcaagacattcgaaacccgtgacccgcgcaccggcgaggtcatcgccaagatcgccgaaggagacaaggccgacatcgacctcgccgtgaaggccgccagggaggccttcgaccatggcccctggccaagaatgtccggctttgcgaggggaaggatcctgcacaagttcgcggacctggtggagcagcacgtggaggagctggcggcgctggacacggtggacgccggcaagctgttcgcgatggggaagctcgtcgacatccccggcggcgcgaacctgctccggtactacgccggcgcggcggacaaggtgcacggcgagacgctcaagatggcgcggccatgccacgggtacacgctcaaggagcccgtcggcgtcgtcggccacatcgtgccgtggaactaccccaccaccatgttcttcttcaaggccagcccggcgctcgccgccggctgcaccatggtcgtcaagcccgccgagcagacccccctctccgcgctcttctacgcccacctcgccaagcttgccggcgtccccgacggcgtgctcaacgtcgtccccggcttcggccccaccgccggcgccgctatctcctcccacatggacattgacaaggtgagcttcaccggctcgacggaggtcggccggctggtgatggaggcggcggcgaagagcaacctgaagcccgtctcgctcgagctgggtggcaagtctccggtcatcgtgttcgacgacgccgacctcgacacggccgtgaacctggtccacatggcctcctacaccaacaagggtgagatctgcgtcgccggctcgcgaatctatgtccaggaggggatctacgatgcgttcgtgaagaaggcgaccgagatggccaagaaatcggtggtcggagatccgttcaacccgcgagttcatcaaggccctcagattgacaaggagcaatacgagaagatcctcaagtacatcgacatcggtaagcgcgaaggcgcgacgttggtcaccggagggaagccctgcggcgaaaacgggtactacatcgagcccaccatcttcacggacgtcaaggaagaaatgtcgatcgcgcaagaggaaatcttcgggccggtgatggccctcatgaaattcaagacggttgaggaggcgatccagaaggcgaacagcacccggtacggcctggctgccggcatagtcaccaagaacatcgacgtcgcgaacacggtttcgcggtcgatccgggcaggggcaatctggatcaattgctacctcggcttcgaccccgacgtgccgttcggggggtacaagatgagcggcttcggcaaggacatgggcatggacgcccttgagaagtacctccacaccaaggcggtggtcacccctctctacaacaccccttggctatga

SEQ ID NO: 38084 - protein, 502 aa, Oryza sativa
MAAANGGDSKGFEVPKLEIKFTKLFINGRFVDAVSGKTFETRDPRTGEVIAKIAEGDKADIDLAVKAAREAFDHGPWPRMSGFARGRILHKFADLVEQHVEELAALDTVDAGKLFAMGKLVDIPGGANLLRYYAGAADKVHGETLKMARPCHGYTLKEPVGVVGHIVPWNYPTTMFFFKASPALAAGCTMVVKPAEQTPLSALFYAHLAKLAGVPDGVLNVVPGFGPTAGAAISSHMDIDKVSFTGSTEVGRLVMEAAAKSNLKPVSLELGGKSPVIVFDDADLDTAVNLVHMASYTNKGEICVAGSRIYVQEGIYDAFVKKATEMAKKSVVGDPFNPRVHQGPQIDKEQYEKILKYIDIGKREGATLVTGGKPCGENGYYIEPTIFTDVKEEMSIAQEEIFGPVMALMKFKTVEEAIQKANSTRYGLAAGIVTKNIDVANTVSRSIRAGAIWINCYLGFDPDVPFGGYKMSGFGKDMGMDALEKYLHTKAVVTPLYNTPWL

SEQ ID NO: 38085 - DNA, 1584 bp, Oryza sativa
  CDS (1)..(1584)
atggcgatggcgatggcgatgcgacgcgcggcggcgctcggcgcgcgccacatcctcgccgcctcgtccacctcctcctccggcgtcctcctccgccgccacatgagcgtggacgcgggggcggcgatggagaaggtacgggcggcggggctgctccggacgcaggggctcatcggcggcaaatgggtggacgcctacgacggcaagaccatcgaggttcaaaatccagcaactggagagactcttgccaatgtgtcctgtatgggcagcaaagaaacatctgatgcaatagcttcagctcacagtacattctattcttggagcaaactcactgcaaatgagaggagcaaggctctaagaaaatggcatgatttaattatctcacacaaggaagaacttgcacttctcatgacactggagcaagggaaacctatgaaagaggctcttgttgaggtcacatatggtgcaagttttattgaatactttgctgaagaagcaaagcgtatatatggtgatattattcccccaactctatctgatcgtagattattggttttgaagcagcctgttggagtagttggagctgttacaccatggaattttcctttagcgatgataaccagaaaggttggaccagcattggcttgtggctgcactgtcgttgtcaagccatcagagttcacacctttgacagcacttgctgcagcagatcttgctcttcaagctggaataccagctggcgcaataaatgttgtgatgggtaatgctcctgagataggtgatgctctactccagagtacacaggtcagaaagattacattcacagggtcaacagctgttggcaaaaaactgatggctggatcagcaaatactgtgaagaaggtttctttggagcttggtggcaatgcaccttgcattgtttttgatgatgcagacattgatgttgccattaaaggcagtcttgctgctaagttccgtaacagcggacagacatgtgtatgtgcaaacaggatattggtgcaagaaggtatttatgaaaaatttgcaagtgcgtttatcaaggctgttcagagtttgaaggttggtaatgggcttgaagagagtacatcacagggccctctgatcaatgaagctgctgttcagaaggtagagaagttcataaatgacgccacttcaaagggagcaaacatcatgcttggtggtaaaaggcacagccttgggatgtcattctatgagccaactgtagtagggaacgtcagcaatgatatgcttcttttcagggaagaagtctttggtccagttgcaccacttgtaccattcaaaactgaggaagatgcaatccgtatggccaatgataccaacgcaggcttagctgcatatatcttcacaaagagcatacctcgttcatggcgcgtttcggaagctcttgaatatggactagtcggtgtgaacgaggggatcatctcaacagaggttgcgccgtttggcggcgtcaagcaatctggccttgggagagaaggatcaaaatacggcatggacgagtacctggagctcaagtacatttgcatgggaaacctgaactga

SEQ ID NO: 38086 - protein, 527 aa, Oryza sativa
MAMAMAMRRAAALGARHILAASSTSSSGVLLRRHMSVDAGAAMEKVRAAGLLRTQGLIGGKWVDAYDGKTIEVQNPATGETLANVSCMGSKETSDAIASAHSTFYSWSKLTANERSKALRKWHDLIISHKEELALLMTLEQGKPMKEALVEVTYGASFIEYFAEEAKRIYGDIIPPTLSDRRLLVLKQPVGVVGAVTPWNFPLAMITRKVGPALACGCTVVVKPSEFTPLTALAAADLALQAGIPAGAINVVMGNAPEIGDALLQSTQVRKITFTGSTAVGKKLMAGSANTVKKVSLELGGNAPCIVFDDADIDVAIKGSLAAKFRNSGQTCVCANRILVQEGIYEKFASAFIKAVQSLKVGNGLEESTSQGPLINEAAVQKVEKFINDATSKGANIMLGGKRHSLGMSFYEPTVVGNVSNDMLLFREEVFGPVAPLVPFKTEEDAIRMANDTNAGLAAYIFTKSIPRSWRVSEALEYGLVGVNEGIISTEVAPFGGVKQSGLGREGSKYGMDEYLELKYICMGNLN

SEQ ID NO: 38087 - DNA, 1686 bp, Oryza sativa
  CDS (1)..(1686)
atggcggcaaggagggctgcttcctccctcctctctcgcggcctcatcgcgaggccttctgctgcctcctccactggcgactccgctatccttggagcaggctcagcacggggcttcttgcctggatcacttcacagattcagcgctgcaccggccgccgctgccaccgccgcagccactgaggagccgatccagccgccggtggacgtgaagtacaccaagctcctcatcaatggcaacttcgtcgatgcagcatctgggaagacgttcgcgacggtggatccccgcaccggcgatgtcattgcccgcgtggccgagggcgacgcggaggacgtcaaccgcgccgtcgccgccgcccgccgggccttcgacgagggcccgtggccgcggatgaccgcctacgagtttgcgcgtgtgtgcatgcaggagcggtgcagggtgttgctgcggttcgcggacctgatcgagcagcacgccgatgagatcgcggcgctggagacgtgggacggcgggaagacgctggagcagacgacggggacggaggtgccgatggtggcgcggtacatgcggtactacggcgggtgggcggacaagatccacggcctcgtcgtgccggcggatgggccacaccacgtgcaggtgctacacgagcccatcggcgtggccgggcagatcatcccctggaacttcccgctgctcatgttcgcctggaaggtcggcccggcgctcgcctgcggcaacgccgtcgtgctcaagaccgccgagcagacgccgctctccgcgctcttcgtcgccagcctgctccacgaggctggcctccccgacggcgttctcaacgtcgtctccggctttggtccgaccgccggcgccgctctctccagccacatgggtgtcgacaagcttgcattcaccggttcgacgggcacgggcaagatcgtgcttgagctggccgcaaggagcaaccttaagccggtgacgctggagctcggaggcaaatcacctttcatcgtcatggatgacgccgatgtcgaccaggccgtcgagcttgcgcaccgcgcgctcttcttcaaccaggggcaatgctgctgcgcggggtcacgcacgttcgtgcacgagcgcgtctacgacgagttcgtggagaaggccagggctcgcgctctgcagcgtgtggtcggcgacccattcaggacaggcgtcgagcaggggcctcagatcgacggcgagcaattcaagaagatcttgcagtacgtcaagtcgggcgtggacagtggcgccacactcgtggccggcggcgacagggcgggcagcagggggttctacatccagccaaccgtctttgcagacgtcgaggacgaaatgaagatcgcgcaggaggagatattcgggccggtgcagtccatcctcaagttcagcacggtggaggaggtggtgcggagggcgaacgcgacgccatacgggctggcggcgggggtgttcacccagaggctggacgcggcgaacaccctggcgcgggcattgagggtcgggacggtgtgggtgaacacctacgacgtgttcgacgcggccgtcccgttcggcggctacaagatgagcggcgttggcagggagaagggcgtctacagcctccgcaactacctccagaccaaggccgtcgtcacgcccatcaaggacgccgcctggttgtag

SEQ ID NO: 38088 - protein, 561 aa, Oryza sativa
MAARRAASSLLSRGLIARPSAASSTGDSAILGAGSARGFLPGSLHRFSAAPAAAATAAATEEPIQPPVDVKYTKLLINGNFVDAASGKTFATVDPRTGDVIARVAEGDAEDVNRAVAAARRAFDEGPWPRMTAYEFARVCMQERCRVLLRFADLIEQHADEIAALETWDGGKTLEQTTGTEVPMVARYMRYYGGWADKIHGLVVPADGPHHVQVLHEPIGVAGQIIPWNFPLLMFAWKVGPALACGNAVVLKTAEQTPLSALFVASLLHEAGLPDGVLNVVSGFGPTAGAALSSHMGVDKLAFTGSTGTGKIVLELAARSNLKPVTLELGGKSPFIVMDDADVDQAVELAHRALFFNQGQCCCAGSRTFVHERVYDEFVEKARARALQRVVGDPFRTGVEQGPQIDGEQFKKILQYVKSGVDSGATLVAGGDRAGSRGFYIQPTVFADVEDEMKIAQEEIFGPVQSILKFSTVEEVVRRANATPYGLAAGVFTQRLDAANTLARALRVGTVWVNTYDVFDAAVPFGGYKMSGVGREKGVYSLRNYLQTKAVVTPIKDAAWL

SEQ ID NO: 38089 - DNA, 1662 bp, Oryza sativa
  CDS (1)..(1662)
atggcggcaaggagggctgcttcctccctcctctctcgcggcctcatcgcgaggccttctgctgcctcctccactggcgactccgctatccttggagcaggctcagcacggggcttcttgcctggatcacttcacagattcagcgctgcaccggccgccgctgccaccgccgcagccactgaggagccgatccagccgccggtggacgtgaagtacaccaagctcctcatcaatggcaacttcgtcgatgcagcatctgggaagacgttcgcgacggtggatccccgcaccggcgatgtcattgcccgcgtggccgagggcgacgcggaggacgtcaaccgcgccgtcgccgccgcccgccgggccttcgacgagggcccgtggccgcggatgaccgcctacgagcggtgcagggtgttgctgcggttcgcggacctgatcgagcagcacgccgatgagatcgcggcgctggagacgtgggacggcgggaagacgctggagcagacgacggggacggaggtgccgatggtggcgcggtacatgcggtactacggcgggtgggcggacaagatccacggcctcgtcgtgccggcggatgggccacaccacgtgcaggtgctacacgagcccatcggcgtggccgggcagatcatcccctggaacttcccgctgctcatgttcgcctggaaggtcggcccggcgctcgcctgcggcaacgccgtcgtgctcaagaccgccgagcagacgccgctctccgcgctcttcgtcgccagcctgctccacgaggctggcctccccgacggcgttctcaacgtcgtctccggctttggtccgaccgccggcgccgctctctccagccacatgggtgtcgacaagcttgcattcaccggttcgacgggcacgggcaagatcgtgcttgagctggccgcaaggagcaaccttaagccggtgacgctggagctcggaggcaaatcacctttcatcgtcatggatgacgccgatgtcgaccaggccgtcgagcttgcgcaccgcgcgctcttcttcaaccaggggcaatgctgctgcgcggggtcacgcacgttcgtgcacgagcgcgtctacgacgagttcgtggagaaggccagggctcgcgctctgcagcgtgtggtcggcgacccattcaggacaggcgtcgagcaggggcctcagatcgacggcgagcaattcaagaagatcttgcagtacgtcaagtcgggcgtggacagtggcgccacactcgtggccggcggcgacagggcgggcagcagggggttctacatccagccaaccgtctttgcagacgtcgaggacgaaatgaagatcgcgcaggaggagatattcgggccggtgcagtccatcctcaagttcagcacggtggaggaggtggtgcggagggcgaacgcgacgccatacgggctggcggcgggggtgttcacccagaggctggacgcggcgaacaccctggcgcgggcattgagggtcgggacggtgtgggtgaacacctacgacgtgttcgacgcggccgtcccgttcggcggctacaagatgagcggcgttggcagggagaagggcgtctacagcctccgcaactacctccagaccaaggccgtcgtcacgcccatcaaggacgccgcctggttgtag

SEQ ID NO: 38090 - protein, 553 aa, Oryza sativa
MAARRAASSLLSRGLIARPSAASSTGDSAILGAGSARGFLPGSLHRFSAAPAAAATAAATEEPIQPPVDVKYTKLLINGNFVDAASGKTFATVDPRTGDVIARVAEGDAEDVNRAVAAARRAFDEGPWPRMTAYERCRVLLRFADLIEQHADEIAALETWDGGKTLEQTTGTEVPMVARYMRYYGGWADKIHGLVVPADGPHHVQVLHEPIGVAGQIIPWNFPLLMFAWKVGPALACGNAVVLKTAEQTPLSALFVASLLHEAGLPDGVLNVVSGFGPTAGAALSSHMGVDKLAFTGSTGTGKIVLELAARSNLKPVTLELGGKSPFIVMDDADVDQAVELAHRALFFNQGQCCCAGSRTFVHERVYDEFVEKARARALQRVVGDPFRTGVEQGPQIDGEQFKKILQYVKSGVDSGATLVAGGDRAGSRGFYIQPTVFADVEDEMKIAQEEIFGPVQSILKFSTVEEVVRRANATPYGLAAGVFTQRLDAANTLARALRVGTVWVNTYDVFDAAVPFGGYKMSGVGREKGVYSLRNYLQTKAVVTPIKDAAWL

SEQ ID NO: 38091 - DNA, 1533 bp, Oryza sativa
  CDS (1)..(1533)
atggcggcaaggagggctgcttcctccctcctctctcgcggcctcatcgcgaggccttctgctgcctcctccactggcgactccgctatccttggagcaggctcagcacggggcttcttgcctggatcacttcacagattcagcgctgcaccggccgccgctgccaccgccgcagccactgaggagccgatccagccgccggtggacgtgaagtacaccaagctcctcatcaatggcaacttcgtcgatgcagcatctgggaagacgttcgcgacggtggatccccgcaccggcgatgtcattgcccgcgtggccgagggcgacgcggaggacgtcaaccgcgccgtcgccgccgcccgccgggccttcgacgagggcccgtggccgcggatgaccgcctacgagcggtgcagggtgttgctgcggttcgcggacctgatcgagcagcacgccgatgagatcgcggcgctggagacgtgggacggcgggaagacgctggagcagacgacggggacggaggtgccgatggtggcgcggtacatgcggtactacggcgggtgggcggacaagatccacggcctcgtcgtgccggcggatgggccacaccacgtgcaggtgctacacgagcccatcggcgtggccgggcagatcatcccctggaacttcccgctgctcatgttcgcctggaaggtcggcccggcgctcgcctgcggcaacgccgtcgtgctcaagaccgccgagcagacgccgctctccgcgctcttcgtcgccagcctgctccacgaggctggcctccccgacggcgttctcaacgtcgtctccggctttggtccgaccgccggcgccgctctctccagccacatgggtgtcgacaagcttgcattcaccggttcgacgggcacgggcaagatcgtgcttgagctggccgcaaggagcaaccttaagccggtgacgctggagctcggaggcaaatcacctttcatcgtcatggatgacgccgatgtcgaccaggccgtcgagcttgcgcaccgcgcgctcttcttcaaccaggggcctcagatcgacggcgagcaattcaagaagatcttgcagtacgtcaagtcgggcgtggacagtggcgccacactcgtggccggcggcgacagggcgggcagcagggggttctacatccagccaaccgtctttgcagacgtcgaggacgaaatgaagatcgcgcaggaggagatattcgggccggtgcagtccatcctcaagttcagcacggtggaggaggtggtgcggagggcgaacgcgacgccatacgggctggcggcgggggtgttcacccagaggctggacgcggcgaacaccctggcgcgggcattgagggtcgggacggtgtgggtgaacacctacgacgtgttcgacgcggccgtcccgttcggcggctacaagatgagcggcgttggcagggagaagggcgtctacagcctccgcaactacctccagaccaaggccgtcgtcacgcccatcaaggacgccgcctggttgtag

SEQ ID NO: 38092 - protein, 510 aa, Oryza sativa
MAARRAASSLLSRGLIARPSAASSTGDSAILGAGSARGFLPGSLHRFSAAPAAAATAAATEEPIQPPVDVKYTKLLINGNFVDAASGKTFATVDPRTGDVIARVAEGDAEDVNRAVAAARRAFDEGPWPRMTAYERCRVLLRFADLIEQHADEIAALETWDGGKTLEQTTGTEVPMVARYMRYYGGWADKIHGLVVPADGPHHVQVLHEPIGVAGQIIPWNFPLLMFAWKVGPALACGNAVVLKTAEQTPLSALFVASLLHEAGLPDGVLNVVSGFGPTAGAALSSHMGVDKLAFTGSTGTGKIVLELAARSNLKPVTLELGGKSPFIVMDDADVDQAVELAHRALFFNQGPQIDGEQFKKILQYVKSGVDSGATLVAGGDRAGSRGFYIQPTVFADVEDEMKIAQEEIFGPVQSILKFSTVEEVVRRANATPYGLAAGVFTQRLDAANTLARALRVGTVWVNTYDVFDAAVPFGGYKMSGVGREKGVYSLRNYLQTKAVVTPIKDAAWL

SEQ ID NO: 38093 - DNA, 1518 bp, Oryza sativa
  CDS (1)..(1518)
atggccgcgccgtcggcgatcccccgccgcggcctgttcatcggcggcgggtggcgggagccgtccctcggccgccgcctccccgtcgtcaacccggccacggaggcaaccatcggtgacatcccggcggccacggcggaggacgtcgagctcgcggtgtcggcggcgagggatgcgttcggccgcgacggtgggagacactggtcgcgcgcgcctggggccgtgcgggccaagtacctcaaggcgatcgccgctaagattaaagataagaaatcttatctagctttgttggagactcttgattctgggaagcctctggatgaagcagctggggacatggaggatgtcgctgcatgctttgagtattatgctgatctggcagaagctttagatgggaaacaacgggcaccaatctctctacccatggaaaattttgagtcctatgtactcaaagaacccattggggttgttggacttatcactccctggaattatcctctgctgatggctacttggaaggttgcacctgccctggctgctgggtgtacagctgtattaaagccatctgagcttgcttccctgacatgtttagagcttggtggaatatgtgcagaaattggattacctccaggagtcttgaacataattactggtctgggcactgaagctggtgctccattagcttcacatccccatgtggataagattgcttttactggaagcacagaaactggtaagaggataatgattactgcttcccaaatggtcaagcctgtttcgttagagcttggtggcaaaagtcctcttattgtctttgatgatgttgatattgataaagctgttgagtgggccatgtttgggtgttttgcgaacgctggtcaagtctgcagtgctacttctcgtctacttttgcatgagaaaattgcaaagcgattcttggataggttggttgcatgggcaaagagtatcaaaatctcagatccactagaagaaggttgcaggctggggtcagtcgttagtgaagggcagtatcaaaaaataatgaagttcatctcaacagcaagatgtgaaggtgccacaattctatatgggggtgcccgaccacaacacctcaaaagggggttctttattgagcctactattataacaaatgttagcacatcaatgcaaatttggcgagaggaagtctttggaccggtcatctgcgttaaagaatttaggacagagcgtgaagcagtagaacttgcaaatgatactcactatggtctagctggcgctgtgatttccaatgatctagagaggtgcgagcgcatttcaaaggctatccagtcaggtatcgtttggataaattgctcgcaaccatgctttgttcaagctccatggggagggaacaagcggagtggttttggccgggagctaggacagtggggcctcgataactacttgagcgtgaagcaagtcaccaagtactgctcagatgaaccatacggatggtaccggcctccatccaagctgtag

SEQ ID NO: 38094 - protein, 505 aa, Oryza sativa
MAAPSAIPRRGLFIGGGWREPSLGRRLPVVNPATEATIGDIPAATAEDVELAVSAARDAFGRDGGRHWSRAPGAVRAKYLKAIAAKIKDKKSYLALLETLDSGKPLDEAAGDMEDVAACFEYYADLAEALDGKQRAPISLPMENFESYVLKEPIGVVGLITPWNYPLLMATWKVAPALAAGCTAVLKPSELASLTCLELGGICAEIGLPPGVLNIITGLGTEAGAPLASHPHVDKIAFTGSTETGKRIMITASQMVKPVSLELGGKSPLIVFDDVDIDKAVEWAMFGCFANAGQVCSATSRLLLHEKIAKRFLDRLVAWAKSIKISDPLEEGCRLGSVVSEGQYQKIMKFISTARCEGATILYGGARPQHLKRGFFIEPTIITNVSTSMQIWREEVFGPVICVKEFRTEREAVELANDTHYGLAGAVISNDLERCERISKAIQSGIVWINCSQPCFVQAPWGGNKRSGFGRELGQWGLDNYLSVKQVTKYCSDEPYGWYRPPSKL

SEQ ID NO: 38095 - DNA, 1650 bp, Oryza sativa
  CDS (1)..(1650)
atggctgccgctgctgcaaggaggggctcatcgctgctctctcgctgcctgctgtccaggcccgccgccgccgcctcgcctgctgtcccctctgcgctccgcagggcagatgggacacaaggattgttgccgggaatccttcagaggttcagcactgcagcagtagcagaggagcccatatcacccccagtccaagtgaactacactcagctcctcattgatggaaaattcgttgattcagcatctggcaaaactttcccaactctggaccctcgtaccggggagctgattgcccatgtggctgaaggcgatgcggaggatattaaccgtgcggttcatgcggcccgcaaggctttcgatgaagggccatggccaaagatgactgcctatgagagatcccggattctgttgcggtttgctgacttgattgagaagcacaacgatgaaattgctgcattggagacatgggacaacggcaagccgtatgcgcaagctgccaacattgaagtgccaatggtggcacggctgatgcggtactatgctggttgggctgacaagatccatgggcttgtcgtgccggctgacggcccacaccatgtacaggtgctgcacgagcccattggtgtcgcaggtcagatcatcccatggaactttccgcttctgatgtttgcgtggaaagttggccctgctttggcttgtggaaacactgttgtgctcaagacggctgagcaaactcctctgtctgctctatttgcttctaagctgttgcatgaggctggactcccagacggtgttgttaacgtggtatctggttttggacctactgctggtgctgctcttgctagtcacatggatgtcgataagattgcattcactggatcgaccgatactggaaaagtcgtccttgagttggctgcaaggagcaaccttaagtcagtgacactggagctaggaggcaagtctcctttcatcatcatggatgatgctgatgttgaccatgctgttgagcttgcgcattttgcactgttctttaaccagggacaatgttgctgtgctgggtctcgtacatttgtgcatgagcgtatctatgatgagttcgtggagaaggccaaggctcgtgctctcaagcgtgtggttggtgatccattcaagaatggtgttgaacagggccctcagattgatgacgagcaattcaacaagatcttgcgctacatcaagtatggtgttgacagtggagccaaccttgtgactggtggcgacagattaggtgacaaaggttactacatccagccaacaattttctcggatgtacaggataacatgaggattgctcaagaagagatatttggccctgtgcagtccattctgaagttcaatgatctgaacgaggtcatcaagagggcaaatgcaagccagtacgggctggctgctggggtcttcaccaacaacctgaacacggccaacaccctgacccgcgcgctcagggtcgggaccgtgtgggtgaactgcttcgacgtcttcgacgccgcgatcccgttcggcggatacaagcagagcggcatcgggagggagaagggcatcgacagcctgaagaactacctgcaggtcaaggccgtcgtcacgccgatcaagaacgccgcgtggttgtaa

SEQ ID NO: 38096 - protein, 549 aa, Oryza sativa
MAAAAARRGSSLLSRCLLSRPAAAASPAVPSALRRADGTQGLLPGILQRFSTAAVAEEPISPPVQVNYTQLLIDGKFVDSASGKTFPTLDPRTGELIAHVAEGDAEDINRAVHAARKAFDEGPWPKMTAYERSRILLRFADLIEKHNDEIAALETWDNGKPYAQAANIEVPMVARLMRYYAGWADKIHGLVVPADGPHHVQVLHEPIGVAGQIIPWNFPLLMFAWKVGPALACGNTVVLKTAEQTPLSALFASKLLHEAGLPDGVVNVVSGFGPTAGAALASHMDVDKIAFTGSTDTGKVVLELAARSNLKSVTLELGGKSPFIIMDDADVDHAVELAHFALFFNQGQCCCAGSRTFVHERIYDEFVEKAKARALKRVVGDPFKNGVEQGPQIDDEQFNKILRYIKYGVDSGANLVTGGDRLGDKGYYIQPTIFSDVQDNMRIAQEEIFGPVQSILKFNDLNEVIKRANASQYGLAAGVFTNNLNTANTLTRALRVGTVWVNCFDVFDAAIPFGGYKQSGIGREKGIDSLKNYLQVKAVVTPIKNAAWL

SEQ ID NO: 38097 - DNA, 1605 bp, Oryza sativa
  CDS (1)..(1605)
atgctccgcgccgccctcctccgctcaggctccggcctccgccggcctcccatggccgcgccgctctccaccgccgccgccgcctcgtggctctccgacagcgcctcgtctccgcctagggtgcgcctcctcatcggcggggagttcgtcgagtcgcgggccgacgagcacgtcgacgtcaccaatccggcgacgcaggaggtggtgtcgcggatcccgctcaccaccgccgacgagttcagggccgccgtggacgccgccaggaccgccttccccgggtggcggaacacgccggtgaccacgcggcagcgcatcatgctcaagtaccaggagctcatccgggccaacatggataaactggcagagaacattacaaccgaacaggggaagacactgaaggatgcttggggcgatgtattccgtgggctagaggtggtggaacatgcttgtggaatggggacactgcagatgggtgaatatgtatcaaatgtttctaacgggattgacacctttagcattagggagccacttggtgtatgtgctggaatatgtccattcaattttccagctatgatccccctatggatgttcccaatagcggtcacttgtggcaatacttttgttctaaagccatcagaaaaagatccaggggctgctatgatgcttgcggagctagcaatggaggctggtttaccaaagggtgtgttgaacattgttcatggtacccatgatgttgtgaacaacatttgtgatgacgaggacatcaaggcagtttcctttgttggttccaatatagctggtatgcatatatattctagagcatcggcaaaggggaagcgtgttcagtctaatatgggtgcaaagaatcatgcaattatccttcctgatgctgaccgagatgccacactgaatgcccttattgctgctggttttggtgctgctgggcaaaggtgtatggcattgagcactgctgtttttgttggaggttcagagccatgggaggatgagctagtcaaacgtgcaagcagccttgtggttaattcaggaatggctagtgatgcagaccttggtccagtgatcagcaaacaggctaaggaacgtatctgcaaattaatacaaagtggtgctgataatggtgctcgtgtgctgcttgatggaagagatattgtggttcctaacttcgagaatggtaattttgttggtccaacactccttgctgatgttaaaagtgaaatggaatgttacaaggaggagatttttggtccagttcttctcttgatgaaggctgagagcctagatgatgctatccaaattgtgaacagaaacaaatatggcaatggagcatccatatttacaacatctggtgtgtctgcaaggaaatttcaaacagacattgaagctggccaggtgggcatcaacgtgccgattccagtacccctgccgttcttctccttcaccggcagcaaagcctcctttgcaggagacttgaatttctacggcaaggcgggcgtgcagttcttcacccagatcaagacggtcacgcagcagtggaaggagtcgccggctcagcgcgtctccctctccatgcccacctcgcagaagtga

SEQ ID NO: 38098 - protein, 534 aa, Oryza sativa
MLRAALLRSGSGLRRPPMAAPLSTAAAASWLSDSASSPPRVRLLIGGEFVESRADEHVDVTNPATQEVVSRIPLTTADEFRAAVDAARTAFPGWRNTPVTTRQRIMLKYQELIRANMDKLAENITTEQGKTLKDAWGDVFRGLEVVEHACGMGTLQMGEYVSNVSNGIDTFSIREPLGVCAGICPFNFPAMIPLWMFPIAVTCGNTFVLKPSEKDPGAAMMLAELAMEAGLPKGVLNIVHGTHDVVNNICDDEDIKAVSFVGSNIAGMHIYSRASAKGKRVQSNMGAKNHAIILPDADRDATLNALIAAGFGAAGQRCMALSTAVFVGGSEPWEDELVKRASSLVVNSGMASDADLGPVISKQAKERICKLIQSGADNGARVLLDGRDIVVPNFENGNFVGPTLLADVKSEMECYKEEIFGPVLLLMKAESLDDAIQIVNRNKYGNGASIFTTSGVSARKFQTDIEAGQVGINVPIPVPLPFFSFTGSKASFAGDLNFYGKAGVQFFTQIKTVTQQWKESPAQRVSLSMPTSQK

SEQ ID NO: 38099 - DNA, 1794 bp, Oryza sativa
  CDS (1)..(1794)
atggcgttgtggtggccgctcctggtgctcgccgccgcctacgcgctctgccgcatcctcctctttctcatcccgcccaccgtcccctccatcgatgtcgacgcttccgacgtgctcgaagacgccaaccagaacaaggaggatagctacatctacataccaccaaggaaggggaaaggagctcagactgacaaggtccaatgctatgagccagcaactatgaaatacttgggatacttccctgcattgacgcctgatgaggttaaggagcatgttgcgcaagccaggaaagcacaaaagatatgggcaaaaagcagcttcaagcaaagacgccagtttcttcgaatccttctaaaatatatacttgaacatcaggatctgatatgcgagatatcatcccgggacactggaaagactatggttgatgcttcattaggtgagataatgaccacctgtgagaagattacctggcttttggatgagggtgagaagtggttaaaacctgaatacaggtcctgtgggagatcaatgcttcacaagaaagcaaaagttgagttctatccacttggagttattggtgcgattgtgtcttggaattaccccttccacaatgtattcaatccaatgctggctgcaatattctctggtaatgcagcagttataaaggtttcagagcatgcaagttggtcaggctgcttttattttcgtatcatacaagcagctcttgcagctgttggtgcaccagataatctggtgcatataataactggttttgcggaaacaggtcaagctcttgtatcttcagtcgacaaaataatatttgttggatcacctggtgttggaaggatgatcatgaacagagcatcggatacattaatacctgtaactcttgaacttggtggtaaagatgcatttattgtatgtgaagatgtagacttacccagtgttgttcaagttgctgtgagagctgccctgcaatctagcggacaaaactgtgctggtgctgaaagattttatgttcacaaggatatctattcaacatttgtttcccaagtggtgaagataatcaaatctatatctgtcggtcctccattatctggcagatacgatatgggtgctatctgtatgatagagcactctgagaaacttcagaatcttgttaatgatgctgttgacaaaggtgctgagattgctggcagagggagctttggccatctgggtgaagatgcagtagatcaattctttcctccaactgtcctggtgaatgttaatcacacaatgaaaattatgcaagaagaggcatttggacctattctgccaatcatgaaattcaattccgatgaagaagttgtcaaacttgccaatgactccaagtacggtcttggttgtgctgtcttttctggcaaccagaagcgtgccatcaaaatagcatcccagctacactgtggtgttgcggcaatcaatgattttgcttcaagttatatgtgtcagtctttgccattcggtggtgtcaaagatagtggatttggaagatttgctggtgtggaaggtttgcgggcttgctgccttgtcaaggcagttgtagaagatagatggtggccatatgttaaaaccatgatcccaaaacctattcagtatcctgtctccgagaatggatttgaattccaagagttgctcgttgaaactctctacggccttagtgtgtgggacagattgcggtcacttgtcaatctgttaaagatgatttcagagcagaataattctcctgctaacaccaggaagaaaagccgatga

SEQ ID NO: 38100 - protein, 597 aa, Oryza sativa
MALWWPLLVLAAAYALCRILLFLIPPTVPSIDVDASDVLEDANQNKEDSYIYIPPRKGKGAQTDKVQCYEPATMKYLGYFPALTPDEVKEHVAQARKAQKIWAKSSFKQRRQFLRILLKYILEHQDLICEISSRDTGKTMVDASLGEIMTTCEKITWLLDEGEKWLKPEYRSCGRSMLHKKAKVEFYPLGVIGAIVSWNYPFHNVFNPMLAAIFSGNAAVIKVSEHASWSGCFYFRIIQAALAAVGAPDNLVHIITGFAETGQALVSSVDKIIFVGSPGVGRMIMNRASDTLIPVTLELGGKDAFIVCEDVDLPSVVQVAVRAALQSSGQNCAGAERFYVHKDIYSTFVSQVVKIIKSISVGPPLSGRYDMGAICMIEHSEKLQNLVNDAVDKGAEIAGRGSFGHLGEDAVDQFFPPTVLVNVNHTMKIMQEEAFGPILPIMKFNSDEEVVKLANDSKYGLGCAVFSGNQKRAIKIASQLHCGVAAINDFASSYMCQSLPFGGVKDSGFGRFAGVEGLRACCLVKAVVEDRWWPYVKTMIPKPIQYPVSENGFEFQELLVETLYGLSVWDRLRSLVNLLKMISEQNNSPANTRKKSR

SEQ ID NO: 38101 - DNA, 1512 bp, Oryza sativa
  CDS (1)..(1512)
atggccacggcgatcccgcagcggcagctcttcgtcgccggcgagtggcgcgcccccgcgctcggccgccgcctccccgtcgtcaaccccgccaccgagtcccccatcggcgagatcccggcgggcacggcggaggacgtggacgcggcggtggcggcggcgcgggaggcgctgaagaggaaccggggccgcgactgggcgcgcgcgccgggcgccgtccgggccaagtacctccgcgcaatcgcggccaagataatcgagaggaaatctgagctggctagactagagacgcttgattgtgggaagcctcttgatgaagcagcatgggacatggacgatgttgctggatgctttgagtactttgcagatcttgcagaatccttggacaaaaggcaaaatgcacctgtctctcttccaatggaaaactttaaatgctatcttcggaaagagcctatcggtgtagttgggttgatcacaccttggaactatcctctcctgatggcaacatggaaggtagctcctgccctggctgctggctgtacagctgtactaaaaccatctgaattggcttccgtgacttgtttggagcttgctgatgtgtgtaaagaggttggtcttccttcaggtgtgctaaacatagtgactggattaggttctgaagccggtgctcctttgtcatcacaccctggtgtagacaaggttgcatttactgggagttatgaaactggtaaaaagattatggcttcagctgctcctatggttaagcctgtttcactggaacttggtggaaaaagtcctatagtggtgtttgatgatgttgatgttgaaaaagctgttgagtggactctctttggttgcttttggaccaatggccagatttgcagtgcaacatcgcgtcttattcttcataaaaaaatcgctaaagaatttcaagaaaggatggttgcatgggccaaaaatattaaggtgtcagatccacttgaagagggttgcaggcttgggcccgttgttagtgaaggacagtatgagaagattaagcaatttgtatctaccgccaaaagccaaggtgctaccattctgactggtggggttagacccaagcatctggagaaaggtttctatattgaacccacaatcattactgatgtcgatacatcaatgcaaatttggagggaagaagtttttggtccagtgctctgtgtgaaagaatttagcactgaagaagaagccattgaattggccaacgatactcattatggtctggctggtgctgtgctttccggtgaccgcgagcgatgccagagattaactgaggagatcgatgccggaattatctgggtgaactgctcgcaaccctgcttctgccaagctccatggggcgggaacaagcgcagcggctttggacgcgagctcggagaagggggcattgacaactacctaagcgtcaagcaagtgacggagtacgcctccgatgagccgtggggatggtacaaatccccttccaagctgtaa

SEQ ID NO: 38102 - protein, 503 aa, Oryza sativa
MATAIPQRQLFVAGEWRAPALGRRLPVVNPATESPIGEIPAGTAEDVDAAVAAAREALKRNRGRDWARAPGAVRAKYLRAIAAKIIERKSELARLETLDCGKPLDEAAWDMDDVAGCFEYFADLAESLDKRQNAPVSLPMENFKCYLRKEPIGVVGLITPWNYPLLMATWKVAPALAAGCTAVLKPSELASVTCLELADVCKEVGLPSGVLNIVTGLGSEAGAPLSSHPGVDKVAFTGSYETGKKIMASAAPMVKPVSLELGGKSPIVVFDDVDVEKAVEWTLFGCFWTNGQICSATSRLILHKKIAKEFQERMVAWAKNIKVSDPLEEGCRLGPVVSEGQYEKIKQFVSTAKSQGATILTGGVRPKHLEKGFYIEPTIITDVDTSMQIWREEVFGPVLCVKEFSTEEEAIELANDTHYGLAGAVLSGDRERCQRLTEEIDAGIIWVNCSQPCFCQAPWGGNKRSGFGRELGEGGIDNYLSVKQVTEYASDEPWGWYKSPSKL

SEQ ID NO: 38103 - DNA, 1500 bp, Oryza sativa
  CDS (1)..(1500)
atggcggcggtggcggggacgggggtgttcgcggagatcctggagggggaggtgtacaggtactacgccgacggggagtggcgcgtctcggcctccggcaagtccgtcgccatcgtcaaccccaccacccgcctcacccagtacagggtgcaagcatgcacccaggaggaggtgaacaaggtgatggagacggcgaaggtggcgcagaaggcgtgggcgcgcacgccgctgtggaagcgcgcggagctcctgcacaaggcggccgccatcctcaaggagcacaagaccccgattgcagagtgcctcgtcaaggagatcgccaagcctgccaaggacgcgatctctgaagtggtgaggtcaggggatttggtgtcgtacacagctgaggagggtgttcggatactgggggaaggcaagctgctggtgtctgatagcttcccgggcaatgaacggaacaagtactgtttgagctccaaggtacctcttggagtagttttggcaatcccaccatttaactatcctgtcaacctagcagtctccaagattggcccagcactaattgctggcaatgctcttgttctgaagcctccaactcagggagcggtggctgcactacatatggtgcactgcttccaccttgctggtttccccaaaggcttgatcaattgtgtcaccgggaaaggttctgaaattggtgattttcttacgatgcatcctggagtcaactgcataagttttacgggaggtgatactggtatagccatttcaaagaaggctggaatggtcccgcttcagatggaacttggaggaaaagatgcttgtgttgtgttagaggatgcagatctggatttagtggcagcaaatatagtaaaaggaggcttctcttacagtggccagaggtgcactgctgtgaaagtggtgctgatcatggaatccgttgctgatatcgtggtagagaaggtgaaggccaagttggcaaaactgacagttgggccacctgaggctgactctgatatcaccccagttgtaacagaatcctcagcaaattttattgagggtttggtcatggatgccaaggagaaaggagcaaccttttgtcaggagtacaggagagaaggcaaccttatctggccgttgctactggatcacgtccggcctgacatgaggattgcttgggaggagccatttggccctgtcttgcctgtgattaggatcaactcggtcgaggaaggcatccaccattgcaatgccagcaattttgggctgcagggatgtgtattcactaaagatatcaacaaagcgatcatgatcagcgatgcgatggagaccggaaccgttcagatcaactctgcaccggctcgaggacctgaccatttccccttccagggcttgaaggacagtgggattggatcccaggggataactaacagcataaacatgatgaccaaggtgaagagcactgtcataaacctaccatctccatcctacaccatgggctga

SEQ ID NO: 38104 - protein, 499 aa, Oryza sativa
MAAVAGTGVFAEILEGEVYRYYADGEWRVSASGKSVAIVNPTTRLTQYRVQACTQEEVNKVMETAKVAQKAWARTPLWKRAELLHKAAAILKEHKTPIAECLVKEIAKPAKDAISEVVRSGDLVSYTAEEGVRILGEGKLLVSDSFPGNERNKYCLSSKVPLGVVLAIPPFNYPVNLAVSKIGPALIAGNALVLKPPTQGAVAALHMVHCFHLAGFPKGLINCVTGKGSEIGDFLTMHPGVNCISFTGGDTGIAISKKAGMVPLQMELGGKDACVVLEDADLDLVAANIVKGGFSYSGQRCTAVKVVLIMESVADIVVEKVKAKLAKLTVGPPEADSDITPVVTESSANFIEGLVMDAKEKGATFCQEYRREGNLIWPLLLDHVRPDMRIAWEEPFGPVLPVIRINSVEEGIHHCNASNFGLQGCVFTKDINKAIMISDAMETGTVQINSAPARGPDHFPFQGLKDSGIGSQGITNSINMMTKVKSTVINLPSPSYTMG

SEQ ID NO: 38105 - DNA, 1512 bp, Brassica napus
  CDS (1)..(1512)
atggcgattacggtgccgcgacggcagctcttcatcggcggtcaatggacagagccccttcgccgtcaaacactccctgttgtcaatcccgccacggaggacatcatcggttacatcccagctgcaacttctgaggatgtggagctcgcggtggaagctgctaggaaagcacttacaagaaaccaaggaaaggattggtctaaagcatccggggctgttcgtgccagatacttacgtgctattgcagctaaggtaacggagaggaagtctgagctagctaatcttgaggctattgactgcggtaaacctctagatgaagcagcatgggacatggatgatgttgctggatgttttgaatattatgctgacctagctcaaggcttagattcaaagcagaaggctcctctttctcttcccttagatacttttaagggctacgttctcaaggaacccattggtgtagttggcctgattactccatggaattatccgttactgatggctgtttggaaagtcgctcctgcacttgccgctgggtgcacggcaatactgaaaccttctgagttggcctccgtgacatgtttggagctcgctgatatctgccgcgaggtgggtctgccacctggtgttcttaatattctgactggtttaggaactgaagcaggtgctccattggcatcgcatccacacgttgacaagattgttttcactggaagcacggcaactggaagcaacattatgacttctgctgccaaattggttaaacctgtttccttggagcttggtgggaaaagccctatcattgtctttgatgatgtcaaaattgacaaagctgtggaatggactatgtttggttgtttctggacaaacggtcagatttgcagtgcgacatctcgacttctcgtgcatgaaaagattgctgacgaatttttggacaagttggtaaagtggacaaagaacattaagatttcagatccttttgaagaaggctgtaggcttggtcctgttgtcagcaaaggacagtacgagagagtagtgaagtttgtctcaaacgctaggaaggaaggtgcaactgtcctctgcggaggagctcgtcctgggcatttaaaaaagggttattttgttgaacctgctataatttcaaatgtgactacttcaatggaaatctggagagatgaagtatttggtcctgttctctgtgtcaaaacattctccactgaggatgaggcaatacagctggcaaatgactcccaatatggattagcaggcgctgtattatcaaatgatctggagaggtgtgatcgcgttagtaaggcattcgaggcgggtattgtgtgggtcaactgttctcagccatgtttctgtcaagctccatggggtggaaccaaacgcagtggttttggccgtgaactaggagaatggggacttgagaactacttgagtgtgaagcaggtgacgcaatatatatctaatgaaccatggggatggtacaaacctccttccaagctttaa

SEQ ID NO: 38106 - protein, 503 aa, Brassica napus
MAITVPRRQLFIGGQWTEPLRRQTLPVVNPATEDIIGYIPAATSEDVELAVEAARKALTRNQGKDWSKASGAVRARYLRAIAAKVTERKSELANLEAIDCGKPLDEAAWDMDDVAGCFEYYADLAQGLDSKQKAPLSLPLDTFKGYVLKEPIGVVGLITPWNYPLLMAVWKVAPALAAGCTAILKPSELASVTCLELADICREVGLPPGVLNILTGLGTEAGAPLASHPHVDKIVFTGSTATGSNIMTSAAKLVKPVSLELGGKSPIIVFDDVKIDKAVEWTMFGCFWTNGQICSATSRLLVHEKIADEFLDKLVKWTKNIKISDPFEEGCRLGPVVSKGQYERVVKFVSNARKEGATVLCGGARPGHLKKGYFVEPAIISNVTTSMEIWRDEVFGPVLCVKTFSTEDEAIQLANDSQYGLAGAVLSNDLERCDRVSKAFEAGIVWVNCSQPCFCQAPWGGTKRSGFGRELGEWGLENYLSVKQVTQYISNEPWGWYKPPSKL

SEQ ID NO: 38107 - DNA, 1509 bp, Brassica napus
  CDS (1)..(1509)
atggcgattcctcctgtgcctactcgccagctcttcatcgacggcgaatggagagagccaatcttgaagaatcgcatccccattgtcaatccatcaacccaagatgtcattggtcatatccccgcggctacaaaggaggatgtggaggttgcagtcaacgctgctcgaagggctttctcaaggaacaaaggtaaagattgggccaaagcaccaggagatcttcgtgctaagtatctacgcgctattgctgctaaggtgactgagaggaagtcgcatctggcgacgcttgagtcgcttgatagtggtaaaccattggatgagacagtctgggatatggaggatgttgctgggtgttttgagttttatgctgaccttgctgaaggcttagatgctaagcagaaagcgcctgtttctcttcccatggagagttttaagagttatgttctcaagcaacctattggagttgtgggactcatcacaccttggaattacccccttctgatggctgtttggaaggtggctccctcacttgctgcaggatgtactgcggttctaaaaccatcagagttggcttcagtcacttgtttggagcttgctgatatctgtcgggaagttggtcttcctcctggtgtcctcaacgttcttactggatatggttctgaagctggtgctcctttggcagcacatcctagtgtggacaagattgcttttaccggaagctttgccacgggaagcaaggtcatgacagctgctgctcagttggtgaagcctgtttccatggaattgggtgggaagagccctctcattgtgtttgatgacgttgatcttgataaagctgctgaatgggctctcttcggttgcttctggacaaatggtcagatctgcagtgcaacttcccgccttcttgttcatgaaaacatcgcatctgaattcatagaaaagcttgtaaaatggagcaagaacattaaagtttctgaccccttggaagaaggatgcaggcttggtcctgttgtcagcgaaggacagtacgagaaaatcttgaagtttatctcatcggctaaaagtgaaggggcaacgattttacatggtggttcacgaccggagcatctgaaaaagggcttcttcattgaaccaaccatcataactgatgtaaccacttcaatgcaaatttggagagaagaagtttttgggcctgttctttgcattaaaacattctccagtgaggatgaggcaattgagctagcaaatgattcccattatggattaggagctgcagtaatatctaatgatgcagaaagatgtgaccgtgtaagccaggactttgaagctgggattgtgtggattaactgctcacagccttgctttactcaagctccatggggtggagtcaaacgcagtgggtttggacgcgaattaggagaatggggactcgataactacttgagtgtgaagcaagtgactctctacacatcaaacgacccgtggggatggtacaaacccccttgctaa

SEQ ID NO: 38108 - protein, 502 aa, Brassica napus
MAIPPVPTRQLFIDGEWREPILKNRIPIVNPSTQDVIGHIPAATKEDVEVAVNAARRAFSRNKGKDWAKAPGDLRAKYLRAIAAKVTERKSHLATLESLDSGKPLDETVWDMEDVAGCFEFYADLAEGLDAKQKAPVSLPMESFKSYVLKQPIGVVGLITPWNYPLLMAVWKVAPSLAAGCTAVLKPSELASVTCLELADICREVGLPPGVLNVLTGYGSEAGAPLAAHPSVDKIAFTGSFATGSKVMTAAAQLVKPVSMELGGKSPLIVFDDVDLDKAAEWALFGCFWTNGQICSATSRLLVHENIASEFIEKLVKWSKNIKVSDPLEEGCRLGPVVSEGQYEKILKFISSAKSEGATILHGGSRPEHLKKGFFIEPTIITDVTTSMQIWREEVFGPVLCIKTFSSEDEAIELANDSHYGLGAAVISNDAERCDRVSQDFEAGIVWINCSQPCFTQAPWGGVKRSGFGRELGEWGLDNYLSVKQVTLYTSNDPWGWYKPPC

SEQ ID NO: 38109 - DNA, 1614 bp, Brassica napus
  CDS (1)..(1614)
atggcgtcaagaagagtttcctcgctgctctctcgctccctcatgtcctcctcttctcccttctctcttagaggtaaagatcctctcatgaacagaggagctcgcaggtacagcaacctcgctgcttctctcgaagacaccatcactccgcctgtgaaagtcgagcagactcagctcctaatcaacggcaagttcgttgattcagcctcaggaaagactttccccacattggatccaagaactggggaagtgatagctcaggtggctgagggtgacgtggaagacgtgaaccgtgcggttgtagccgcgcgcaaggcctttgacgagggtccatggcctagaatgactgcttacgagaggccgaagatactgtttcgtttcgctgacttgattgagaaacacaacgacgagatcgctgctctcgagacttgggacaatgggaagccttatgagcagtctgccaagattgaagttcctatgcttgctagagtgttccgttactatgctggttgggcggacaagatccatggaatgacggttcgaggagacggttcgcaccatgtgcagacgctccacgagccgattggagtcgctggacagatcatcccatggaacttccctcttctcatgctctcgtggaagcttggaccagctttagcttgcgggaacaccgttgtgctcaagacggctgagcagactcctctctctgctcttcttgttggaagactacttcacgaggctggacttcctgaaggagttgtgaatatagtttctggatttggtcctaccgctggtgcagccattgctagtcacatggatattgataaggttgctttcaccggttctactgatgttggaaagattattcttgagttggcttcaaaaagtaacctcaaggcagtgtctcttgagcttggaggcaagtcaccattcattgtatgtgaagatgctgacgtggatcaggccgttgagatggctcatttcgctttgttctttaaccagggacaatgctgctgtgctggctcgcgtacatttgtacatgaacgagtgtatgatgagtttgtagagaaagctaaaactcgtgcaatcaaccgcgctgttggagatcccttcaagtcagggattgagcaaggtccccaggtggactcagagcagttcgagaaaatcctgaagtacattagacatggagtcgatagtggagccaccttacaagctggaggtgaccgtcatggttccaagggttactacattcaacctactgtcttctctgacgtcaaggacgacatgctcatagcaaaagacgagatcttcggaccagttcagaccatacttaagttcaagaatctggatgaggtgattgcaagggcgaacaactcaaggtacggtctagctgcaggagtgttcacacagaatctggacacagcgaataggctgatgcgagcgctcagggttggaagcgtttggataaactgtttcgatgtgtttgatgcaacaattccatttggagggtataagatgagtggcattggaagagagaaaggtatctacagtctcaacaattacttgcaagtcaaggctgttgtcacttccatcaagaaccccgcttggctctaa

SEQ ID NO: 38110 - protein, 537 aa, Brassica napus
MASRRVSSLLSRSLMSSSSPFSLRGKDPLMNRGARRYSNLAASLEDTITPPVKVEQTQLLINGKFVDSASGKTFPTLDPRTGEVIAQVAEGDVEDVNRAVVAARKAFDEGPWPRMTAYERPKILFRFADLIEKHNDEIAALETWDNGKPYEQSAKIEVPMLARVFRYYAGWADKIHGMTVRGDGSHHVQTLHEPIGVAGQIIPWNFPLLMLSWKLGPALACGNTVVLKTAEQTPLSALLVGRLLHEAGLPEGVVNIVSGFGPTAGAAIASHMDIDKVAFTGSTDVGKIILELASKSNLKAVSLELGGKSPFIVCEDADVDQAVEMAHFALFFNQGQCCCAGSRTFVHERVYDEFVEKAKTRAINRAVGDPFKSGIEQGPQVDSEQFEKILKYIRHGVDSGATLQAGGDRHGSKGYYIQPTVFSDVKDDMLIAKDEIFGPVQTILKFKNLDEVIARANNSRYGLAAGVFTQNLDTANRLMRALRVGSVWINCFDVFDATIPFGGYKMSGIGREKGIYSLNNYLQVKAVVTSIKNPAWL

SEQ ID NO: 38111 - DNA, 1614 bp, Brassica napus
  CDS (1)..(1614)
atggcgtcaagaagagtgtcctcgcttctatctcgctccctcatctcctcctcttctctcttctcccttagaggtaaagatcctctcctgaacagaggagctcgcaggtacagcaacctcgctgcttctctcgaagacaccatcactccaccagtgaaagtcgagcacactcagctcctaatcaacggaaagttcgttgattcagcctcaggaaagactttccccacgttggatccaagaactggggaagtgatagctcaggtggctgagggtgacgtggaagacgtgaaccgtgcggttgtagccgcgcgcaaggcctttgaccagggtccatggcctagaatgactgcttatgagaggtcgaagatactgtttcgtttcgctgacttgattgagaaacacaacgacgagattgctgctcttgagacttgggacaacgggaagccttatgagcagtctgccaatattgaagttcctatgcttgctagagtgttccgttactatgctggttgggcagacaagatccatggaatgacggttcctggagacggttcccaccacgtgcagacgctccacgagccgattggagtcgctggacagatcatcccatggaacttccctcttctcatgctctcgtggaagcttggaccagctttagcttgccggaacaccgttgtgctcaagaccgctgagcagactcctctctctgctcttcttgttggaaaactacttcatgaggctggacttcctgaaggagttgtgaatatagtttctggatttggtcctaccgctggtgcagccattgctagtcacatggacattgataaggttgctttcaccgggtctactgatgttggaaagattattcttgagttggcttcaaaaagtaacctcaaggcagtgacccttgagcttggaggcaagtcacctttcattgtatgtgaagatgctgatgtggatcaggccgttgagatggctcatttcgctctcttctttaaccagggacaatgctgctgtgctggctcgcgtacatttgtacatgaacgcgtgtatgatgagtttgtagagaaagccaaagctcgtgcaatcaaccgcgctgttggagatcccttcaagtcaggcattgagcaaggtccccaggtggactcagagcagttcgagaaaatcctgaagtacattagacatggagtcgatagtggagccaccttacaagctggaggtgaccgtcatggctccaagggttactacattcaacccactgtcttctctgacgtcaaggatgacatgctcatagcaaaagacgagatcttcggaccagttcagaccatacttaagttcaagaatctggatgaggttattgcaagggcgaacaactcaagatacggtctagctgcaggagtgttcacacagaatctggacacagcgaataggctgatgcgagcgctgagggttggaagcgtttggataaactgtttcgatgtgtttgatgccacaattccatttggagggtataagatgagtggcattggaagagagaaaggtatctacagtctcaacaattacttgcaagtcaaggctgttgtcactgccatcaagaaccccgcttggctctaa

SEQ ID NO: 38112 - protein, 537 aa, Brassica napus
MASRRVSSLLSRSLISSSSLFSLRGKDPLLNRGARRYSNLAASLEDTITPPVKVEHTQLLINGKFVDSASGKTFPTLDPRTGEVIAQVAEGDVEDVNRAVVAARKAFDQGPWPRMTAYERSKILFRFADLIEKHNDEIAALETWDNGKPYEQSANIEVPMLARVFRYYAGWADKIHGMTVPGDGSHHVQTLHEPIGVAGQIIPWNFPLLMLSWKLGPALACRNTVVLKTAEQTPLSALLVGKLLHEAGLPEGVVNIVSGFGPTAGAAIASHMDIDKVAFTGSTDVGKIILELASKSNLKAVTLELGGKSPFIVCEDADVDQAVEMAHFALFFNQGQCCCAGSRTFVHERVYDEFVEKAKARAINRAVGDPFKSGIEQGPQVDSEQFEKILKYIRHGVDSGATLQAGGDRHGSKGYYIQPTVFSDVKDDMLIAKDEIFGPVQTILKFKNLDEVIARANNSRYGLAAGVFTQNLDTANRLMRALRVGSVWINCFDVFDATIPFGGYKMSGIGREKGIYSLNNYLQVKAVVTAIKNPAWL

SEQ ID NO: 38113 - DNA, 1620 bp, Glycine max
  CDS (1)..(1620)
atggcttcttcattgaggatctcaaggctcctctctcgttcttttctttctgcttccactactactcctttgttttctagaggcggaagtggtgctcttggtgcagggctcagtaaattcagcactgctgctgccattgaagaaccaattaaaccaccaattaaagtagaacacacccagctcttaattgatggaaaatttgttgatgctgctactggcaaaacttttccaacgttggaccccaggacaggagatgtgatttctcatgttgctgagggtgaccatgaagatgttgatcgagcagttgcagctgctcgcaaagccttcgaccgcggaccttggccaaagatgacagcctatgaaagacaaaggatattgctgcgtgctgctgatctgtttgaaaagcacaatgatgaccttgctgcactcgagacttgggataatgggaagccatatgaacagtctgctcaaatcgaaattccaatgctggttcgcctatttcgatactatgctggttgggcagataagattcatggtctcacagttccagctgatgggccatatcatgtgcaaacattgcatgaacccattggtgttgccggtcagatcattccgtggaacttccctcttgtcatgtttgcctggaaggttgggccagcattggcctgtggtaacaccattgttctcaaaacagctgagcagactccattatctgctttgtatgcatcaaagttgcttcatgaggctggactgcctcctggtgttctgaatataatatctggctttggtccaactgccggtgctgctattgctagtcacatggacatagataagcttgctttcactggttcaaccgaaactggaaaaattgtccttgaactggcggctagaagtaaccttaagcctgtaactttggagcttggtgggaaatccccattcattgtatgcgaagatgctgatgtagatgaggctgttgagctagcacactttgcattattctttaatcagggacaatgctgctgtgccgggtctagaacatttgtacacgaacgtgtgtacgatgaatttattgagaaagcaaaggcacgcgctttgaagcgtgctgttggtgatccattcaaggggggaatagagcaaggtcctcagattgattcagaacaatttcagaaaatactgaagtatattagatccggtgttgaaagtggagctactcttgaaaccggaggagatagatttggcaactcgggcttctatattcagcctactgtcttctcaaatgttaaggatgacatgctgattgcgaaggaagagatctttggcccagtgcaaagcatattaaaattcaaggaccttgatgatgtgattcaaagagcaaataacacacactatggccttgcagcaggggtgttcacaaaaaacattaacacagctaatactttgactagagcattgagagctggaacagtgtgggtgaactgctttgatacatttgatgcagcaattccctttggagggtacaaaatgagtggtcaaggaagagaaaaaggagaatacagtctcaagaattacttgcaagtgaaggctgttgttacatccttgaagaacccagcttggctttga

SEQ ID NO: 38114 - protein, 539 aa, Glycine max
MASSLRISRLLSRSFLSASTTTPLFSRGGSGALGAGLSKFSTAAAIEEPIKPPIKVEHTQLLIDGKFVDAATGKTFPTLDPRTGDVISHVAEGDHEDVDRAVAAARKAFDRGPWPKMTAYERQRILLRAADLFEKHNDDLAALETWDNGKPYEQSAQIEIPMLVRLFRYYAGWADKIHGLTVPADGPYHVQTLHEPIGVAGQIIPWNFPLVMFAWKVGPALACGNTIVLKTAEQTPLSALYASKLLHEAGLPPGVLNIISGFGPTAGAAIASHMDIDKLAFTGSTETGKIVLELAARSNLKPVTLELGGKSPFIVCEDADVDEAVELAHFALFFNQGQCCCAGSRTFVHERVYDEFIEKAKARALKRAVGDPFKGGIEQGPQIDSEQFQKILKYIRSGVESGATLETGGDRFGNSGFYIQPTVFSNVKDDMLIAKEEIFGPVQSILKFKDLDDVIQRANNTHYGLAAGVFTKNINTANTLTRALRAGTVWVNCFDTFDAAIPFGGYKMSGQGREKGEYSLKNYLQVKAVVTSLKNPAWL

SEQ ID NO: 38115 - DNA, 1611 bp, Glycine max
  CDS (1)..(1611)
atggcttcttcactcagaatctcaagacttatctctcgctccttttcttctacttctttcttttcacgaggtgggaatggtttccttggttcaagacaaagtaaattcagcacttctgctgccattgaggaagaacccattaaaccatcaatacaagtagaacacacccaactcttaattgatggaaaatttgtagatgctgcttctggtaaaacttttcaaactttagatcctaggacaggtgaagtgattgctcatgttgctgagggtcactctgaagatgttgatcgagcagtttcagctgcacgaaaagcatttgatcatggaccatggcctaagatgacagcttatgaacggcaaaggatcttgttgcgtgtggccgatctgatcgagaagcataatgatgagcttgcagcacttgagacttgggataatggaaagccttatgaacaagctgctaagattgaagttccaatgcttgttcgcctgattcgatactatgctggttgggcagataagattcatggtctaacagttccagctgatggaccttatcatgtgcaaacattgcacgaaccgattgatgttgccggtcagatcattccatggaacttccctcttctcatgtttgcctggaaggttggaccggcattggcctgtggcaacaccattgttctcaaaacagctgagcagacaccattatctgctttatatgcagcaaaactatttcatgaggctggacttcctgctggtgttttgaatgtagtttccggctttggtccaactgctggtgctgctcttgctagtcacatggaggttgataagcttgcttttaccggttccactgatactgggaaagttgtccttgaactggcggctaaaagcaatcttaagcctgttactttggagcttggtgggaaatctccctttatagtgtgtgaagacgctgatgtagatcaggctgttgagctcgcacactttgccttattctttaatcagggacaatgttgctgtgctgggtctcgaacatttgtacatgaaaatgtatacgaggagtttgttcagaaagcaaaggctcgtgctttgagacgtgttgttggtgatccattcaaggggggaatagagcaaggtcctcagattgattcagaccaatttgagaaaatactgaggtacatcagatccggtgttgaaagcggggcaacccttgaaacaggaggagacaagcttggcaacaagggcttctacattcaacctacagtcttctcaaatgttaaggatggcatgctgattgcaaaggatgagatctttggtccagtccaatccatattaaaattcaaggaccttggtgaggtagttcaaagagcgaacaacacacgttacgggcttgcggcaggagtgttcacaaagaacatggacactgcaaacactttgacgcgggcactgagagttggaacagtttggataaactgctttgacacatttgatgctgcaattccctttggagggtacaaaatgagtggtcaaggcagagaaaaaggagagtatagtctcaaaaactacttgcaagtgaaggctgtcgttaatcccttgaagaacccagcatggctttga

SEQ ID NO: 38116 - protein, 536 aa, Glycine max
MASSLRISRLISRSFSSTSFFSRGGNGFLGSRQSKFSTSAAIEEEPIKPSIQVEHTQLLIDGKFVDAASGKTFQTLDPRTGEVIAHVAEGHSEDVDRAVSAARKAFDHGPWPKMTAYERQRILLRVADLIEKHNDELAALETWDNGKPYEQAAKIEVPMLVRLIRYYAGWADKIHGLTVPADGPYHVQTLHEPIDVAGQIIPWNFPLLMFAWKVGPALACGNTIVLKTAEQTPLSALYAAKLFHEAGLPAGVLNVVSGFGPTAGAALASHMEVDKLAFTGSTDTGKVVLELAAKSNLKPVTLELGGKSPFIVCEDADVDQAVELAHFALFFNQGQCCCAGSRTFVHENVYEEFVQKAKARALRRVVGDPFKGGIEQGPQIDSDQFEKILRYIRSGVESGATLETGGDKLGNKGFYIQPTVFSNVKDGMLIAKDEIFGPVQSILKFKDLGEVVQRANNTRYGLAAGVFTKNMDTANTLTRALRVGTVWINCFDTFDAAIPFGGYKMSGQGREKGEYSLKNYLQVKAVVNPLKNPAWL

SEQ ID NO: 38117 - DNA, 1527 bp, Linum usitatissimum
  CDS (1)..(1527)
atggggttcgagaagaaagagcatgaatttctgggcgagatcgggctgagctcgagcaatcctggctgttatgtgggtgggaaatggaaggctaatggacctgtgatcacaactacgaaccctgccaacaaccagacaattgctgaagtggttgagggttccatggaagactatgaggagggcttgaaagcttgcagtgaagcaacaaagacatggatgcaggttccagcaccaaagagaggtgagattgttaggcagattggagatgcactcagagccaaacttgatcatctcggccgtcttgtctctctcgagatgggcaagatactggctgaaggagtaggagaagttcaggaaattatcgacatgtgtgatttcgctgtcgggttgagcaggcaactgaacggatctattatcccttccgagcgcccgaaccacgccatgttggagatgtggaaccctctcggaattgttggtgttatcactgctttcaacttcccttgtgctgttcttggatggaatgcttgccttgcgctagtttgtggaaactgcgttgtctggaaaggtgctccaactacacctttggtcaccatagcaatgacaaagctgatcgctgaggtgctcgagaagaacaacttacctggtgcgatatttacatcgttatgtggtggtgccgaaattggtcaagccatagcgaaagacactcgcatacctctagtctccttcaccggcagttcaaaggtgggacaaatggtgcagcaaatagtcagccagagattcggcaaatgcttgctcgagttaagtggaaacaacgccattatcgttatggacgatgcagacgttcagcttgccgcccgttcggttctctttgctgctgttgggacagccggtcagcgatgcacaacttgccgtcggctgctcctccacgagagcatctacaagaaagtacttgatcagcttgtcgaagcttacaagcaagtgaaaatcggcgatccgttggagaaaggcaccctgcttggaccgttgcatactaccgaatcgaggaaaaacttcgagaggggaatcgagctcgtcaaatctcagggagggaatatcctgaccggaggatcgatcataaaatctgacgggaatttcgtacagccaacaattgtagaggttgctccaactgtagttgcagttaaagaagagctctttgctcctgttctgtatgttatgaaatttaagactttgcaagaggctattgatataaacaactcagtgccacaaggattgagcagttctatctttacccagaagcccgaaaccatcttcaaatggatcgggccactggggagcgactgcggtattgtgaatgtgaacataccgacaaatggtgcagaaatcggtggcgcatttggtggcgaaaaggctaccgggggtggtcgagaagctggaagtgattcgtggaagcagtacatgcgccgatccacttgcacaatcaattatggaaacgagttgcctctagctcaaggaatcaatttcggctag

SEQ ID NO: 38118 - protein, 508 aa, Linum usitatissimum
MGFEKKEHEFLGEIGLSSSNPGCYVGGKWKANGPVITTTNPANNQTIAEVVEGSMEDYEEGLKACSEATKTWMQVPAPKRGEIVRQIGDALRAKLDHLGRLVSLEMGKILAEGVGEVQEIIDMCDFAVGLSRQLNGSIIPSERPNHAMLEMWNPLGIVGVITAFNFPCAVLGWNACLALVCGNCVVWKGAPTTPLVTIAMTKLIAEVLEKNNLPGAIFTSLCGGAEIGQAIAKDTRIPLVSFTGSSKVGQMVQQIVSQRFGKCLLELSGNNAIIVMDDADVQLAARSVLFAAVGTAGQRCTTCRRLLLHESIYKKVLDQLVEAYKQVKIGDPLEKGTLLGPLHTTESRKNFERGIELVKSQGGNILTGGSIIKSDGNFVQPTIVEVAPTVVAVKEELFAPVLYVMKFKTLQEAIDINNSVPQGLSSSIFTQKPETIFKWIGPLGSDCGIVNVNIPTNGAEIGGAFGGEKATGGGREAGSDSWKQYMRRSTCTINYGNELPLAQGINFG

SEQ ID NO: 38119 - DNA, 1482 bp, Zea mays
  CDS (1)..(1482)
atgagcgcggacgcgagcgccgcgatggagaagatccgcgccgcgggtctgctcaagacgcaggggctcatcgccggacagtgggtcgacgcatacgatggcaagaccatcgaggtgcaaaatccagcaactggcgaggtccttgcaaacgtgtcctttatgggcagcagagaaacatctgatgctattgcttctgctcacagtacattctattcttggagtaaactcactgcaagtgagagaggcaaggcactaagaaaatggtacgatctaattatttcacacaaggaagagcttgcacttctcatgacactggagcaggggaaacctatgaaagaagcccttggtgaggtcaattatggtgcaagtttcatagaatattttgcagaggaagcaaagcgcatatatggtgatataattcctccaactttatctgatcgtagattgttggttctgaagcagcctgttggggtagttggagctattacaccatggaattttccattagcaatgataacccgaaaggttggaccagctttggcctgtggctgcactgttgttgtcaagccatcagagttcacacctctgacatcattagctgcagcagatcttgctcttcaagctggaataccagcgggtgcactaaatgttgtgatgggcaatgctcctgagataggtgatgcattactgcagagtacacaggtcagaaagattacgttcactggatcaacagctgttggcaaaaaactgatggctgaatctgcaaatactgtgaaaaaggtctctttggaacttggtgggaatgcaccttgcattgtttttgatgatgcagacattgatgttgctgttaaaggcagtcttgctgccaagttccgtaacagtggacagacatgtgtttgtgcaaacaggatactggtgcaagaaggtatctacgaaaagtttgcatctgcattcatcaaggctgttcagagtttgaaggttgggaatgggctagaagagagtacatctcagggtcctctgattaacgaagctgctgttcaaaaggtggagaagttcataaatgacgcgacttcaaagggagcaaatgtcatgctaggtggtaaaagacacagcctggggatgtcatcttatgagccaactgtagtagggaatgtcagcaatgatatgcttcttttcagagaagaagtttttggtccagttgcaccccttataccattcaaaactgaggaagaagctgtccatatggccaacgatacaaacgcaggcttagctgcatacatatttaccaagagcatacctcgttcatggcgtgtatccgaatctcttgaatacggcttagttggggtaaacgaggggattatttcaacagaggtggcaccatttggcggagtaaagcagtctggtcttgggagagaaggatcgaagtacggcgtcgacgaatacttggagctcaagtacatctgcatgggcaacttgggttga

SEQ ID NO: 38120 - protein, 493 aa, Zea mays
MSADASAAMEKIRAAGLLKTQGLIAGQWVDAYDGKTIEVQNPATGEVLANVSFMGSRETSDAIASAHSTFYSWSKLTASERGKALRKWYDLIISHKEELALLMTLEQGKPMKEALGEVNYGASFIEYFAEEAKRIYGDIIPPTLSDRRLLVLKQPVGVVGAITPWNFPLAMITRKVGPALACGCTVVVKPSEFTPLTSLAAADLALQAGIPAGALNVVMGNAPEIGDALLQSTQVRKITFTGSTAVGKKLMAESANTVKKVSLELGGNAPCIVFDDADIDVAVKGSLAAKFRNSGQTCVCANRILVQEGIYEKFASAFIKAVQSLKVGNGLEESTSQGPLINEAAVQKVEKFINDATSKGANVMLGGKRHSLGMSSYEPTVVGNVSNDMLLFREEVFGPVAPLIPFKTEEEAVHMANDTNAGLAAYIFTKSIPRSWRVSESLEYGLVGVNEGIISTEVAPFGGVKQSGLGREGSKYGVDEYLELKYICMGNLG

SEQ ID NO: 38121 - DNA, 1530 bp, Hordeum vulgare
  CDS (1)..(1530)
atggcgagcttcgcgagggaggagcaccagttcctcgccgagctcggcctcgcgccgcgcaacccgggctccttcgcctgcggcgcctggggcggctcgggccccgtcgtcgccaccaccaaccccaccaacaacgaggtcattgccgaggtcgtcgaagcgtccgtggacgactacgagaagggcatgagcgcctgcttcgatgccgccaggacctggatggctgtcccggctccgaaacgaggagaaattgttaggcagattggtgatgccctgagagcaaagcttcatcacctcggcagacttctgtcacttgagatggggaaaattctccctgaaggaattggggaggttcaggaaattattgacatgtgtgattatgctgtggggctaagtcgtcagctaaatggatccatcataccatctgaacgcccaaaccatatgatgatggaggtctggaatcctcttggagttgttggtgtcatcacagcattcaatttcccttgcgccgtgctgggttggaatgcttgcattgctttggtctgcggcaactgtgttgtctggaagggtgctccaactactccattgatcactattgcaatgactaaaatagtggctagtgtatttgagaagaacaacttgccaagtgcaatcttcacagctttttgtgggggtgctgaaattggtcaagcaattgctcttgacacaaggatacctttggtttcattcacaggaagtacaaaggttggtcaaatggttcagcaacaggttagcgcgagatttggtaaatgccttcttgaacttagtgggaacaatgccattattgtcatggatgatgcagacattccactagctgtgcgttctgttttgtttgctgctgttggcacagcagggcaacgatgcactacatgtcgtaggctgcttcttcatgaaagcatatatcaaacatttcttgatcaacttgttgaggtttataaacaagtccgtattggggatcctatggaaaagggcaccttgctgggaccactgcacactactgcatcaaaagaaagctttttgaaaggcatccaaactatcagatcccagggaggaaaaatccttctaggaggatcttctattgaatcagaagggaactttgttcaaccaacaattgtggaaatttcacctgatgcgccagttgtgagggaagaattgtttggtcctgtcctttatgccatgaaatttcagaccctgaaggaagcaattgaaatcaacaattctgttcctcaaggattgagcagttctatatttacaaggaagccagatgctattttcaagtggattgggcctcatggtagtgattgtggtatagtgaatgtaaatatacccactaatggtgctgaaattggtggagcttttggtggagaaaaagcaaccggtggcggacgagaagcaggaagtgattcctggaagcaatacatgaggagggctacttgtacaatcaactacggaagcgagctgcctctagcacagggaataaattttggctag

SEQ ID NO: 38122 - protein, 509 aa, Hordeum vulgare
MASFAREEHQFLAELGLAPRNPGSFACGAWGGSGPVVATTNPTNNEVIAEVVEASVDDYEKGMSACFDAARTWMAVPAPKRGEIVRQIGDALRAKLHHLGRLLSLEMGKILPEGIGEVQEIIDMCDYAVGLSRQLNGSIIPSERPNHMMMEVWNPLGVVGVITAFNFPCAVLGWNACIALVCGNCVVWKGAPTTPLITIAMTKIVASVFEKNNLPSAIFTAFCGGAEIGQAIALDTRIPLVSFTGSTKVGQMVQQQVSARFGKCLLELSGNNAIIVMDDADIPLAVRSVLFAAVGTAGQRCTTCRRLLLHESIYQTFLDQLVEVYKQVRIGDPMEKGTLLGPLHTTASKESFLKGIQTIRSQGGKILLGGSSIESEGNFVQPTIVEISPDAPVVREELFGPVLYAMKFQTLKEAIEINNSVPQGLSSSIFTRKPDAIFKWIGPHGSDCGIVNVNIPTNGAEIGGAFGGEKATGGGREAGSDSWKQYMRRATCTINYGSELPLAQGINFG

SEQ ID NO: 38123 - DNA, 1509 bp, Brassica napus
  CDS (1)..(1509)
atggcgattcctcctgtgcctactcgccagctcttcatcgacggcgaatggagagagccaatcttgaagaatcgcatccccattgtcaatccatcaacccaagatgtcattggtcatatccccgcggctacaaaggaggatgtggaggttgcagtcaacgctgctcgaagggctttctcaaggaacaaaggtaaagattgggccaaagcaccaggagatcttcgtgctaagtatctacgcgctattgctgctaaggtgactgagaggaagtcgcatctggcgacgcttgagtcgcttgatagtggtaaaccattggatgagacagtctgggatatggaggatgttgctgggtgttttgagttttatgctgaccttgctgaaggcttagatgctaagcagaaagcgcctgtttctcttcccatggagagttttaagagttatgttctcaagcaacctattggagttgtgggactcatcacaccttggaattacccccttctgatggctgtttggaaggtggctccctcacttgctgcaggatgtactgcggttctaaaaccatcagagttggcttcagtcacttgtttggagcttgctgatatctgtcgggaagttggtcttcctcctggtgtcctcaacgttcttactggatatggttctgaagctggtgctcctttggcagcacatcctagtgtggacaagattgcttttaccggaagctttgccacgggaagcaaggtcatgacagctgctgctcagttggtgaagcctgtttccatggaactgggtgggaagagccctctcattgtgttcgatgacgttgatcttgacaaagctgctgaatgggctctcttcggttgcttctggacaaatggtcagatctgcagtgcaacttcccgccttcttgttcatgaaaacatcgcatctgaattcatagaaaaacttgtaaaatggagcaagaacattaaagtttctgaccccttggaagaaggatgcaggcttggtcctgttgtcagcgaagggcagtacgagaaaattttgaagtttatctcaacggctaaaagtgaaggggcaacgattttacatgggggttcccgacctgagcatctgaaaaagggcttcttcatcgaaccaaccatcataactgatgtaaccacttcaatgcaaatttggagagaagaagtttttgggcctgttctttgcgtgaaaacattctccagtgaggatgaggcaattgagctagcaaatgattcccattacggattaggagctgcagtaatatctaatgatgcagaaaggtgtgaccgcgtaagccaggactttgaagctgggattgtgtggattaactgctcacagccttgctttactcaagctccatggggtggagtcaaacgcagtgggtttggacgcgaattaggagaatggggacttgataactacttgagtgtgaagcaagtgacgctctacacatcaaacgacccatggggatggtacaaacccccttgctaa

SEQ ID NO: 38124 - protein, 502 aa, Brassica napus
MAIPPVPTRQLFIDGEWREPILKNRIPIVNPSTQDVIGHIPAATKEDVEVAVNAARRAFSRNKGKDWAKAPGDLRAKYLRAIAAKVTERKSHLATLESLDSGKPLDETVWDMEDVAGCFEFYADLAEGLDAKQKAPVSLPMESFKSYVLKQPIGVVGLITPWNYPLLMAVWKVAPSLAAGCTAVLKPSELASVTCLELADICREVGLPPGVLNVLTGYGSEAGAPLAAHPSVDKIAFTGSFATGSKVMTAAAQLVKPVSMELGGKSPLIVFDDVDLDKAAEWALFGCFWTNGQICSATSRLLVHENIASEFIEKLVKWSKNIKVSDPLEEGCRLGPVVSEGQYEKILKFISTAKSEGATILHGGSRPEHLKKGFFIEPTIITDVTTSMQIWREEVFGPVLCVKTFSSEDEAIELANDSHYGLGAAVISNDAERCDRVSQDFEAGIVWINCSQPCFTQAPWGGVKRSGFGRELGEWGLDNYLSVKQVTLYTSNDPWGWYKPPC

SEQ ID NO: 38125 - DNA, 1530 bp, Brassica napus
  CDS (1)..(1530)
atgggttcagcgagcaaagagtatgagtttctgagcgagattgggttaagcagctctcacaaccttggaaactacatcggtggcaaatggctaggaaacggtcctcttgtttctactctgaatcctgctaacaatcagccaattgctcaagttgtggaagcttctcttgaagactacgagacaggtctcagagcttgtgaggaagcagctaagacatggatgcaggttcctgctcccaagagaggtgatattgtgagacaaattggggatgcgctgagatccaaacttgactatcttggccgtcttctttctcttgaaatgggaaagatccttgccgaaggcatcggtgaagttcaggaagtgattgacatgtgtgattttgctgttggtttgagccgacaactcaatggttcagtcataccttcagaacgcccaaaccatatgatgttggagatgtggaatcctcttggcattgtcggtgtcatcacagcgtttaacttcccatgtgcagttcttggctggaatgcttgcattgcactggtctgcggaaactgtgtagtctggaaaggtgctccaactacaccgttgattaccatcgcaatgaccaaactagtggctgaagttctagagaagaatcatttacccggtgccattttcactgccatgtgtggtggtgctgagattggtgaagcaatagccaaggacacacgcattcctctagtatcctttactggtagctccaaggtgggcttaacggtgcaacaaacagtgagcgcgagatctggcaaaactctgcttgaactgagtggaaacaatgcgatcatagtcatggacgatgctgacattcagttagctgcacgttctgttctgtttgctgcggttggaacagctggtcaacgctgcacaacttgccgtaggctgctattgcatgagagtgtgtatgacaaagtacttgagcaactcctgacttcatacaaacaagtcaagatcggtgatcctctcgagaaagggacgttgttaggaccattacatactcctgaatcaaagaaaaactttgagaaagggattgaagtcatcaaatcccagggtggcaaagtactaacgggaggtaaagcagttgaaggtgaaggaaacttcgtggagcctacgataatagagatatcatcagatgctgctgttgttaaagaagagctctttgctccggttttatatgctctcaagtttaagacatttgaagaagctgttgcgataaataactcggttcctcaaggtctaagcagctctatattcactcgtagccccgagaacatcttcaagtggataggaccaatgggaagtgactgtgggatagtgaatgtgaacataccgacgaatggagctgagataggaggagcttttggaggtgagaaagcgactggtggtggtcgtgaagctggtagtgactcttggaagcagtatatgcgccgttccacttgcacgattaactacgggaacgagttacctctagcgcaaggaatcaacttcggttaa

SEQ ID NO: 38126 - protein, 509 aa, Brassica napus
MGSASKEYEFLSEIGLSSSHNLGNYIGGKWLGNGPLVSTLNPANNQPIAQVVEASLEDYETGLRACEEAAKTWMQVPAPKRGDIVRQIGDALRSKLDYLGRLLSLEMGKILAEGIGEVQEVIDMCDFAVGLSRQLNGSVIPSERPNHMMLEMWNPLGIVGVITAFNFPCAVLGWNACIALVCGNCVVWKGAPTTPLITIAMTKLVAEVLEKNHLPGAIFTAMCGGAEIGEAIAKDTRIPLVSFTGSSKVGLTVQQTVSARSGKTLLELSGNNAIIVMDDADIQLAARSVLFAAVGTAGQRCTTCRRLLLHESVYDKVLEQLLTSYKQVKIGDPLEKGTLLGPLHTPESKKNFEKGIEVIKSQGGKVLTGGKAVEGEGNFVEPTIIEISSDAAVVKEELFAPVLYALKFKTFEEAVAINNSVPQGLSSSIFTRSPENIFKWIGPMGSDCGIVNVNIPTNGAEIGGAFGGEKATGGGREAGSDSWKQYMRRSTCTINYGNELPLAQGINFG

SEQ ID NO: 38127 - DNA, 1491 bp, Brassica napus
  CDS (1)..(1491)
atggctgggactggaattttcacagagattctagacggagaagtctacaagtactactctgatggagagtggagaacttcttcctccggtaaaagtgtggccatcgttaaccctgccacgaggaagacacagtacaaggttcaagcatgcacgcaagaagaagtgaacaaggtgatggagatggctaaatctgctcagaagtcatgggcaaagactcctctttggaaaagagctgagcttcttcacaaagctgctgcgatcctcaaggacaacaaagctcccattgctgagtctcttgtcaaggaaattgctaaaccagccaaagattctgtcactgaggttgtgaggtctggagatttgatctcttattgtgctgaagaaggtgttaggatcttaggtgaagggaagtttctgctctctgatagcttccctgggaatgaacgtaccaagtactgcctcacttccaagatccctctcggtgtggttttggctattcctccattcaactatcctgtcaatctcgctgtatcgaagattgctcctgctttgatagctggaaactcccttgtcctgaaacctccaactcaaggagctgtttcttgccttcatatggtgtattgctttcacttagctggtttcccaaaaggtctcattagctgcatcacaggaaaaggctctgagattggagatttcctcactatgcaccctgctgttaactgcattagtttcaccggcggtgataccggaatctcaatctccaagaaagctggtatgatccctcttcagatggaacttggaggaaaagatgcatgcattgtcctggaagatgctgatcttgatttagtcgcttccaatatcatcaaaggaggattctcctacagtgggcagagatgcactgcggttaaggtagtcctagtgataaaatcagtggcggatgagcttgtagagaaagtgaaagctaaagtggcgaaactcacggtgggaccgcctgaagagaactgcgatattacagcggtggtgtcggaatcctcggctaatttcattgaaggattggtgatggatgctaaggagaaaggagcaacgttctgtcaagagtataaaagagaaggcaacttgatttggccgttgcttttggacaatgtcagaccagacatgaggattgcttgggaggaacctttcggtcctgtcttgcctgtcttgaggatcagttctgttgaggaaggcattaatcattgcaatgctagtaactttggcctccagggatgtgtattcactaaagacatcaacaaggcaatgctgatcagtgatgcaatggagacaggaacggttcagattaactctgcgccagctcgtggaccagaccatttccctttccagggactaaaggacagtggaatacgatcacaaagtgtgacaaatagcatcaatctgatgaccaaagtgaagaccactgtcattaacttgcctacaccctcatactctatgggttag

SEQ ID NO: 38128 - protein, 496 aa, Brassica napus
MAGTGIFTEILDGEVYKYYSDGEWRTSSSGKSVAIVNPATRKTQYKVQACTQEEVNKVMEMAKSAQKSWAKTPLWKRAELLHKAAAILKDNKAPIAESLVKEIAKPAKDSVTEVVRSGDLISYCAEEGVRILGEGKFLLSDSFPGNERTKYCLTSKIPLGVVLAIPPFNYPVNLAVSKIAPALIAGNSLVLKPPTQGAVSCLHMVYCFHLAGFPKGLISCITGKGSEIGDFLTMHPAVNCISFTGGDTGISISKKAGMIPLQMELGGKDACIVLEDADLDLVASNIIKGGFSYSGQRCTAVKVVLVIKSVADELVEKVKAKVAKLTVGPPEENCDITAVVSESSANFIEGLVMDAKEKGATFCQEYKREGNLIWPLLLDNVRPDMRIAWEEPFGPVLPVLRISSVEEGINHCNASNFGLQGCVFTKDINKAMLISDAMETGTVQINSAPARGPDHFPFQGLKDSGIRSQSVTNSINLMTKVKTTVINLPTPSYSMG

SEQ ID NO: 38129 - DNA, 1614 bp, Brassica napus
  CDS (1)..(1614)
atggcgtcaagaagagtttcctcgctgctctctcgctccctcatgtcctcctcttctcccttctctcttagaggtaaagatcctctcatgaacagaggagctcgcaggtacagcaacctcgctgcttctctcgaagacaccatcactccgcctgtgaaagtcgagcagactcagctcctaatcaacggcaagttcgttgattcagcctcaggaaagactttccccacattggatccaagaactggggaagtgatagctcaggtggctgagggtgacgtggaagacgtgaaccgtgcggttgtagccgcgcgcaaggcctttgacgagggtccatggcctagaatgactgcttacgagaggtcgaagatactgtttcgtttcgctgacttgattgagaaacacaacgacgagatcgctgctctcgagacttgggacaatgggaagccttatgagcagtctgccaagattgaagttcctatgcttgctagagtgttccgttactatgctggttgggcggacaagatccatggaatgacggttcgaggagacggttcgcaccatgtgcagacgctccacgagccgattggagtcgctggacagatcatcccatggaacttccctcttctcatgctctcgtggaagcttggaccagctttagcttgcgggaacaccgttgtgctcaagacggctgagcagactcctctctctgctcttcttgttggaagactacttcacgaggctggacttcctgaaggagttgtgaatatagtttctggatttggtcctaccgctggtgcagccattgctagtcacatggacattgataaggttgctttcaccggttctactgatgttggaaagattattcttgagttggcttcaaaaagtaacctcaaggcagtgtctcttgagcttggaggcaagtcaccattcattgtatgtgaagatgctgatgtggatcaggccgttgagatggctcatttcgctttgttctttaaccagggacaatgctgctgtgctggctcgcgtacatttgtacatgaacgagtgtatgatgagtttgtagagaaagccaaagctcgtgcaatcaaacgcgctgttggagatcccttcaagtcaggcattgagcaaggtccccaggtggactcagagcaattcaagaaaatcccgaagtacattaaacatggagttgagagtggagccaccttacaagctggaggcgaccgtcatggctccaagggatactacattcaacccactgtcttctcagacgtcaaagacgacatgctcatagcaaaagacgagatcttcggaccagttcaaaccatacttaaattcaagaatctagatgaggtgattgcaagggcgaacaactcaagatacggtctagctgcaggagtgttcacacagaatctggacacagcgaacaggctgatgcgagcgctcagggttggaagcgtttggataaactgtttcgatgtgtttgatgcaacaattccattcggagggtacaagatgagtggcattggaagagagaaaggtatctacagtctcaacaattacttgcaagtcaaggctgttgtcactgccatcaagaaccccgcttggctctaa

SEQ ID NO: 38130 - protein, 537 aa, Brassica napus
MASRRVSSLLSRSLMSSSSPFSLRGKDPLMNRGARRYSNLAASLEDTITPPVKVEQTQLLINGKFVDSASGKTFPTLDPRTGEVIAQVAEGDVEDVNRAVVAARKAFDEGPWPRMTAYERSKILFRFADLIEKHNDEIAALETWDNGKPYEQSAKIEVPMLARVFRYYAGWADKIHGMTVRGDGSHHVQTLHEPIGVAGQIIPWNFPLLMLSWKLGPALACGNTVVLKTAEQTPLSALLVGRLLHEAGLPEGVVNIVSGFGPTAGAAIASHMDIDKVAFTGSTDVGKIILELASKSNLKAVSLELGGKSPFIVCEDADVDQAVEMAHFALFFNQGQCCCAGSRTFVHERVYDEFVEKAKARAIKRAVGDPFKSGIEQGPQVDSEQFKKIPKYIKHGVESGATLQAGGDRHGSKGYYIQPTVFSDVKDDMLIAKDEIFGPVQTILKFKNLDEVIARANNSRYGLAAGVFTQNLDTANRLMRALRVGSVWINCFDVFDATIPFGGYKMSGIGREKGIYSLNNYLQVKAVVTAIKNPAWL

SEQ ID NO: 38131 - DNA, 1614 bp, Brassica napus
  CDS (1)..(1614)
atggcgtcaagaagagtttcctcgctgctctctcgctccctcatgtcctcctcttctcccttctctcttagaggtaaagatcctctcatgaacagaggagctcgcaggtacagcaacctcgctgcttctctcgaagacaccatcactccgcctgtgaaagtcgagcagactcagctcctaatcaacggcaagttcgttgattcagcctcaggaaagactttccccacattggatccaagaactggggaagtgatagctcaggtggctgagggtgacgtggaagacgtgaaccgtgcggttgtagccgcgcgcaaggcctttgacgagggtccatggcctagaatgactgcttacgagaggtcgaagatactgtttcgtttcgctgacttgattgagaaacacaacgacgagatcgctgctctcgagacttgggacaatgggaagccttatgagcagtctgccaagattgaagttcctatgcttgctagagtgttccgttactatgctggttgggcggacaagatccatggaatgacggttcgaggagacggttcgcaccatgtgcagacgctccacgagccgattggagtcgctggacagatcatcccatggaacttccctcttctcatgctctcgtggaagcttggaccagctttagcttgcgggaacaccgttgtgctcaagacggctgagcagactcctctctctgctcttcttgttggaagactacttcacgaggctggacttccggaaggagttgtgaatatagtgtctggatttggtcctacagctggtgcagccatagctagtcacatggacattgataaggttgctttcaccggttctactgatgttggaaagattattcttgagttggcttcaaaaagtaacctcaaggcagtgtctcttgagcttggaggcaagtcaccattcattgtatgtgaagatgctgatgtggatcaggccgttgagatggctcatttcgctttgttctttaaccagggacaatgctgctgtgctggctcgcgtacatttgtacatgaacgagtgtatgatgagtttgtagagaaagccaaagctcgtgcaatcaaacgcgctgttggagatcccttcaagtcaggcattgagcaaggtccccaggtggactcagagcaattcaagaaaatcccgaagtacattacacaaggagtcgagagtggagccaccttacaagctggaggcgaccgtcatggttccaagggttactacattcaacccactgtcttctctgacgtcaaggatgacatgctcatagcaaaagacgagatcttcggaccagttcagaccatacttaagttcaagaatctggatgaggttattgcaagggcgaacaactcaaggtacggtctagctgcaggagtgttcacacagaatctggacacagcgaataggctgatgcgagcgctcagggttggaagcgtttggataaactgtttcgatgtgtttgatgccacaattccatttggagggtataagatgagtggcattggaagagagaaaggtatctacagtctcaacaattacttgcaagtcaaggctgttgtcacttccatcaagaaccccgcttggctctaa

SEQ ID NO: 38132 - protein, 537 aa, Brassica napus
MASRRVSSLLSRSLMSSSSPFSLRGKDPLMNRGARRYSNLAASLEDTITPPVKVEQTQLLINGKFVDSASGKTFPTLDPRTGEVIAQVAEGDVEDVNRAVVAARKAFDEGPWPRMTAYERSKILFRFADLIEKHNDEIAALETWDNGKPYEQSAKIEVPMLARVFRYYAGWADKIHGMTVRGDGSHHVQTLHEPIGVAGQIIPWNFPLLMLSWKLGPALACGNTVVLKTAEQTPLSALLVGRLLHEAGLPEGVVNIVSGFGPTAGAAIASHMDIDKVAFTGSTDVGKIILELASKSNLKAVSLELGGKSPFIVCEDADVDQAVEMAHFALFFNQGQCCCAGSRTFVHERVYDEFVEKAKARAIKRAVGDPFKSGIEQGPQVDSEQFKKIPKYITQGVESGATLQAGGDRHGSKGYYIQPTVFSDVKDDMLIAKDEIFGPVQTILKFKNLDEVIARANNSRYGLAAGVFTQNLDTANRLMRALRVGSVWINCFDVFDATIPFGGYKMSGIGREKGIYSLNNYLQVKAVVTSIKNPAWL

SEQ ID NO: 38133 - DNA, 1593 bp, Brassica napus
  CDS (1)..(1593)
atggtactcggagctgcagcgcgtgtagctatcgtcggttgccgtaggctcgtctgctcctcctcacatgcttcccccctcctcgtctcctctcagtgccgccagatgagtatggatgcacaaagcgtctccgagaagctcaggagctcaggtcttctgcgcacacagggtcttataggaggaaagtggattgattcgtatgataagaccacaatcaaggttaacaacccagcaacgggtgaaattgtggctgatgttgcatgtatgggagtcaaagagacgaatgatgctattgcttcttcttacgaagcattccaatcttggagcacacggactgctggagagaggagtaaagttttaaggcgatggtttgaccttctggttgcacacaaggaagaacttggacaacttataactttggagcaaggaaaaccactaaaggaggctataggagaggtcgcatatggggcaagttttattgagtactatgcggaggaggcaaaacgtgtatacggtgatataattcctcctaatgcgtctgatcgccggttgttggtcctaaaacagcctgttggtgttgttggtgcaattaccccttggaactttcccttagctatgattactcgaaaggttggtcctgctctggcttctggttgcacggtggttgttaaaccatctgaacttacgcccctgacagcacttgctgcggccgaacttgcacttcaagctggagttcctccaggtgcacttaacgtggtcatgggaaatgctcctgaaattggggatgctttgcttgcaagtccacaggtgaggaaaatcacgttcacaggatcaacagcagttgggaagaagttgatggcagctgctgcacctaccgtcaagaaggtttctctagaacttggcggcaatgcaccctccataatatttgatgatgcagacctagatgtagcagtaaaaggaacgcttgcagcgaaatttaggaacagtggtcagacatgtgtatgtgcgaacagagtacttgtgcaagatggtatctatgataaatttgctgaggccttttctgaagcggttcaaaaattacaagtaggagatggctttaaggaggggacaacccagggtccacttataaacgatgcagcaattcaaaaggtagaatcattcgtgcaagatgccgtttccaagggagcaaaaatccttctcggcggcaaaaagcacagtctagggatgactttttatgagcctactgttatccgtgatgttacgagtaacatgattatgtctaaggaggagattttcggacccgtagctccccttattcggtttaagactgaggaggacgctatcagaatcgctaatgacactattgcaggacttgctgcgtatatattcacaaacagtgtccaacgatcgtggcgtgtatccgaagcacttgaatacggacttgtaggggtgaatgaaggaatcatatcaacagaggtggctccattcggtggagtgaagcagtctggacttggaagggaaggatctaagtacggtatggacgaataccatgagatcaaatacatatgcatgggagatatgaacagacagtga

SEQ ID NO: 38134 - protein, 530 aa, Brassica napus
MVLGAAARVAIVGCRRLVCSSSHASPLLVSSQCRQMSMDAQSVSEKLRSSGLLRTQGLIGGKWIDSYDKTTIKVNNPATGEIVADVACMGVKETNDAIASSYEAFQSWSTRTAGERSKVLRRWFDLLVAHKEELGQLITLEQGKPLKEAIGEVAYGASFIEYYAEEAKRVYGDIIPPNASDRRLLVLKQPVGVVGAITPWNFPLAMITRKVGPALASGCTVVVKPSELTPLTALAAAELALQAGVPPGALNVVMGNAPEIGDALLASPQVRKITFTGSTAVGKKLMAAAAPTVKKVSLELGGNAPSIIFDDADLDVAVKGTLAAKFRNSGQTCVCANRVLVQDGIYDKFAEAFSEAVQKLQVGDGFKEGTTQGPLINDAAIQKVESFVQDAVSKGAKILLGGKKHSLGMTFYEPTVIRDVTSNMIMSKEEIFGPVAPLIRFKTEEDAIRIANDTIAGLAAYIFTNSVQRSWRVSEALEYGLVGVNEGIISTEVAPFGGVKQSGLGREGSKYGMDEYHEIKYICMGDMNRQ

SEQ ID NO: 38135 - DNA, 1620 bp, Brassica napus
  CDS (1)..(1620)
atggcggctcgtagtagagtgtcttctctattgtcacgctccttttcagcttcctctccctttctctctcgttctcaaggaaaaaatttgaataatggaagtaggatcgtacggagatttggaacctcttctgcagctgaagaagtcataagcccatcggttcaagtttcttacacaaagctcctcatcgatgggaactttgtagacgctgcttctggtaagacgttcccgactcttgatccacgcacaggggaagtcattgcgcacgtagctgaaggtgatgctgaagatatcaaccgggctgtgaaagctgcaaggaaggcctttgatgaaggaccttggcctaagatgactgcttatgaaaggtcgagggtcatgttgagattcgcagatttggtcgagaaacacagcgaagagctcgctgctctagagtcatgggacaatgggaagacttatgaacaagcactaacagcagagattccaatggtcgccagattgttccgttactatgctgggtgggcggataagattcatgggcttacagttccagctgacggaaactatcatgttcagacactgcatgaacccataggtgttgctggtcagatcataccgtggaactttccgcttctgatgtttgcttggaaagttggtcctgctcttgcttgtggtaacaccattgtcctcaaaaccgctgaacagactcctctcactgctttctacgtcggcaaacttttccttgaagcgggtcttcctcctggtgttctgaatatagtttctggatttggtgcaaccgctggtgcttctctcgcaagtcacatggacgtagacaagcttgctttcacaggatcgactgatactggtaaagttatacttggactggctgctaacagcaatctcaagccggtaactctggaacttggagggaagtcaccgttcatcgtattcgaagatgctgatattgataaggctgtagagctggctcacttggctctcttctttaaccaggggcaaggttgctgcgcggggtctcggacatatgttcacgagaaagtgtatgatgagttcgttgagaaagcaaaggcacgcgctttaaaacgtgtggttggtgatcctttcaagaaaggcattgaacagggtcctcagatcgactcaaagcaattcgagaaagtgatgaagtacataaggtcaggagtggaaagcaatgctactcttgaatgtggtggtggtcaggttggagacagaggctacttcatccaacctacagtcttttctaatgttaaggacgacatgcttatcgctcaagacgagatttttggtccagtccagtccatcttgaagttcagtgatgttgatgaggtgataaagagggcgaacgacactaggtacgggctagccgcaggggttttcacaaagagcctggacactgcaaatagggtgtcgagggctttgaaagctggcaccgtttgggtcaactgtttcgatgtctttgacgcagccatcccctttggtggttacaagatgagcggcaacggcagagagaaaggtatttacagtctcaacaactacttgcaggtcaaggcagtcgtcactccccttaataaccctgcatggatctga

SEQ ID NO: 38136 - protein, 539 aa, Brassica napus
MAARSRVSSLLSRSFSASSPFLSRSQGKNLNNGSRIVRRFGTSSAAEEVISPSVQVSYTKLLIDGNFVDAASGKTFPTLDPRTGEVIAHVAEGDAEDINRAVKAARKAFDEGPWPKMTAYERSRVMLRFADLVEKHSEELAALESWDNGKTYEQALTAEIPMVARLFRYYAGWADKIHGLTVPADGNYHVQTLHEPIGVAGQIIPWNFPLLMFAWKVGPALACGNTIVLKTAEQTPLTAFYVGKLFLEAGLPPGVLNIVSGFGATAGASLASHMDVDKLAFTGSTDTGKVILGLAANSNLKPVTLELGGKSPFIVFEDADIDKAVELAHLALFFNQGQGCCAGSRTYVHEKVYDEFVEKAKARALKRVVGDPFKKGIEQGPQIDSKQFEKVMKYIRSGVESNATLECGGGQVGDRGYFIQPTVFSNVKDDMLIAQDEIFGPVQSILKFSDVDEVIKRANDTRYGLAAGVFTKSLDTANRVSRALKAGTVWVNCFDVFDAAIPFGGYKMSGNGREKGIYSLNNYLQVKAVVTPLNNPAWI

SEQ ID NO: 38137 - DNA, 1506 bp, Brassica napus
  CDS (1)..(1506)
atggagaacggtaaatgcaacggaggcgcgacggcgaagttaccggagatcaaattcaccaagcttttcattaacggccagttccttgatgctgcttcaggtaaaacctttgaaaccatagacccaaggaacggtgaagtgatcgcgaaaatagcagcaggagacaaagaagacgttgacttggccgttaacgctgcacgtcacgccttcgatcatggtccttggcctcgaatgactggcttcgagagggcaaggattatcaacaaatatacagacttaatacagcagaatattgaagaattggctgctcttgatgcggttgacggcggaaaattgttccaagtgggaaaaatgaatgacattccggctgcagccggacatttccggtactatgcgggtgcggcggataaaatccacggcgagacacttcgaatgacacgtccgtctttgttcggatacacacttaaagaacctattggagtggtcggccacatcatcccttggaattttccaagcattatgtttgccatgaaagtggctccggctttagctgctggttgcaccatggtggtcaagccagcagagcagacaccactctctgctttgttctatgctcatctctcgaaagaagcgggatttcctgatggcgtgatcaacgtggtgactggatttggatcaactgctggagctgccattgcctcccatatggacattgacaaagttagtttcacgggatcaactgatgttgggaggaagataatgcaagccgcagccacaagcaatctaaaaaaagtgtcccttgaattaagcggaaaatcgcctcttctcattttcgatgatgcagatgttaacaaagctgccgaacttgcgctactaggttgcttctacaacaagggtgagatctgcgtcacaagctctcatgcgtatgaccaacaagctatatacgataaggttgtagcgaaaatggtggagaaggttaaagactggaccgttggtgacccttttgattccacttctagacaaggacctcaagtggataaaaaacaacatgagaaggttctctcttacattgagcatggcaaaaacgaaggagctacgttattaactggagggaacgctattggagacaaaggatactacatcgaaccaactatattcgcagatgtcacggaagatatgaagatatacaaagaagaaatctttggaccagtcatgtctttgatgaaattcaagactatagaggaaggaatcaaatgcgcaaacaacacgaaatacggtctagcagctggaatagtgagccaaaacgttgacgtgattaacacggtttcgagatcaatcaaagctggagtcatttgggttaactgctacttcgcatttgacctcgactctccttacggtggctacaagatgagtggcaattgtcgtgaaagtggcatggacgctctcgatagctatctacaagtcaaatccattgccatgcctcttcacaactccccttggatgtag

SEQ ID NO: 38138 - protein, 501 aa, Brassica napus
MENGKCNGGATAKLPEIKFTKLFINGQFLDAASGKTFETIDPRNGEVIAKIAAGDKEDVDLAVNAARHAFDHGPWPRMTGFERARIINKYTDLIQQNIEELAALDAVDGGKLFQVGKMNDIPAAAGHFRYYAGAADKIHGETLRMTRPSLFGYTLKEPIGVVGHIIPWNFPSIMFAMKVAPALAAGCTMVVKPAEQTPLSALFYAHLSKEAGFPDGVINVVTGFGSTAGAAIASHMDIDKVSFTGSTDVGRKIMQAAATSNLKKVSLELSGKSPLLIFDDADVNKAAELALLGCFYNKGEICVTSSHAYDQQAIYDKVVAKMVEKVKDWTVGDPFDSTSRQGPQVDKKQHEKVLSYIEHGKNEGATLLTGGNAIGDKGYYIEPTIFADVTEDMKIYKEEIFGPVMSLMKFKTIEEGIKCANNTKYGLAAGIVSQNVDVINTVSRSIKAGVIWVNCYFAFDLDSPYGGYKMSGNCRESGMDALDSYLQVKSIAMPLHNSPWM

SEQ ID NO: 38139 - DNA, 1512 bp, Brassica napus
  CDS (1)..(1512)
atggcgattacggtgccgcgacggcagctcttcatcggcggtcaatggacagagccccttcgccgtcaaacactccctgttgtcaatcccgccacggaggacatcatcggttacatcccagctgcaacttctgaggatgtggaactcgcggtggaagctgctaggaaagcacttacaagaaacaaaggaaaggattggtctaaagcatccggggctgttcgtgccagatacttacgtgctattgcagctaaggtaacggagaggaaatctgaactagctaatcttgaggctattgactgcggtaaacctctagatgaagcagcatgggacatggatgatgttgctggatgttttgaatattatgctgacctagctcaaggcttagatgcaaagcagaaggctcctctttctcttcccttagatacttttaagggctacgttctcaaggaacccattggtgtagttggcctgattactccatggaattatccgttactgatggctgtttggaaagtcgctcctgcacttgctgctgggtgcacggcaatactgaaaccttctgagttggcctccgtgacatgtttggagctcgctgatatctgccgcgaggtgggtctgccacctggtgttcttaatattctgactggtttaggaactgaagcaggtgctccattggcatcgcatccacacgttgacaagattgttttcactggaagcacggcaactggaagcaacattatgacttctgctgccaaattggttaaacctgtttccttggagcttggtgggaaaagccctatcattgtctttgatgatgtcaaaattgacaaagctgtggaatggactatgtttggttgtttctggacaaacggtcagatttgcagtgcgacatctcgacttctcgtgcatgaaaagattgctgacgaatttttggacaagttggtaaagtggacaaagaacattaagatttcagatccttttgaagaaggctgtaggcttggtcctgttgtcagcaaaggacagtacgagagagtagtgaagtttgtctcaaacgctaggaaggaaggtgcaactgtcctctgcggaggagctcgtcctgggcatttaaaaaagggttattttgttgaacctgctataatttcaaatgtgactacttcaatggaaatctggagagatgaagtatttggtcctgttctctgtgtcaaaacattctccactgaggatgaggcaatacagctggcaaatgactcccaatatggattagcaggcgctgtattatcaaatgatctggagaggtgtgatcgcgttagtaaggcattcgaggcgggtattgtgtgggtcaactgttctcagccatgtttctgtcaagctccatggggtggaaccaaacgcagtggttttggccgtgaactaggagaatggggacttgggaactacttgagtgtgaagcaggtgacgcaatatatatctgatgaaccatggggatggtacaaacctccttccaagctttaa

SEQ ID NO: 38140 - protein, 503 aa, Brassica napus
MAITVPRRQLFIGGQWTEPLRRQTLPVVNPATEDIIGYIPAATSEDVELAVEAARKALTRNKGKDWSKASGAVRARYLRAIAAKVTERKSELANLEAIDCGKPLDEAAWDMDDVAGCFEYYADLAQGLDAKQKAPLSLPLDTFKGYVLKEPIGVVGLITPWNYPLLMAVWKVAPALAAGCTAILKPSELASVTCLELADICREVGLPPGVLNILTGLGTEAGAPLASHPHVDKIVFTGSTATGSNIMTSAAKLVKPVSLELGGKSPIIVFDDVKIDKAVEWTMFGCFWTNGQICSATSRLLVHEKIADEFLDKLVKWTKNIKISDPFEEGCRLGPVVSKGQYERVVKFVSNARKEGATVLCGGARPGHLKKGYFVEPAIISNVTTSMEIWRDEVFGPVLCVKTFSTEDEAIQLANDSQYGLAGAVLSNDLERCDRVSKAFEAGIVWVNCSQPCFCQAPWGGTKRSGFGRELGEWGLGNYLSVKQVTQYISDEPWGWYKPPSKL

SEQ ID NO: 38141 - DNA, 1530 bp, Brassica napus
  CDS (1)..(1530)
atgggttcagcgagcaaagagtatgagtttctgagcgagattgggttaagcagctctcacaaccttggaaactacatcggtggcaaatggctaggaaacggtcctcttgtttctactctgaatcctgctaacaatcagccaattgctcaagttgtggaagcttctcttgaagactacgagacaggtctcagagcttgtgaggaagcagctaagacatggatgcaggttcctgctcccaagagaggtgatattgtgagacaaattggggatgcgctgagatccaaacttgactatcttggccgtcttctttctcttgaaatgggaaagatccttgccgaaggcatcggtgaagttcaggaagtgattgacatgtgtgattttgctgttggtttgagccgacaactcaatggttcagtcattccttctgaacgcccaaaccatatgatgttggagatgtggaatcctcttggcattgtcggtgtcatcacagcgtttaacttcccttgtgcagttcttggctggaatgcttgcattgcactcgtctgcggaaactgtgtagtctggaaaggtgctccaactacaccgttgattaccatcgcaatgaccaaactagtggctgaagttctagagaagaatcatttacccggtgccatcttcactgccatgtgtggtggtgctgagattggtgaagcaatagccaaggacacacgcattcctctagtatcctttactggtagctccaaggtgggcttaacggtgcaacaaacagtgagtgctagatctggcaaaactctgcttgagttgagtggaaacaatgcgatcatagtcatggacgatgctgacattcagttagctgcacgttctgttctgtttgctgcggttggaaccgctggtcaacgctgcacaacttgccgtaggctgctattgcatgagagtgtgtatgacaaagtacttgagcaactcctgacttcatacaaacaagttaagatcggtgatcctctcgagaaagggacgttgttaggaccattacatactcctgaatcaaagaaaaactttgagaaaggaatcgaagtcatcaaatcccagggtggtagagtactaacgggaggtaaagcagttgacggtgaaggaaactttgtggagcctacgataatagagatatcatcagatgctgctgttgttaaagaagagctgtttgctccggttctatatgctctaaagtttaagacatttgaagaagctgttgcaataaacaactcagttcctcaaggtctaagcagctcgatattcacccgtagccccgagaacatcttcaagtggatcggaccaatgggaagtgactgtgggatagtgaatgtgaacataccgacgaatggagctgagataggaggagcttttggaggtgagaaagcgactggtggcggtcgtgaagctggtagtgactcttggaagcagtatatgcgccgttccacttgtactatcaactatgggaacgagttacctctggcacaaggaatcaacttcggttaa

SEQ ID NO: 38142 - protein, 509 aa, Brassica napus
MGSASKEYEFLSEIGLSSSHNLGNYIGGKWLGNGPLVSTLNPANNQPIAQVVEASLEDYETGLRACEEAAKTWMQVPAPKRGDIVRQIGDALRSKLDYLGRLLSLEMGKILAEGIGEVQEVIDMCDFAVGLSRQLNGSVIPSERPNHMMLEMWNPLGIVGVITAFNFPCAVLGWNACIALVCGNCVVWKGAPTTPLITIAMTKLVAEVLEKNHLPGAIFTAMCGGAEIGEAIAKDTRIPLVSFTGSSKVGLTVQQTVSARSGKTLLELSGNNAIIVMDDADIQLAARSVLFAAVGTAGQRCTTCRRLLLHESVYDKVLEQLLTSYKQVKIGDPLEKGTLLGPLHTPESKKNFEKGIEVIKSQGGRVLTGGKAVDGEGNFVEPTIIEISSDAAVVKEELFAPVLYALKFKTFEEAVAINNSVPQGLSSSIFTRSPENIFKWIGPMGSDCGIVNVNIPTNGAEIGGAFGGEKATGGGREAGSDSWKQYMRRSTCTINYGNELPLAQGINFG

SEQ ID NO: 38143 - DNA, 1491 bp, Brassica napus
  CDS (1)..(1491)
atggctgggactggaattttcacagagattctagacggagaagtctacaagtactactctgatggagagtggagaacttcttcctccggtaaaagtgtggccatcgttaaccctgccacgaggaagacacagtacaaggttcaagcatgcacgcaagaagaagtgaacaaggtgatggagatggctaaatctgctcagaagtcatgggcaaagactcctctttggaaaagagctgagcttcttcacaaagctgctgcgatcctcaaggacaacaaagctcccattgctgagtctcttgtcaaggaaattgctaaaccagccaaagattctgtcactgaggttgtgaggtctggagatttgatctcttattgtgctgaagaaggtgttaggatcttaggtgaagggaagtttctgctctctgatagcttccctgggaatgaacgtaccaagtactgcctcacttccaagatccctcttggtgtggttttggctattcctccattcaactatcctgtcaatctcgctgtatcgaagattgctcctgctttgatagctggaaactcccttgtcctgaaacctccaactcaaggagctgtttcttgccttcatatggtgtattgctttcacttagctggtttcccaaaaggtctcattagctgcatcacaggaaaaggctctgagattggagatttcctcactatgcaccctgctgttaactgcattagtttcaccgggggtgataccggaatctccatctccaagaaagctggtatgatccctcttcagatggaacttggaggaaaagatgcatgcattgtcctggaagatgctgatcttgatttagtcgcttccaatatcatcaaaggaggattctcctacagtgggcagagatgcactgcggttaaggtagtcttagtgatcgaatcagtggctgatgagcttgtagagaaagtgaaagctaaagtggcgaaactcacggtgggaccgcctgaagagaactgcgatattacagccgtggtgtcggaatcctcggctaatttcattgaaggattggtgatggatgctaaggagaaaggagcaacgttctgtcaagagtataaaagagaaggcaacttgatttggccgttgcttttggacaatgtcagaccagacatgaggattgcttgggaggaacctttcggtcctgtcttgcctgtcttgaggatcagttctgttgaggaaggcattaatcattgcaatgctagtaactttggcctccagggatgtgtattcactaaagacatcaacaaggcaatgctgatcagtgatgcaatggagacaggaacggttcagattaactctgcgccagctcgtggaccagaccatttccctttccagggactaaaggacagtggaataggatcacaaggtgtgacaaatagcatcaatctgatgaccaaagtgaagaccactgtcattaacttgcctacaccctcatactctatgggttag

SEQ ID NO: 38144 - protein, 496 aa, Brassica napus
MAGTGIFTEILDGEVYKYYSDGEWRTSSSGKSVAIVNPATRKTQYKVQACTQEEVNKVMEMAKSAQKSWAKTPLWKRAELLHKAAAILKDNKAPIAESLVKEIAKPAKDSVTEVVRSGDLISYCAEEGVRILGEGKFLLSDSFPGNERTKYCLTSKIPLGVVLAIPPFNYPVNLAVSKIAPALIAGNSLVLKPPTQGAVSCLHMVYCFHLAGFPKGLISCITGKGSEIGDFLTMHPAVNCISFTGGDTGISISKKAGMIPLQMELGGKDACIVLEDADLDLVASNIIKGGFSYSGQRCTAVKVVLVIESVADELVEKVKAKVAKLTVGPPEENCDITAVVSESSANFIEGLVMDAKEKGATFCQEYKREGNLIWPLLLDNVRPDMRIAWEEPFGPVLPVLRISSVEEGINHCNASNFGLQGCVFTKDINKAMLISDAMETGTVQINSAPARGPDHFPFQGLKDSGIGSQGVTNSINLMTKVKTTVINLPTPSYSMG

SEQ ID NO: 38145 - DNA, 1620 bp, Brassica napus
  CDS (1)..(1620)
atggcggctcgtagtagagtgtcttctctattgtcacgctccttttcagcttcctctccctttctctctcgttctcaaggaaaaaatttgaataatggaagtaggatcgtacggagatttggaacctcttctgcagctgaagaagtcataagcccatcggttcaagtttcttacacaaagctcctcatcgatgggaacttcgttgacgctgcttctggcaagacgttcccgactcttgatccacgcacaggggaagtcattgcgcacgtagctgaaggtgatgctgaagatatcaaccgggctgtgaaagctgcaaggaaggcctttgatgaaggaccttggcctaagatgactgcttatgaaaggtcgagggtaatgttgagattcgcagatttggttgagaaacacagcgaagagctcgcggctctagagtcatgggacaatgggaagacttatgaacaagcactaacagcagagattccaatggtcgccagattgttccgctactatgctgggtgggcggataagattcatgggcttacagttccagctgacggaaactatcatgttcagacactgcatgaacccataggtgttgctggacagatcattccatggaactttcctcttttgatgtttgcttggaaagttggtcctgctcttgcttgtggtaataccattgtcctcaaaaccgctgaacagactcctctcactgctttctacgtcggcaaacttttccttgaagcgggtcttcctcctggtgttctgaatatagtttctggattcggtgcaaccgctggtgcttctctcgcaagtcacatggatgtagacaagcttgctttcacaggatcgactgatactggtaaagttatacttggactggctgctaacagcaatctcaagccggtgactctggaacttggagggaagtcaccgttcatcgtattcgaagatgctgatattgataaagctgtggagcttgctcactttgctctcttctttaaccaggggcaatgttgctgcgcggggtctcggacatatgttcatgagaaagtgtatgatgagttcgttgagaaagcaaaggcacgcgctttaaaacgtgtggttggtgatcctttcaagaaaggcattgaacagggtcctcagatcgactcaaagcaattcgagaaagtgatgaagtacataaggtcaggagtggaaagcaatgctactcttgaatgtggtggtggtcaggttggagacagaggctacttcatccaacctacagtcttttctaatgttaaggacgacatgcttatcgctcaagacgagatttttggtccagtccagtccatcttgaagttcagtgatgttgatgaggtgataaagagggcgaacgacactaggtacgggctagccgcaggggttttcacaaagagcctggacactgcaaatagggtgtcgagggctttgaaagctggcaccgtttgggtcaactgtttcgatgtctttgacgcagccatcccctttggtggttacaagatgagcggcaacggcagagagaaaggtatttacagtctcaacaactacttgcaggtcaaggcagtcgtcactccccttaataaccctgcatggatctga

SEQ ID NO: 38146 - protein, 539 aa, Brassica napus
MAARSRVSSLLSRSFSASSPFLSRSQGKNLNNGSRIVRRFGTSSAAEEVISPSVQVSYTKLLIDGNFVDAASGKTFPTLDPRTGEVIAHVAEGDAEDINRAVKAARKAFDEGPWPKMTAYERSRVMLRFADLVEKHSEELAALESWDNGKTYEQALTAEIPMVARLFRYYAGWADKIHGLTVPADGNYHVQTLHEPIGVAGQIIPWNFPLLMFAWKVGPALACGNTIVLKTAEQTPLTAFYVGKLFLEAGLPPGVLNIVSGFGATAGASLASHMDVDKLAFTGSTDTGKVILGLAANSNLKPVTLELGGKSPFIVFEDADIDKAVELAHFALFFNQGQCCCAGSRTYVHEKVYDEFVEKAKARALKRVVGDPFKKGIEQGPQIDSKQFEKVMKYIRSGVESNATLECGGGQVGDRGYFIQPTVFSNVKDDMLIAQDEIFGPVQSILKFSDVDEVIKRANDTRYGLAAGVFTKSLDTANRVSRALKAGTVWVNCFDVFDAAIPFGGYKMSGNGREKGIYSLNNYLQVKAVVTPLNNPAWI

SEQ ID NO: 38147 - DNA, 1512 bp, Brassica napus
  CDS (1)..(1512)
atggcgattacggtgccgcgacggcagctcttcatcggcggtcaatggacagagccccttcgccgtcaaacactccctgttgtcaatcccgccacggaggacatcatcggttacatcccagctgcaacttctgaggatgtggagctcgcggtggaagctgctaggaaagcacttacaagaaaccaaggaaaggattggtctaaagcatccggggctgttcgtgccagatacttacgtgctattgcagctaaggtaacggagaggaagtctgagctagctaatcttgaggctattgactgcggtaaacctctagatgaagcagcatgggacatggatgatgttgctggatgttttgaatattatgctgacctagctgaaggcttagatgcaaagcagaaggctcctctttctcttcccttagatacttttaagggctacgttctcaaggaacccattggtgtagttgggctgattactccatggaattatccgttactgatggctgtttggaaagtcgctcctgcacttgctgctgggtgcacggcaatactgaaaccttctgagttggcctccgtgacatgtttggagctcgctgatatctgccgcgaggtgggtctgccacctggtgttcttaatattctgactggtttaggaactgaagcaggtgctccattggcatcgcatccacacgttgacaagattgttttcactggaagcacggcaactggaagcaacattatgacttctgctgccaaattggttaaacctgtttccttggagcttggtgggaaaagccctatcattgtctttgatgatgtcaaaattgacaaagctgtggaatggactatgtttggttgtttctggacaaacggtcagatttgcagtgcgacatctcgacttctcgtgcatgaaaagattgctgacgaatttttggacaagttggtaaagtggacaaagaacattaagatttcagatccttttgaagaaggctgtaggcttggtcctgttgtcagcaaaggacagtacgagagagtagtgaagtttgtctcaaacgctaggaaggaaggtgcaactgtcctctgcggaggagctcgtcctgggcatttaaaaaagggttattttgttgaacctgctataatttcaaatgtgactacttcaatggaaatctggagagatgaagtatttggtcctgttctctgtgtcaaaacattctccactgaggatgaggcaatacagctggcaaatgactcccaatatggattagcaggcgctgtattatcaaatgatctggagaggtgtgatcgcgttagtaaggcattcgaggcgggtattgtgtgggtcaactgttctcagccatgtttctgtcaagctccatggggtggaaccaaacgcagtggttttggccgtgaactaggagaatggggacttgggaactacttgagtgtgaagcaggtgacgcaatatatatctgatgaaccatggggatggtacaaacctccttccaagctttaa

SEQ ID NO: 38148 - protein, 503 aa, Brassica napus
MAITVPRRQLFIGGQWTEPLRRQTLPVVNPATEDIIGYIPAATSEDVELAVEAARKALTRNQGKDWSKASGAVRARYLRAIAAKVTERKSELANLEAIDCGKPLDEAAWDMDDVAGCFEYYADLAEGLDAKQKAPLSLPLDTFKGYVLKEPIGVVGLITPWNYPLLMAVWKVAPALAAGCTAILKPSELASVTCLELADICREVGLPPGVLNILTGLGTEAGAPLASHPHVDKIVFTGSTATGSNIMTSAAKLVKPVSLELGGKSPIIVFDDVKIDKAVEWTMFGCFWTNGQICSATSRLLVHEKIADEFLDKLVKWTKNIKISDPFEEGCRLGPVVSKGQYERVVKFVSNARKEGATVLCGGARPGHLKKGYFVEPAIISNVTTSMEIWRDEVFGPVLCVKTFSTEDEAIQLANDSQYGLAGAVLSNDLERCDRVSKAFEAGIVWVNCSQPCFCQAPWGGTKRSGFGRELGEWGLGNYLSVKQVTQYISDEPWGWYKPPSKL

SEQ ID NO: 38149 - DNA, 1530 bp, Brassica napus
  CDS (1)..(1530)
atgggttcagcgagcaaagagtatgagtttctgagtgagattgggttaagcagctctcacaaccttggaaactacgttggtggcaaatggctaggcaacggacctcttgtttctactctgaaccctgctaacaatcagccaattgctcaagtggttgaagcttctcttgaagactacgagataggtctcaaagcttgtgaggaagcagctaagacatggatgcaggttcctgctcccaagagaggtgatattgtgagacaaattggggatgcgctaagatccaaacttgactatcttggccgtcttctttctcttgaaatgggaaagatccttgctgaaggcatcggtgaagttcaggaagtgattgacatgtgtgattttgctgttggtttgagccgacaactcaatggttcagtcattccttcagaacgcccaaaccatatgatgttggagatgtggaatcctcttggcattgtcggtgtcatcacagcgtttaacttcccttgtgcagttcttggctggaatgcttgcattgcactcgtctgcggaaactgtgtagtctggaaaggtgctccaactacaccgttgattaccatcgcaatgaccaaactagtggctgaagttctagagaagaatcatttacccggtgccatcttcactgccatgtgtggtggtgctgagattggtgaagcaatagccaaagacacacgcattcctctagtatcctttactggtagctccaaggtgggcttaacggtgcaacaaacagtgagtgctagatctggcaaaactctgcttgagttgagtggaaacaatgcgatcatagtcatggacgatgctgacattcagttagctgcacgttctgttctgtttgctgcggttggaacagctggtcaacgctgcacaacttgccgtaggctgcttttgcatgagagtgtgtatgacaaagtacttgagcaactccttacttcatacaaacaagtcaagatcggtgatcctcttgagaaagggactttgttaggaccattacatactcctgaatcaaagaaaaactttgagaaagggattgaagtcatcaaatcccagggtggcaaagtactaacgggaggtaaagcagttgaaggtgaaggaaacttcgtggagcctacgataatagagatatcatcagatgctgctgttgttaaagaagagctctttgctccggttctatatgctctcaagtttaagacatttgaagaagctgttgcgataaataactcggttcctcaaggtctaagcagctctatattcactcgtagccccgagaacatcttcaagtggatcggaccaatgggaagtgactgtgggatagtgaatgtgaacataccgacgaatggagctgagataggaggagcttttggaggtgagaaagcgactggtggtggtcgtgaagctggtagtgactcttggaagcagtatatgcgccgttccacttgtactatcaactatgggaacgagttacctctggcacaaggaatcaacttcggttaa

SEQ ID NO: 38150 - protein, 509 aa, Brassica napus
MGSASKEYEFLSEIGLSSSHNLGNYVGGKWLGNGPLVSTLNPANNQPIAQVVEASLEDYEIGLKACEEAAKTWMQVPAPKRGDIVRQIGDALRSKLDYLGRLLSLEMGKILAEGIGEVQEVIDMCDFAVGLSRQLNGSVIPSERPNHMMLEMWNPLGIVGVITAFNFPCAVLGWNACIALVCGNCVVWKGAPTTPLITIAMTKLVAEVLEKNHLPGAIFTAMCGGAEIGEAIAKDTRIPLVSFTGSSKVGLTVQQTVSARSGKTLLELSGNNAIIVMDDADIQLAARSVLFAAVGTAGQRCTTCRRLLLHESVYDKVLEQLLTSYKQVKIGDPLEKGTLLGPLHTPESKKNFEKGIEVIKSQGGKVLTGGKAVEGEGNFVEPTIIEISSDAAVVKEELFAPVLYALKFKTFEEAVAINNSVPQGLSSSIFTRSPENIFKWIGPMGSDCGIVNVNIPTNGAEIGGAFGGEKATGGGREAGSDSWKQYMRRSTCTINYGNELPLAQGINFG

SEQ ID NO: 38151 - DNA, 1491 bp, Brassica napus
  CDS (1)..(1491)
atggctgggactggaattttcacagagattctagacggagaagtctacaagtactactctgatggagagtggagaacttcttcctccggtaaaagtgtggccatcgttaaccctgccacgaggaagacacagtacaaggttcaagcatgcacgcaagaagaagtgaacaaggtgatggagatggctaaatctgctcagaagtcatgggcaaagactcctctttggaaaagagctgagcttcttcacaaagctgctgcgatcctcaaggacaacaaagctcccattgctgagtctcttgtcaaggaaattgctaaaccagccaaagattctgtcactgaggttgtgaggtctggagatttgatctcttattgtgctgaagaaggtgttaggatcttaggtgaagggaagtttctgctctctgatagcttccctggtaatgaacgtaccaagtactgcctcacttccaagatccctctcggtgtggttttggctattcctccattcaactatcctgtcaatctcgctgtatcgaagatcgctcctgctttgatagctggaaactcccttgtcctgaaacctccaactcaaggagctgtttcttgccttcatatggtacattgctttcacttagccggtttcccaaaaggtctcattagctgcatcactggaaaaggctctgagattggcgatttcctcactatgcaccctgctgttaactgcattagtttcactggcggtgataccggaatctcaatctccaagaaagctggtatgatccctcttcagatggaacttggaggaaaagatgcatgcattgtcctggaagatgctgatcttgatttagtcgcttccaatatcatcaaaggaggattctcctacagtgggcagagatgcactgcggttaaggtagtcttagtgatggaatcagtggcggatgagcttgttgagaaagtgaaagctaaagtggctaaactcacggtgggaccacctgaggagaactgtgatattacagcggtggtgtctgaatcctcggctaatttcattgaaggattggtgatggatgctaaggagaaaggagcaacgttctgtcaagagtataaaagagaaggcaacttgatttggccgttgcttttggacaatgtcagaccggacatgaggattgcttgggaggaacctttcggtcctgtcttacccgtcttgaggatcaattctgttgaagaaggcattaatcattgcaatgctagtaactttggcctccagggatgtgtattcactaaagacatcaacaaggcaatgctgatcagtgatgcaatggagacaggaacggttcagattaactctgcgccagctcgtggaccagaccatttccctttccagggactaaaggacagtggaataggatcacaaggtgtgacaaatagcatcaatctgatgaccaaagtgaagaccactgtcattaacttgcctacaccctcatactctatgggttag

SEQ ID NO: 38152 - protein, 496 aa, Brassica napus
MAGTGIFTEILDGEVYKYYSDGEWRTSSSGKSVAIVNPATRKTQYKVQACTQEEVNKVMEMAKSAQKSWAKTPLWKRAELLHKAAAILKDNKAPIAESLVKEIAKPAKDSVTEVVRSGDLISYCAEEGVRILGEGKFLLSDSFPGNERTKYCLTSKIPLGVVLAIPPFNYPVNLAVSKIAPALIAGNSLVLKPPTQGAVSCLHMVHCFHLAGFPKGLISCITGKGSEIGDFLTMHPAVNCISFTGGDTGISISKKAGMIPLQMELGGKDACIVLEDADLDLVASNIIKGGFSYSGQRCTAVKVVLVMESVADELVEKVKAKVAKLTVGPPEENCDITAVVSESSANFIEGLVMDAKEKGATFCQEYKREGNLIWPLLLDNVRPDMRIAWEEPFGPVLPVLRINSVEEGINHCNASNFGLQGCVFTKDINKAMLISDAMETGTVQINSAPARGPDHFPFQGLKDSGIGSQGVTNSINLMTKVKTTVINLPTPSYSMG

SEQ ID NO: 38153 - DNA, 1554 bp, Glycine max
  CDS (1)..(1554)
atgaactccaatggttaccctgcttcctccttcaaaatccccaccgtcaagttcaccaagctcttcatcaatggacattttgttgattcactttcaggaggagaatttgagacaatagacccaagaaccggagaggtgattgcaaggattgcagagggaaccaaagaagacattgaccttgccgtcaaagcgtctcgtctggctttcgaccatggtccatggcctcgtatgcctgccgtagtacgttatcatttactacctccggttctctttttacaagaaacaagttttaatgaaagagcaagaattatgatgaaatgggctgacctaattgaccaacacgtagaagaaattgcagcactggatgccattgatgctggaaagttgtaccatatgcttaaggctattgaaattcctgcaacagcaaatactatacgttattatgctggtgctgctgataaaattcatggagaggtattaaagcccgcacgggagttccatgcatatactttacttgaaccagttggtgttgtgggacatatcattccttggaatttccctagcatcatgtttgtctccaaggttagcccttgcttggctgctggttgcacaatggtcctcaagcctgctgaacaaacacctctttcagctttgttttatgctcatctagctaaactggctggaattccagatggagtgctcaatgtagtccccggatttggcgcaactgcaggtgctgcaatatgctcagacatggacattgataaggtcagttttacaggttcaacagaagtagggcgtgaagtaatgcgtgctgcagctaacagtaatttgaaaccagtttcacttgaactaggaggcaagtcaccattcataatttttgatgatgcaaatctagataaagcggttgagcttgctctcatggccctagtatataacaagggagaagtttgtgctgcaggctcccgcgtatttgttcaggaagggatctatgatgaatttgataagaggttggtggagaaggcaaaagcttgggttgttggggatccctttgatcctaatgttcagcaagggcctcaggttgacaaaaagcaatttgaaaaaattctttcctacatcgagcatggaaaaagagaaggggccacccttttgacagggggcaaaagagtgggtaacaagggttactacattgagccaacaattttctctaatgttaaggaggacatgcttatagcacaagatgaaatattcggtcccgtgatagcactgatgaagtttaagacaattgaggaagcaattaaaagtgctaacaacagcagatatggcctagtagcaggtgttgtgaccaagagcttggacacagcaaacacaatgtcaaggtcaattcgtgcaggggttgtttggatcaactgttattttgccttcgaaaatgacattccttatggaggatgtaagatgagtggatttggaaaagattctggattggaagccctacacaagtacctacatgttaaatccgttgtaacacccatttacaattctccttggctttga

SEQ ID NO: 38154 - protein, 517 aa, Glycine max
MNSNGYPASSFKIPTVKFTKLFINGHFVDSLSGGEFETIDPRTGEVIARIAEGTKEDIDLAVKASRLAFDHGPWPRMPAVVRYHLLPPVLFLQETSFNERARIMMKWADLIDQHVEEIAALDAIDAGKLYHMLKAIEIPATANTIRYYAGAADKIHGEVLKPAREFHAYTLLEPVGVVGHIIPWNFPSIMFVSKVSPCLAAGCTMVLKPAEQTPLSALFYAHLAKLAGIPDGVLNVVPGFGATAGAAICSDMDIDKVSFTGSTEVGREVMRAAANSNLKPVSLELGGKSPFIIFDDANLDKAVELALMALVYNKGEVCAAGSRVFVQEGIYDEFDKRLVEKAKAWVVGDPFDPNVQQGPQVDKKQFEKILSYIEHGKREGATLLTGGKRVGNKGYYIEPTIFSNVKEDMLIAQDEIFGPVIALMKFKTIEEAIKSANNSRYGLVAGVVTKSLDTANTMSRSIRAGVVWINCYFAFENDIPYGGCKMSGFGKDSGLEALHKYLHVKSVVTPIYNSPWL

SEQ ID NO: 38155 - DNA, 1494 bp, Glycine max
  CDS (1)..(1494)
atggctgctgggactggactctttgcagagattttggatggagatgcgtacaagtactatgctgatggagagtggaagaaatctgcttctgggaaaagtgtttccatcatcaaccccactaccagaaagactcaatacaaagttcaagcttgttcacaagaggaggttaataaggtcatggacttagcaaaatctgcacaaaagttatgggcaaagaccccactatggaaacgtgctgagcttcttcacaaggcagctgctatccttaaagagcacaaaactccaattgcagagtgcctggtgaaagaaatagcaaagccagccaaagatgctgttatggaggttgtaagatctggggatctggtttcttacactgctgaagaaggtgtaaggattctgggagagggaaagttcttggtgtcggatagctttcctggaaatgaaaggacaaaatattgcctcacatccaagattccactaggagtgattttagccattccaccttttaactatcccgtcaatcttgctgtttccaaaattgctcctgccctgattgctggaaactcaattgtgctcaagcctccaactcagggagctgtttctgctttgcacatggttcactgctttcacttggctggttttcccaaaggcctaatcaactgtgtcactggaaaaggctcagaaattggtgatttccttacaatgcatccaggagtgaactgtataagctttactggtggtgatactggcattgcaatttcaaagaaggcaggcatgattcctctgcaaatggagttgggaggaaaagatgcctgcattgtacttgaagatgctgacctggatttggttgctgcaaacattataaagggaggcttttcatacagtggtcagagatgcactgctgttaaggttgtcctggtaatggagtccgttgccgatgctttggttgagaaggtgaaggctaaggtggcaaaactaactgttggaccaccagaggatgactgtgatatcaccccggttgtgtcagaatcatctgccaatttcattgaaggcctggtcttggatgctaaggagaaaggagcaacattctgccaggagtacaaaagagaaggcaatcttatttggcctttgctactggacaatgttaggccagacatgagaatcgcatgggaagagccatttggaccagttttaccagtaattaggatcaattcagttgaagaaggaatccatcattgcaatgctagcaactttggacttcagggatgtgtcttcacaaaggatgtcaacaaagcaataatgatcagtgatgcaatggaaacgggaacagttcagataaattccgccccggctcgtgggccagatcattttccctttcagggtataaaggacagtggcattggatctcaagggattaccaacagcataaacatgatgaccaaggtcaaaacgactgtgatcaacttacccagcccttcctatactatgggctag

SEQ ID NO: 38156 - protein, 497 aa, Glycine max
MAAGTGLFAEILDGDAYKYYADGEWKKSASGKSVSIINPTTRKTQYKVQACSQEEVNKVMDLAKSAQKLWAKTPLWKRAELLHKAAAILKEHKTPIAECLVKEIAKPAKDAVMEVVRSGDLVSYTAEEGVRILGEGKFLVSDSFPGNERTKYCLTSKIPLGVILAIPPFNYPVNLAVSKIAPALIAGNSIVLKPPTQGAVSALHMVHCFHLAGFPKGLINCVTGKGSEIGDFLTMHPGVNCISFTGGDTGIAISKKAGMIPLQMELGGKDACIVLEDADLDLVAANIIKGGFSYSGQRCTAVKVVLVMESVADALVEKVKAKVAKLTVGPPEDDCDITPVVSESSANFIEGLVLDAKEKGATFCQEYKREGNLIWPLLLDNVRPDMRIAWEEPFGPVLPVIRINSVEEGIHHCNASNFGLQGCVFTKDVNKAIMISDAMETGTVQINSAPARGPDHFPFQGIKDSGIGSQGITNSINMMTKVKTTVINLPSPSYTMG

SEQ ID NO: 38157 - DNA, 1623 bp, Glycine max
  CDS (1)..(1623)
atggcaactcgaagactttcattgctcctctctcgctctctatcttccacttcttttcaagctgcttctctacttcactcactagggagaaactctggcaagtggggaaactttaacagattcagcactgcagcagcagttgaggatttaatcactccacaagttccaataacatacactaagcatctgataaatggacaatttgtggatgctgcttcagggaaaacttttccaacatatgacccacgcacaggagaagtgattgctcaagttgctgaaggtgatgcagaagatatcaaccgtgcagtatcggcagctcgcaaggcctttgatgaaggaccttggccaaaattgactgcttatgaaagatgcaagataatactgcgctttgctgatttggttgagaaacacagcgatgaacttgcagctctcgagacatggaataacggaaagacttatgaacaggctgccaagactgaattaccaatgttcgtgcgtttatttcactattatgctggttgggcagacaaaattcatgggctgacagtgccagctgatggaaattatcatgtgcagacattgcatgaaccaattggtgtagcaggacaaatcataccttggaactttcctctcctcatgtttgcttggaaagttggaccagctcttgcatgtggaaatactgtcatccttaagactgctgaacaaacacctttaacagctctctatgtagcaaaactttttcatgaggctggtcttccaccaggtgttttgaatgtagtttctggctatggtccaactgctggtgcagctctagcaagtcatatggatgttgacaagctagcattcactggatctaccgagactggaaaagttgtgcttggattggctgcgcaaagcaatttgaagcctgtgacattggaacttggagggaaatcacctttcatagtgtgtgaggatgctgatgttgaccaggctgtagaacttgcgcactttgctttgttctttaatcaggggcaatgttgctgtgctgggtctcgtacctttgtacatgagcatatctatgatgagttcttggagaaagcaaaggctcgtgctttgaaacgtgttgttggggatcccttcaaaaagggtgtcgaacaaggacctcagattgatgtggaacaattccagaaggtccttaggtacataaagtccggtattgaaagcaaggccacccttgaatgtgggggtgaccaaattggctcaaagggcttctttgtccagcccactgtcttctcaaatgttcaggatgacatgttgatagcaaaagatgaaatatttggccctgtacaaaccatcttgaagttcaaggacatcgacgaagtaattcgaaggtcaaacgcaacgcactatggtctagctgcaggagttttcactaagaatgtgcacacagccaacactttgatgcgagcactgagggttggaacagtatggatcaattgctttgatgtttttgatgctgcaattccctttggagggtacaaaatgagcggcattggcagggagaagggtatctacagtctcaacaattacctgcaagtgaaagctgtggtttcaccagtgaagaaacctgcatggttgtga

SEQ ID NO: 38158 - protein, 540 aa, Glycine max
MATRRLSLLLSRSLSSTSFQAASLLHSLGRNSGKWGNFNRFSTAAAVEDLITPQVPITYTKHLINGQFVDAASGKTFPTYDPRTGEVIAQVAEGDAEDINRAVSAARKAFDEGPWPKLTAYERCKIILRFADLVEKHSDELAALETWNNGKTYEQAAKTELPMFVRLFHYYAGWADKIHGLTVPADGNYHVQTLHEPIGVAGQIIPWNFPLLMFAWKVGPALACGNTVILKTAEQTPLTALYVAKLFHEAGLPPGVLNVVSGYGPTAGAALASHMDVDKLAFTGSTETGKVVLGLAAQSNLKPVTLELGGKSPFIVCEDADVDQAVELAHFALFFNQGQCCCAGSRTFVHEHIYDEFLEKAKARALKRVVGDPFKKGVEQGPQIDVEQFQKVLRYIKSGIESKATLECGGDQIGSKGFFVQPTVFSNVQDDMLIAKDEIFGPVQTILKFKDIDEVIRRSNATHYGLAAGVFTKNVHTANTLMRALRVGTVWINCFDVFDAAIPFGGYKMSGIGREKGIYSLNNYLQVKAVVSPVKKPAWL

SEQ ID NO: 38159 - DNA, 1515 bp, Glycine max
  CDS (1)..(1515)
atgagtgctctctctaactccagtagtagccacggcaattccttcctcaagatgcccgccatcaagtttaccaagctcttcatcaatggagattttgttgattccatatcaggaaggacatttgagactatagaccccagaaaagaagaggtaattgcaagagttagtgagggagataaagaagacattgatattgctgttaaagcagcacgtcaggcatttgactcgggtccatggcctcgcttgccaggctctgaaagggcaaaaattatgatgaaatgggcagacctagttgatgaaaatatagaagaactagcagcattagataccattgatgctggaaagctatactatattaataaggtagcggaaattccttcagctacaaatgcgttacggtactatgcaggtgctgctgataaaattcacggtgacgtattaaaaatgaacggggatttccatgcatatacacttttggaaccaattggtgttgtgggacacataattccatggaatgcccccagcctctcatttttcatcaaggttagcccttccttagctgcaggctgtactatggtcctcaaacctgctgaacaaacacccctctctgctttgttttatgctcatctagctaagttggctggaatcccagatggtgtgcttaatatagtacctggatttggcccaactgctggcgcagcaataagctcacacatggacatagatgcggtcagttttactggttcaattgaagtagggcgtgaagtgttgcaggctgcagcttggagcaatttaaaaccggtttcacttgaattaggaggcaagtctcctctcattattttcaatgatgcggatatagacaaagcttccgagcttgctctctttggcatcatgtctaacaagggagaaatttgtgtggcaggttctcgtgtgtttgtccaggaagagatctatgatgaatttgagaagaagttggtggagaaggcaaaatcttgggtcgttggggatccttttgatcccaaatcgctgcaagggcctcaggctgacaggaaccaattggagaaaatactttcatatattgagcacggaaagagagaaggagccacccttttgacaggaggtaatacagtgggcaacaaaggttactacatagaacctacaattttctccaatgtaaaggaggacatgctaatagcacgggatgaaatatttggccctgtactagcgctgatgaagtttaagaccatggaggaagcaattaaaagtgctaacaataccaagtatggcctagcagcaggaattgtaaccaagaatttggatactgcaaacactatgtcaaggtccattcgtgcaggcattgtttggatcaactgctattttaccgtagggagtgatgttccttttggagggtataagatgagcggatttggaagagatttgggattacaggcccttcacaagtacttacaagttaaatctgttgtaacacctattcataattctccttggctttga

SEQ ID NO: 38160 - protein, 504 aa, Glycine max
MSALSNSSSSHGNSFLKMPAIKFTKLFINGDFVDSISGRTFETIDPRKEEVIARVSEGDKEDIDIAVKAARQAFDSGPWPRLPGSERAKIMMKWADLVDENIEELAALDTIDAGKLYYINKVAEIPSATNALRYYAGAADKIHGDVLKMNGDFHAYTLLEPIGVVGHIIPWNAPSLSFFIKVSPSLAAGCTMVLKPAEQTPLSALFYAHLAKLAGIPDGVLNIVPGFGPTAGAAISSHMDIDAVSFTGSIEVGREVLQAAAWSNLKPVSLELGGKSPLIIFNDADIDKASELALFGIMSNKGEICVAGSRVFVQEEIYDEFEKKLVEKAKSWVVGDPFDPKSLQGPQADRNQLEKILSYIEHGKREGATLLTGGNTVGNKGYYIEPTIFSNVKEDMLIARDEIFGPVLALMKFKTMEEAIKSANNTKYGLAAGIVTKNLDTANTMSRSIRAGIVWINCYFTVGSDVPFGGYKMSGFGRDLGLQALHKYLQVKSVVTPIHNSPWL

SEQ ID NO: 38161 - DNA, 1527 bp, Glycine max
  CDS (1)..(1527)
atgggttccgataataccaacttggagttcttgaaggagatcggtttgggctcctccaacattggttcttacattaatggccaatggaaagccactggttcttctgtcacttctgttaatccttctaacaatcagagcatagctcaagtgactgaagcgactttgcaagattatgaggagggattgcaagcttgcagtgaagcagccaagacatggatgactattccggcaccgaagagaggtgagattgtgagacagattggtgaagcattgagggccaagttggatcctttgggtagactggtgtctcttgagatgggaaaaattctcccagaaggaattggggaagttcaggaaattattgatatgtgtgattattgtgttgggctaagcagacaattgaatggatcaattataccatcagaacgtccagatcatatgatgtttgaggtatggaacccactaggaatagttggtgtaatcactgctttcaactttccatgcgctgttctaggatggaatgcttgcattgctttagtctgtggtaactgtgttgtgtggaagggtgctccaacaactcctttgataactattgctgtgacaaagctagtagctgaagttcttgagaggaacaaattacctggtgcaatattcacctctttctgtggaggtgctgacattggtcaggcaatagcaaaagacacccgcattcccctggtttcatttactggaagttcaaaggttggcttgatggtccagcaaacagttaatgagagatttggcaaatgcttgcttgagttaagtggtaacaatgcaataatagtcatggatgatgcagatatcaaattggctgtacgatctattttgtttgcagctgtgggtactgctggtcagcggtgtacaacttgccgtagactgtttctgcatgaaagtatttacgcagatgtactagaccaacttattggagtctacaaacaagtcaaaattgggaatcccttggagaaggggactctagttgggcccttgcatactcctacttcagtggaaaactttcagaagggtatttcagtcataaaatctcagggagggaagatcctaacaggtggatctgtattagagtcagcaggaaattttgtacaaccaacaattgttgagatttctcccgatgctcctgtagttaaagaagaattgtttggtccagttctgtatgttatgaaatttcagactctggaagaagcaattgccttgaacaattctgtacctcaaggattaagtagttcaatctttacccaaagacctggaactatattcaagtggattgggccacgaggtagtgattgtggtatagtgaatgcaaacatacctacaaatggagctgagattggtggtgcctttggtggagaaaaggcgaccggtggtggccgtgaggcgggaagtgactcgtggaagcaatacatgcggcgttctacatgtaccatcaattatggaagtgaactaccattagctcagggaataaactttggctag

SEQ ID NO: 38162 - protein, 508 aa, Glycine max
MGSDNTNLEFLKEIGLGSSNIGSYINGQWKATGSSVTSVNPSNNQSIAQVTEATLQDYEEGLQACSEAAKTWMTIPAPKRGEIVRQIGEALRAKLDPLGRLVSLEMGKILPEGIGEVQEIIDMCDYCVGLSRQLNGSIIPSERPDHMMFEVWNPLGIVGVITAFNFPCAVLGWNACIALVCGNCVVWKGAPTTPLITIAVTKLVAEVLERNKLPGAIFTSFCGGADIGQAIAKDTRIPLVSFTGSSKVGLMVQQTVNERFGKCLLELSGNNAIIVMDDADIKLAVRSILFAAVGTAGQRCTTCRRLFLHESIYADVLDQLIGVYKQVKIGNPLEKGTLVGPLHTPTSVENFQKGISVIKSQGGKILTGGSVLESAGNFVQPTIVEISPDAPVVKEELFGPVLYVMKFQTLEEAIALNNSVPQGLSSSIFTQRPGTIFKWIGPRGSDCGIVNANIPTNGAEIGGAFGGEKATGGGREAGSDSWKQYMRRSTCTINYGSELPLAQGINFG

SEQ ID NO: 38163 - DNA, 1506 bp, Glycine max
  CDS (1)..(1506)
atgactagccttactaatggcgatgctgcctccctcaacaaggtccccacgatcaacttcaccaagctcttcattaacggacacttcgttcactctctgtcaggaaagacatttgagacaatagatccaagaacaggagatgttatagcgaggataagcgagggagataaagaagacattgacattgctgttaaagcagcacgtcatgcatttgacaacggtccatggcctcgccttcccggctctgagagagcaagaatattgctgaaatgggcagaaataatagaggaaaacgcagaagaacttgcagcactagatgccattgatgcggggaagttgtaccatatgtgtaggaatttggaagttccagcagcagcaaacactcttcgttactatgcaggtgcagccgataagattcatggagaggtgttgaaaatgtcccgagacttccatgcctatacattacttgaaccacttggtgttgtgggacacattactccctggaatttccccaataccatgttctacatcaaggttgctccttctttagctgctggctgcaccatggtcctcaagcccgccgagcaaacacccctctctgctttgttttctgctcatcttgctaaattggctggaatcccagatggagtgatcaatgtagtgcctggatttggcccaactgctggtgctgcattaagctcacacatggatgttgataaggtcagctttaccggttcaacacaaacaggccgtgtgataatgcaggctgcagcaaagagtaacttgaaacaagtttcacttgaattaggaggcaagtcacccctcataatttttgatgatgcagatatagacaaagctactgagctagctctactaggcatcctatataacaagggagaagtttgtgttgcaagttcccgtgtgcttgttcaagaagggatctatgatgaatttgagaaaaaactggtggagaaggcaaaagcttgggtcgttggggatccctttgatcctaaagttcaacaaggccctcaggttgacaaggaacaatttgaaaaggtcctttcatatattgagcatggaaagaaagaaggagctacccttttgaccgggggtaaaacagtgggaaacaagggctactttattgagccaacaattttctccaatataagggaggatatgcttatagcacaggatgaaatatttggcccagtaatggcactgaagaagtttaagaccattgaggaagcaattaagagtgctaacaataccaagtatggcctagcagcaggcatagtgaccaagaatttggatacggcaaacacagtgtcaaggtccattcgtgcaggcactatttggatcaactgctattttgcctttggcgatgatgttccctttggagggtataagatgagtggatttggaaaagatcatggattggaagcccttcacaagtacctacaagttaaatctgttgttactcccctttacaattcaccctggctttga

SEQ ID NO: 38164 - protein, 501 aa, Glycine max
MTSLTNGDAASLNKVPTINFTKLFINGHFVHSLSGKTFETIDPRTGDVIARISEGDKEDIDIAVKAARHAFDNGPWPRLPGSERARILLKWAEIIEENAEELAALDAIDAGKLYHMCRNLEVPAAANTLRYYAGAADKIHGEVLKMSRDFHAYTLLEPLGVVGHITPWNFPNTMFYIKVAPSLAAGCTMVLKPAEQTPLSALFSAHLAKLAGIPDGVINVVPGFGPTAGAALSSHMDVDKVSFTGSTQTGRVIMQAAAKSNLKQVSLELGGKSPLIIFDDADIDKATELALLGILYNKGEVCVASSRVLVQEGIYDEFEKKLVEKAKAWVVGDPFDPKVQQGPQVDKEQFEKVLSYIEHGKKEGATLLTGGKTVGNKGYFIEPTIFSNIREDMLIAQDEIFGPVMALKKFKTIEEAIKSANNTKYGLAAGIVTKNLDTANTVSRSIRAGTIWINCYFAFGDDVPFGGYKMSGFGKDHGLEALHKYLQVKSVVTPLYNSPWL

SEQ ID NO: 38165 - DNA, 1500 bp, Glycine max
  CDS (1)..(1500)
atgaactccaatggttaccctgcttcctccttcaaaatccccaccgtcaagttcaccaagctcttcatcaatggacattttgttgattcactttcaggaggagaatttgagacaatagacccaagaaccggagaggtgattgcaaggattgcagagggaaccaaagaagacattgaccttgccgtcaaagcgtctcgtctggctttcgaccatggtccatggcctcgtatgcctgccgtagaaagagcaagaattatgatgaaatgggctgacctaattgaccaacacgtagaagaaattgcagcactggatgccattgatgctggaaagttgtaccatatgcttaaggctattgaaattcctgcaacagcaaatactatacgttattatgctggtgctgctgataaaattcatggagaggtattaaagccggcacgggagttccatgcatatactttactagaaccaattggtgttgtgggacacattattccttggaatttccctagcaccatgtttgttgccaaggtgagtccttccttggctgctggttgcacaatggtcctcaagcctgctgaacaaacacctctctcggccttgttttatgctcatcttgctaagctggctggaattccagatggagtgcttaatgtagtacccggatttggccaaactgcaggtgctgcaataagctcacacatggacattgataaggtaagctttacgggttcaacagaagtggggcgtgaagtaatgcgtgctgcagctaatagtaatttgaaaccagtttcacttgagctaggaggcaagtcacccgtcatagtttttgatgatgctgatgtagataaagctgctggacttgctctcatgggcatcctatttaataagggagaaatttgtgttgcaggctcccgtgtgttggttcaggaaggaatctatgatgaatttgagaagaaattggtggaaaaagcaaatgcttgggtggttggtgatccttttgatcctaaagttcagcaagggcctcaggttgacaagaagcaatttgaaaagattctttcctatatcgagcatggaaagaaagaaggtgcaacccttttgacagggggcaaaagagtgggcaacaagggttactacattgagcctacaattttctctaatgttaaggaggacatgcttatagtacaagatgaaatatttggccctgtgatggctttgatgaagtttaagactattgaagatgcaattaagattgccaacaatacaaggtatggcctagcatcaggcattgtgacaaagagtttggacacagccaacactgtgtcaaggtccattcgtgcaggcattgtttggatcaactgttattttgcctttggggatgacattccttatggggggtacaagatgagtggatttggaagagattttggaatggaagccctacacaagtatcttcaagttaaatctgttgtaactcccatttacaattctccctggctttga

SEQ ID NO: 38166 - protein, 499 aa, Glycine max
MNSNGYPASSFKIPTVKFTKLFINGHFVDSLSGGEFETIDPRTGEVIARIAEGTKEDIDLAVKASRLAFDHGPWPRMPAVERARIMMKWADLIDQHVEEIAALDAIDAGKLYHMLKAIEIPATANTIRYYAGAADKIHGEVLKPAREFHAYTLLEPIGVVGHIIPWNFPSTMFVAKVSPSLAAGCTMVLKPAEQTPLSALFYAHLAKLAGIPDGVLNVVPGFGQTAGAAISSHMDIDKVSFTGSTEVGREVMRAAANSNLKPVSLELGGKSPVIVFDDADVDKAAGLALMGILFNKGEICVAGSRVLVQEGIYDEFEKKLVEKANAWVVGDPFDPKVQQGPQVDKKQFEKILSYIEHGKKEGATLLTGGKRVGNKGYYIEPTIFSNVKEDMLIVQDEIFGPVMALMKFKTIEDAIKIANNTRYGLASGIVTKSLDTANTVSRSIRAGIVWINCYFAFGDDIPYGGYKMSGFGRDFGMEALHKYLQVKSVVTPIYNSPWL

SEQ ID NO: 38167 - DNA, 1512 bp, Glycine max
  CDS (1)..(1512)
atgagcatcccaattccccatcggcagttattcatagacggagactggaaagtccccgtcctcaagaatcggattcccatcatcaacccttccacccaacacatcatcggggatatcccagcagctactaaggaagacgttgatctcgctgtcgctgccgccaaagctgccctctcccgcaacaagggcgccgattgggcctccgcttccggctccgttcgggctcgctacctccgcgccatcgctgccaagatcaccgagaaaaagcctgaactagcaaaactcgaagctattgactgtggaaaaccgctcgatgaagccgcctgggacatcgacgatgttgctggttgctttgagttctatgctgaccttgctgaaaaattggacgcacagcaaaaggctcatgtgtctcttcccatggacacattcaagagttatgttcttaaggagccgattggagtcgttgctttaataactccttggaattatcctctgttgatggctacgtggaaggttgctcctgctctggcggccggctgtgctgcaatattgaagccctctgagttggcatctgtgacatgtttggagctcgctgaaatttgcaaagaagtcgggcttcctcctggcgtgttgaacattctcactggattaggacctgaagcgggtgctcctttagcagctcatcccgatgtagacaagattgcctttactggaagctctgcaactgggagcaaaattatgacagctgcagctcagctgatcaagcctgtttcactagagcttggtgggaaaagcccaatcattgtttttgaggatgttgaccttgacaaggctgctgaatggaccatatttggttgcttctggacaaatggtcagatatgcagtgcaacttcccgccttattgtacatgaaagtatagcaacagaatttttgaataggattgtgaaatgggtcaaaaacatcaaaatttctgatcccttggaagaaggttgcagactaggccctattgttagtgaaggacagtatgaaaagatattgaagtttatctcaaatgctaagagtgagggtgcaaccattttgactggtgggtctcgcccagagcatctaaagaagggattctttgttgaaccaactgtcataactgatgtaactacctccatgcaaatttggagagaagaagtatttggaccagttctctgtgtaaaaacatttagcactgaggaagaagctattgatctagcaaatgacactgtatatggcttgggttctgctgtaatatcaaatgatctagaaagatgtgagcgcattactaaggcttttaaggctggaattgtgtggattaattgctctcaaccatgcttcactcaagccccatggggaggcattaaacgcagtggttttggtcgtgaattaggagaatggggacttgataattacttgagtgtgaagcaagtgacccaatatatctctgatgaaccgtggggctggtaccagtctccttcaaggctgtga

SEQ ID NO: 38168 - protein, 503 aa, Glycine max
MSIPIPHRQLFIDGDWKVPVLKNRIPIINPSTQHIIGDIPAATKEDVDLAVAAAKAALSRNKGADWASASGSVRARYLRAIAAKITEKKPELAKLEAIDCGKPLDEAAWDIDDVAGCFEFYADLAEKLDAQQKAHVSLPMDTFKSYVLKEPIGVVALITPWNYPLLMATWKVAPALAAGCAAILKPSELASVTCLELAEICKEVGLPPGVLNILTGLGPEAGAPLAAHPDVDKIAFTGSSATGSKIMTAAAQLIKPVSLELGGKSPIIVFEDVDLDKAAEWTIFGCFWTNGQICSATSRLIVHESIATEFLNRIVKWVKNIKISDPLEEGCRLGPIVSEGQYEKILKFISNAKSEGATILTGGSRPEHLKKGFFVEPTVITDVTTSMQIWREEVFGPVLCVKTFSTEEEAIDLANDTVYGLGSAVISNDLERCERITKAFKAGIVWINCSQPCFTQAPWGGIKRSGFGRELGEWGLDNYLSVKQVTQYISDEPWGWYQSPSRL

SEQ ID NO: 38169 - DNA, 1518 bp, Glycine max
  CDS (1)..(1518)
atgagttccctctctaataactctagtagtagccacggcaattccttcctccagatgccccccatcaagtttaccaagctcttcatcaatggagatttcgttgattccttatctggaaggacatttgagactatagaccccagaacagaagaggtaattgcaagagttagtgagggagataaagaagatattgatattgctgttaaagcagcacgtcaggcatttgactcaggtccatggcctcgcttgcccgcctctgaaagggcaaaaattatgatgaaatgggcagacctaattgatgaaaacatagaagaactagcagcattagataccgttgatgctggcaagctgaactatattaataaggttgtggaaattccttcagctacaaatgcgttacgatactatgcaggtgcggctgataaaattcatggtgaagtattaaaaatgaatggggattttcatgcatatacacttttggaaccaattggtgttgtgggacacataattccatggaatgcccccagcctctcattcatcatcaaggttagcccttccttagctgcaggctgtactatggtcctcaaacctgctgaacaaacacccctctctgcgtggtgttatgctcatataactaaggtggctggaatcccagatggtgtgcttaatatagtacctggatttggcccaactgctggcgcagcaataagctcacacatggacatagatgcggtcagttttactggttcaattgaagtagggcgtgaagtgatgcaggctgcagctaggagcaatttaaaaccagtttcacttgaattaggaggcaagtctcctctcattattttcaatgacgcggatatagacaaagctgcccagcttgctctctttggcatcatgtctaacaagggagaaatttgtgtggcaagttctcgggtgtttgtccaggaagagatctatgatgaatttgagaagaagttggtggagaaggcaaaatcttgggtcgttggggatccttttgatcccaaatccctgcaagggcctcaggctgacaggaaccaattggagaaaatactctcctatattgaacacggaaagagagaaggagctacccttttgaccggaggtaatacagtgggcaacaaaggttactacatagaacctacaattttctgtaatgtaaaggaggacatgcttatagcacgagatgaaatatttggccctgtactagcgctgatgaaatttaagaccatggaggaagcaattaaaagtgctaacaacaccaagtatggcctagcagcaggaattgtgaccaagaatttggatactgcaaacactatgtcaaggtccattcgtgcaggcattgtttggatcaactgctatttaaccgtagggagtgacgttccttttggagggtataagatgagtggatttggaagagatttgggattgcaggcccttcataagtacttacaagttaaatctgttgtaacacctattcacaattctccttggctttga

SEQ ID NO: 38170 - protein, 505 aa, Glycine max
MSSLSNNSSSSHGNSFLQMPPIKFTKLFINGDFVDSLSGRTFETIDPRTEEVIARVSEGDKEDIDIAVKAARQAFDSGPWPRLPASERAKIMMKWADLIDENIEELAALDTVDAGKLNYINKVVEIPSATNALRYYAGAADKIHGEVLKMNGDFHAYTLLEPIGVVGHIIPWNAPSLSFIIKVSPSLAAGCTMVLKPAEQTPLSAWCYAHITKVAGIPDGVLNIVPGFGPTAGAAISSHMDIDAVSFTGSIEVGREVMQAAARSNLKPVSLELGGKSPLIIFNDADIDKAAQLALFGIMSNKGEICVASSRVFVQEEIYDEFEKKLVEKAKSWVVGDPFDPKSLQGPQADRNQLEKILSYIEHGKREGATLLTGGNTVGNKGYYIEPTIFCNVKEDMLIARDEIFGPVLALMKFKTMEEAIKSANNTKYGLAAGIVTKNLDTANTMSRSIRAGIVWINCYLTVGSDVPFGGYKMSGFGRDLGLQALHKYLQVKSVVTPIHNSPWL

SEQ ID NO: 38171 - DNA, 1611 bp, Glycine max
  CDS (1)..(1611)
atggcttcttcactcagaatttcaagactcatctctcgctccttttcttctacctccttcttttcacgaggtgggaatggtttccttggttcaagacactgcaaatacagcacttcttctgccattgaagaagaacccgttaaaccatcagtgcaagtagaacacacccaactcttaattgatggaaaatttgtagatgctgcttctggtaaaacttttccaactttagatcctaggacaggtgaagtaattgctcatgttgctgagggtcactctgaggatgttgatcgagcagttgcagctgcacgaaaagcatttgatcatggaccatggcctaagatgacggcttatgaacggcaaaggatcttgttgcgcgcggccgatctgatcgagaagcataatgatgagcttgcagcacttgagacttgggataatggaaagccttatgaacaagctgctaagattgaagttccaatgcttgttcgcctgattcgatactatgctggttgggcagataagattcatggtctaacagttccagctgatggaccttatcatgtgcaaacattgcacgaaccgattgatgttgccggtcagatcattccatggaacttccctcttctcatgtttgcctggaaggttggaccggcattggcctgtggcaacaccattgttctcaaaacagctgagcagacaccattatctgctttatatgcagcaaaactatttcatgaggctggacttcctgctggtgttttgaatgtagtttccggctttggtccaactgctggtgctgctcttgctagtcacatggaggttgataagcttgcttttaccggttccactgatactgggaaagttgtccttgaactggcggctaaaagcaatcttaagcctgttactttggagcttggtgggaaatctccctttatagtgtgtgaagacgctgatgtagatcaggctgttgagctcgcacacttcgccttattctttaatcacggacaatgttgctgtgctgggtctcgaacatttgtacatgaaaatgtatacgaggagtttgttcagaaagcaaaggctcgtgctttgagacgtgttgttggtgatccattcaaggggggaatagagcaaggtcctcagattgattcagaccaatttgagaaaatactgaggtacatcagatccggtgttgaaagcggggcaacccttgaaacaggaggagacaagcttggcaacaagggcttctacattcaacctacagtcttctcaaatgttaaggatggcatgctgattgcaaaggatgagatctttggtccagtccaatccatattaaaattcaaggaccttggtgaggtagttcaaagagcgaacaacacacgttacgggcttgcggcaggagtgttcacaaagaacatggacactgcaaacactttgacgcgggcactgagagttggaacagtttggataaactgctttgacacatttgatgctgcaattccctttggagggtacaaaatgagtggtcaaggcagagaaaaaggagagtatagtctcaaaaactacttgcaagtgaaggctgtcgttaatcccttgaagaacccagcatggctttga

SEQ ID NO: 38172 - protein, 536 aa, Glycine max
MASSLRISRLISRSFSSTSFFSRGGNGFLGSRHCKYSTSSAIEEEPVKPSVQVEHTQLLIDGKFVDAASGKTFPTLDPRTGEVIAHVAEGHSEDVDRAVAAARKAFDHGPWPKMTAYERQRILLRAADLIEKHNDELAALETWDNGKPYEQAAKIEVPMLVRLIRYYAGWADKIHGLTVPADGPYHVQTLHEPIDVAGQIIPWNFPLLMFAWKVGPALACGNTIVLKTAEQTPLSALYAAKLFHEAGLPAGVLNVVSGFGPTAGAALASHMEVDKLAFTGSTDTGKVVLELAAKSNLKPVTLELGGKSPFIVCEDADVDQAVELAHFALFFNHGQCCCAGSRTFVHENVYEEFVQKAKARALRRVVGDPFKGGIEQGPQIDSDQFEKILRYIRSGVESGATLETGGDKLGNKGFYIQPTVFSNVKDGMLIAKDEIFGPVQSILKFKDLGEVVQRANNTRYGLAAGVFTKNMDTANTLTRALRVGTVWINCFDTFDAAIPFGGYKMSGQGREKGEYSLKNYLQVKAVVNPLKNPAWL

SEQ ID NO: 38173 - DNA, 1506 bp, Glycine max
  CDS (1)..(1506)
atgactagccttactaatggcgatgctggctccctcaacaaggtccccacgatcaagttcaccaagctcttcattaatggagacttcgttgactctctgtcaggaaagacatttgagacaatagatccaagaacaggagatgttatagcgaggataagcgagggagataaagaagacattgacattgctgttaaagcagcacgtcatgcatttgacaacggtccatggcctcgccttcccggctctgagagagcaagaatattgctgaaatgggcagaaataattgaggaaaacgcagaagaacttgcagcactagatgcgattgatgcggggaagttgtaccatatgtgtaggaatgtggaagttccagcagcggcaaacactcttcgttactatgctggtgcagccgataagattcatggagaggtgttgaaaatgtcccgagagttccatgcctatacattacttgaaccacttggtgttgtgggacacattactccctggaatttccccaataccatgttctacatcaaagtcgctccttctttagctgctggctgcaccatggtcctcaagcccgctgagcaaacacccctctctgctttgttttctgctcatcttgctaaattggctggaatcccagatggagtgatcaatgtagtgcctggatttggcccaactgctggtgctgcattaagctcacacatggatgttgataaggtcagctttaccggttcaacacaaacaggccgtgtgataatgcaggctgcagcaaagagtaacttgaaacaagtttcacttgaattaggaggcaagtcacccctcataatttttgatgatgcagatatagacaaagctactgagctagctctactaggcatcctatataacaagggagaagtttgtgttgcaagttcccgtgtgcttgttcaagaagggatctatgatgaatttgagaaaaaactggtggagaaggcaaaagcttgggtcgttggggatccctttgatcctaaagttcaacaaggccctcaggttgacaaggaacaatttgaaaaggtcctttcatatattgagcatggaaagaaagaaggagctacccttttgactgggggtaaaacagtgggaaacaagggctactttattgagccaacaattttctccaatataagggaggatatgcttatagcacaggatgaaatatttggcccagtaatggcactgaagaagtttaagaccattgaggaagcaattaagagtgctaacaataccaagtatggcctagcagcaggcatagtgaccaagaatttggatacggcaaacacagtgtcaaggtccattcgtgcaggcactatttggatcaactgctattttgcctttggcgatgatgttccctttggagggtataagatgagtggatttggaaaagatcatggattggaagcccttcacaagtacctacaagttaaatctgttgttactcccctttacaattcaccctggctttga

SEQ ID NO: 38174 - protein, 501 aa, Glycine max
MTSLTNGDAGSLNKVPTIKFTKLFINGDFVDSLSGKTFETIDPRTGDVIARISEGDKEDIDIAVKAARHAFDNGPWPRLPGSERARILLKWAEIIEENAEELAALDAIDAGKLYHMCRNVEVPAAANTLRYYAGAADKIHGEVLKMSREFHAYTLLEPLGVVGHITPWNFPNTMFYIKVAPSLAAGCTMVLKPAEQTPLSALFSAHLAKLAGIPDGVINVVPGFGPTAGAALSSHMDVDKVSFTGSTQTGRVIMQAAAKSNLKQVSLELGGKSPLIIFDDADIDKATELALLGILYNKGEVCVASSRVLVQEGIYDEFEKKLVEKAKAWVVGDPFDPKVQQGPQVDKEQFEKVLSYIEHGKKEGATLLTGGKTVGNKGYFIEPTIFSNIREDMLIAQDEIFGPVMALKKFKTIEEAIKSANNTKYGLAAGIVTKNLDTANTVSRSIRAGTIWINCYFAFGDDVPFGGYKMSGFGKDHGLEALHKYLQVKSVVTPLYNSPWL

SEQ ID NO: 38175 - DNA, 1614 bp, Glycine max
  CDS (1)..(1614)
atggcagcattgaacctttgccgcatggcacttcgatcctcgaagcttctctctcgcccttatcatcgtctttctgttcagttgcagatgcagatgcagccctcttctcctccactcactcgaaagatgagcatggatgcacagagtgttgcttctcagcttaatagttctggattgttgaggactcagggccttattggagggaaatggagtgatgcttatgatggcaaaaccataaaggtttataatccagcaactggtgaatctattgtagatgttgcatgcatgggtggaagagagacaaatgatgcaatttctgcagcctatgatgcatatggatcatggagcaaaaccactgccgctgaacgaagcaaatttctgaggaaatggtatgatttgctaatggtacataaagaagaacttgcacagcttataaccttggagcaggggaaacctcttaaagagtctgttggtgagataaactatggggctggctttattgagtttgcagctgaggaggcaaaacgtatatatggggatataattcctgcacctctatctgatcggcgattatttgttctaaagcagcctgtaggggttgtaggtgcaattacaccttggaactttccccttgctatgattactcgaaaggttggtccagcccttgcatgtggctgtacagtggtcataaagccctctgaacttacgcctctcaccgctttagctgcagcggaactctccattcaagctggaataccaccgggtgtcgtgaatgtggtaatgggaaatgctcctgatattggggacgctttacttgcaagtccacaggtaaggaagatcacattcacaggctcgacggctgttgggaagaaattgatggctggttcagctgaaacagttaaaaaagtatctcttgaactcggcggcaatgcaccttgcatagtttttgatgatgctgacctggatgttgcagtaaaaggaactcttgcagcaaagttccgtaacagtggacaaacatgtgtttgtgcaaatagaattattgtgcaagaaggtatatatgagaagtttgcaaatgctttacgtgatactgttcagaatatgaaagttggggatggtttcagtgaaggtgtggcacagggtcctctaatcaatgaagctgctgtcaaaaaggttgagtccttaattcatgatgctacatcaaagggggcaaaagtaattcttgggggtaaaagacatagccttggatttactttttatgaacccacggtcatcagtgatgtcaacagtgatatgcgcatatcaagagaggaagcatttggacctgttgcaccccttttgagattcaaaactgaagaggatgctatcagaattgctaacgacactaatgcaggtttgggttcatacatatttacaaacagtatccaacgatcatggcgtgttgctgaggctctagaatatggacttgtgggtgttaatgaaggagtaatttcaactgaggtggctccattcggtggttttaaacagtccggcctcggaagagaaggctccaaatatgggatggatgaatatttagagatcaagtatgtttgcttgggaaacatgcacaaagcttga

SEQ ID NO: 38176 - protein, 537 aa, Glycine max
MAALNLCRMALRSSKLLSRPYHRLSVQLQMQMQPSSPPLTRKMSMDAQSVASQLNSSGLLRTQGLIGGKWSDAYDGKTIKVYNPATGESIVDVACMGGRETNDAISAAYDAYGSWSKTTAAERSKFLRKWYDLLMVHKEELAQLITLEQGKPLKESVGEINYGAGFIEFAAEEAKRIYGDIIPAPLSDRRLFVLKQPVGVVGAITPWNFPLAMITRKVGPALACGCTVVIKPSELTPLTALAAAELSIQAGIPPGVVNVVMGNAPDIGDALLASPQVRKITFTGSTAVGKKLMAGSAETVKKVSLELGGNAPCIVFDDADLDVAVKGTLAAKFRNSGQTCVCANRIIVQEGIYEKFANALRDTVQNMKVGDGFSEGVAQGPLINEAAVKKVESLIHDATSKGAKVILGGKRHSLGFTFYEPTVISDVNSDMRISREEAFGPVAPLLRFKTEEDAIRIANDTNAGLGSYIFTNSIQRSWRVAEALEYGLVGVNEGVISTEVAPFGGFKQSGLGREGSKYGMDEYLEIKYVCLGNMHKA

SEQ ID NO: 38177 - DNA, 1611 bp, Glycine max
  CDS (1)..(1611)
atggcttcttcactcagaatttcaagactcatctctcgctccttttcttctacctccttcttttcacgaggtgggaatggtttccttggttcaagacactgcaaatacagcacttcttctgccattgaagaagaacccgttaaaccatcagtgcaagtagaacacacccaactcttaattgatggaaaatttgtagatgctgcttctggtaaaacttttccaactttagatcctaggacaggtgaagtaattgctcatgttgctgagggtcactctgaggatgttgatcgagcagttgcagctgcacgaaaagcatttgatcatggaccatggcctaagatgacggcttatgaacggcaaaggatcttgttgcgcgtggccgatctgctcgagaagcataatgatgagcttgcagcacttgagacttgggataatggaaagccttatgaacaagctgctaagattgaagttccaatgcttgttcgcctgattcgatactatgctggttgggcagataagattcatggtctaacagttccagctgatggaccttatcatgtgcaaacattgcacgaaccgattgatgttgccggtcagatcattccatggaacttccctcttctcatgtttgcctggaaggttggaccggcattggcctgtggcaacaccattgttctcaaaacagctgagcagacaccattatctgctttatatgcagcaaaactatttcatgaggctggacttcctgctggtgttttgaatgtagtttccggctttggtccaactgctggtgctgctcttgctagtcacatggaggttgataagcttgcttttaccggttccactgatactgggaaagttgtccttgaactggcggctaaaagcaatcttaagcctgttactttggagcttggtgggaaatctccctttatagtgtgtgaagacgctgatgtagatcaggctgttgagctcgcacactttgccttattctttaatcagggacaatgttgctgtgctgggtctcgaacatttgtacatgaaaatgtatacgaggagtttgttcagaaagcaaaggctcgtgctttgagacgtgttgttggtgatccattcaaggggggaatagagcaaggtcctcagattgattcagaccaatttgagaaaatactgaggtacatcagatccggtgttgaaagcggggcaacccttgaaacaggaggagacaagcttggcaacaagggcttctacattcaacctacagtcttctcaaatgttaaggatggcatgctgattgcaaaggatgagatctttggtccagtccaatccatattaaaattcaaggaccttggtgaggtagttcaaagagcgaacaacacacgttacgggcttgcggcaggagtgttcacaaagaacatggacactgcaaacactttgacgcgggcactgagagttggaacagtttggataaactgctttgacacatttgatgctgcaattccctttggagggtacaaaatgagtggtcaaggcagagaaaaaggagagtatagtctcaaaaactacttgcaagtgaaggctgtcgttaatcccttgaagaacccagcatggctttga

SEQ ID NO: 38178 - protein, 536 aa, Glycine max
MASSLRISRLISRSFSSTSFFSRGGNGFLGSRHCKYSTSSAIEEEPVKPSVQVEHTQLLIDGKFVDAASGKTFPTLDPRTGEVIAHVAEGHSEDVDRAVAAARKAFDHGPWPKMTAYERQRILLRVADLLEKHNDELAALETWDNGKPYEQAAKIEVPMLVRLIRYYAGWADKIHGLTVPADGPYHVQTLHEPIDVAGQIIPWNFPLLMFAWKVGPALACGNTIVLKTAEQTPLSALYAAKLFHEAGLPAGVLNVVSGFGPTAGAALASHMEVDKLAFTGSTDTGKVVLELAAKSNLKPVTLELGGKSPFIVCEDADVDQAVELAHFALFFNQGQCCCAGSRTFVHENVYEEFVQKAKARALRRVVGDPFKGGIEQGPQIDSDQFEKILRYIRSGVESGATLETGGDKLGNKGFYIQPTVFSNVKDGMLIAKDEIFGPVQSILKFKDLGEVVQRANNTRYGLAAGVFTKNMDTANTLTRALRVGTVWINCFDTFDAAIPFGGYKMSGQGREKGEYSLKNYLQVKAVVNPLKNPAWL

SEQ ID NO: 38179 - DNA, 1512 bp, Hordeum vulgare
  CDS (1)..(1512)
atggtcgcgccggccaagatcccgcagcggcagctcttcatcgacggcgagtggcgcgcgcccgcgctcggccgccgcctccccgtcatcaacccgaccaccgaggtctccatcggcgagatcccggcgggcacctcggaggacgtggacgccgcggtggcggccgcgcgggccgccctcaagaggaaccgcggccgcgactggtcccgcgcccccggcgccgtccgggccaagtacctccgcgcaatcgccgccaagatgattgagcggaaatctgatctggctaggctagaggcacttgattgcgggaagcctcttgatgaagcggcatgggacatggacgatgttgccggctgctttgagttcttcgcaggtcatgctgaagccttggacaaaaggcaaaatgctgcagttgctctcccggagaattttaaatgccatcttaagaaggaacctattggtgtagttgctctaatcacaccatggaactatcctctcctgatggctgtatggaaggtagcccctgctctggcagctggttgtacagctgtactgaaaccatctgaattagcttccgtgacttgcttagagcttggtgatgtgtgtaaagaggtcggtcttccatcaggtgtcttaaacattgtgactggactaggtaatgaagctggtgctcctttgtcatcacaccctgacgtcgacaaggttgcatttaccgggagctatgcaaccggtcaaaagattatggttgctgcagctcctacagtcaagcctgttacattggagcttggtggcaaaagtcctattgtagtatttgatgatgtcgacattgacaaagctgttgagtggactctatttgggtgcttttggaccaatggtcagatttgtagtgcgacatctcgtcttcttatccataaaaatatcgctaaagaattcgttgacaggatggttgcatggtccaaaaatatcaaggtgtcagacccgctcgaggagggttgcaggcttgggccagttgttagtgaaggacagtatgagaagatcaagaagttcgtagcgaatgctaaaactgaaggtgcgaccattctcactgggggtgtcaggcccaagcatctggagaaaggtttcttcattgaacccacaatcatcactgacatcaacacatcaatggagatttggagggaggaagtctttggtccagtcctgtgtgtgaaggaattttctaccgaagaggaagccatcgaactggccaacgatactcattatggtctggctggtgccgtgatttccggtgaccgtgagcgatgccagagattggctgaggagatcgaggcgggatgcatctgggtgaactgctcgcagccttgcttctgccaagctccgtggggtgggaacaagcgcagcggctttgggcgagagctcggagaagggggcattgataactacctgagcatcaagcaggtgacggagtacacatctgatgcgccgtggggatggtacaaggctccggctaactaa

SEQ ID NO: 38180 - protein, 503 aa, Hordeum vulgare
MVAPAKIPQRQLFIDGEWRAPALGRRLPVINPTTEVSIGEIPAGTSEDVDAAVAAARAALKRNRGRDWSRAPGAVRAKYLRAIAAKMIERKSDLARLEALDCGKPLDEAAWDMDDVAGCFEFFAGHAEALDKRQNAAVALPENFKCHLKKEPIGVVALITPWNYPLLMAVWKVAPALAAGCTAVLKPSELASVTCLELGDVCKEVGLPSGVLNIVTGLGNEAGAPLSSHPDVDKVAFTGSYATGQKIMVAAAPTVKPVTLELGGKSPIVVFDDVDIDKAVEWTLFGCFWTNGQICSATSRLLIHKNIAKEFVDRMVAWSKNIKVSDPLEEGCRLGPVVSEGQYEKIKKFVANAKTEGATILTGGVRPKHLEKGFFIEPTIITDINTSMEIWREEVFGPVLCVKEFSTEEEAIELANDTHYGLAGAVISGDRERCQRLAEEIEAGCIWVNCSQPCFCQAPWGGNKRSGFGRELGEGGIDNYLSIKQVTEYTSDAPWGWYKAPAN

SEQ ID NO: 38181 - DNA, 1581 bp, Hordeum vulgare
  CDS (1)..(1581)
atggcgatggcgatgcgacgcgcggcggcgctcggcgcccgccacatcctagccgcctccggctccgcctcctcccgcgtcgccagccgccgccacatgggcagcgtggacgcgggcgcggcgatggagaagatccgggcggcggggctgctcaggacgcgcggcctcatcggcggcaagtgggtcgacgcctacgacgggaagaccatcgaggtgcaaaatccagcaactggcgaggtccttgcaaatgtagcctgcatgggcaacagagaaacagctgatgcaatagcttctgctcacactacattttatacttggagcaaactcactgcaagtgaaaggagcaaggcactaagaaaatggcatgacctacttatgtcacacaaggaagaacttgcgcttcttatgacactggaacaggggaagcctatgaaagaagcccttggggaggtgaactatggtgcaagtttcatagaattttttgctgaggaagcaaagcgtgtgtatggtgatattattcccccaactctagctgatcgcagactattggttctgaagcagcctattggggtagttggagctattacaccatggaattttcctttagcaatgataaccagaaaggttggaccagcattggcttgtggatgcacagttgttgtcaagccatcagagttcacacctctgacagcattagctgcagcagaccttgctcttcaagctggaataccagctggtgtactaaatgttgtgatgggtaatgctcctgagataggtgatgaactaatgcagagcacacaggtcagaaagattacgttcacgggttcaacagctgttggcaaaaaactgatggctggatcagcaaacaccgtgaaaaaggtttctttggagcttggtgggaatgcaccttgcattgttttcgatgatgcagatattgatgttgccgttaaaggcagtcttgctgccaagtttcggaacagtggacagacatgtgtatgtgcaaacaggatattggtgcaagaaggtatctacgaaaaattcgcaagtgcatttgtcaaggctgttcagagcttgcaagtcggtaatgggctagaagagagtacatcacagggtcctctaatcaatgaagctgccgttcaaaaggtagagaagtttgtaggtgatgctacttcaaagggagccaacgtcatgctcggtggtaaaagacacagcctcgggatgaccttttatgagccaactgtggtagggaacgtaagcaatgatatgcttcttttcagggaagaagtttttggtccagttgcaccacttataccattcaaaactgaggaggaagcaatccatctagcaaacgacaccaatgcaggcttagctgcatacatgtttacaaagagcatagcccggtcatggcgtgtttccgaagctcttgagtacgggcttgtcggtgtgaatgagggattgatttccacagaggtggcgccattcggtggggttaagcagtctggccttgggcgggaaggatcaaaatatggcatggatgacttcctggagattaagtatgtatgcatgggcaacctgggttga

SEQ ID NO: 38182 - protein, 526 aa, Hordeum vulgare
MAMAMRRAAALGARHILAASGSASSRVASRRHMGSVDAGAAMEKIRAAGLLRTRGLIGGKWVDAYDGKTIEVQNPATGEVLANVACMGNRETADAIASAHTTFYTWSKLTASERSKALRKWHDLLMSHKEELALLMTLEQGKPMKEALGEVNYGASFIEFFAEEAKRVYGDIIPPTLADRRLLVLKQPIGVVGAITPWNFPLAMITRKVGPALACGCTVVVKPSEFTPLTALAAADLALQAGIPAGVLNVVMGNAPEIGDELMQSTQVRKITFTGSTAVGKKLMAGSANTVKKVSLELGGNAPCIVFDDADIDVAVKGSLAAKFRNSGQTCVCANRILVQEGIYEKFASAFVKAVQSLQVGNGLEESTSQGPLINEAAVQKVEKFVGDATSKGANVMLGGKRHSLGMTFYEPTVVGNVSNDMLLFREEVFGPVAPLIPFKTEEEAIHLANDTNAGLAAYMFTKSIARSWRVSEALEYGLVGVNEGLISTEVAPFGGVKQSGLGREGSKYGMDDFLEIKYVCMGNLG

SEQ ID NO: 38183 - DNA, 1491 bp, Hordeum vulgare
  CDS (1)..(1491)
atggcggggacgggggtgttcgcggacgtgctggacggggaggtctacaagtactacgccgacggggagtggcgcgcgtccgcctccggcaagacagtcgccatcgtcaaccccaccacccgccagacgcagtacagggtgcaagcatgtacacaggaggaggtgaacaaggtgatggacgccgccaaggtggcgcagaaggcgtgggcgcggactcctctgtggaagcgcgcggaactcctccacaaggcggcggccatcctcaaggagcacaagaccccgatcgccgagtgcctggtcaaggagattgccaagccggccaaggatgccgtttctgaggtggtgcggtctggcgatttggtgtcgtacacagccgaggagggcgtccggatactaggggagggcaagctgctggtatctgatagcttccccggtaatgagcgcaacaagtactgtttgagctccaaggtaccccttggagtagttttggcaatcccaccatttaactatcctgtcaacctggcggtttctaagattggcccagcgctaattgctggaaattctcttgtgctcaagcctccaactcagggcgcggtggcagccctccatatggtacactgctttcacctggccggtttcccaaagggcctgattagttgtgttactgggaagggttctgaaataggtgattttcttacaatgcatcccggagtcaactgcataagtttcacgggaggcgataccggtatagccatttcgaagaaggccgggatggtcccgcttcagatggaactcggaggaaaagatgcctgcattgtgctagaggatgcggacctcgatctagtcgcagcaaacatagtaaaaggaggcttctcatacagtggccagaggtgcactgcagtcaaagtggttctgatcatggaagtcgtggctgacgccgtcgtggagaaggtcaatgccaaactggcaaagctgaaagttggcccaccagaggatgactgtgatatcaccccagttgtaacagaatcctcggcaaatttcattgaaggcttggtaatggatgccaaggagaaaggggcaactttttgccaagagtacaggagagaaggcaacctcatctggccattgctattggatcatgtccggcctgacatgaggattgcttgggaggagccttttggccctgttttgccagtgatcaggatcaactctgttgaggaaggcatccaccattgcaacgccagcaactttggactccagggatgtgtgttcactagagacatcaacaaggcaatcatgatcagtgatgcaatggagactggaacggtgcagatcaactctgccccggctcgaggaccggaccatttccccttccagggtctcaaggacagtggaataggatcccaggggataaccaacagcataaacatgatgaccaaggtgaagagcactgtcataaacctgccatctccatcctacaccatgggctga

SEQ ID NO: 38184 - protein, 496 aa, Hordeum vulgare
MAGTGVFADVLDGEVYKYYADGEWRASASGKTVAIVNPTTRQTQYRVQACTQEEVNKVMDAAKVAQKAWARTPLWKRAELLHKAAAILKEHKTPIAECLVKEIAKPAKDAVSEVVRSGDLVSYTAEEGVRILGEGKLLVSDSFPGNERNKYCLSSKVPLGVVLAIPPFNYPVNLAVSKIGPALIAGNSLVLKPPTQGAVAALHMVHCFHLAGFPKGLISCVTGKGSEIGDFLTMHPGVNCISFTGGDTGIAISKKAGMVPLQMELGGKDACIVLEDADLDLVAANIVKGGFSYSGQRCTAVKVVLIMEVVADAVVEKVNAKLAKLKVGPPEDDCDITPVVTESSANFIEGLVMDAKEKGATFCQEYRREGNLIWPLLLDHVRPDMRIAWEEPFGPVLPVIRINSVEEGIHHCNASNFGLQGCVFTRDINKAIMISDAMETGTVQINSAPARGPDHFPFQGLKDSGIGSQGITNSINMMTKVKSTVINLPSPSYTMG

SEQ ID NO: 38185 - DNA, 1584 bp, Zea mays
  CDS (1)..(1584)
atggcgatggcgatgatggctatgcgacgcgcggtggcgctcggcgctcgccacatccccgccgccgcagcctcttcgttccgagtcgtctccctccgccacatgagcgcggacgcgggcgccgcgatggagaagatccgcgccgccgggctgctcaggacgcaggggcttatcgctgggcagtgggtggacgcctacgacggaaagaccattgaggtgcaaaatccagcaactggtgaggtcctggcaaacgtgtcctgtatgggcagcagagaaacatctgatgctattgcttctgctcacagtacattctattcttggagtaaattcactgcaagtgagaggagcaaggcactaagaaaatggtacgatctaattatttcacacaaggaagagcttgcacttctcatgacactggagcaggggaaacctatgaaagaagcccttggtgaggtcaattatggtgcaagtttcatagaatattttgcagaggaagcaaagcgtatatatggtgacatcattcccccaactttatctgatcgcagattgttggttttgaagcagcctgttggggtagttggagctattacaccatggaattttccattagcaatgataacccggaaggttggaccagctttggcctgtggctgtactgttgttgtcaagccatcggagttcacacctctgacagcattagctgcagcagatcttgctcttcaagcgggaataccagcgggtgcattgaatgttgtgatgggtaatgctgctgagataggtgatgcgttgctgcagagtacacaggtcagaaagattacattcactggatcaacagctgttggcaaaaaactgatggctggatctgcaaatactgtgaaaaaggtctccttggaacttggtgggaatgcaccttgcattgttttcgatgatgcggacattgatgttgctgttaaaggcagtcttgctgccaagttccgtaacagtggacagacatgtgtttgtgcaaacaggatattggtgcaagaaggtatctacgaaaagtttgcaaaagcattcatccaggctgttcagagtttgaaggtcggtaacggtctagaagagagtacatctcagggtcctctgattaacgaagctgctgttcaaaaggtggagaagttcataaatgacgcaacttcaaagggagcaaatgtcatgctaggtggtaaaagacacagcctgggaatgtcattttatgagccaactgtagtagggaatgtcagcaatgatatgcttcttttcagagaagaagtttttggtccagttgcaccccttataccgttcaaaactgaggaagaagcagtccatatggccaacgatacaaacgcaggcttagctgcatacatttttaccaagagcatacctcgttcatggcgtgtatctgaatctcttgagtacggcttagttggggtaaacgaggggattatttcaacggaggtggcgccatttggcggagtaaagcagtctggtctagggagagaaggatcgaagtacggcattgacgagtacttggagctcaagtacatctgcatgggcaacttgggttga

SEQ ID NO: 38186 - protein, 527 aa, Zea mays
MAMAMMAMRRAVALGARHIPAAAASSFRVVSLRHMSADAGAAMEKIRAAGLLRTQGLIAGQWVDAYDGKTIEVQNPATGEVLANVSCMGSRETSDAIASAHSTFYSWSKFTASERSKALRKWYDLIISHKEELALLMTLEQGKPMKEALGEVNYGASFIEYFAEEAKRIYGDIIPPTLSDRRLLVLKQPVGVVGAITPWNFPLAMITRKVGPALACGCTVVVKPSEFTPLTALAAADLALQAGIPAGALNVVMGNAAEIGDALLQSTQVRKITFTGSTAVGKKLMAGSANTVKKVSLELGGNAPCIVFDDADIDVAVKGSLAAKFRNSGQTCVCANRILVQEGIYEKFAKAFIQAVQSLKVGNGLEESTSQGPLINEAAVQKVEKFINDATSKGANVMLGGKRHSLGMSFYEPTVVGNVSNDMLLFREEVFGPVAPLIPFKTEEEAVHMANDTNAGLAAYIFTKSIPRSWRVSESLEYGLVGVNEGIISTEVAPFGGVKQSGLGREGSKYGIDEYLELKYICMGNLG

SEQ ID NO: 38187 - DNA, 1569 bp, Triticum aestivum
  CDS (1)..(1569)
atgcgacgcgcggcggcgctcggcgcccgccacatcctggccgcctccgcctccgcctcctcccgcgtcgccagccgccgccacatgggcagcgtggacgcgggcgcggcgatggagaagatccgggcggcggggctgctcaggacgcgcggcctcatcggcggcaaatgggtcgacgcctacgacgggaagaccatcgaggtgcaaaatccagcaactggcgaggtcctagcaaatgtagcctgcatgggcaacagagaaacagctgatgcaataacttctgctaacactacattttatacttggagcaaactcactgcaagtgaaaggagcaaggcactaagaaaatggcatgacctacttatgtcacacaaggaagaacttgcacttcttatgacactggaacaggggaagcctatgaaagaagcccttggggaggtgaactatggtgcaagtttcatagaattttttgctgaggaagcaaagcgtgtgtatggtgatattattcccccaactctagctgaccgcagactattggttctgaagcagcctattggcgtagttggagctattacaccatggaattttcctttagcaatgataaccagaaaggttggaccagcattggcttgtggatgcactgttgttgtcaagccatcagagttcacacctctgacagcattagctgcagcagaccttgctcttcaagctggaataccagctggtgcactaaatgttgtgatgggtaatgctcctgagataggtgatgaactaatgcagagcatgcaggtcagaaagattacgttcacgggttcaacagctgttggcaaaaaactgatggctggatcagcaaacactgtgaaaaaggtttctttggagctcggtgggaatgcgccttgcattgttttcgatgatgcagatattgatgttgccgttaaaggcagtcttgctgccaagtttcggaacagcggacagacgtgtgtatgtgcaaacaggatattggtgcaagaaggtatctacgaaaaattcgcaagtgcatttgtcaaggctgttcagagtttgcaagtcggtaatgggctagaagagagtacatcacagggtcctctaatcaatgaagctgctgttgaaaaggtagagaagtttgtaggtgatgctacttcaaagggagccaacatcatgctcggtggtaaaaggcacagccttgggatgagcttttatgagccaactgtggtagggaatgtaagcaatgatatgcttcttttcagggaagaagtttttggtccagttgcaccacttataccattcaaaactgaggaggaagcaatccatttagcaaacgacaccaatgcaggcttagccgcatacatgtttacaaagagcattgcgcggtcatggcgtgtttctgaagctcttgaatacgggcttgtcggtgtgaacgagggattgatttcaacagaggtagcgccattcggtggggttaagcagtctgggcttgggcgagaaggatcaaaatacggcatggacgactacctggagattaagtatgtatgcatgggcaacctgggttga

SEQ ID NO: 38188 - protein, 522 aa, Triticum aestivum
MRRAAALGARHILAASASASSRVASRRHMGSVDAGAAMEKIRAAGLLRTRGLIGGKWVDAYDGKTIEVQNPATGEVLANVACMGNRETADAITSANTTFYTWSKLTASERSKALRKWHDLLMSHKEELALLMTLEQGKPMKEALGEVNYGASFIEFFAEEAKRVYGDIIPPTLADRRLLVLKQPIGVVGAITPWNFPLAMITRKVGPALACGCTVVVKPSEFTPLTALAAADLALQAGIPAGALNVVMGNAPEIGDELMQSMQVRKITFTGSTAVGKKLMAGSANTVKKVSLELGGNAPCIVFDDADIDVAVKGSLAAKFRNSGQTCVCANRILVQEGIYEKFASAFVKAVQSLQVGNGLEESTSQGPLINEAAVEKVEKFVGDATSKGANIMLGGKRHSLGMSFYEPTVVGNVSNDMLLFREEVFGPVAPLIPFKTEEEAIHLANDTNAGLAAYMFTKSIARSWRVSEALEYGLVGVNEGLISTEVAPFGGVKQSGLGREGSKYGMDDYLEIKYVCMGNLG

SEQ ID NO: 38189 - DNA, 1491 bp, Triticum aestivum
  CDS (1)..(1491)
atggcggggacgggggtgttcgcggacgtgctggacggggaggtctacaagtactacgccgacggggagtggcgcgcgtccgcctccggcaagacggtcgccatcgtcaaccccaccacccgccagacgcagtacagggtgcaagcatgtacacaggaggaggtgaacaaggtgatggacgccgccaaggtggcgcagaaggcgtgggcgcggactccgctgtggaagcgcgcggagctcctccacaaggcggcggccatcctcaaggagcacaagaccccgatcgccgagtgtctggtcaaggagatcgccaagccggccaaggatgccgtttctgaggtggtgcgatccggcgatttggtgtcatacacggccgaggagggtgtccggatactgggggagggcaagctgctggtatccgatagcttccccggtaatgagcgcaacaagtactgtttgagctccaaggtacctcttggagtagttttggcaatcccaccatttaactatcctgtcaacctggcggtttctaagattggcccagcgctaattgctggcaattctcttgtgctcaagcctccgactcagggcgcggtggcagccctccatatggtacactgctttcacctggccggtttcccaaagggcctgataagctgtgttactgggaaaggttctgaaataggtgattttctcacaatgcaccctggagtcaactgcataagtttcacgggaggtgataccggcatagccatttcaaagaaggccgggatggtcccgcttcagatggagctaggaggaaaagatgcctgcattgtgctggaggatgcagacctcgatctagtcgcggcaaacatagtaaaaggaggcttctcatacagtggccagaggtgcactgcagtaaaagtggttctgatcatggaagcggttgccgacaccgtggtggagaaggtcaacgccaagctggcaaagctgaaagtgggcccaccagaggatgacagtgatatcaccccagttgtaacagaatcctcggcaaatttcattgaaggcttggtaatggatgccaaggagaaaggggcaaccttttgccaagagtacaggagagaaggcaaccttatctggccgttgctgctggatcatgtccggcctgacatgaggatcgcctgggaggagccttttggccctgtcttgcccgtgatcaggatcaactcggttgaggaaggcatccaccattgcaacgccagcaactttgggctccagggatgtgtgttcacaagagacatcaacaaggcaatcatgatcagtgatgcaatggagagtggaactgtgcagatcaactccgccccggctcgaggtccggaccatttccccttccagggcctgaaggacagtggaataggatcccaggggataacgaacagcataaacatgatgaccaaggtgaagagcactgtcataaacctcccatctccgtcctacaccatgggctga

SEQ ID NO: 38190 - protein, 496 aa, Triticum aestivum
MAGTGVFADVLDGEVYKYYADGEWRASASGKTVAIVNPTTRQTQYRVQACTQEEVNKVMDAAKVAQKAWARTPLWKRAELLHKAAAILKEHKTPIAECLVKEIAKPAKDAVSEVVRSGDLVSYTAEEGVRILGEGKLLVSDSFPGNERNKYCLSSKVPLGVVLAIPPFNYPVNLAVSKIGPALIAGNSLVLKPPTQGAVAALHMVHCFHLAGFPKGLISCVTGKGSEIGDFLTMHPGVNCISFTGGDTGIAISKKAGMVPLQMELGGKDACIVLEDADLDLVAANIVKGGFSYSGQRCTAVKVVLIMEAVADTVVEKVNAKLAKLKVGPPEDDSDITPVVTESSANFIEGLVMDAKEKGATFCQEYRREGNLIWPLLLDHVRPDMRIAWEEPFGPVLPVIRINSVEEGIHHCNASNFGLQGCVFTRDINKAIMISDAMESGTVQINSAPARGPDHFPFQGLKDSGIGSQGITNSINMMTKVKSTVINLPSPSYTMG

SEQ ID NO: 38191 - DNA, 1503 bp, Triticum aestivum
  CDS (1)..(1503)
atggcggcagcgaacggcgccaaggggttcgaggtgccggaactggacatcaagttcaccaagctcttcatcaatggccagttcgtcgacgcggcttccggcaagacgttcgagacacgggacccacgcaccggcgaggtgatcgccaggatcgccgagggagacaaggccgacatcgacctcgccgtgaaggccgcccgcgaggccttcgacaacggcccatggcccagaatgcccggctgtgcaagggcccggatcatgcacaagttcgcggacctggtggaccagcacgtcgaggagctggcggcgctggacacggtggacgccggcaagctattcatgatgggtaagatgatggacatccccggaggcgccaacctgctccgctactacgccggcgccgccgacaagatccacggcgagacgctcaagatggcgcgcccgctccacggctacacgctcaaggagcccgtcggcgtcgtgggccacatcgtgccctggaactaccccaccaccatgttcttcttcaaggtcagccccgcgctcgccgccggctgcaccatggtcgtcaagcccgccgagcagacgcccctctccgcgctcttctacgcccacctcgccaaggaggccggcatccccgacggcgttctcaacgtcgtgcccggatttggacccacggccggtgccgccatcgcctctcacatggacgtcgacaagatcagcttcacgggatccacggaggtcgggcggctggtcatgcaggctgcggccacgagcaacctaaagcccgtctcactggagctggggggcaagtcccccgtcatcgtgtttgacgacgccgacgttgacatggccgtcaacctcgttaacatggccacctacatgaacaagggcgagatctgcgtcgccggcacacgcatatacgtgcaggaagggatctacgacgcctttgtgaagaaatcggtcgagcttgccaagaaatcggtggtcggagatcctttcaacccaaacgtacatcaaggccctcaggttgacaaggatcaatacgaaaaggtgctcaagtacatcgacgtcggtaagagcgaaggcgccaccctcctcaccggagggaagccctgcagcgacaagggttactacatcgagcccaccatcttcaccgacgtcaccgatgacatgtcgattgcgcaagaggaaatcttcggcccagtcatggctctcatgaaattcaagacggtggacgaggtgattcagaaggccaacagcacccggtatggcctggccgccggcgtggtgaccaagaacatcgacaccatgaacaccgtgtcgcggtccgtcaggtccggggtcgtctgggttaactgctacttcgccttcgaccccgacgccccgttcggcggctgcaagatgagcggcttcggcaaggacatgggcacggatgccctcgaaaagtacctgcacaccaagactgtggtcactccgctctacaacacaccctggctgtga

SEQ ID NO: 38192 - protein, 500 aa, Triticum aestivum
MAAANGAKGFEVPELDIKFTKLFINGQFVDAASGKTFETRDPRTGEVIARIAEGDKADIDLAVKAAREAFDNGPWPRMPGCARARIMHKFADLVDQHVEELAALDTVDAGKLFMMGKMMDIPGGANLLRYYAGAADKIHGETLKMARPLHGYTLKEPVGVVGHIVPWNYPTTMFFFKVSPALAAGCTMVVKPAEQTPLSALFYAHLAKEAGIPDGVLNVVPGFGPTAGAAIASHMDVDKISFTGSTEVGRLVMQAAATSNLKPVSLELGGKSPVIVFDDADVDMAVNLVNMATYMNKGEICVAGTRIYVQEGIYDAFVKKSVELAKKSVVGDPFNPNVHQGPQVDKDQYEKVLKYIDVGKSEGATLLTGGKPCSDKGYYIEPTIFTDVTDDMSIAQEEIFGPVMALMKFKTVDEVIQKANSTRYGLAAGVVTKNIDTMNTVSRSVRSGVVWVNCYFAFDPDAPFGGCKMSGFGKDMGTDALEKYLHTKTVVTPLYNTPWL

SEQ ID NO: 38193 - DNA, 1518 bp, Zea mays
  CDS (1)..(1518)
atggcctcgcaagcgatggtaccgctgcggcagctctttgtcgacggcgagtggcgcccgcccgcgcagggccgccgcctccccgtcgtcaaccctaccactgaggctcacatcggcgagatcccggcgggcacggcggaggacgtggacgccgcggtggcggcggcgcgcgcggcgctcaagaggaaccgcggccgcgactgggcgcgcgccccgggggccgtccgggccaagtacctccgcgccatcgccgccaaggtaattgagaggaaacaagagctagctaagctagaggcacttgattgtgggaagccttatgatgaagcagcatgggacatggatgatgttgctgggtgctttgagtacttcgcagatcaggcagaagctttggacaaaagacaaaattccccagtttctcttccgatggaaacttttaaatgccatctccgaagagagcctattggggtagttgggctgataactccttggaactatcctctcctgatggctacatggaaggtagctcctgctctggctgctggttgtgcagctgtgctaaagccatctgaattggcttctgtgacttgcttagagcttgctgatatctgtaaagaagtcggtcttcctcccggtgtcttaaacattgtgacaggattaggtcctgatgctggtgctcctttgtcagcacacccagatgttgacaaggtcgcttttactgggagttttgaaactggtaagaagattatggcggctgcagctcctatggttaagcctgttacactggaacttggtggaaaaagtcctatagtagtatttgatgatgttgacattgacaaagctgttgagtggactctgtttgggtgcttttggaccaatggtcagatttgcagcgcaacatctcgtcttcttatccatacaaaaattgctaaaaaatttaatgagaggatggttgcatgggccaaaaatattaaggtttcggatccacttgaagagggttgcaggcttgggccagttgttagtgaaggacagtatgagaagattaaaaagttcatatcgaatgccaaaagccaaggtgctactattctgactggaggtgttagacctgcgcatcttgagaaggggttctttattgaaccaacaatcattactgatatcaccacatcaatggaaatctggagggaggaagtctttggtccagtcctgtgcgttaaagaatttagcactgaagatgaagccatcgaactggccaatgatacacagtatggtttagctggtgctgtaatttctggtgatcgggagcgctgccagagattatctgaggagattgacgctggaattatctgggtaaactgctcacagccctgcttctgccaagctccctggggcggtaacaagcgtagtggatttggacgtgagcttggagaagggggcattgataactacctgagcgtcaagcaagtcacggagtacatctctgatgagccgtggggatggtaccaatccccctccaagctgtaa

SEQ ID NO: 38194 - protein, 505 aa, Zea mays
MASQAMVPLRQLFVDGEWRPPAQGRRLPVVNPTTEAHIGEIPAGTAEDVDAAVAAARAALKRNRGRDWARAPGAVRAKYLRAIAAKVIERKQELAKLEALDCGKPYDEAAWDMDDVAGCFEYFADQAEALDKRQNSPVSLPMETFKCHLRREPIGVVGLITPWNYPLLMATWKVAPALAAGCAAVLKPSELASVTCLELADICKEVGLPPGVLNIVTGLGPDAGAPLSAHPDVDKVAFTGSFETGKKIMAAAAPMVKPVTLELGGKSPIVVFDDVDIDKAVEWTLFGCFWTNGQICSATSRLLIHTKIAKKFNERMVAWAKNIKVSDPLEEGCRLGPVVSEGQYEKIKKFISNAKSQGATILTGGVRPAHLEKGFFIEPTIITDITTSMEIWREEVFGPVLCVKEFSTEDEAIELANDTQYGLAGAVISGDRERCQRLSEEIDAGIIWVNCSQPCFCQAPWGGNKRSGFGRELGEGGIDNYLSVKQVTEYISDEPWGWYQSPSKL

SEQ ID NO: 38195 - DNA, 1782 bp, Zea mays
  CDS (1)..(1782)
atggccttctggtggccgctgctggtgctcgccgccgcatacgcgctctgtcgcctgctcctcttcctcatcccgcccaccgtcccatccatcgacgtcgacgcctccgacgtgttggccaaggaggacagcttcatctacataccgagacggggtaaatcaactcagactgacaaggtccaatgctatgaaccagcgaccatgaaatacttggggtacttcccagtggtgactcctgatgaggtcaaggaacatgttgcacaatccaggaaagctcaaaggatatgggcaaaaagcagcttcaagcaaaggcgccagtttcttcgaatcgttctcaagtatatacttgaacatcaggatctcatatgcgaggtatcatctcgggacactggaaagactatggttgatgcttcattaggagagataatgaccacctgtgagaagattacctggcttttggatgagggcgagaagtggctgaaacctgaatacagatctactgggagatcaatgctgcataagagagcaaaagttgagttttaccctcttggagtgattggtgcgattgtatcttggaattatcccttccataatgtttttaatccagtgctagcagcagtattctccggtaatgcagcagttataaaggtctcagaacatgcgacttggtcgggctgcttttattttcgtattatacaagcagctctttcagctgttggtgcacctgagaatctggtgcacataataactggttttgcggaaacaggccaagctcttgtatcatcagtagacaaaataatatttgtgggatcaccaggtgttggaaaaatgatcatgaaaagggcgtcggagactctaatacctgtaactctggagcttggtggcaaagattcatttattgtgtgtgaagatgtagatttacccagtgttgttcaagttgctactagagctgctctgcaatctagtgggcagaattgcgctggtgctgaaagattttatgttcacgatgacatctattctgcctttgtttcacagatagtgaagacagtcaaatctataagtgttggccccccattatcaggcagatatgacatgggtgcaatctgtatgattgagcactctgagaaacttcagaatcttgttaatgatgctctagacaaaggtgccgaaattgccgtcagggggagttttggcaatcttggtgaagatgcagttgatcaatttttcccaccaactgtcctggtgaatgttgatcacacaatgaaaattatgcaagaagagacatttggacctattataccaatcatgaaattcagttctgatgaagaggctatcaaacttgcaaacgactcaaaatatggtcttggctgtgctgttttttcgggcaaccagaagcgtgccatcagaatagcgtcccagttacactgtggggtagcagcaatcaatgattttgcttcaagttacatgtgccagtctttgccattcggtggtgttaaagacagcggattcgggagatttgctggcgtagaaggcttgcgagcttgctgccttgtgaagtctgttgtagaagatagattgtggccatatattagaacagtgatcccgaagcctatccagtatcccgtctcagagcatggatttgagttccagcagttgcttgtggagactctgtatggctatagcgtgtgggacaggttgcggtcccttgtgaatcttataaagatggttaccgagcagaattctgccccggcttcaaatgcgaccacgaagaaaaggcgatga

SEQ ID NO: 38196 - protein, 593 aa, Zea mays
MAFWWPLLVLAAAYALCRLLLFLIPPTVPSIDVDASDVLAKEDSFIYIPRRGKSTQTDKVQCYEPATMKYLGYFPVVTPDEVKEHVAQSRKAQRIWAKSSFKQRRQFLRIVLKYILEHQDLICEVSSRDTGKTMVDASLGEIMTTCEKITWLLDEGEKWLKPEYRSTGRSMLHKRAKVEFYPLGVIGAIVSWNYPFHNVFNPVLAAVFSGNAAVIKVSEHATWSGCFYFRIIQAALSAVGAPENLVHIITGFAETGQALVSSVDKIIFVGSPGVGKMIMKRASETLIPVTLELGGKDSFIVCEDVDLPSVVQVATRAALQSSGQNCAGAERFYVHDDIYSAFVSQIVKTVKSISVGPPLSGRYDMGAICMIEHSEKLQNLVNDALDKGAEIAVRGSFGNLGEDAVDQFFPPTVLVNVDHTMKIMQEETFGPIIPIMKFSSDEEAIKLANDSKYGLGCAVFSGNQKRAIRIASQLHCGVAAINDFASSYMCQSLPFGGVKDSGFGRFAGVEGLRACCLVKSVVEDRLWPYIRTVIPKPIQYPVSEHGFEFQQLLVETLYGYSVWDRLRSLVNLIKMVTEQNSAPASNATTKKRR

SEQ ID NO: 38197 - DNA, 1530 bp, Zea mays
  CDS (1)..(1530)
atgggggccttcgcgaaggaggagcaccagttcctagccgagctcggcctcgcgcagcgcaacccaggcgcgttcgcatgcggtgcgtggggcggctcaggtcccaccgtcacctccacgagcccgaccaacaatcaggtcatcgcagaggtcgtggaggcgtccgtgcacgactacgaggagggcatgcgcgcctgcttcgacgccgccaagacatggatggcgattcctgctccaaagcgaggagagatcgttaggcaaatcggtgatgcactgagagcaaagctccatcaccttggcaggcttgtgtcacttgagatggggaaaattcttcctgaagggatcggtgaggttcaggaaatcatcgacatgtgtgattatgctgtggggctaagtcgccaactaaatggatccattataccatctgaacgaccaaaccatatgatgatggaggtgtggaatccccttggagttgtgggtgttataacggcatttaatttcccttgtgctgtgcttggttggaatgcttgcattgctttggtctgtggaaattgtgtcgtctggaaaggtgctccaacaactccactgatcactattgcaatgacaaaaatagtggctagtgtattggagaagaacaacttgccaggcgcaatttttacatctttttgtgggggcactgaaattggtcaagcaattgcccttgacattaggatacctttggtttcattcactggaagtacaagggctggtctaatggttcagcaacaagttagtgcaagatttggtaaatgccttcttgaacttagcggaaacaatgccatcattgttatggatgatgcagatatccagctagctgtgcgatctgtcttgttcgctgctgttggtacagcaggacaacgctgcactacatgtcgtaggctgattcttcatgagaacatatatcaaaccttccttgatcagcttgttgaggtatacaaacaagtccgaattggggatccgttggagaaaggcaccttactgggaccactgcacactcctgcttcaaaagagaactttttgaaaggcattcagactatcaaatctcagggagggaaaatcctttttggaggatctgccattgaatcagaaggaaactttgtgcaaccaacaattgtggaaattacaccttctgcaccagttgtgaaagaagaactctttggtcctgtcctttatgttatgaaatttcagaccttgaaggaagcaattgaaatcaataactctgttcctcaaggattgagcagttctatatttacaaagaggccagatattatttttaagtggctcgggccccatggtagtgattgtggtatagtgaatgtgaacatacctactaatggtgctgaaattggtggagcatttggtggagaaaaagcaactggtggtggacgagaagcagggagtgattcctggaagcagtacatgaggagggcgacttgtacaatcaactatgggagcgagctacctctagcccagggaatcaattttggttaa

SEQ ID NO: 38198 - protein, 509 aa, Zea mays
MGAFAKEEHQFLAELGLAQRNPGAFACGAWGGSGPTVTSTSPTNNQVIAEVVEASVHDYEEGMRACFDAAKTWMAIPAPKRGEIVRQIGDALRAKLHHLGRLVSLEMGKILPEGIGEVQEIIDMCDYAVGLSRQLNGSIIPSERPNHMMMEVWNPLGVVGVITAFNFPCAVLGWNACIALVCGNCVVWKGAPTTPLITIAMTKIVASVLEKNNLPGAIFTSFCGGTEIGQAIALDIRIPLVSFTGSTRAGLMVQQQVSARFGKCLLELSGNNAIIVMDDADIQLAVRSVLFAAVGTAGQRCTTCRRLILHENIYQTFLDQLVEVYKQVRIGDPLEKGTLLGPLHTPASKENFLKGIQTIKSQGGKILFGGSAIESEGNFVQPTIVEITPSAPVVKEELFGPVLYVMKFQTLKEAIEINNSVPQGLSSSIFTKRPDIIFKWLGPHGSDCGIVNVNIPTNGAEIGGAFGGEKATGGGREAGSDSWKQYMRRATCTINYGSELPLAQGINFG

SEQ ID NO: 38199 - DNA, 1497 bp, Zea mays
  CDS (1)..(1497)
atggcgctggcggggacgggggtgttcgcggagatcctggacagcgaggtgtacaggtactacgccgacggggagtggcgcacctccgcctccggcaagtccgtcgccatcgtcaaccccaccacccgcaagacgcagtacagggtgcaagcatgcacgcaggaggaggtgaacaaggcgatggacgcggccaaggtcgcgcagaaggcatgggcccggacgccgctgtggaagcgtgcggacctcctccacaaggcggccgcgatcctgaaggagcacaaggcccccatcgccgagtgccttgtcaaggagatagccaagccggccaaggatgccgtttctgaggttgtccggtctggggatttggtgtcgtacacagctgaggagggtgtgcggatactcggggagggcaagctgcttgtttcggatagcttccctggtaatgaacgaaacaagtactgtctgagctccaagataccccttggagtagttttggcaatcccgccgttcaactatcctgtcaacttagcagtttctaagattggcccagcactaattgcaggcaatgctcttgtgctaaagcctccaactcagggcgctgtggctgcacttcatatggtacactgcttccacctggctggtttcccgaaaggtttgatcagttgtgtgactgggaagggttctgaaataggagattttcttacaatgcatcctggagtcaactgcataagttttactggtggcgatactggtatagccatttcaaagaaggctggaatggtccctcttcagatggagcttgggggaaaagatgcttgcattgtgctagaggatgcagatctggatttggtttccgcaaatatagtaaagggtggcttctcatacagtggccagaggtgcactgctgtcaaagtagtgctgatcatggaatcgattgctgatgctgtggtacagaaggttaatgccaagttggcgaaactgaaagttggcccacctgaggacgactctgatatcaccccggttgtaacagaatcctcagccaacttcatcgagggtctggtgatggatgcaaaggagaaaggagcaactttctgccaggagtacaggagagaaggcaaccttatctggccgttgctgctggatcatgtccgccctgacatgaggatcgcatgggaggagccttttgggcctgtcttgcctgtgattaggattaactcagttgaggaaggcatccaccattgcaatgccagtaatttcggcctacagggatgcatttttacaagagacatcaacaaggcaatcctgatcagtgatgcaatggagactggaactgtgcagatcaactctgcaccggctcgtgggcctgatcatttccccttccagggactgaaagacagtggcattgggtcccaggggataacaaacagcattaacatgatgaccaaggtgaagagcactgtcataaacctgccgtcaccatcctacaccatgggctga

SEQ ID NO: 38200 - protein, 498 aa, Zea mays
MALAGTGVFAEILDSEVYRYYADGEWRTSASGKSVAIVNPTTRKTQYRVQACTQEEVNKAMDAAKVAQKAWARTPLWKRADLLHKAAAILKEHKAPIAECLVKEIAKPAKDAVSEVVRSGDLVSYTAEEGVRILGEGKLLVSDSFPGNERNKYCLSSKIPLGVVLAIPPFNYPVNLAVSKIGPALIAGNALVLKPPTQGAVAALHMVHCFHLAGFPKGLISCVTGKGSEIGDFLTMHPGVNCISFTGGDTGIAISKKAGMVPLQMELGGKDACIVLEDADLDLVSANIVKGGFSYSGQRCTAVKVVLIMESIADAVVQKVNAKLAKLKVGPPEDDSDITPVVTESSANFIEGLVMDAKEKGATFCQEYRREGNLIWPLLLDHVRPDMRIAWEEPFGPVLPVIRINSVEEGIHHCNASNFGLQGCIFTRDINKAILISDAMETGTVQINSAPARGPDHFPFQGLKDSGIGSQGITNSINMMTKVKSTVINLPSPSYTMG

SEQ ID NO: 38201 - DNA, 1584 bp, Zea mays
  CDS (1)..(1584)
atggcgatggcgatgatggctatgcgacgcgcggtggcgctcggcgctcgccacatccccgccgccgcagcctcttcgttccgagtcgtctccctccgccacatgagcgcggacgcgggcgccgcgatggagaagatccgcgccgccgggctgctcaggacgcaggggcttatcgctgggcagtgggtggacgcctacgacggaaagaccattgaggtgcaaaatccagcaactggtgaggtcctggcaaacgtgtcctgtatgggcagcagagaaacatctgaggctattgcttctgctcacagtacattctattcttggagtaaattcactgcaagtgagaggagcaaggcactaagaaaatggtacgatctaattatttcacacaaggaagagcttgcacttctcatgacactggagcaggggaaacctatgaaagaagcccttggtgaggtcaattatggtgcaagtttcatagaatattttgcagaggaagcaaagcgtatatatggtgacatcattcccccaactttatctgatcgcagattgttggttttgaagcagcctgttggggtagttggagctattacaccatggaattttccattagcaatgataacccggaaggttggaccagctttggcctgtggctgtactgttgttgtcaagccatcggagttcacacctctgacagcattagctgcagcagatcttgctcttcaagcgggaataccagcgggtgcattgaatgttgtgatgggtaatgctgctgagataggtgatgcgttgctgcagagtacacaggtcagaaagattacattcactggatcaacagctgttggcaaaaaactgatggctggatctgcaaatactgtgaaaaaggtctccttggaacttggtgggaatgcaccttgcattgttttcgatgatgcggacattgatgttgctgttaaaggcagtcttgctgccaagttccgtaacagtggacagacatgtgtttgtgcaaacaggatattggtgcaagaaggtatctacgaaaagtttgcaaaagcattcatccaggctgttcagagtttgaaggtcggtaacggtctagaagagagtacatctcagggtcctctgattaacgaagctgctgttcaaaaggtggagaagttcataaatgacgcaacttcaaagggagcaaatgtcatgctaggtggtaaaagacacagcctgggaatgtcattttatgagccaactgtagtagggaatgtcagcaacgatatgcttcttttcagagaagaagtttttggtccagttgcaccccttataccgttcaaaactgaggaagaagcagtccatatggccaacgatacaaacacaggcttagctgcatacatttttaccaagagcatacctcgttcatggcgtgtatctgaatctcttgagtacggcttagttggggtaaacgaggggattatttcaacggaggtggcgccatttggcggagtaaagcagtctggtctagggagagaaggatcgaagtacggcattgacgagtacttggagctcaagtacatctgcatgggcaacttgggttga

SEQ ID NO: 38202 - protein, 527 aa, Zea mays
MAMAMMAMRRAVALGARHIPAAAASSFRVVSLRHMSADAGAAMEKIRAAGLLRTQGLIAGQWVDAYDGKTIEVQNPATGEVLANVSCMGSRETSEAIASAHSTFYSWSKFTASERSKALRKWYDLIISHKEELALLMTLEQGKPMKEALGEVNYGASFIEYFAEEAKRIYGDIIPPTLSDRRLLVLKQPVGVVGAITPWNFPLAMITRKVGPALACGCTVVVKPSEFTPLTALAAADLALQAGIPAGALNVVMGNAAEIGDALLQSTQVRKITFTGSTAVGKKLMAGSANTVKKVSLELGGNAPCIVFDDADIDVAVKGSLAAKFRNSGQTCVCANRILVQEGIYEKFAKAFIQAVQSLKVGNGLEESTSQGPLINEAAVQKVEKFINDATSKGANVMLGGKRHSLGMSFYEPTVVGNVSNDMLLFREEVFGPVAPLIPFKTEEEAVHMANDTNTGLAAYIFTKSIPRSWRVSESLEYGLVGVNEGIISTEVAPFGGVKQSGLGREGSKYGIDEYLELKYICMGNLG

SEQ ID NO: 38203 - DNA, 1650 bp, Zea mays
  CDS (1)..(1650)
atgagtcgcctcctctcgcggcagcaccttgccgccgtccgtcgatctgcaccctttgcgtgcgtgtccaggtggctgcacacgccgtcattcgcgacggtttctccgcaagaggtttcaggttccagcccagcggaagtgcagaattttgtgcagggcagctggacagcatctgctaactggaactggatagtcgatcccctgaacggtgataaattcatcaaagttgctgaggttcagggaacagaaataaagccattcgtggagagtttatctaaatgcccaaagcatggacttcacaacccacttaaagctccagagaggtacctcatgtatggagatatatctgcaaaagctgcgcatatgctgggccaacctgcagtcttagatttctttgctaaacttatccagagggtatctcccaagagctaccaacaagctcttgcagaagttcaagtttctcaaaagtttttggaaaacttttgtggagaccaggtacgctttctggcaaggtcatttgctgtaccaggtaaccatcttggacaaagaagtaatggctaccgttggccatatggcccagttgcaattatcacaccattcaattttccgttggagatccccttactacaattgatgggagcactatacatgggaaataaaccagtactcaaggttgacagcaaggttagcattgtgatggaacaaatgattaggttgcttcatgattgtggattgccagcagaggatatggatttcataaattctgatggtgccgtaatgaacaagcttctgttagaggctaatccgaaaatgacccttttcactgggagttcacgggtagcagagaaattggctgctgatttgaaaggccgagttaaattggaggatgctggttttgattggaaaattcttggtccagatgttcaagaggttgattatgttgcatgggtttgcgatcaggatgcttatgcttgtagcggtcagaaatgctctgctcagtctgttctattcatgcacaagaattggtcttctagtggtctgcttgagaaaatgaagaaactttctgaaagaaggaagcttgaagatttaacaattggtccagtccttacagttactacagaagccatgatagagcacatgaacaaccttctcaaaataagaggatcgaaggttctgtttggtggtgaaccgttagggaatcactcaattcccaaaatttatggtgccatgaagcctactgctgtatttgttcctctagaagaaattctaaaaagtgggaacttcgagcttgtgacaaaggagatatttggtccattccaggtagtcacagaatactctgaggatcagcttgagttggtcttagaagcctgcgaaaggatgaatgcgcatctgacagctgcagttgtctcaaacgacccgctattcctgcaggatgtacttgggagatccgttaacgggacaacctacgccggaattcgagcgaggaccacgggcgctccacagaaccactggtttggcccggccggtgatccgcgaggcgcagggatcgggactccggaagccatcaaacttgtctggtcctgccacagggaagtcatatatgacgtcgggcccgtgcccgagagctgggcgcttccttccgcgacctga

SEQ ID NO: 38204 - protein, 549 aa, Zea mays
MSRLLSRQHLAAVRRSAPFACVSRWLHTPSFATVSPQEVSGSSPAEVQNFVQGSWTASANWNWIVDPLNGDKFIKVAEVQGTEIKPFVESLSKCPKHGLHNPLKAPERYLMYGDISAKAAHMLGQPAVLDFFAKLIQRVSPKSYQQALAEVQVSQKFLENFCGDQVRFLARSFAVPGNHLGQRSNGYRWPYGPVAIITPFNFPLEIPLLQLMGALYMGNKPVLKVDSKVSIVMEQMIRLLHDCGLPAEDMDFINSDGAVMNKLLLEANPKMTLFTGSSRVAEKLAADLKGRVKLEDAGFDWKILGPDVQEVDYVAWVCDQDAYACSGQKCSAQSVLFMHKNWSSSGLLEKMKKLSERRKLEDLTIGPVLTVTTEAMIEHMNNLLKIRGSKVLFGGEPLGNHSIPKIYGAMKPTAVFVPLEEILKSGNFELVTKEIFGPFQVVTEYSEDQLELVLEACERMNAHLTAAVVSNDPLFLQDVLGRSVNGTTYAGIRARTTGAPQNHWFGPAGDPRGAGIGTPEAIKLVWSCHREVIYDVGPVPESWALPSAT

SEQ ID NO: 38205 - DNA, 1521 bp, Zea mays
  CDS (1)..(1521)
atggcgccgccgcagacgatcccccggcgcggcctcttcattggcggggcctggagggagccgtgcctcgggcgccgcctgcccgtcgtcaacccggccaccgaggccaccatcggcgacatcccggcgggcacggcggaggacgtggagatcgcggtcgccgcggcgcgggacgcgttctcccgcgacggcgggaggcactggtcgcgcgcccctggggccgtgcgcgccaacttcctccgggcgatcgccgccaagattaaagacaggaaatctgagctggctttgctggagacacttgattctggaaagcctctggatgaagcaagtggagacatggacgatgtcgctgcatgctttgagtactatgctgatctggcagaagctttagatgggaagcaacagtcaccgatctctctgcctatggaaaactttaagtcgtatgtacttaaagaacccattggggttgttggactgatcactccttggaattatcctctgttgatggcaacttggaaggtcgcacctgccttggctgctgggtgtacaactatattaaaaccttcagagttggcttctgtgagctgcttagagcttggtgcaatatgtatggaaataggcctaccaccaggtgtcttgaacataattactggtctgggccctgaagctggtgctccattatcctcacattcccatgtggataaggttgcttttactggaagtacagagactggtaagaggataatgatttcagctgcccaaatggttaagcctgtttcattagagcttggtgggaaaagtcctcttattgtctttgatgacattggtgacattgacaaagctgttgaatggaccatgtttgggatcttcgcgaatgctggtcaagtctgcagtgctacttctcgtttactgctgcatgagaaaattgcaaagaaattcttggatagattggttgcatgggcaaagaatataaaagtctcagatccactggaggaaggctgcagactgggttcagttatcagtgaaggacagtacgagaagataaagaaattcatctcgactgcaagaagtgaaggtgccacaattctgtatggaggtggccgaccacagcatctcagaagagggttctttcttgaacctacaattataacagatgttagtacgtcaatgcaaatttggcaagaggaagtctttggaccagttatctgtgttaaggagtttaggacagagagtgaagctgtggaacttgcaaatgatactcactatggtttagctggtgccgtgatctccaatgatcaagagaggtgtgagcgcatttcaaaggctcttcactctggtattatttggataaattgctcgcaaccatgcttcgtccaagctccttggggagggaacaagcggagcggttttggtcgggagctcggagaatggggtcttgataactacctgacagttaagcaagtcaccaagtattgctcggatgaaccgtggggatggtaccagcctccatctaagctgtga

SEQ ID NO: 38206 - protein, 506 aa, Zea mays
MAPPQTIPRRGLFIGGAWREPCLGRRLPVVNPATEATIGDIPAGTAEDVEIAVAAARDAFSRDGGRHWSRAPGAVRANFLRAIAAKIKDRKSELALLETLDSGKPLDEASGDMDDVAACFEYYADLAEALDGKQQSPISLPMENFKSYVLKEPIGVVGLITPWNYPLLMATWKVAPALAAGCTTILKPSELASVSCLELGAICMEIGLPPGVLNIITGLGPEAGAPLSSHSHVDKVAFTGSTETGKRIMISAAQMVKPVSLELGGKSPLIVFDDIGDIDKAVEWTMFGIFANAGQVCSATSRLLLHEKIAKKFLDRLVAWAKNIKVSDPLEEGCRLGSVISEGQYEKIKKFISTARSEGATILYGGGRPQHLRRGFFLEPTIITDVSTSMQIWQEEVFGPVICVKEFRTESEAVELANDTHYGLAGAVISNDQERCERISKALHSGIIWINCSQPCFVQAPWGGNKRSGFGRELGEWGLDNYLTVKQVTKYCSDEPWGWYQPPSKL

SEQ ID NO: 38207 - DNA, 1530 bp, Zea mays
  CDS (1)..(1530)
atgggggccttcgcgaaggaggagcaccagttcctagccgagctcggcctcgcgcagcgcaacccaggcgcgttcgcatgcggtgcgtggggcggctcaggtcccaccgtcacctccacgagcccgaccaacaatcaggtcatcgcagaggtcgtggaggcgtccgtgcacgactacgaggagggcatgcgcgcctgcttcgatgccgccaagacatggatggcgattcctgctccaaagcgaggagagatcgttaggcaaatcggtgatgcactgagagcaaagctccatcaccttggcaggcttgtgtcacttgagatggggaaaattcttcctgaagggatcggtgaggttcaggaaatcatcgacatgtgtgattatgctgtggggctaagtcgccaactaaatggatccattataccatctgaacgaccaaaccatatgatgatggaggtgtggaatccccttggagttgtgggtgttataacggcatttaatttcccttgtgctgtgcttggttggaatgcttgcattgctttggtctgtggaaattgtgtcgtctggaaaggtgctccaacaactccactgatcactattgcaatgacaaaaatagtggctagtgtattggagaagaacaacttgccaggcgcaatttttacatctttttgtgggggcactgaaattggtcaagcaattgcccttgacattaggatacctttggtttcattcactggaagtacaagggctggtctaatggttcagcaacaagttagtgcaagatttggtaaatgccttcttgaacttagcggaaacaatgccatcattgttatggatgatgcagatatccagctagctgtgcgatctgtcttgttcgctgctgttggtacagcaggacaacgctgcactacatgtcgtaggctgattcttcatgagaacatatatcaaaccttccttgatcagcttgttgaggtatacaaacaagtccgaattggggatccgttggagaaaggcaccttactgggaccactgcacactcctgcttcaaaagagaactttttgaaaggcattcagactatcaaatctcagggagggaaaatcctttttggaggatctgccattgaatcagaaggaaactttgtgcaaccaacaattgtggaaattacaccttctgcaccagttgtgaaagaagaactctttggtcctgtcctttatgttatgaaatttcagtccttgaaggaagcaattgaaatcaataactctgttcctcaaggattgagcagttctatatttacaaagaggccagatattatttttaagcggctcgggccccatggtagtgattgtggtatagtgaatgtgaacatacctactaatggtgctgaaattggtggagcatttggtggagaaaaagcaactggtggtggacgagaagcagggagtgattcctggaagcagtacatgaggagggcgacttgtacaatcaactatgggagcgagctacctctagcccagggaatcaattttggttaa

SEQ ID NO: 38208 - protein, 509 aa, Zea mays
MGAFAKEEHQFLAELGLAQRNPGAFACGAWGGSGPTVTSTSPTNNQVIAEVVEASVHDYEEGMRACFDAAKTWMAIPAPKRGEIVRQIGDALRAKLHHLGRLVSLEMGKILPEGIGEVQEIIDMCDYAVGLSRQLNGSIIPSERPNHMMMEVWNPLGVVGVITAFNFPCAVLGWNACIALVCGNCVVWKGAPTTPLITIAMTKIVASVLEKNNLPGAIFTSFCGGTEIGQAIALDIRIPLVSFTGSTRAGLMVQQQVSARFGKCLLELSGNNAIIVMDDADIQLAVRSVLFAAVGTAGQRCTTCRRLILHENIYQTFLDQLVEVYKQVRIGDPLEKGTLLGPLHTPASKENFLKGIQTIKSQGGKILFGGSAIESEGNFVQPTIVEITPSAPVVKEELFGPVLYVMKFQSLKEAIEINNSVPQGLSSSIFTKRPDIIFKRLGPHGSDCGIVNVNIPTNGAEIGGAFGGEKATGGGREAGSDSWKQYMRRATCTINYGSELPLAQGINFG

SEQ ID NO: 38209 - DNA, 1518 bp, Zea mays
  CDS (1)..(1518)
atggcctcgccagcgatggtcccgctgcggcagctcttcgtcgacggcgagtggcgcccgcccgcgcagggccgccgcctccccgtcgtcaaccccaccaccgaggctcacatcggcgagatccctgcgggcacagcggaggacgtggacgccgcggtggcggcggcgcgggcggcgctcaagaggaaccgtggccgcgactgggcgcgcgccccgggggccgtccgggccaagtacctccgcgctatcgccgccaaggtgattgagaggaaacctgagctggctaagctagaggcacttgattgtgggaagccttatgatgaagcagcatgggacatggatgatgttgctgggtgctttgagtactttgcggatcaggcagaagccttggataaaaggcaaaattccccagtttctcttccaatggaaacttttaaatgtcatctccgaagagagcctattggggtagttgggctgataactccttggaactatcctctactgatggctacatggaagatagcccctgcattggctgctggttgtacagctgtgctgaagccatctgaactggcttctgtgacttgcttagagcttgctgatatctgtaaagaagtcggtctcccttctggtgtcttgaacattgtgacaggattaggtcctgatgctggcgctcctttgtcagcacacccagatgttgacaaggtcgcttttactgggagttttgaaactggcaagaaaattatggcatcggcagctcctatggtcaagcctgttacactggaacttggtggaaaaagtcctatagtagtatttgatgatgttgacattgacaaagctgtcgagtggactctgtttgggtgcttttggaccaatggtcagatttgcagcgcaacatctcgtcttcttatccatacaaaaattgctaaaaaatttaatgagaggatggttgcatgggccaaaaatattaaggtttcggatccacttgaagagggttgcaggcttgggccagttgttagtgaaggacagtatgagaagattaagaagttcatatcgaatgccaaaagccaaggtgctactattctgactggaggtgttagacctgcgcatcttgagaaggggttctttattgaaccaactattattactgatatcaccacatcaatggaaatctggagggaggaagtctttggtccagtcctgtgcgttaaagaatttagcactgaagatgaagccatcgaacttgccaacgatacacagtatggtttggctggtgctgtaatttctggtgatcgggagcgctgccagaggttatctgaggagattgacgctggatgcatctgggtaaactgctcgcaaccctgcttctgccaagctccctggggcgggaacaagcgcagtggatttggacgtgagcttggagaagggggcattgataactacctgagcgtcaagcaagtcacggagtacatctctgatgagccgtggggatggtaccaatccccctccaagctgtaa

SEQ ID NO: 38210 - protein, 505 aa, Zea mays
MASPAMVPLRQLFVDGEWRPPAQGRRLPVVNPTTEAHIGEIPAGTAEDVDAAVAAARAALKRNRGRDWARAPGAVRAKYLRAIAAKVIERKPELAKLEALDCGKPYDEAAWDMDDVAGCFEYFADQAEALDKRQNSPVSLPMETFKCHLRREPIGVVGLITPWNYPLLMATWKIAPALAAGCTAVLKPSELASVTCLELADICKEVGLPSGVLNIVTGLGPDAGAPLSAHPDVDKVAFTGSFETGKKIMASAAPMVKPVTLELGGKSPIVVFDDVDIDKAVEWTLFGCFWTNGQICSATSRLLIHTKIAKKFNERMVAWAKNIKVSDPLEEGCRLGPVVSEGQYEKIKKFISNAKSQGATILTGGVRPAHLEKGFFIEPTIITDITTSMEIWREEVFGPVLCVKEFSTEDEAIELANDTQYGLAGAVISGDRERCQRLSEEIDAGCIWVNCSQPCFCQAPWGGNKRSGFGRELGEGGIDNYLSVKQVTEYISDEPWGWYQSPSKL

SEQ ID NO: 38211 - DNA, 1782 bp, Zea mays
  CDS (1)..(1782)
atggccttctggtggccgctgctggtgctcgccgccgcatacgcgctctgtcgcctgctcctcttcctcatcccgcccaccgtcccatccatcgacgtcgacgcctccgacgtgttggccaaggaggacagcttcatctacataccgagacggggtaaatcaactcagactgacaaggtccaatgctatgaaccagcgaccatgaaatacttggggtacttcccagtggtgactcctgatgaggtcaaggaacatgttgcacaatccaggaaagctcaaaggatatgggcaaaaagcagcttcaagcaaaggcgccagtttcttcgaatcgttctcaagtatatacttgaacatcaggatctcatatgcgaggtatcatctcgggacactggaaagactatggttgatgcttcattaggagagataatgaccacctgtgagaagattacctggcttttggatgagggcgagaagtggctgaaacctgaatacagatctactgggagatcaatgctgcataagagagcaaaagctgagttttaccctcttggagtgattggtgcgattgtatcttggaattatcccttccataatgtttttaatccagtgctagcagcagtattctccggtaatgcagcagttataaaggtctcagaacatgcgacttggtcgggctgcttttattttcgtattatacaagcagctctttcagctgttggtgcacctgagaatctggtgcacataataactggttttgcggaaacaggccaagctcttgtatcatcagtagacaaaataatatttgtgggatcaccaggtgttggaaaaatgatcatgaaaagggcgtcggagactctaatacctgtaactctggagcttggtggcaaagattcatttattgtgtgtgaagatgtagatttacccagtgttgttcaagttgctactagagctgctctgcaatctagtgggcagaattgcgctggtgctgaaagattttatgttcacgatgacatctattctgcctttgtttcacagatagtgaagacagtcaaatctataagtgttggccccccattatcaggcagatatgacatgggtgcaatctgtatgattgagcactctgagaaacttcagaatcttgttaatgatgctctagacaaaggtgccgaaattgccgtcagggggagttttggcaatcttggtgaagatgcagttgatcaatttttcccaccaactgtcctggtgaatgttgatcacacaatgaaaattatgcaagaagagacatttggacctattataccaatcatgaaattcagttctgatgaagaggctatcaaacttgcaaacgactcaaaatatggtcttggctgtgctgttttttctggcaaccagaagcgtgccatcagaatagcgtcccagttacactgtggggtagcagcaatcaatgattttgcttcaagttacatgtgccagtctttgccattcggtggtgttaaagacagcggattcgggagatttgctggcgtagaaggcttgcgagcttgctgccttgtgaagtctgttgtagaagatagattgtggccatatattagaacagtgatcccgaagcctatccagtatcccgtctcagagcatggatttgagttccagcagttgcttgtggagactctgtatggctatagcgtgtgggacaggttgcggtcccttgtgaatcttataaagatggttaccgagcagaattttgccccgacttcaaatgcgaccacgaagaaaaggcgatga

SEQ ID NO: 38212 - protein, 593 aa, Zea mays
MAFWWPLLVLAAAYALCRLLLFLIPPTVPSIDVDASDVLAKEDSFIYIPRRGKSTQTDKVQCYEPATMKYLGYFPVVTPDEVKEHVAQSRKAQRIWAKSSFKQRRQFLRIVLKYILEHQDLICEVSSRDTGKTMVDASLGEIMTTCEKITWLLDEGEKWLKPEYRSTGRSMLHKRAKAEFYPLGVIGAIVSWNYPFHNVFNPVLAAVFSGNAAVIKVSEHATWSGCFYFRIIQAALSAVGAPENLVHIITGFAETGQALVSSVDKIIFVGSPGVGKMIMKRASETLIPVTLELGGKDSFIVCEDVDLPSVVQVATRAALQSSGQNCAGAERFYVHDDIYSAFVSQIVKTVKSISVGPPLSGRYDMGAICMIEHSEKLQNLVNDALDKGAEIAVRGSFGNLGEDAVDQFFPPTVLVNVDHTMKIMQEETFGPIIPIMKFSSDEEAIKLANDSKYGLGCAVFSGNQKRAIRIASQLHCGVAAINDFASSYMCQSLPFGGVKDSGFGRFAGVEGLRACCLVKSVVEDRLWPYIRTVIPKPIQYPVSEHGFEFQQLLVETLYGYSVWDRLRSLVNLIKMVTEQNFAPTSNATTKKRR

SEQ ID NO: 38213 - DNA, 1650 bp, Zea mays
  CDS (1)..(1650)
atgagtcgcctcctctcgcggcagcaccttgccgccgtccgtcgatctgcaccctttgcgtgcgtgtccaggtggctgcacacgccgtcattcgcgacggtttctccgcaagaggtttcaggttccagcccagcggaagtgcagaattttgtgcagggcagctggacagcatctgctaactggaactggatagtcgatcccctgaacggtgataaattcatcaaagttgctgaggttcagggaacagaaataaagccattcgtggagagtttatctaaatgcccaaagcatggacttcacaacccacttaaagctccagagaggtacctcatgtatggagatatatctgcaaaagctgcgcatatgctgggccaacctgcagtcttagatttctttgctaaacttatccagagggtatctcccaagagctaccaacaagctcttgcagaagttcaagtttctcaaaagtttttggaaaacttttgtggagaccaggtacgctttctggcaaggtcatttgctgtaccaggtaaccatcttggacaaagaagtaatggctaccgttggccatatggcccagttgcaattatcacaccattcaattttccgttggagatccccttactacaattgatgggagcactatacatgggaaataaaccagtactcaaggttgacagcaaggttagcattgtgatggaacaaatgattaggttgcttcatgattgtggattgccagcagaggatatggatttcataaattctgatggtgccgtaatgaacaagcttctgttagaggctaatccgaaaatgacccttttcactgggagttcacgggtagcagagaaattggctgctgatttgaaaggccgagttaaattggaggatgctggttttgattggaaaattcttggtccagatgttcaagaggttgattatgttgcatgggtttgcgatcaggatgcttatgcttgtagcggtcagaaatgctctgctcagtctgttctattcatgcacaagaattggtcttctagtggtctgcttgagaaaatgaagaaactttctgaaagaaggaagcttgaagatttaacaattggtccagtccttacagttactacagaagccatgatagagcacatgaacaaccttctcaaaataagaggatcaaaggttctgtttggtggtgaaccgttagcgaatcactcaattcccaaaatttatggtgccatgaagcctactgctgtatttgttcctctagaagaaattctaaaaagtgggaacttcgagcttgtgacaaaggagatatttggtccattccaggtagtcacagaatactctgaggatcagcttgagttggtcttagaagcctgcgaaaggatgaatgcgcatctgacagctgcagttgtctcaaacgacccgctattcctgcaggatgtacttgggagatccgttaacgggacaacctacgccggaattcgagcgaggaccacgggcgctccacagaaccactggtttggcccggccggtgatccgcgaggcgcagggatcgggactccggaagccatcaaacttgtctggtcctgccacagggaagtcatatatgacgtcgggcccgtgcccgagagctgggcgcttccttccgcgacctga

SEQ ID NO: 38214 - protein, 549 aa, Zea mays
MSRLLSRQHLAAVRRSAPFACVSRWLHTPSFATVSPQEVSGSSPAEVQNFVQGSWTASANWNWIVDPLNGDKFIKVAEVQGTEIKPFVESLSKCPKHGLHNPLKAPERYLMYGDISAKAAHMLGQPAVLDFFAKLIQRVSPKSYQQALAEVQVSQKFLENFCGDQVRFLARSFAVPGNHLGQRSNGYRWPYGPVAIITPFNFPLEIPLLQLMGALYMGNKPVLKVDSKVSIVMEQMIRLLHDCGLPAEDMDFINSDGAVMNKLLLEANPKMTLFTGSSRVAEKLAADLKGRVKLEDAGFDWKILGPDVQEVDYVAWVCDQDAYACSGQKCSAQSVLFMHKNWSSSGLLEKMKKLSERRKLEDLTIGPVLTVTTEAMIEHMNNLLKIRGSKVLFGGEPLANHSIPKIYGAMKPTAVFVPLEEILKSGNFELVTKEIFGPFQVVTEYSEDQLELVLEACERMNAHLTAAVVSNDPLFLQDVLGRSVNGTTYAGIRARTTGAPQNHWFGPAGDPRGAGIGTPEAIKLVWSCHREVIYDVGPVPESWALPSAT

SEQ ID NO: 38215 - DNA, 1509 bp, Zea mays
  CDS (1)..(1509)
atggcgactgcgaacgggagcagcaaggggccgttcgaggtgcccaaggtggaggtcaggttcaccaagctcttcatcgacggcaagttcgtcgacgccgtctccggcaagacgttcgagacccgggaccctcgcaccggcgaggtgatcgccagcatcgcggagggaggcaaggccgacgtcgacctcgccgtcaaggccgcccgggaggccttcgacaacgggccctggcccaggatgacgggatacgagcgtggtcggatcctccacaggttcgcggacctgatcgacgagcacgtggaggagctggcggcgctggacacggtggacgccggcaagctgttcgccgtgggcaaggcgcgggacatcccgggcgccgcgcacctgctgcgctactacgccggcgccgccgacaaggtgcacggcgcgacgctcaagatggcgcagcggatgcacgggtacacgctcaaggagcccgtgggcgtggtgggccacatcgtgccctggaactaccccaccaccatgttcttcttcaaggtagggcccgcgctcgccgcaggctgcgccgtcgtcgtcaagcccgccgagcagacgccgctgtccgcgctcttctacgcgcacctcgccagggaggccggcgtccccgccggcgtgctcaacgtcgtgccgggattcgggcccacggccggggccgccgtcgccgcccacatggacgtcgacaaggtcagcttcaccgggtccacggaggtcggccgcctcgtcatgagggccgcggccgagagcaacctcaagcccgtgtcgctcgagctgggcggcaagtctcctgtcatcgtcttcgacgacgctgacctcgacatggccgttaacctcgtcaacttcgccacctacaccaacaagggcgagatctgtgtggccggcacgcgcatctacgtgcaggaagggatctacgacgagttcgtgaagaaggccgccgagctcgccagcaagtccgtggtcggagacccgttcaacccgagtgtcagccaaggcccccaggttgacaaggaccagtacgagaaggtcctcaggtacattgacatcgggaagcgcgaaggcgccacgctggtcaccggagggaagccctgcggcgacaagggctactacatcgagcccaccatcttcacggacgtcaaggacgacatgacgatcgcacaggatgaaatctttgggccggtgatggctctcatgaaattcaagaccgtggaggaggtgatccagaaagcgaacaacacccggtacggcctggccgccggcatcgtgaccaagaacatcgacgtcgccaacaccgtgtcgcggtccatccgcgccggcgccatctggatcaactgctacttcgcgttcgacccggacgcgccgttcggcgggtacaagatgagcgggttcggcaaggacatgggcatggacgcgctcgacaagtacctgcagaccaagaccgtcgtcactccgctgtacaacactccatggctctga

SEQ ID NO: 38216 - protein, 502 aa, Zea mays
MATANGSSKGPFEVPKVEVRFTKLFIDGKFVDAVSGKTFETRDPRTGEVIASIAEGGKADVDLAVKAAREAFDNGPWPRMTGYERGRILHRFADLIDEHVEELAALDTVDAGKLFAVGKARDIPGAAHLLRYYAGAADKVHGATLKMAQRMHGYTLKEPVGVVGHIVPWNYPTTMFFFKVGPALAAGCAVVVKPAEQTPLSALFYAHLAREAGVPAGVLNVVPGFGPTAGAAVAAHMDVDKVSFTGSTEVGRLVMRAAAESNLKPVSLELGGKSPVIVFDDADLDMAVNLVNFATYTNKGEICVAGTRIYVQEGIYDEFVKKAAELASKSVVGDPFNPSVSQGPQVDKDQYEKVLRYIDIGKREGATLVTGGKPCGDKGYYIEPTIFTDVKDDMTIAQDEIFGPVMALMKFKTVEEVIQKANNTRYGLAAGIVTKNIDVANTVSRSIRAGAIWINCYFAFDPDAPFGGYKMSGFGKDMGMDALDKYLQTKTVVTPLYNTPWL

SEQ ID NO: 38217 - DNA, 26 bp, Artificial sequence
  primer
atgaattttcatcatctggcttactg

SEQ ID NO: 38218 - DNA, 24 bp, Artificial sequence
  primer
ttaggcctccaggcttatccagat

SEQ ID NO: 38219 - protein, 530 aa, Artificial sequence
  consensus sequence
  Variant (2)..(8): Xaa in position 2 to 8 is any amino acid
  Variant (9)..(11): Xaa in position 9 to 11 is any or no amino acid
  Variant (13)..(19): Xaa in position 13 to 19 is any amino acid
  Variant (21)..(35): Xaa in position 21 to 35 is any amino acid
  Variant (37)..(39): Xaa in position 37 to 39 is any amino acid
  Variant (42)..(43): Xaa in position 42 to 43 is any amino acid
  Variant (45)..(46): Xaa in position 45 to 46 is any amino acid
  Variant (49)..(50): Xaa in position 49 to 50 is any amino acid
  Variant (51)..(55): Xaa in position 51 to 55 is any or no amino acid
  Variant (57)..(62): Xaa in position 57 to 62 is any amino acid
  Variant (63)..(81): Xaa in position 63 to 81 is any or no amino acid
  Variant (83)..(89): Xaa in position 83 to 89 is any amino acid
  Variant (91)..(100): Xaa in position 91 to 100 is any amino acid
  Variant (101)..(102): Xaa in position 101 to 102 is any or no amino acid
  Variant (104)..(110): Xaa in position 104 to 110 is any amino acid
  Variant (113)..(147): Xaa in position 113 to 147 is any amino acid
  Variant (148)..(164): Xaa in position 148 to 164 is any or no amino acid
  Variant (166)..(166): Xaa in position 166 is any amino acid
  Variant (169)..(171): Xaa in position 169 to 171 is any amino acid
  Variant (173)..(173): Xaa in position 173 is any amino acid
  Variant (177)..(177): Xaa in position 177 is any amino acid
  Variant (179)..(184): Xaa in position 179 to 184 is any amino acid
  Variant (186)..(187): Xaa in position 186 to 187 is any amino acid
  Variant (192)..(192): Xaa in position 192 is any amino acid
  Variant (194)..(196): Xaa in position 194 to 196 is any amino acid
  Variant (198)..(198): Xaa in position 198 is any amino acid
  Variant (200)..(201): Xaa in position 200 to 201 is any amino acid
  Variant (203)..(204): Xaa in position 203 to 204 is any amino acid
  Variant (207)..(213): Xaa in position 207 to 213 is any amino acid
  Variant (214)..(217): Xaa in position 214 to 217 is any or no amino acid
  Variant (219)..(220): Xaa in position 219 to 220 is any amino acid
  Variant (221)..(221): Xaa in position 221 is any or no amino acid
  Variant (224)..(224): Xaa in position 224 is any amino acid
  Variant (226)..(226): Xaa in position 226 is any amino acid
  Variant (229)..(229): Xaa in position 229 is any amino acid
  Variant (231)..(233): Xaa in position 231 to 233 is any amino acid
  Variant (235)..(235): Xaa in position 235 is any amino acid
  Variant (236)..(238): Xaa in position 236 to 238 is any or no amino acid
  Variant (240)..(241): Xaa in position 240 to 241 is any amino acid
  Variant (242)..(242): Xaa in position 242 is any or no amino acid
  Variant (244)..(248): Xaa in position 244 to 248 is any amino acid
  Variant (250)..(256): Xaa in position 250 to 256 is any amino acid
  Variant (261)..(262): Xaa in position 261 to 262 is any amino acid
  Variant (263)..(263): Xaa in position 263 is any or no amino acid
  Variant (265)..(273): Xaa in position 265 to 273 is any amino acid
  Variant (274)..(276): Xaa in position 274 to 276 is any or no amino acid
  Variant (278)..(280): Xaa in position 278 to 280 is any amino acid
  Variant (287)..(287): Xaa in position 287 is any amino acid
  Variant (289)..(295): Xaa in position 289 to 295 is any amino acid
  Variant (296)..(296): Xaa in position 296 is any or no amino acid
  Variant (298)..(300): Xaa in position 298 to 300 is any amino acid
  Variant (302)..(308): Xaa in position 302 to 308 is any amino acid
  Variant (309)..(313): Xaa in position 309 to 313 is any or no amino acid
  Variant (315)..(316): Xaa in position 315 to 316 is any amino acid
  Variant (318)..(318): Xaa in position 318 is any amino acid
  Variant (320)..(321): Xaa in position 320 to 321 is any amino acid
  Variant (323)..(324): Xaa in position 323 to 324 is any amino acid
  Variant (326)..(332): Xaa in position 326 to 332 is any amino acid
  Variant (334)..(344): Xaa in position 334 to 344 is any amino acid
  Variant (345)..(347): Xaa in position 345 to 347 is any or no amino acid
  Variant (349)..(349): Xaa in position 349 is any amino acid
  Variant (350)..(352): Xaa in position 350 to 352 is any or no amino acid
  Variant (354)..(359): Xaa in position 354 to 359 is any amino acid
  Variant (360)..(360): Xaa in position 360 is any or no amino acid
  Variant (363)..(381): Xaa in position 363 to 381 is any amino acid
  Variant (382)..(382): Xaa in position 382 is any or no amino acid
  Variant (385)..(387): Xaa in position 385 to 387 is any amino acid
  Variant (388)..(388): Xaa in position 388 is any or no amino acid
  Variant (391)..(393): Xaa in position 391 to 393 is any amino acid
  Variant (394)..(403): Xaa in position 394 to 403 is any or no amino acid
  Variant (405)..(408): Xaa in position 405 to 408 is any amino acid
  Variant (411)..(413): Xaa in position 411 to 413 is any amino acid
  Variant (414)..(414): Xaa in position 414 is any or no amino acid
  Variant (416)..(417): Xaa in position 416 to 417 is any amino acid
  Variant (418)..(423): Xaa in position 418 to 423 is any or no amino acid
  Variant (425)..(429): Xaa in position 425 to 429 is any amino acid
  Variant (431)..(431): Xaa in position 431 is any amino acid
  Variant (436)..(440): Xaa in position 436 to 440 is any amino acid
  Variant (442)..(445): Xaa in position 442 to 445 is any amino acid
  Variant (446)..(447): Xaa in position 446 to 447 is any or no amino acid
  Variant (449)..(452): Xaa in position 449 to 452 is any amino acid
  Variant (455)..(457): Xaa in position 455 to 457 is any amino acid
  Variant (461)..(465): Xaa in position 461 to 465 is any amino acid
  Variant (467)..(481): Xaa in position 467 to 481 is any amino acid
  Variant (483)..(486): Xaa in position 483 to 486 is any amino acid
  Variant (488)..(496): Xaa in position 488 to 496 is any amino acid
  Variant (497)..(499): Xaa in position 497 to 499 is any or no amino acid
  Variant (504)..(504): Xaa in position 504 is any amino acid
  Variant (505)..(507): Xaa in position 505 to 507 is any or no amino acid
  Variant (509)..(509): Xaa in position 509 is any amino acid
  Variant (512)..(512): Xaa in position 512 is any amino acid
  Variant (514)..(514): Xaa in position 514 is any amino acid
  Variant (515)..(515): Xaa in position 515 is any or no amino acid
  Variant (517)..(520): Xaa in position 517 to 520 is any amino acid
  Variant (521)..(525): Xaa in position 521 to 525 is any or no amino acid
  Variant (527)..(529): Xaa in position 527 to 529 is any amino acid
IXXXXXXXXXXGXXXXXXXPXXXXXXXXXXXXXXXDXXXAVXXAXXAFXXXXXXXWXXXXXXXXXXXXXXXXXXXXXXXXXRXXXXXXXAXXXXXXXXXXXXAXXXXXXXGKXXXXXXXXXXXXXXXXXXXXXXXXXXXXXXXXXXXXXXXXXXXXXXXXXXXXPXGVXXXIXPWNXPXXXXXXKXXPALAXGXXXVXKXXEXXPLXXXXXXXXXXXLXXXAGXPXGVXNXXXGXXXXGXXXGXXXXXHXXXXXXXFTGSXXXGXXXXXXXXXXXXKXXXLELGGKXPXXXXXXXXDXXXAXXXXXXXXXXXXGXXCXAXXRXXVXXXXXXXFXXXXXXXXXXXXXXGXXXXPXXXXXXXGPXXXXXXXXXXXXXXXXXXXXGAXXXXGGXXXXXXXXXXXXXGXXXXPTXXXXVXXXXXXXXMXXXXXEXFGPVXXXXXFXXXXXXEXXXXANXXXYGLXXXXXTXXXXXXXXXXXXXXXGXXXXNXXXXXXXXXXXXPFGGXXXXKXSGXGXXRXXXXXXXXXYXXXK

SEQ ID NO: 38220 - protein, 14 aa, Artificial sequence
  protein pattern
  Variant (2)..(2): Xaa in position 2 is any amino acid
  Variant (5)..(5): Xaa in position 5 is any amino acid
  Variant (6)..(6): Xaa in position 6 is Ala, Gly or Leu
  Variant (7)..(7): Xaa in position 7 is any amino acid
  Variant (9)..(9): Xaa in position 9 is any amino acid
  Variant (11)..(11): Xaa in position 11 is Phe or Trp
  Variant (13)..(13): Xaa in position 13 is any amino acid
PXGVXXXIXPXNXP

SEQ ID NO: 38221 - protein, 18 aa, Artificial sequence
  protein pattern
  Variant (2)..(3): Xaa in position 2 to 3 is any or no amino acid
  Variant (5)..(5): Xaa in position 5 is any or no amino acid
  Variant (7)..(7): Xaa in position 7 is Cys or Asn
  Variant (8)..(8): Xaa in position 8 is Ala, Cys, Ser, Thr or Val
  Variant (9)..(9): Xaa in position 9 is any amino acid
  Variant (10)..(10): Xaa in position 10 is Ile or Val
  Variant (11)..(11): Xaa in position 11 is Ile, Leu, Met or Val
  Variant (13)..(13): Xaa in position 13 is any amino acid
  Variant (14)..(14): Xaa in position 14 is Ala or Ser
  Variant (16)..(16): Xaa in position 16 is any amino acid
  Variant (17)..(17): Xaa in position 17 is Ala, Asp, Ser or Thr
  Variant (18)..(18): Xaa in position 18 is Pro or Ser
AXXAXGXXXXXKXXEXXX

SEQ ID NO: 38222 - protein, 18 aa, Artificial sequence
  protein pattern
  Variant (2)..(3): Xaa in position 2 to 3 is any amino acid
  Variant (4)..(4): Xaa in position 4 is any or no amino acid
  Variant (7)..(7): Xaa in position 7 is any amino acid
  Variant (10)..(10): Xaa in position 10 is any amino acid
  Variant (11)..(11): Xaa in position 11 is Ala or Ser
  Variant (12)..(12): Xaa in position 12 is Ala, Pro or Ser
  Variant (13)..(13): Xaa in position 13 is any amino acid
  Variant (14)..(14): Xaa in position 14 is Ile, Leu, Met or Val
  Variant (15)..(15): Xaa in position 15 is Ile or Val
  Variant (16)..(17): Xaa in position 16 to 17 is any amino acid
  Variant (18)..(18): Xaa in position 18 is Asp, Asn, Ser or Thr
KXXXLEXGGXXXXXXXXX

SEQ ID NO: 38223 - protein, 11 aa, Artificial sequence
  protein pattern
  Variant (2)..(2): Xaa in position 2 is Phe, Trp or Tyr
  Variant (5)..(5): Xaa in position 5 is any amino acid
  Variant (7)..(7): Xaa in position 7 is any amino acid
  Variant (10)..(10): Xaa in position 10 is any amino acid
  Variant (11)..(11): Xaa in position 11 is Cys or Gly
PXGGXKXSGXX

SEQ ID NO: 38224 - protein, 18 aa, Artificial sequence
  protein pattern
  Variant (2)..(2): Xaa in position 2 is any amino acid
  Variant (3)..(3): Xaa in position 3 is Ala, Leu or Pro
  Variant (4)..(4): Xaa in position 4 is Ile, Leu, Met or Val
  Variant (5)..(9): Xaa in position 5 to 9 is any amino acid
  Variant (10)..(10): Xaa in position 10 is Ile, Leu or Val
  Variant (11)..(12): Xaa in position 11 to 12 is any amino acid
  Variant (13)..(13): Xaa in position 13 is Ala, Ile, Leu or Val
  Variant (14)..(14): Xaa in position 14 is any amino acid
GXXXXXXXXXXXXXFTGS

SEQ ID NO: 38225 - protein, 17 aa, Artificial sequence
  protein pattern
  Variant (2)..(4): Xaa in position 2 to 4 is any or no amino acid
  Variant (7)..(7): Xaa in position 7 is Phe, Ile, Leu, Met or Val
  Variant (9)..(9): Xaa in position 9 is any amino acid
  Variant (11)..(11): Xaa in position 11 is any amino acid
  Variant (12)..(12): Xaa in position 12 is Phe, Ile, Leu, Met or Val
  Variant (13)..(13): Xaa in position 13 is Gly, Asn, Gln or Ser
  Variant (14)..(14): Xaa in position 14 is any amino acid
  Variant (15)..(15): Xaa in position 15 is Ile, Leu or Val
  Variant (16)..(16): Xaa in position 16 is any amino acid
  Variant (17)..(17): Xaa in position 17 is Cys, Gly, Ser or Thr
LXXXAGXPXGXXXXXXX

SEQ ID NO: 38226 - DNA, 1032 bp, Escherichia coli
  CDS (1)..(1032): transl_table=11
atgatcgctgaactgtttacaaataatgcgcttaatctggtcattattttcggtagctgcgcagcattgattctgatgagcttttggtttcgccgtggaaatcgtaaaagaaaaggatttttattccatgcggtgcaatttttaatctacaccataattatcagtgctgttggtagcattattaattatgttatagaaaactataaactcaaatttatcaccccaggcgttatcgattttatctgtacgtccctgattgcggttattctgacgattaagctatttctgctgattaatcagtttgaaaaacagcagattaaaaaaggtcgcgatatcaccagtgcgcggattatgtcgcgtatcatcaaaatcaccattattgtggtgcttgttctgctttatggcgaacatttcggcatgagcctttctggcttgctgacctttggtggtattggtggtctggctgtcggtatggccggtaaagatattctgagtaacttcttttccgggattatgctctatttcgaccgtcctttcagtattggcgactggatccgttcaccggacagaaatatcgaaggtacagtagcggaaattggctggcgaattaccaaaattacgacctttgataatcgtccattgtacgtaccgaactcgctgttttcgtcgatcagcgtagaaaacccaggacgaatgaccaaccgccgcattaccacgaccattggtttacgttatgaggatgcggcaaaagtgggcgttattgtcgaagctgtacgtgagatgctgaaaaatcacccggccatcgaccagcgacaaaccttactggtttatttcaaccagtttgctgactcttcattgaatattatggtttattgctttaccaaaaccacggtatgggctgaatggcttgctgcacagcaagacgtttatttgaagattatcgatattgtacagtcacacggcgcggactttgccttccccagccagacgctgtatatggataacattacaccgccggaacagggtcgctaa

SEQ ID NO: 38227 - protein, 343 aa, Escherichia coli
MIAELFTNNALNLVIIFGSCAALILMSFWFRRGNRKRKGFLFHAVQFLIYTIIISAVGSIINYVIENYKLKFITPGVIDFICTSLIAVILTIKLFLLINQFEKQQIKKGRDITSARIMSRIIKITIIVVLVLLYGEHFGMSLSGLLTFGGIGGLAVGMAGKDILSNFFSGIMLYFDRPFSIGDWIRSPDRNIEGTVAEIGWRITKITTFDNRPLYVPNSLFSSISVENPGRMTNRRITTTIGLRYEDAAKVGVIVEAVREMLKNHPAIDQRQTLLVYFNQFADSSLNIMVYCFTKTTVWAEWLAAQQDVYLKIIDIVQSHGADFAFPSQTLYMDNITPPEQGR

SEQ ID NO: 38228 - DNA, 1032 bp, Shigella flexneri 2a str. 301
  CDS (1)..(1032): transl_table=11
atgatcgctgaactgtttacaaataatgcgcttaatctggtcattattttcggtagctgcgcagcattgattctgatgagcttttggtttcgccgtggaaatcgtaaaagaaaaggatttttattccatgcggtgcaatttttaatctacaccataattatcagtgctgttggtagcatcagtaattatgttatagaaaactataaactcaaatttatcaccccaggcgttatcgattttatctgtacgtccctgattgcggttattctgacgattaagctatttctgctgattaatcagtttgaaaaacagcagattaaaaaaggtcgcgatatcaccagtgcgcggattatgtcgcgcattatcaaaatcaccattattgtagtgcttgttctgctttatggcgaacatttcggcatgagcctttctggcttgctgacctttggtggtattggtggtctggctgtcggtatggccggtaaagatattctgagtaatttcttttccgggatcatgctctatttcgaccgtcctttcagtattggcgactggatccgttcaccggacagaaatatcgaaggtacagtagcggaaattggctggcgaattaccaaaattacgacctttgataatcgtccattgtacgtaccgaactcgctgttttcgtcgatcagcgtagaaaacccaggacgaatgaccaaccgccgcattaccacgaccattggtttacgttatgaggatgcggcaaaagtgggcgttattgtcgaagccgtacgtgagatgctgaaaaatcacccggccatcgaccagcgacaaaccttactggtttatttcaaccagtttgctgactcgtcattgaatattatggtttattgctttaccaaaaccacggtatgggctgagtggcttgctgcacagcaagacgtttatttgaagattatcgatattgtacagtcacacggcgcggactttgccttccccagccagacgctgtatatggataacattacaccgccggaacaggggcgctaa

SEQ ID NO: 38229 - protein, 343 aa, Shigella flexneri 2a str. 301
MIAELFTNNALNLVIIFGSCAALILMSFWFRRGNRKRKGFLFHAVQFLIYTIIISAVGSISNYVIENYKLKFITPGVIDFICTSLIAVILTIKLFLLINQFEKQQIKKGRDITSARIMSRIIKITIIVVLVLLYGEHFGMSLSGLLTFGGIGGLAVGMAGKDILSNFFSGIMLYFDRPFSIGDWIRSPDRNIEGTVAEIGWRITKITTFDNRPLYVPNSLFSSISVENPGRMTNRRITTTIGLRYEDAAKVGVIVEAVREMLKNHPAIDQRQTLLVYFNQFADSSLNIMVYCFTKTTVWAEWLAAQQDVYLKIIDIVQSHGADFAFPSQTLYMDNITPPEQGR

SEQ ID NO: 38230 - DNA, 1032 bp, Salmonella typhimurium LT2
  CDS (1)..(1032): transl_table=11
atgttcactgaattttttctcaaaaacgcatttaatctggcgatacttttcagttgcggtatggcgttgctggtcgtgagattttggctcagccgtaacgtacagtggaagaaaggattcacgttccatgcggcacagttttttatttatgcaattattattgggaccatcgggagcatcctgaataatgctattgaagattataatttgcgttttatctcttccggggtcattgattttatctgcacctcgctcattgcgcttattctgacgataaaacttttcctgattattaaccaatttgaaaaagcacaggtcaataaaggtagagatgtcaccagtacccgtattctggcacgggtcataaaaataaccattattgtcgcgattgtcttactgtatggcgaacattttggcatgagtctgtccggtctgctgacctttggcggtatcggcggtatcgctgttggtatggcgggcaaagatgtcctgagcaattttttctccggtattatgctctatttcgatcgccccttcagtatcggagactggattcgttctcctgacagaaatatcgaaggtacggtcgccgaaatcggctggcgaattacgcgaattaacacattcgaccaccgcccgttgtacgtgcctaattccgtcttttcatccattagcgttgagaatccgggacggatgaccaaccgtcgaataaaaacggttattgggttacgttacgaagatgccgacaaaattggcctcattgttgacgctatcagaaacatgttgcaggcgcacagagatatcgatcagaaacagacgctgttggtctattttaatgaattcgccgactcttcgctgaatattatggtgtattgctttaccaaaacaacagtatggcaggaatggcttgccgtacagcaggatgtttacctgaaaattattgcgattgtccaggaaaacggcgctgacttcgccttcccaagccagacgctctatatcgatgacccggaggccgcgcctgcgacaaaataa

SEQ ID NO: 38231 - protein, 343 aa, Salmonella typhimurium LT2
MFTEFFLKNAFNLAILFSCGMALLVVRFWLSRNVQWKKGFTFHAAQFFIYAIIIGTIGSILNNAIEDYNLRFISSGVIDFICTSLIALILTIKLFLIINQFEKAQVNKGRDVTSTRILARVIKITIIVAIVLLYGEHFGMSLSGLLTFGGIGGIAVGMAGKDVLSNFFSGIMLYFDRPFSIGDWIRSPDRNIEGTVAEIGWRITRINTFDHRPLYVPNSVFSSISVENPGRMTNRRIKTVIGLRYEDADKIGLIVDAIRNMLQAHRDIDQKQTLLVYFNEFADSSLNIMVYCFTKTTVWQEWLAVQQDVYLKIIAIVQENGADFAFPSQTLYIDDPEAAPATK

SEQ ID NO: 38232 - DNA, 1032 bp, Escherichia coli CFT073
  CDS (1)..(1032): transl_table=11
atgatcgctgaactgtttacaaataatgcgcttaatctggtcattattttcggtagctgcgcagcattgattctgatgagcttttggtttcgccgtggaaatcgtaaaagaaaaggatttttattccatgcggtgcaatttttaatctacaccataattattagtgctgttggtagcatcattaactatgttatagaaaactataaactcaaatttatcaccccaggcgttatcgattttatctgtacgtccctgattgcggttattctgacgattaagctatttctgctgattaatcagtttgaaaaacagcagattaaaaaaggtcgcgatatcaccagtgcgcggatcatgtcgcgcattatcaaaatcaccattattgtggtgcttgttctgctttatggcgaacatttcggcatgagcctttctggcttgttgacctttggtggtattggtggtctggctgtcggtatggccggtaaagatattctgagtaacttcttttccgggattatgctctatttcgaccgtcctttcagtattggcgactggatccgttcaccggacagaaatatcgaaggtacagtagcggaaattggctggcgaattaccaaaattaagacctttgataatcgtccattgtacgtaccgaactcgctgttttcgtcgatcagcgtagaaaatcctggacgaatgaccaaccggcgcattaccacgaccattggtttacgttatgaggatgcggcaaaagtgggcgttattgtcgaagccgtacgtgagatgctgaaaaatcacccggccatcgaccagcgacaaaccttactggtttatttcaaccagtttgctgattcgtcattaaatattatggtttattgctttaccaaaaccacggtatgggctgagtggcttgctgcacagcaagacgtttatttgaagattatcgatattgtacagtcacacggcgcggactttgccttccccagccagacgctgtatatggataacattacaccgccggaccagggtcgctaa

SEQ ID NO: 38233 - protein, 343 aa, Escherichia coli CFT073
MIAELFTNNALNLVIIFGSCAALILMSFWFRRGNRKRKGFLFHAVQFLIYTIIISAVGSIINYVIENYKLKFITPGVIDFICTSLIAVILTIKLFLLINQFEKQQIKKGRDITSARIMSRIIKITIIVVLVLLYGEHFGMSLSGLLTFGGIGGLAVGMAGKDILSNFFSGIMLYFDRPFSIGDWIRSPDRNIEGTVAEIGWRITKIKTFDNRPLYVPNSLFSSISVENPGRMTNRRITTTIGLRYEDAAKVGVIVEAVREMLKNHPAIDQRQTLLVYFNQFADSSLNIMVYCFTKTTVWAEWLAAQQDVYLKIIDIVQSHGADFAFPSQTLYMDNITPPDQGR

SEQ ID NO: 38234 - DNA, 1098 bp, Vibrio parahaemolyticus RIMD 2210633
  CDS (1)..(1098): transl_table=11
atgtcacagtggtttaccgatttacaaaactatgtacaagcgcatagtcaggattggagcggaagtgttctttttatcacgttagccagttttatcgcatggatcgcttggcgagtgatccgttcacgtcttgcaattcttgtcgagaaaaccccttttcattgggataacatgttgcttgatgcgctcaaagcgccagtgagcacactcatttggtgttggcctgctacggtgtcactcggcatcattttagaaagcgaactgaatgacaagatcaattggctgagcacgctcaagctgattcttattatcagcgtcttcgtatggaccgtcatgcgactgatcaccaatatcgaagatttcgttctggaacagaaaaaccgagacgaaaccaccgttcaagccatcgcgaaagttgggcgcttattcatcatcactatcggcgtattaaccatcatgcaggcatttggcttgtctctgtctggtctgctgacgtttggtggtgtgggtggcttaatcgtaggtcttgctgcaaaagatttgctgtcgaacttcttcggtggtttgatgatttacttcgatcgtccattcaaagtaggcgattggattcgctctccagatcgtcaaatcgagggcaccgtagaacgcattggttggcgcatgaccagcatccgcacgtttgataaacgcccactttatgtgcctaactccgtgtttagcaacatcgtggttgaaaacccttcccgaatgctaaaccgtcgaatctacgaagtggtgggcttgcgttacgatgatgccgacaaagtgccagaaatcatcaccgcagtgcgcgaaatgttaaagaatcacaaagatatcgatacgcgccaaaccttgattgtgaactttgatacctttggcccatcatcgttgaacttctttatctacaccttcacgaaaaccgtgaactgggtgagataccacgaagtgaaacaagacgtcttattgaaagtcgtcggcatcattaaagagcacaacgcagatatcgcgttcccaactcaaacactgaagctcgacccgattcaaatggcgaaaaaccaagaagacagcggtttttaa

SEQ ID NO: 38235 - protein, 365 aa, Vibrio parahaemolyticus RIMD 2210633
MSQWFTDLQNYVQAHSQDWSGSVLFITLASFIAWIAWRVIRSRLAILVEKTPFHWDNMLLDALKAPVSTLIWCWPATVSLGIILESELNDKINWLSTLKLILIISVFVWTVMRLITNIEDFVLEQKNRDETTVQAIAKVGRLFIITIGVLTIMQAFGLSLSGLLTFGGVGGLIVGLAAKDLLSNFFGGLMIYFDRPFKVGDWIRSPDRQIEGTVERIGWRMTSIRTFDKRPLYVPNSVFSNIVVENPSRMLNRRIYEVVGLRYDDADKVPEIITAVREMLKNHKDIDTRQTLIVNFDTFGPSSLNFFIYTFTKTVNWVRYHEVKQDVLLKVVGIIKEHNADIAFPTQTLKLDPIQMAKNQEDSGF

SEQ ID NO: 38236 - DNA, 1032 bp, Salmonella enterica subsp. enterica serovar Typhi Ty2
  CDS (1)..(1032): transl_table=11
atgttcactgaattttttctcaaaaacgcatttaatctggcgatacttttcagttgcggtatggcgttgctggtcgtgagattttggctcagccgtaacgtacagtggaagaaaggattcacgttccatgcggcacagttttttatttacgcgattattattggaaccatcgggagcatcctgaataatgctattgaagattataatttgcgttttatctcttccggggtcattgattttatctgcacctcgctcattgcgcttattctgacgataaaacttttcctgattattaaccaatttgaaaaagcacaggtcaataaaggtagagatgtcaccagtacccgtattctggcacgggtcataaaaataaccattattgtcgcgattgtcttactgtatggcgaacattttggcatgagtctgtccggtctgctgacctttggcggtatcggcggtatcgctgttggtatggcgggcaaagatgtcctgagcaattttttctccggtattatgctctatttcgatcgccccttcagtatcggagactggattcgttctcctgacagaaatatcgaaggtacggtcgccgaaatcggctggcgaattacacgaattaacacattcgaccaccgcccgttgtacgtgcctaattccgtcttttcatccattagcgttgagaatccgggacggatgaccaaccgtcgaataaaaacggttattggattacgttacgaagatgccgacaaaattggcctcattgttgacgctatcagaaacatgctgcaggcgcacagcgatatcgatcagaaacagacgctgttggtctattttaatgaattcgccgactcttcgctgaatattatggtgtattgctttaccaaaacaacaatatggcaggaatggcttgctgtacagcaggatgtttacctgaaaattattgcgattgtccaggaaaacggcgctgacttcgccttcccaagccagacgctatatatcgatgacccggaggccgcgcctgcgataaaataa

SEQ ID NO: 38237 - protein, 343 aa, Salmonella enterica subsp. enterica serovar Typhi Ty2
MFTEFFLKNAFNLAILFSCGMALLVVRFWLSRNVQWKKGFTFHAAQFFIYAIIIGTIGSILNNAIEDYNLRFISSGVIDFICTSLIALILTIKLFLIINQFEKAQVNKGRDVTSTRILARVIKITIIVAIVLLYGEHFGMSLSGLLTFGGIGGIAVGMAGKDVLSNFFSGIMLYFDRPFSIGDWIRSPDRNIEGTVAEIGWRITRINTFDHRPLYVPNSVFSSISVENPGRMTNRRIKTVIGLRYEDADKIGLIVDAIRNMLQAHSDIDQKQTLLVYFNEFADSSLNIMVYCFTKTTIWQEWLAVQQDVYLKIIAIVQENGADFAFPSQTLYIDDPEAAPAIK

SEQ ID NO: 38238 - DNA, 1152 bp, Coxiella burnetii RSA 493
  CDS (1)..(1152): transl_table=11
gtgagtccgttattaaatacccataattccattattaaaatcgtccttcttcttattatcggcagcattgccagctttttagaatggttgctttaccgtcgattattgcctcgattccagcgacggcagcgggtttggttgcaagcttttttacaagcgctgcatcaaccgttgcaggtttacatctgggtcatcattcttagttttgtcgcttctatcctggcaacattattttttttcaacggcggttttacggatgccttatcctcaacccgtctgattttcactttggttgttattttttggtttgccatgcggtttattcgctatctagaagatggaatgacgcatcaagcccgtcaaaaagtgggtaaggttagcgatgaaactagcgtacatgccatcgcccaactaacgcgcgtcgttattattgccttcgttttgttaatgttattgcaaacgatcggtattaagatatcggcgttattagcttttggtggcgtgggcgtggctgttattggttttgcagcaaaggatacgttgggtaatttttttggcggcatgatgatttactgggatcgccccttttccgtgggagattggattcgatcgcccgatcgacaaatcgaaggcactgtcgaaaacattggctggcgattgacgcgaattcggacatttgataagcgctcgctttatgttcctaatggaattttatccaatgtggctgttgaaaacccttcacgaatgacaaatcgacgtctcaaaattattgtcggcgtgcgttattcggacgccagcaaaattatggatttagccaaagcgattgaagaaatgttgcgaaacgatcctgaaattgatgtaacccaaactttatttgttaatttattcgagttcgccccttcttcgttaaatatgatggtgtacactttcacaaaaacaacggagtgggtaaagtttcaagccattcagcaaaaaataatgttaaaaattataaatatcattaccacttatggcgctgagtgtgctttccctacgcaaacaattcacgtcccggaagggttattagtaaaaaaagaaaaaggagaaaatgataatgaatatgctgatcgaggcaacgaaaaagagcgacgaggttcagatgattttacctga

SEQ ID NO: 38239 - protein, 383 aa, Coxiella burnetii RSA 493
MSPLLNTHNSIIKIVLLLIIGSIASFLEWLLYRRLLPRFQRRQRVWLQAFLQALHQPLQVYIWVIILSFVASILATLFFFNGGFTDALSSTRLIFTLVVIFWFAMRFIRYLEDGMTHQARQKVGKVSDETSVHAIAQLTRVVIIAFVLLMLLQTIGIKISALLAFGGVGVAVIGFAAKDTLGNFFGGMMIYWDRPFSVGDWIRSPDRQIEGTVENIGWRLTRIRTFDKRSLYVPNGILSNVAVENPSRMTNRRLKIIVGVRYSDASKIMDLAKAIEEMLRNDPEIDVTQTLFVNLFEFAPSSLNMMVYTFTKTTEWVKFQAIQQKIMLKIINIITTYGAECAFPTQTIHVPEGLLVKKEKGENDNEYADRGNEKERRGSDDFT

SEQ ID NO: 38240 - DNA, 1104 bp, Vibrio vulnificus YJ016
  CDS (1)..(1104): transl_table=11
atgaatgattggttaattgagctgcaacgggcactctttagtaatcacaaggattggttcggcagtgtcctgtttattacaggttgcagcgccatcgcatggatcgtctggcgcgtcgtcgcatcgcgcttgcatcagttggcagagaaaacccgacttcactgggatgatcttctactagaagcttttagaacccctatcagcacttttatctggctttggccaggaaccatctctcttggcattatcgtccaaagccaaaccggccaaagcttagcttggcttggcactgcgaaactcatcatggtgatttcgctgctggtttggattgtcatgcgctttgtcaatcgcgcagaagagtatgttttggcggctcaaagctacgacgagaccacagtgcaagccactgctaaggtggcgaggttatttattcttaccatcggcacgctgaccatgatgcaggtgtttggcctgagtttgtctggcttgttaaccttcggtggcgtgggtggtttgatcgtcggtttagcggccaaagaccttctttcaaacttctttggtggtttgatgatctactttgaccgtccattcaaagtgggggattgggtacgctctccggatcgccaaattgaaggcaccgttgagcgcatcggttggcggatgaccattattcgcacttttgataaacgccctctgtatgtaccaaattcggtgtttagcaatattgtggtggaaaacccttcgcgcatgctcaatcgtcgtatttacgaaaccattggtgtccgttatgacgattgcaataagctacctcacatcattgagcaagtgcgcgagatgctgaaacatcaccccgatatcgatgccgaacagaccttgatcgtgaactttaacagctttggttcttcgtcacttaacttcttcgtctacaccttcaccaaaacagtgaactgggtggaataccacggtgtgaagcaagatgtgctactcaaagtgatggagattgttcaaaaaaatggggcggatattgccttcccgactcaaacattgaagtttgaccccgttcaagccgggctggtggaatccaatcgctctcaatcggagtaa

SEQ ID NO: 38241 - protein, 367 aa, Vibrio vulnificus YJ016
MNDWLIELQRALFSNHKDWFGSVLFITGCSAIAWIVWRVVASRLHQLAEKTRLHWDDLLLEAFRTPISTFIWLWPGTISLGIIVQSQTGQSLAWLGTAKLIMVISLLVWIVMRFVNRAEEYVLAAQSYDETTVQATAKVARLFILTIGTLTMMQVFGLSLSGLLTFGGVGGLIVGLAAKDLLSNFFGGLMIYFDRPFKVGDWVRSPDRQIEGTVERIGWRMTIIRTFDKRPLYVPNSVFSNIVVENPSRMLNRRIYETIGVRYDDCNKLPHIIEQVREMLKHHPDIDAEQTLIVNFNSFGSSSLNFFVYTFTKTVNWVEYHGVKQDVLLKVMEIVQKNGADIAFPTQTLKFDPVQAGLVESNRSQSE

SEQ ID NO: 38242 - DNA, 1113 bp, Prochlorococcus marinus str. MIT 9303
  CDS (1)..(1113): transl_table=11
atgcctctgatgacgccccttcccttcaatcttcaggtgccgattgccggccttgttttggccattgtcagctggttgttgctagacactcttggcaggcggttccgctcaggttcgttgcggcgtggattgctgctcagtagcaggcaaagcatttccctgagttgcgcacttgtaggagtgatttgttggctgttggatttgttggatccgtcattgattcaattcccgcgtgatggcgttaaggcgtttggaattcttgtggtcataggtctttcatggacgctgctgtcttggaagaaggagctcaagcaaaaccaagagaggtatgccactcagatgctgcggggctttggggaaaaagacaggcggttcctgttcgatgttgttcagaagagcatcggtattgctgccatggtcattttgtggctggaggtgatgcatctgatgggtatttcaccggccgtgctggttaccgccggtggggttggcgccgttgcattgggtttcggggccaaggggattgtttcgaattccttaagcggccttagtctttacattaaccgtccctttgtggtaagtgattttattgatattccttccgaaaatctttctggaaatgtagaacatatcggttggttttataccaagttgcgttcctctgatcgtcaaccagtgtacataccaaataacatctttacaagtaagccggttgtcaatattgctgatatagacaaccgtaggatttggattgaatttggcgttaattatggcgatcgtagaaggattgagtcgattgtgagtgatcttcagcaggttttagttaatcatccagatgtagatcagagcaagaaaatggccgtgaatttcaccggctatggcgattcgagtctgaatctgcgtttggtctgttattcctctagtggaaatttaagcgatgcttgggccttgcagcagaggctgcttctcaagattggtgatgtggttgaagcgcatggtgcaggaatgccattccccacacgcactttgattcattcaggattgaatcaaatgccgcaaacgatgaatcctctgataggaatcaatcaagaatcgggtgaaggtgcaatttga

SEQ ID NO: 38243 - protein, 370 aa, Prochlorococcus marinus str. MIT 9303
MPLMTPLPFNLQVPIAGLVLAIVSWLLLDTLGRRFRSGSLRRGLLLSSRQSISLSCALVGVICWLLDLLDPSLIQFPRDGVKAFGILVVIGLSWTLLSWKKELKQNQERYATQMLRGFGEKDRRFLFDVVQKSIGIAAMVILWLEVMHLMGISPAVLVTAGGVGAVALGFGAKGIVSNSLSGLSLYINRPFVVSDFIDIPSENLSGNVEHIGWFYTKLRSSDRQPVYIPNNIFTSKPVVNIADIDNRRIWIEFGVNYGDRRRIESIVSDLQQVLVNHPDVDQSKKMAVNFTGYGDSSLNLRLVCYSSSGNLSDAWALQQRLLLKIGDVVEAHGAGMPFPTRTLIHSGLNQMPQTMNPLIGINQESGEGAI

SEQ ID NO: 38244 - DNA, 1122 bp, Thiobacillus denitrificans ATCC 25259
  CDS (1)..(1122): transl_table=11
atgtttgatcttctggaaaactttggcaaatcattcatcgcctcgtcgtggctgccgcaagtcttgctcgtgaccggcgccgtcgtcacggtcaacgtcgtcgcctacaccgttctccactacctcgaaaaagccgcgcgccggaccgccgcggtgtgggacgacgccctgattcaggcggcgcgccggccggcgacgctggcgctctgggtgatcggcgcgtattacgcggcccgcgtcatctacgcgcaccaggagcgcagcttccccgacggcctcacgctcgcgcgcgacagcgtcgtcatcgccgccttcgcctggttcctgctgcgcctgatcggcaacgcggcgcgcggcatgcgggcacgcgcgctcgaaccggggtgcaaggtcgatctgacgaccgtcgacgcgctgtcgaagctcggacgcatcagcatcgtcgttcttgccggtctcgtcgtcgcgcaaaccctcgggttcagcgtctcgggcgtgctcgccttcggcggcataggcggcatcgcggtcggtttcgctgccaaggacatgctcgccaacttcttcggcgggctgacgatctacctcgaccgccccttcgtcgtcggcgaatggatccgctcgccggacaaggagatcgaaggcaccgtcgaatacatcggctggcgtcacacgcgggtgcgtgcgttcaacaagaatccgatctatgtgccgaacgcgctgttcaccaacatcgtcgtcgaaaacccgacccgcatgaccaatcggcgcatcaaggaaacgatcggcatccgctatcaggatttcgacaagatggcggcgatcgtcgccgaggtgaaagccatgctgcaggcgcatcccgaaatcgacagcgagacgacgctgatcgtcagcttcaacgccttcgccgcgtcgtcgctcgatttcttcgtctacaccttcacgcgcactgtcgagtggattcacttccacgaggtcaagcaggacgtgctgctgaaaatcggcgcgatcatcagcgcccacggcgccgagatcgcctatcccacgcgcagcctgcacatcgaatcgaccctcgatccggcctcgtccgagccgcgagcgcccacagccgacgcggcctga

SEQ ID NO: 38245 - protein, 373 aa, Thiobacillus denitrificans ATCC 25259
MFDLLENFGKSFIASSWLPQVLLVTGAVVTVNVVAYTVLHYLEKAARRTAAVWDDALIQAARRPATLALWVIGAYYAARVIYAHQERSFPDGLTLARDSVVIAAFAWFLLRLIGNAARGMRARALEPGCKVDLTTVDALSKLGRISIVVLAGLVVAQTLGFSVSGVLAFGGIGGIAVGFAAKDMLANFFGGLTIYLDRPFVVGEWIRSPDKEIEGTVEYIGWRHTRVRAFNKNPIYVPNALFTNIVVENPTRMTNRRIKETIGIRYQDFDKMAAIVAEVKAMLQAHPEIDSETTLIVSFNAFAASSLDFFVYTFTRTVEWIHFHEVKQDVLLKIGAIISAHGAEIAYPTRSLHIESTLDPASSEPRAPTADAA

SEQ ID NO: 38246 - DNA, 1110 bp, Saccharophagus degradans 2-40
  CDS (1)..(1110): transl_table=11
gtggacgcttttaaatctacgctgcaagagtggttaggggagctagcaggcaaagaaaacctttggattgcagaggtttttattgttgtgttttgcacccttattgttgcgctagtagtaagtacctttttaaacaagctcaagaaaaagtcgctgttaaccaaaaccctttgggatgatgcgttttttcattctttggcagcgccagcaaaatggtttgtatgggtacttggcttaacaactgcagcaacaattgcctcaaagcactccgagtcggccattttagaggccattgccacggttcgccacgtaggctatatcgtaattgttacttggtttgtaacggggtttatctccaaagcagaaaaaaacttaattgaccctgaatacagtcgtcagcctatggatagaaccacggctatggcgctgggtaaattattgcgtatatcggtaattattaccgcgatgttggtggcgttgcagtcgctgggctacagtatttcgggcgtgttagcctttggtggcattggcggtatagcggtaggttttgcggcgaaagacctacttgccaacttttttggcgggttaatggtgtacttagatcgaccatttgctgttggcgattggattcgttcgccagataaaaatatagaaggcgtagtagaagatataggttggcgtcaaacgcgtattcgtactttcgataagcgcccactgtacgtacccaatgcaacctttactcaaatttcagtagaaaatccatcgcgtatgcagcacaggcgcatctacgaaaccgtgggtattcgctacgacgacgccactaaaatggcgggtattgtggctgatgtaaaagcgatgctggtagagcatgaggcgattgatcacaataatacgcttattgttaatttcaacggttttgcttcttcatcgctggattttttcatctattgttttacgcacacaacagattggattgaatttcacgaaattaaacaagacgtgctgttgaaagtgctaaaaattattgaaaagcatgaggctgaatgtgcattcccaacctcaacgctacatgttcccgatggaatacaattaatgcaggcggaaaactaa

SEQ ID NO: 38247 - protein, 369 aa, Saccharophagus degradans 2-40
MDAFKSTLQEWLGELAGKENLWIAEVFIVVFCTLIVALVVSTFLNKLKKKSLLTKTLWDDAFFHSLAAPAKWFVWVLGLTTAATIASKHSESAILEAIATVRHVGYIVIVTWFVTGFISKAEKNLIDPEYSRQPMDRTTAMALGKLLRISVIITAMLVALQSLGYSISGVLAFGGIGGIAVGFAAKDLLANFFGGLMVYLDRPFAVGDWIRSPDKNIEGVVEDIGWRQTRIRTFDKRPLYVPNATFTQISVENPSRMQHRRIYETVGIRYDDATKMAGIVADVKAMLVEHEAIDHNNTLIVNFNGFASSSLDFFIYCFTHTTDWIEFHEIKQDVLLKVLKIIEKHEAECAFPTSTLHVPDGIQLMQAEN

SEQ ID NO: 38248 - DNA, 1110 bp, Photobacterium sp. SKA34
  CDS (1)..(1110): transl_table=11
atggaaaagttcatatattggtggtcgtcgttagaaaagggcgcatctgtcgattggatgtataacattggcttactgttattgttgagctcggtgctatggggtggatggatcttattgtcacgtcgtttagctacggtggcagaaaaaagccagtttatttgggatgatgcattaatcagtgcaatccgtgcgcctattacgctatgtatttgggtttggccaggcttgctgtcaattggcatattaattgataacttgagcacttattccagtacatcattatcgactcttcgtcatctgttgctgatctggaccattatttggacgctatttcgtttaatttccaatatggagcagaccatattggaaaaccgaccgcagcgtgatacgacaaccgttaatgcgatatcgaagattttacgtttaatcgtcatggtgtttggcggtttaattgcgatgcaaaatctaggcttgagcttatcaggcctactaacctttggtggtgttggtggtttagttgtcggtatggcagcgaaagatctgctggcaaatttctttggcggcatgatgttatattttgatcgtccttttaaagtcgttgactggatccgcagtcctgatcgtcaaattgaaggtacggtagagaaaattggcttccgtatgacgattatccgcacctttgataagcgtccactgtatgtgcctaactctgtgtttagctcggtggtggtagaaaatgcatctcgcatgctcaaccgccgtattaagcaaagtgtcggtttacgttattgtgatgctgcagttgtgggtgatgttgtacgtgatatcaaaaccatgctacagaaccacccagatatcgatactcgacaaaccttgattgtgagctttgatacttacggtgcgtcgtcactcaatattttggtatacacctttaccaaaacggttgagtgggctaagtacaaagacgtacagcagaatgtgatgctgaaaattgttgagattgtgcattcgcatagggccgattttgctttcccaaccacaacattagatatgcctgcagcggcatctacggcactggtctctattgagcgtattcagcaagcttga

SEQ ID NO: 38249 - protein, 369 aa, Photobacterium sp. SKA34
MEKFIYWWSSLEKGASVDWMYNIGLLLLLSSVLWGGWILLSRRLATVAEKSQFIWDDALISAIRAPITLCIWVWPGLLSIGILIDNLSTYSSTSLSTLRHLLLIWTIIWTLFRLISNMEQTILENRPQRDTTTVNAISKILRLIVMVFGGLIAMQNLGLSLSGLLTFGGVGGLVVGMAAKDLLANFFGGMMLYFDRPFKVVDWIRSPDRQIEGTVEKIGFRMTIIRTFDKRPLYVPNSVFSSVVVENASRMLNRRIKQSVGLRYCDAAVVGDVVRDIKTMLQNHPDIDTRQTLIVSFDTYGASSLNILVYTFTKTVEWAKYKDVQQNVMLKIVEIVHSHRADFAFPTTTLDMPAAASTALVSIERIQQA

SEQ ID NO: 38250 - DNA, 1122 bp, Oceanospirillum sp. MED92
  CDS (1)..(1122): transl_table=11
atgattgatttgctaaatggattgttagcgcaatacatgccggaatatggtgagtctgcatggcttattttgtccggtgctatctgtgtgatcgctgttgttgctgatttggttgctcgatcaaccattgcgcagcttatgcgtcaggcagagaaaacaaagattctttgggatgatgtctttttaaactcttttagtcgtcctttgctctttttgatctggttagccgcgggctattggttgttgcagatttttgagcagcactttgctattcaaatccttggtgatgaaaatccgttacctaaattggttccggttattctatttgcctggtcatgcttgcgcttcttgaagcggcttgagcaggttctggttatgccggatcgaatgaaaaagccgatggaccctacaacagtgggggcgcttagtcggcttttgcgtttgatcgtgaccattattatcgtcctgatcattatgcagagttacggctatagcatatcgggcatcctggcatttggtggtatcggtggtattgcggttggttttgccgccaaagatctgttggcgaacttctttggtgggttgatgatctatctggacaggcctttcaaagttggcgattggatacgttcccctgataagcagatcgaaggtacggtcgaggatattggctggcgtcagacgcgtatccgcacttttgataagcgtcctttatacgtgccgaattctacctttgccaatatttcggtagaaaatccttcgcgaatgacaaatcgacgaatctatgagtatatcggggttcgttatgatgatgcggcgcaagttgaacagatcattgctgatgtaaaagcgatgctaaagagtcatcctgaaatagatacccgtcagacactcattgtcaatctggatcggttcgggccttcttctctggatttctttatctataccttcacacagacaacggactggatcaggtttcatgagattaagcaggatgtcatgcttaagattatgcagataattgaatctaatggggctgaattcgcctttcctaccactactgttcatttgcatgggatgccctccgggctccactcagaagcgactgctgaagccccttaa

SEQ ID NO: 38251 - protein, 373 aa, Oceanospirillum sp. MED92
MIDLLNGLLAQYMPEYGESAWLILSGAICVIAVVADLVARSTIAQLMRQAEKTKILWDDVFLNSFSRPLLFLIWLAAGYWLLQIFEQHFAIQILGDENPLPKLVPVILFAWSCLRFLKRLEQVLVMPDRMKKPMDPTTVGALSRLLRLIVTIIIVLIIMQSYGYSISGILAFGGIGGIAVGFAAKDLLANFFGGLMIYLDRPFKVGDWIRSPDKQIEGTVEDIGWRQTRIRTFDKRPLYVPNSTFANISVENPSRMTNRRIYEYIGVRYDDAAQVEQIIADVKAMLKSHPEIDTRQTLIVNLDRFGPSSLDFFIYTFTQTTDWIRFHEIKQDVMLKIMQIIESNGAEFAFPTTTVHLHGMPSGLHSEATAEAP

SEQ ID NO: 38252 - DNA, 1101 bp, marine gamma proteobacterium HTCC2207
  CDS (1)..(1101): transl_table=11
atgaaaaagatagaaaactggttggtcaatttgacaggtgaacagtacctctgggtgctggagttatttgttatcgtagttctggctctgggtctgggtatggtgattaatcgagttgtcgacaaactcgaagtgcaggccgcgaagaccaaaactgtatgggatgatgccctaatcgaagcctgccggcgcccactgatctgggtggtgtggattcttggcgtcaattttgctgccgggattgctgcgcaaaaaatggattctggactttatgatctggtggatccggttaatcgtttggcgctgatctttttgggcgttatgtttctgaccaactttattagtcgcgctgagcgcaatctggtgcatccggactatattgccaaaccgatggatgagaccactgtgcgtgccgtgggcaagttgctccgcgccgcggtgattatcaccggtgtgttaatcgccatgcagctcttcggttatagcatttcaggcctgctagcatttggtggtatcggcggtattgccatgggttttgccgccaaggatctgctggctaacttttttggtggtttgatgatctacctagatcgacctttctcagtcggagactgggtgcgctcaccagatcaagagattgagggcacagtggaagatattggctggcgactgacgcgaattagaacctttgacaagcgtccgttatatatccccaatgccgtatttgccaatatttcagtggagaatccttcgcgaatgaccaaccgtcgaatatacgaaaccattggtgtgcgctacgatgatctggcacagatgggcccaattattgagcaggtgaaagcgatgttgttggcccatcctgatattgataccaatcaaacaatgatggttaacttcaataagtttgccgctagctccctagacttttttatctatgtctttaccaagaccaccaactgggaggcttatcatcaagtgaagcaggatgtactgctaaaggtggccgatattattgcggcaaatcaggccgaggttgcctttccaacctcaacgttgcatgttccagatggtatccaagtgaatgcggtaaaggatcagtag

SEQ ID NO: 38253 - protein, 366 aa, marine gamma proteobacterium HTCC2207
MKKIENWLVNLTGEQYLWVLELFVIVVLALGLGMVINRVVDKLEVQAAKTKTVWDDALIEACRRPLIWVVWILGVNFAAGIAAQKMDSGLYDLVDPVNRLALIFLGVMFLTNFISRAERNLVHPDYIAKPMDETTVRAVGKLLRAAVIITGVLIAMQLFGYSISGLLAFGGIGGIAMGFAAKDLLANFFGGLMIYLDRPFSVGDWVRSPDQEIEGTVEDIGWRLTRIRTFDKRPLYIPNAVFANISVENPSRMTNRRIYETIGVRYDDLAQMGPIIEQVKAMLLAHPDIDTNQTMMVNFNKFAASSLDFFIYVFTKTTNWEAYHQVKQDVLLKVADIIAANQAEVAFPTSTLHVPDGIQVNAVKDQ

SEQ ID NO: 38254 - DNA, 1086 bp, Oceanobacter sp. RED65
  CDS (1)..(1086): transl_table=11
atgagctttgattaccaatattggttggggatttggtggatagaatcgatcgcgatagcggtagtgggcttgctcgcctattttgtgattagtttaattattgatcgtttaaaagcaaaagcggaaaaaacccgtattcaatttgatgatgcggtgatagaggctgtgcaatcgccgattagttggggtgtattgtttactacagcttggattattttaagtaaagtgcaaaaccactttgaaagtattgtactgccaagtcagcagaatacttttacgattgtttattctgcgttgttctgctggtttatgctgagtctgattcgtattcgtgagaatcaaatttggaaaggtcaggttgagacaaaggcagacaaaacgacgattagcggtatttttaaagtattacgtctcatcgttattattcttactttgttagtagtgtttcaaacactgggtgtatccattagtggtattgttgcttttggtggtgtaggtggtgctgctgtcgcctttgctgcgcgcgacatgttggccaatttttttggtggcttaatggtctttttagataagccgttttcagtaggtgattggatccgctctcctgatcaaaatattgaaggttctgttgagaacattgggtggcgtattacaaagattcgcacgtttgatcttcgtcccttatatgttccaaattccgtttttactaatatcagtattgaaaatccacagcgaatgttgcaccgcagaatctacgaaaaggtcggtattcgctataaggatttctctcaaatcaaagctatctgtgatgatgtcgaagctatgctaaacgagcacgaagacattaacgatcagcaaacactaatggttaactttaatcagtttgcggcatcctctttggagttctttatatattgctttacccataccaaacattgggagacgtatcacaaggttaagcaagacgtgctaatcaaggtgggagagatcatccagaaacatgaggctgaaatagcgtttccaacgcacactgtgcatatggagacaccacagtttgccggtttgaacgatgaggctcctcaatga

SEQ ID NO: 38255 - protein, 361 aa, Oceanobacter sp. RED65
MSFDYQYWLGIWWIESIAIAVVGLLAYFVISLIIDRLKAKAEKTRIQFDDAVIEAVQSPISWGVLFTTAWIILSKVQNHFESIVLPSQQNTFTIVYSALFCWFMLSLIRIRENQIWKGQVETKADKTTISGIFKVLRLIVIILTLLVVFQTLGVSISGIVAFGGVGGAAVAFAARDMLANFFGGLMVFLDKPFSVGDWIRSPDQNIEGSVENIGWRITKIRTFDLRPLYVPNSVFTNISIENPQRMLHRRIYEKVGIRYKDFSQIKAICDDVEAMLNEHEDINDQQTLMVNFNQFAASSLEFFIYCFTHTKHWETYHKVKQDVLIKVGEIIQKHEAEIAFPTHTVHMETPQFAGLNDEAPQ

SEQ ID NO: 38256 - DNA, 1125 bp, marine gamma proteobacterium HTCC2143
  CDS (1)..(1125): transl_table=11
atggaaaatatgcaatcattaattgaaagtccatcattgcttggactaagtttttccgagtacccttgggtgtgggaagttttcgcactcgtactaatcactctatttgtacgttatgcgctatggctggtattgcgaaaattggagctgcaatttcaaaaatccgacaatctttgggatgatgccatgctcgaggcggtccgcaagcctgccgattttttagtgtggttgatgggtttcagttgggttctggaggtgttgattgaacaatcgggtgcggctatttttaccgccattgcaccaatgcgatcactgcttttcattgcattattggcttggtttctaattcgtgtcataaaacaggttgagcaacgtttaacgtcaccggaatataccagcgaccctgtcgatacgacgactgtattggctttgggcaagctggtgcgagtagcggtatttatcacatcgggtttagtgataatgcaaaccatgggatacagtatttcaggtgtgctggcgtttggcggcgttggtggtattgctgttggcttcgctgccaaagatttattggctaatttttttggcggattaatgatctacttggatcggccattttctgtgggggattggattcgctctcccgatcaagaaatcgaaggcacggtagaggatattggttggcgccaaacacgtattcgcacatttgataagcgtcccttgtatattcccaatgcaacattcagccacatttccgttgaaaacccatcgcgcatgcttaatcgacgaatcaaggaaactataggggtccgctatgatgacgcagccgtgttgccactgatactcgatgatgttgagggcatgttgagggcgcatccagatattgataccagtcaaacactcatggttaactttaatagtttcggtccgtcgtcgctcgatttttttatttacaccttcacgcgcaccacaaattggatagagtatcatgctattaagcagcgtattcttttgacgatactcgatataattatcggccatggtgctgatgttgcgttccccactacaacgattaaagtacctgagccaatcacctctgttaatggtttgggaggtggcgatcgatga

SEQ ID NO: 38257 - protein, 374 aa, marine gamma proteobacterium HTCC2143
MENMQSLIESPSLLGLSFSEYPWVWEVFALVLITLFVRYALWLVLRKLELQFQKSDNLWDDAMLEAVRKPADFLVWLMGFSWVLEVLIEQSGAAIFTAIAPMRSLLFIALLAWFLIRVIKQVEQRLTSPEYTSDPVDTTTVLALGKLVRVAVFITSGLVIMQTMGYSISGVLAFGGVGGIAVGFAAKDLLANFFGGLMIYLDRPFSVGDWIRSPDQEIEGTVEDIGWRQTRIRTFDKRPLYIPNATFSHISVENPSRMLNRRIKETIGVRYDDAAVLPLILDDVEGMLRAHPDIDTSQTLMVNFNSFGPSSLDFFIYTFTRTTNWIEYHAIKQRILLTILDIIIGHGADVAFPTTTIKVPEPITSVNGLGGGDR

SEQ ID NO: 38258 - DNA, 26 bp, Artificial sequence
  primer
atgatcgctgaactgtttacaaataa

SEQ ID NO: 38259 - DNA, 21 bp, Artificial sequence
  primer
ttagcgaccctgttccggcgg

SEQ ID NO: 38260 - protein, 298 aa, Artificial sequence
  consensus sequence
  Variant (2)..(52): Xaa in position 2 to 52 is any amino acid
  Variant (53)..(55): Xaa in position 53 to 55 is any or no amino acid
  Variant (57)..(59): Xaa in position 57 to 59 is any amino acid
  Variant (61)..(68): Xaa in position 61 to 68 is any amino acid
  Variant (69)..(78): Xaa in position 69 to 78 is any or no amino acid
  Variant (80)..(80): Xaa in position 80 is any amino acid
  Variant (82)..(99): Xaa in position 82 to 99 is any amino acid
  Variant (101)..(106): Xaa in position 101 to 106 is any amino acid
  Variant (108)..(108): Xaa in position 108 is any amino acid
  Variant (110)..(110): Xaa in position 110 is any amino acid
  Variant (113)..(113): Xaa in position 113 is any amino acid
  Variant (115)..(115): Xaa in position 115 is any amino acid
  Variant (119)..(119): Xaa in position 119 is any amino acid
  Variant (122)..(123): Xaa in position 122 to 123 is any amino acid
  Variant (126)..(126): Xaa in position 126 is any amino acid
  Variant (128)..(128): Xaa in position 128 is any amino acid
  Variant (131)..(131): Xaa in position 131 is any amino acid
  Variant (133)..(133): Xaa in position 133 is any amino acid
  Variant (137)..(137): Xaa in position 137 is any amino acid
  Variant (139)..(139): Xaa in position 139 is any amino acid
  Variant (141)..(141): Xaa in position 141 is any amino acid
  Variant (143)..(143): Xaa in position 143 is any amino acid
  Variant (148)..(149): Xaa in position 148 to 149 is any amino acid
  Variant (158)..(159): Xaa in position 158 to 159 is any amino acid
  Variant (165)..(166): Xaa in position 165 to 166 is any amino acid
  Variant (171)..(171): Xaa in position 171 is any amino acid
  Variant (173)..(173): Xaa in position 173 is any amino acid
  Variant (175)..(175): Xaa in position 175 is any amino acid
  Variant (179)..(179): Xaa in position 179 is any amino acid
  Variant (187)..(188): Xaa in position 187 to 188 is any amino acid
  Variant (190)..(191): Xaa in position 190 to 191 is any amino acid
  Variant (193)..(193): Xaa in position 193 is any amino acid
  Variant (198)..(198): Xaa in position 198 is any amino acid
  Variant (201)..(201): Xaa in position 201 is any amino acid
  Variant (206)..(209): Xaa in position 206 to 209 is any amino acid
  Variant (211)..(211): Xaa in position 211 is any amino acid
  Variant (214)..(214): Xaa in position 214 is any amino acid
  Variant (216)..(221): Xaa in position 216 to 221 is any amino acid
  Variant (223)..(228): Xaa in position 223 to 228 is any amino acid
  Variant (231)..(232): Xaa in position 231 to 232 is any amino acid
  Variant (234)..(235): Xaa in position 234 to 235 is any amino acid
  Variant (238)..(239): Xaa in position 238 to 239 is any amino acid
  Variant (243)..(243): Xaa in position 243 is any amino acid
  Variant (245)..(245): Xaa in position 245 is any amino acid
  Variant (247)..(248): Xaa in position 247 to 248 is any amino acid
  Variant (250)..(251): Xaa in position 250 to 251 is any amino acid
  Variant (255)..(258): Xaa in position 255 to 258 is any amino acid
  Variant (260)..(260): Xaa in position 260 is any amino acid
  Variant (263)..(263): Xaa in position 263 is any amino acid
  Variant (265)..(266): Xaa in position 265 to 266 is any amino acid
  Variant (268)..(274): Xaa in position 268 to 274 is any amino acid
  Variant (276)..(276): Xaa in position 276 is any amino acid
  Variant (278)..(278): Xaa in position 278 is any amino acid
  Variant (281)..(283): Xaa in position 281 to 283 is any amino acid
  Variant (285)..(289): Xaa in position 285 to 289 is any amino acid
  Variant (291)..(292): Xaa in position 291 to 292 is any amino acid
  Variant (296)..(297): Xaa in position 296 to 297 is any amino acid
AXXXXXXXXXXXXXXXXXXXXXXXXXXXXXXXXXXXXXXXXXXXXXXXXXXXXXXIXXXEXXXXXXXXXXXXXXXXXXDXTXXXXXXXXXXXXXXXXXXLXXXXXXGXSXSGXLXFGGXGGXXVGXAXKDXLXNFFXGXMXYXDRPFXXGDWIRSPDXXIEGTVXXIGWRXTXIXTFDXRPLYVPNXXFXXIXVENPXRMXNRRIXXXXGXRYXDXXXXXXIXXXXXXMLXXHXXIDXXQTLXVXFXXFXXSSLXXXXYXFTXTXXWXXXXXXXQXVXLKXXXIXXXXXAXXAFPXXT

SEQ ID NO: 38261 - protein, 60 aa, Artificial sequence
  protein pattern
  Variant (3)..(3): Xaa in position 3 is any amino acid
  Variant (4)..(4): Xaa in position 4 is Ile or Val
  Variant (8)..(8): Xaa in position 8 is Ile or Val
  Variant (13)..(13): Xaa in position 13 is any amino acid
  Variant (14)..(14): Xaa in position 14 is Glu, Asn or Gln
  Variant (18)..(18): Xaa in position 18 is Ser, Thr or Val
  Variant (20)..(20): Xaa in position 20 is any or no amino acid
  Variant (22)..(22): Xaa in position 22 is any or no amino acid
  Variant (27)..(27): Xaa in position 27 is any amino acid
  Variant (29)..(29): Xaa in position 29 is any amino acid
  Variant (31)..(31): Xaa in position 31 is any amino acid
  Variant (35)..(35): Xaa in position 35 is any amino acid
  Variant (37)..(37): Xaa in position 37 is Pro or Ser
  Variant (40)..(40): Xaa in position 40 is Ile or Val
  Variant (43)..(43): Xaa in position 43 is Ala, Gly or Ser
  Variant (44)..(44): Xaa in position 44 is any amino acid
  Variant (45)..(45): Xaa in position 45 is Phe or Leu
  Variant (46)..(46): Xaa in position 46 is Ala, Ser or Thr
  Variant (47)..(47): Xaa in position 47 is any amino acid
  Variant (48)..(48): Xaa in position 48 is Ile or Val
  Variant (49)..(49): Xaa in position 49 is Ala, Ser or Val
  Variant (50)..(50): Xaa in position 50 is Ile or Val
  Variant (54)..(54): Xaa in position 54 is Gly, Gln or Ser
  Variant (57)..(58): Xaa in position 57 to 58 is any amino acid
PFXXGDWXRSPDXXIEGXVXEXIGWRXTXIXTFDXRXLYXPNXXXXXXXXENPXRMXXRR

SEQ ID NO: 38262 - protein, 38 aa, Artificial sequence
  protein pattern
  Variant (2)..(3): Xaa in position 2 to 3 is any amino acid
  Variant (5)..(5): Xaa in position 5 is any amino acid
  Variant (6)..(6): Xaa in position 6 is Ala, Asp or Glu
  Variant (9)..(10): Xaa in position 9 to 10 is any amino acid
  Variant (11)..(11): Xaa in position 11 is Asn, Gln or Thr
  Variant (13)..(13): Xaa in position 13 is Leu or Met
  Variant (14)..(14): Xaa in position 14 is Ile, Leu or Met
  Variant (16)..(16): Xaa in position 16 is any amino acid
  Variant (17)..(17): Xaa in position 17 is Phe or Leu
  Variant (18)..(18): Xaa in position 18 is Asp or Asn
  Variant (19)..(19): Xaa in position 19 is any amino acid
  Variant (20)..(20): Xaa in position 20 is Phe or Tyr
  Variant (21)..(21): Xaa in position 21 is Ala or Gly
  Variant (22)..(22): Xaa in position 22 is Ala, Asp, Pro or Ser
  Variant (26)..(26): Xaa in position 26 is Asp or Asn
  Variant (27)..(27): Xaa in position 27 is Phe or Ile
  Variant (28)..(28): Xaa in position 28 is Phe, Leu or Met
  Variant (29)..(29): Xaa in position 29 is Ile or Val
  Variant (31)..(31): Xaa in position 31 is Cys, Thr or Val
  Variant (34)..(34): Xaa in position 34 is any amino acid
  Variant (36)..(36): Xaa in position 36 is Thr or Val
  Variant (37)..(37): Xaa in position 37 is any amino acid
LXXHXXIDXXXTXXVXXXXXXXSSLXXXXYXFTXTXXW

SEQ ID NO: 38263 - protein, 58 aa, Artificial sequence
  protein pattern
  Variant (2)..(9): Xaa in position 2 to 9 is any amino acid
  Variant (10)..(13): Xaa in position 10 to 13 is any or no amino acid
  Variant (15)..(19): Xaa in position 15 to 19 is any amino acid
  Variant (20)..(20): Xaa in position 20 is any or no amino acid
  Variant (22)..(22): Xaa in position 22 is any amino acid
  Variant (24)..(24): Xaa in position 24 is Ile, Leu or Val
  Variant (27)..(27): Xaa in position 27 is Ile, Leu or Val
  Variant (29)..(29): Xaa in position 29 is Ala or Thr
  Variant (33)..(33): Xaa in position 33 is Ile or Val
  Variant (36)..(36): Xaa in position 36 is Ile or Leu
  Variant (37)..(37): Xaa in position 37 is Ala, Ile or Val
  Variant (38)..(38): Xaa in position 38 is Met or Val
  Variant (40)..(40): Xaa in position 40 is Phe, Leu or Met
  Variant (42)..(42): Xaa in position 42 is Ala or Gly
  Variant (45)..(45): Xaa in position 45 is Ile, Leu, Met or Val
  Variant (47)..(47): Xaa in position 47 is Ala or Ser
  Variant (51)..(51): Xaa in position 51 is Gly or Ser
  Variant (53)..(53): Xaa in position 53 is Ile, Leu or Met
  Variant (54)..(54): Xaa in position 54 is any amino acid
  Variant (55)..(55): Xaa in position 55 is Ile, Leu or Val
  Variant (57)..(57): Xaa in position 57 is Phe or Leu
RXXXXXXXXXXXXLXXXXXXGXSXSGXLXFGGXGGXXXGXAXKDXLXNFFXGXXXYXD

SEQ ID NO: 38264 - protein, 30 aa, Artificial sequence
  protein pattern
  Variant (2)..(2): Xaa in position 2 is Asp or Asn
  Variant (4)..(4): Xaa in position 4 is any or no amino acid
  Variant (6)..(6): Xaa in position 6 is any or no amino acid
  Variant (8)..(8): Xaa in position 8 is Ile or Val
  Variant (9)..(10): Xaa in position 9 to 10 is any amino acid
  Variant (12)..(12): Xaa in position 12 is Ile or Val
  Variant (13)..(16): Xaa in position 13 to 16 is any amino acid
  Variant (18)..(18): Xaa in position 18 is Asp or Glu
  Variant (19)..(19): Xaa in position 19 is any amino acid
  Variant (21)..(21): Xaa in position 21 is Phe or Tyr
  Variant (23)..(23): Xaa in position 23 is Ser or Thr
  Variant (24)..(24): Xaa in position 24 is any amino acid
  Variant (25)..(25): Xaa in position 25 is Ser or Thr
  Variant (26)..(26): Xaa in position 26 is Leu or Val
  Variant (27)..(27): Xaa in position 27 is any amino acid
  Variant (28)..(28): Xaa in position 28 is Phe, Ile, Leu, Met or Val
  Variant (29)..(29): Xaa in position 29 is any amino acid
  Variant (30)..(30): Xaa in position 30 is Ala, Asp, Gly, Asn, Pro, Ser or Thr
QXVXLXKXXXIXXXXXAXXAXPXXXXXXXX

SEQ ID NO: 38265 - protein, 21 aa, Artificial sequence
  protein pattern
  Variant (2)..(5): Xaa in position 2 to 5 is any amino acid
  Variant (7)..(7): Xaa in position 7 is Ile, Leu or Val
  Variant (10)..(10): Xaa in position 10 is any amino acid
  Variant (12)..(12): Xaa in position 12 is any amino acid
  Variant (13)..(13): Xaa in position 13 is Ala, Asp, Asn, Ser or Thr
  Variant (14)..(14): Xaa in position 14 is any amino acid
  Variant (15)..(15): Xaa in position 15 is Ile, Leu, Met or Val
  Variant (16)..(17): Xaa in position 16 to 17 is any amino acid
  Variant (19)..(19): Xaa in position 19 is any amino acid
  Variant (20)..(20): Xaa in position 20 is Ala, Asp, Glu or Thr
  Variant (21)..(21): Xaa in position 21 is Ala, Asp, Glu or Gln
IXXXXGXRYXDXXXXXXIXXX

SEQ ID NO: 38266 - DNA, 669 bp, Escherichia coli
  CDS (1)..(669): transl_table=11
atgcgtaccacatcatttgcgaaagttgcagctttatgcggcttattggctctgtctggttgtgcatctaaaatcacccagccagataaatattctggttttttaaacaattactctgatttaaaagaaacaacctcggctacaggtaaacctgttttacgttgggtagacccgagttttgatcaaagcaaatatgacagcatcgtctggaacccaatcacttattatccggtaccgaaaccgtcgacccaggtagggcagaaagttctggataaaattttgaactataccaacaccgaaatgaaagaagcgatagcgcagcgtaaaccactggttaccaccgctgggccgcgtagtctgattttccgtggggccattaccggtgtagataccagcaaagaagggctgcaattctatgaagtggttcctgttgcattagtggttgcggggacgcaaatggctacaggccaccgtaccatggatactcgcctctattttgaaggtgagctgattgatgcagcgactaataaaccggttatcaaagtcgttcgtcagggcgaaggtaaagacctgaataacgaaagtacgccaatggctttcgaaaatattaaacaagttattgatgacatggcgaccgatgccaccatgtttgacgttaacaaaaagtaa

SEQ ID NO: 38267 - protein, 222 aa, Escherichia coli
MRTTSFAKVAALCGLLALSGCASKITQPDKYSGFLNNYSDLKETTSATGKPVLRWVDPSFDQSKYDSIVWNPITYYPVPKPSTQVGQKVLDKILNYTNTEMKEAIAQRKPLVTTAGPRSLIFRGAITGVDTSKEGLQFYEVVPVALVVAGTQMATGHRTMDTRLYFEGELIDAATNKPVIKVVRQGEGKDLNNESTPMAFENIKQVIDDMATDATMFDVNKK

SEQ ID NO: 38268 - DNA, 669 bp, Salmonella typhimurium LT2
  CDS (1)..(669): transl_table=11
atgcgtactcatactttatttaaagttgcagtgcttactggcttgctggcgttatccggctgtgcgtctaaagtcacacagccggataagtattctggattcttaaaaaattattcggacctgcaggaaactacctccgccacggggaaaccggtgttgcgctgggtagatccacatttcaatgactctaactatgacagtattgtttacaatccgataacatactatcccgtccccaaaccaacgacccaggtcgggcagcaagttcttgataaactgctggcttatacgaacactaaagtaaaatcagcaattgaacagcgcaaaccgctggtcacgacgccagggccgcgcagtttgattttccgcggggcgattacgggcgtggataccagcaaagaagggctgcaattctatgaggtgatccctgtagcgctgattgtggcgggcacgcaaatggcgacgggccaccggaccatggatacccacctctattttgaaggtgagctgatagatgccgcgaccaacaagccggtcgtcaaggtagtacgccagggtgaaggtaaagacctgagcaattccagtacgccaatggcgtttgagacgttgaaacaggtcgtggatgatatggcgacggatacctctatgtttgacgttaataaaaaataa

SEQ ID NO: 38269 - protein, 222 aa, Salmonella typhimurium LT2
MRTHTLFKVAVLTGLLALSGCASKVTQPDKYSGFLKNYSDLQETTSATGKPVLRWVDPHFNDSNYDSIVYNPITYYPVPKPTTQVGQQVLDKLLAYTNTKVKSAIEQRKPLVTTPGPRSLIFRGAITGVDTSKEGLQFYEVIPVALIVAGTQMATGHRTMDTHLYFEGELIDAATNKPVVKVVRQGEGKDLSNSSTPMAFETLKQVVDDMATDTSMFDVNKK

SEQ ID NO: 38270 - DNA, 822 bp, Pseudomonas putida KT2440
  CDS (1)..(822): transl_table=11
ttgagtgggcagcaacgtttgcagcgcccctcagggcgagccacgcactgtgttcttttcaaagaggattaccccgtccactggccaactgcctcgcacctgctagcgttgttgaggccgacctctcacggatgccttttcatcatgaaatcattgcctcgcattaccctgttgtgcgccgcgctgcttgccgtggccgcctgctccagcaaccgcgtggaccccaaggattactccggcttcctcaaagactacagccggctgcaagaagccaagagcccgtcgggtgacccggtgatgcgctggatcgaccccaaggtcaatatcaaccagtacagcaaggtgttcgtcgagccaagccagttctaccccaagccgcagccaacagcggttatctcgcagcagacgctgcaggaaatcacccgctacttcaacgaggccctgcgccgcgaaatggccagcgtgatgccgttggccaaggggcctggcccgggcgtgatcgtggtgcgcccggcgatcacggcagtgtccaccagtaacgagggcctcaggccttacgaggtgatccctatcgcgcttatcgcggcaggtgtgaataccgccatgggtggccgtgaccaggacgtggatgtcggtgtggaggcagcgttcctggacggctccagccagaaggtactggcccaggtggtccgcaagggcgcgggccaggagctggagaacgatacccagaagctgaccttgaatgacgtcaagccggtgctcgatggctgggccaaggacatgcgtgcgagcttcctggcagcgaagcagaaaggccgctga

SEQ ID NO: 38271 - protein, 273 aa, Pseudomonas putida KT2440
MSGQQRLQRPSGRATHCVLFKEDYPVHWPTASHLLALLRPTSHGCLFIMKSLPRITLLCAALLAVAACSSNRVDPKDYSGFLKDYSRLQEAKSPSGDPVMRWIDPKVNINQYSKVFVEPSQFYPKPQPTAVISQQTLQEITRYFNEALRREMASVMPLAKGPGPGVIVVRPAITAVSTSNEGLRPYEVIPIALIAAGVNTAMGGRDQDVDVGVEAAFLDGSSQKVLAQVVRKGAGQELENDTQKLTLNDVKPVLDGWAKDMRASFLAAKQKGR

SEQ ID NO: 38272 - DNA, 669 bp, Salmonella enterica subsp. enterica serovar Typhi Ty2
  CDS (1)..(669): transl_table=11
atgcgtactcatactttatttaaagttgcagtgcttactggcttgctggcgttatccggctgtgcgtctaaagtcacacagccggataagtattctggattcttaaaaaattattcggacctgaaggagactacttccgccacggggaaaccggtgttgcgctgggtagatccacattttaatgactctaactatgacagtattgtttacaatccgataacatattaccccatccccaagccaacgacccaggtcggacagcaagttcttgataaactgctggcttatacgaacactaaagtaaaatcagcaattgaacagcgcaaaccgctggtcacgacggcagggccgcgcagtttgattttccgcgaggcgattacgggcgtggataccagcaaagaagggctgcaattctatgaggtgatccctgtagcgctgattgtggcgggcacgcaaatggcgacgggccaccggaccatggatacccacctctattttgagggtgagctgatagatgccgcgaccaacaagccggtcgtcaaggtagtgcgccagggcgaaggtaaagacctgagtaattccagtacgccaatggcgtttgagacgttgaaacaggttgtggatgatatggcgacggatacctctatgtttgacactaacaaaaaataa

SEQ ID NO: 38273 - protein, 222 aa, Salmonella enterica subsp. enterica serovar Typhi Ty2
MRTHTLFKVAVLTGLLALSGCASKVTQPDKYSGFLKNYSDLKETTSATGKPVLRWVDPHFNDSNYDSIVYNPITYYPIPKPTTQVGQQVLDKLLAYTNTKVKSAIEQRKPLVTTAGPRSLIFREAITGVDTSKEGLQFYEVIPVALIVAGTQMATGHRTMDTHLYFEGELIDAATNKPVVKVVRQGEGKDLSNSSTPMAFETLKQVVDDMATDTSMFDTNKK

SEQ ID NO: 38274 - DNA, 657 bp, Shigella flexneri 2a str. 2457T
  CDS (1)..(657): transl_table=11
atgcgtaccacatcatttgcgaaagttgcagctttatgcggcttgttggctctgtctggttgtgcctctaaaatcacccagccagataaatataacaattactctgatttaaaagaaacaacctcagcaacaggtaaacctgttttacgttgggtagacccgagttttgatcaaagcaaatatgacagcatcgtctggaacccaatcacttattatccggtaccaaaaccttctacccaggtagggcagaaagttctggataaaattttgaactataccaacaccgaaatgaaagaagcgatagcgcagcgtaaaccagtggttaccaccgctgggccgcgtagtctgattttccgtggggccattaccggtgtagataccagcaaagaagggctgcaattctatgaagtggttcctgttgcattagtggttgcggggacgcaaatggctacaggccaccgtaccatggatactcgcctctattttgaaggtgagctgattgatgcagcgactaataaaccggttatcaaagtcgttcgtcagggcgaaggtaaagacctgaataacgaaagtacgccaatggctttcgaaaatattaaacaagttattgatgacatggcgaccgatgccaccatgtttgacgttaacaaaaagtag

SEQ ID NO: 38275 - protein, 218 aa, Shigella flexneri 2a str. 2457T
MRTTSFAKVAALCGLLALSGCASKITQPDKYNNYSDLKETTSATGKPVLRWVDPSFDQSKYDSIVWNPITYYPVPKPSTQVGQKVLDKILNYTNTEMKEAIAQRKPVVTTAGPRSLIFRGAITGVDTSKEGLQFYEVVPVALVVAGTQMATGHRTMDTRLYFEGELIDAATNKPVIKVVRQGEGKDLNNESTPMAFENIKQVIDDMATDATMFDVNKK

SEQ ID NO: 38276 - DNA, 681 bp, Bordetella bronchiseptica RB50
  CDS (1)..(681): transl_table=11
atgaagtcgtccctgtatcgaatcgcagcgctcagcgccgctgccctgttgctggccggctgcgccagccagcgcgccccgaaggagtcgggctttctcggcgattactcgcagttgcgcgaggagcaagtgcccggcggcgcgcggctgatctaccgcgacgccgcgctcaagccgcgccagtacaccgccatgtggctgtcgccggtcgagtactatcccagcccgcaaccgtcggcgcaggtgtcgatggaaacgctgaccgaactgcagaactacctggaccagtcgctgcgccgcaagatcggccgcgagatccgcctggtcaacggccccggcccgggcgtggccaaggcgcgcatcgcgatcacggcggtcggcagcgaaagcgaggcgctggcggcctaccagtacatccccgtggcgctggccatcaccggcgccagggccgtgctggaaggcggccggccgcagcaggccaccatcgcgatcgaaagcaaggtcaccgacagccagacaggccagctgctgtgggcgtcggtgcgcgggggcactggcgagcgcgtgcgcgccatcgcccagggccaggcctcggtgccggcctcggcgctcaagccgctgatcgacgaatggaccgataacgtcgcgcgtgaaatacgcaactacgtgcgcagcaaataa

SEQ ID NO: 38277 - protein, 226 aa, Bordetella bronchiseptica RB50
MKSSLYRIAALSAAALLLAGCASQRAPKESGFLGDYSQLREEQVPGGARLIYRDAALKPRQYTAMWLSPVEYYPSPQPSAQVSMETLTELQNYLDQSLRRKIGREIRLVNGPGPGVAKARIAITAVGSESEALAAYQYIPVALAITGARAVLEGGRPQQATIAIESKVTDSQTGQLLWASVRGGTGERVRAIAQGQASVPASALKPLIDEWTDNVAREIRNYVRSK

SEQ ID NO: 38278 - DNA, 675 bp, Pseudomonas aeruginosa UCBPP-PA14
  CDS (1)..(675): transl_table=11
atgaaacgacttcgagttgccgtttcctgcgcgctgctggcggcgctggtgggttgttccaatggtcaggtcaagccggaaaactactcgggcttcatcggtgactattcgacgctggcgcctgccaccgcgccttccggagcgccgctcctgcgctgggtagacccgcaggcggacgtgcggcgctaccagcggatctacatcgagcccagcaggttctatccggtcccgaaaccgaacgacaaggtttccgcgaagacgcttgcggacatcacgacctactacgatcaggcattgcgccgtgagctgggcaagagcctgccgctggccagcgcccccggcccgggtatcctggtgctgaaaccggcgatcaccgcagtttccagccatacccagggtctacggccatacgaggtcatccccatcgcgctgatcgctgctgggatgagcacggcggtcgggattcgcgaccaggatacccagatcgccaccgaggccatgctgctcgacggtggggacaacaaggtattggcgaagatggtgcgccagggcaccggcaaggcgctggacgattccgatcagccgatcacgggagacgatgtcaaggcggtgctggacggttgggcggccgacatgcgcatgtcgtacgagaagactctcggttctcgtcgatga

SEQ ID NO: 38279 - protein, 224 aa, Pseudomonas aeruginosa UCBPP-PA14
MKRLRVAVSCALLAALVGCSNGQVKPENYSGFIGDYSTLAPATAPSGAPLLRWVDPQADVRRYQRIYIEPSRFYPVPKPNDKVSAKTLADITTYYDQALRRELGKSLPLASAPGPGILVLKPAITAVSSHTQGLRPYEVIPIALIAAGMSTAVGIRDQDTQIATEAMLLDGGDNKVLAKMVRQGTGKALDDSDQPITGDDVKAVLDGWAADMRMSYEKTLGSRR

SEQ ID NO: 38280 - DNA, 669 bp, Pseudomonas putida GB-1
  CDS (1)..(669): transl_table=11
atgaacaccaagacattggctgcatcgctgtgccttgcaaccctcatgctgcaggggtgcgccagcaagtacgtggagtccgaccagtattcagggttcctgaaggactacagcatcctcaaggaagacaagtcgccgtccggcgcgccagtcatgcgctggatcaagcccggggtcgatgccaagcgctacaccagcgtgtacatagagccaagccagctctaccccaaaccgcaaccgaccgacaaagtgccgcaatcgaccttgacggggatcacccagtactacgaccagaccctgaagaaccacttctcccaggtattaccgctggccaccagccctggtccgcgcgtactggtggtgcgcccggcgataacggcggtgagcgcccagaccaaaagcctgcgcccttatgaagtcattccgattgcgttgatcgccgcaggcatcagcaccgccaccggtatccgtgaccaggacaccagcatcgccaccgaagcggcgttccttgatggtgacagcaaccaggtggtggccgaagtggtgcgcaaaggtgcaggtaccgagctggatgactcatcccaggtcatgcaggcaaaagacgccaaagccgtactcgatggctgggccaaggacatggtcggctccttccaggcattgcgcaaatag

SEQ ID NO: 38281 - protein, 222 aa, Pseudomonas putida GB-1
MNTKTLAASLCLATLMLQGCASKYVESDQYSGFLKDYSILKEDKSPSGAPVMRWIKPGVDAKRYTSVYIEPSQLYPKPQPTDKVPQSTLTGITQYYDQTLKNHFSQVLPLATSPGPRVLVVRPAITAVSAQTKSLRPYEVIPIALIAAGISTATGIRDQDTSIATEAAFLDGDSNQVVAEVVRKGAGTELDDSSQVMQAKDAKAVLDGWAKDMVGSFQALRK

SEQ ID NO: 38282 - DNA, 22 bp, Artificial sequence
  primer
atgcgtaccacatcatttgcga

SEQ ID NO: 38283 - DNA, 27 bp, Artificial sequence
  primer
ttactttttgttaacgtcaaacatggt

SEQ ID NO: 38284 - protein, 209 aa, Artificial sequence
  consensus sequence
  Variant (2)..(2): Xaa in position 2 is any amino acid
  Variant (4)..(6): Xaa in position 4 to 6 is any amino acid
  Variant (7)..(7): Xaa in position 7 is any or no amino acid
  Variant (9)..(9): Xaa in position 9 is any amino acid
  Variant (11)..(11): Xaa in position 11 is any amino acid
  Variant (14)..(14): Xaa in position 14 is any amino acid
  Variant (16)..(20): Xaa in position 16 to 20 is any amino acid
  Variant (21)..(22): Xaa in position 21 to 22 is any or no amino acid
  Variant (27)..(28): Xaa in position 27 to 28 is any amino acid
  Variant (29)..(29): Xaa in position 29 is any or no amino acid
  Variant (32)..(32): Xaa in position 32 is any amino acid
  Variant (34)..(34): Xaa in position 34 is any amino acid
  Variant (36)..(40): Xaa in position 36 to 40 is any amino acid
  Variant (42)..(42): Xaa in position 42 is any amino acid
  Variant (44)..(45): Xaa in position 44 to 45 is any amino acid
  Variant (48)..(48): Xaa in position 48 is any amino acid
  Variant (51)..(56): Xaa in position 51 to 56 is any amino acid
  Variant (58)..(63): Xaa in position 58 to 63 is any amino acid
  Variant (65)..(67): Xaa in position 65 to 67 is any amino acid
  Variant (70)..(70): Xaa in position 70 is any amino acid
  Variant (72)..(72): Xaa in position 72 is any amino acid
  Variant (74)..(76): Xaa in position 74 to 76 is any amino acid
  Variant (78)..(81): Xaa in position 78 to 81 is any amino acid
  Variant (83)..(87): Xaa in position 83 to 87 is any amino acid
  Variant (89)..(101): Xaa in position 89 to 101 is any amino acid
  Variant (104)..(107): Xaa in position 104 to 107 is any amino acid
  Variant (110)..(114): Xaa in position 110 to 114 is any amino acid
  Variant (116)..(116): Xaa in position 116 is any amino acid
  Variant (120)..(120): Xaa in position 120 is any amino acid
  Variant (122)..(127): Xaa in position 122 to 127 is any amino acid
  Variant (129)..(130): Xaa in position 129 to 130 is any amino acid
  Variant (134)..(134): Xaa in position 134 is any amino acid
  Variant (136)..(136): Xaa in position 136 is any amino acid
  Variant (139)..(140): Xaa in position 139 to 140 is any amino acid
  Variant (143)..(145): Xaa in position 143 to 145 is any amino acid
  Variant (147)..(147): Xaa in position 147 is any amino acid
  Variant (148)..(148): Xaa in position 148 is any or no amino acid
  Variant (150)..(150): Xaa in position 150 is any amino acid
  Variant (152)..(153): Xaa in position 152 to 153 is any amino acid
  Variant (155)..(159): Xaa in position 155 to 159 is any amino acid
  Variant (161)..(164): Xaa in position 161 to 164 is any amino acid
  Variant (166)..(175): Xaa in position 166 to 175 is any amino acid
  Variant (178)..(178): Xaa in position 178 is any amino acid
  Variant (180)..(180): Xaa in position 180 is any amino acid
  Variant (182)..(183): Xaa in position 182 to 183 is any amino acid
  Variant (184)..(186): Xaa in position 184 to 186 is any or no amino acid
  Variant (188)..(199): Xaa in position 188 to 199 is any amino acid
  Variant (201)..(201): Xaa in position 201 is any amino acid
  Variant (203)..(203): Xaa in position 203 is any amino acid
  Variant (205)..(206): Xaa in position 205 to 206 is any amino acid
  Variant (208)..(208): Xaa in position 208 is any amino acid
AXLXXXXLXLXGCXSXXXXXXXYSGFXXXYSXLXEXXXXXGXPXXRWXDPXXXXXXYXXXXXXPXXXYPXPXPXXXVXXXXLXXXXXYXXXXXXXXXXXXXPLXXXXGPXXXXXRXAITXVXXXXXXLXXYEVXPXALXXAGXXXAXXGXRXXDXXXXXEXXXXDXXXXXXXXXXVRXGXGXXXXXLXXXXXXXXXXXXKXVXDXXAXD

SEQ ID NO: 38285 - protein, 37 aa, Artificial sequence
  protein pattern
  Variant (2)..(6): Xaa in position 2 to 6 is any amino acid
  Variant (9)..(10): Xaa in position 9 to 10 is any amino acid
  Variant (11)..(11): Xaa in position 11 is Ile or Leu
  Variant (12)..(12): Xaa in position 12 is Ile or Val
  Variant (13)..(13): Xaa in position 13 is Phe, Leu or Val
  Variant (14)..(14): Xaa in position 14 is Lys or Arg
  Variant (15)..(15): Xaa in position 15 is any amino acid
  Variant (19)..(19): Xaa in position 19 is Ala or Gly
  Variant (21)..(21): Xaa in position 21 is Asp or Ser
  Variant (22)..(22): Xaa in position 22 is Ala, Ser or Thr
  Variant (23)..(25): Xaa in position 23 to 25 is any amino acid
  Variant (26)..(26): Xaa in position 26 is Gly or Ser
  Variant (28)..(28): Xaa in position 28 is Gln or Arg
  Variant (29)..(29): Xaa in position 29 is any amino acid
  Variant (33)..(33): Xaa in position 33 is Ile or Val
  Variant (35)..(35): Xaa in position 35 is Ile or Val
PXXXXXGPXXXXXXXAITXVXXXXXXLXXYEVXPXAL

SEQ ID NO: 38286 - protein, 39 aa, Artificial sequence
  protein pattern
  Variant (2)..(3): Xaa in position 2 to 3 is any amino acid
  Variant (6)..(6): Xaa in position 6 is Ile or Val
  Variant (7)..(7): Xaa in position 7 is Asp or Lys
  Variant (9)..(10): Xaa in position 9 to 10 is any amino acid
  Variant (11)..(11): Xaa in position 11 is Asp or Asn
  Variant (12)..(14): Xaa in position 12 to 14 is any amino acid
  Variant (16)..(16): Xaa in position 16 is Asp, Gln, Ser or Thr
  Variant (17)..(17): Xaa in position 17 is any amino acid
  Variant (18)..(18): Xaa in position 18 is Ile or Val
  Variant (19)..(20): Xaa in position 19 to 20 is any amino acid
  Variant (21)..(21): Xaa in position 21 is Glu or Asn
  Variant (23)..(25): Xaa in position 23 to 25 is any amino acid
  Variant (28)..(28): Xaa in position 28 is any amino acid
  Variant (30)..(30): Xaa in position 30 is any amino acid
  Variant (32)..(32): Xaa in position 32 is Asn, Ser or Thr
  Variant (33)..(33): Xaa in position 33 is Ala, Asp or Thr
  Variant (34)..(34): Xaa in position 34 is any amino acid
  Variant (35)..(35): Xaa in position 35 is Ile or Val
  Variant (36)..(36): Xaa in position 36 is Gly, Pro or Ser
  Variant (37)..(37): Xaa in position 37 is Ala or Gln
  Variant (38)..(38): Xaa in position 38 is any amino acid
  Variant (39)..(39): Xaa in position 39 is Thr or Val
PXXRWXXPXXXXXXYXXXXXXPXXXYPXPXPXXXXXXXX

SEQ ID NO: 38287 - protein, 44 aa, Artificial sequence
  protein pattern
  Variant (2)..(2): Xaa in position 2 is any amino acid
  Variant (4)..(4): Xaa in position 4 is any amino acid
  Variant (6)..(6): Xaa in position 6 is Asp or Thr
  Variant (7)..(7): Xaa in position 7 is any amino acid
  Variant (9)..(9): Xaa in position 9 is Thr or Val
  Variant (10)..(10): Xaa in position 10 is any amino acid
  Variant (11)..(11): Xaa in position 11 is Ile, Leu or Val
  Variant (12)..(13): Xaa in position 12 to 13 is any amino acid
  Variant (15)..(16): Xaa in position 15 to 16 is any amino acid
  Variant (17)..(17): Xaa in position 17 is any or no amino acid
  Variant (19)..(19): Xaa in position 19 is any or no amino acid
  Variant (21)..(21): Xaa in position 21 is Ala or Gly
  Variant (22)..(22): Xaa in position 22 is Ala, Asp, Gly or Ser
  Variant (23)..(23): Xaa in position 23 is Asp, Ser or Thr
  Variant (24)..(24): Xaa in position 24 is Asn or Gln
  Variant (25)..(25): Xaa in position 25 is any amino acid
  Variant (26)..(26): Xaa in position 26 is Pro or Val
  Variant (27)..(27): Xaa in position 27 is Leu or Val
  Variant (28)..(28): Xaa in position 28 is Ala, Ile or Val
  Variant (29)..(29): Xaa in position 29 is any amino acid
  Variant (30)..(30): Xaa in position 30 is Met or Val
  Variant (33)..(33): Xaa in position 33 is any amino acid
  Variant (35)..(35): Xaa in position 35 is Ala, Glu or Thr
  Variant (37)..(37): Xaa in position 37 is any amino acid
  Variant (38)..(38): Xaa in position 38 is Ala, Asp or Glu
  Variant (40)..(40): Xaa in position 40 is Asp, Glu, Asn or Ser
  Variant (41)..(41): Xaa in position 41 is Asp or Asn
  Variant (42)..(42): Xaa in position 42 is Asp, Glu or Ser
  Variant (43)..(43): Xaa in position 43 is Asp, Ser or Thr
  Variant (44)..(44): Xaa in position 44 is Gln or Thr
AXGXRXXDXXXXXEXXXLXDXXXXXXXXXXVRXGXGXXLXXXXX

SEQ ID NO: 38288 - protein, 13 aa, Artificial sequence
  protein pattern
  Variant (4)..(4): Xaa in position 4 is Ile or Leu
  Variant (5)..(5): Xaa in position 5 is any amino acid
  Variant (6)..(6): Xaa in position 6 is Asp or Asn
  Variant (9)..(9): Xaa in position 9 is any amino acid
  Variant (11)..(11): Xaa in position 11 is any amino acid
  Variant (12)..(12): Xaa in position 12 is Glu or Pro
  Variant (13)..(13): Xaa in position 13 is Ala, Asp, Glu or Thr
SGFXXXYSXLXXX

SEQ ID NO: 38289 - DNA, 249 bp, Escherichia coli
  CDS (1)..(249): transl_table=11
atgaaaaaacttgatgcacgtcaaaaaatgacgcatatttgcgcgcgttttattcatctggctggacgcccgtacatgtctctctatcaacacatgcttgttttttatgcggttatggcagcaatcgcatttcttatcacctggtttctttctcacgataagaaacgcatccgtttcttaagcgcctttctggtgggggcaacatggccgatgagtttcccggtggcgctgttgttttcactgttttaa

SEQ ID NO: 38290 - protein, 82 aa, Escherichia coli
MKKLDARQKMTHICARFIHLAGRPYMSLYQHMLVFYAVMAAIAFLITWFLSHDKKRIRFLSAFLVGATWPMSFPVALLFSLF

SEQ ID NO: 38291 - DNA, 264 bp, Salmonella typhimurium LT2
  CDS (1)..(264): transl_table=11
ttgctgttaaggctgataaaccttgatgtgcgtcaaataaaaagagcatattgcgcgcgttttttcctctggttggcgtggatgcctgatatgaccctctttcaaaagatattaattttttacgccgtcatggcggtgatatcatccctgatcacctggtttttgactcatgacaaaaaacgaattcgtttcctgagcgcctttttggttggcgcgacatggccgataagtttccccgtcgcattgctgttttcgcttttctga

SEQ ID NO: 38292 - protein, 87 aa, Salmonella typhimurium LT2
MLLRLINLDVRQIKRAYCARFFLWLAWMPDMTLFQKILIFYAVMAVISSLITWFLTHDKKRIRFLSAFLVGATWPISFPVALLFSLF

SEQ ID NO: 38293 - DNA, 249 bp, Shigella flexneri 2a str. 301
  CDS (1)..(249): transl_table=11
gtgaaaaaacttgatgcacgtcaaaaaatggcgcatatttgcgcgcgttttattcatatggctggacgcccgtacatgtttctctatcaacatatgcttgttttttatgcggttatggcagcaatcgcatttcttatcacctggtttctttctcacgataagaaacgcatccgtttcttaagcgcctttctggtgggggccacatggccgatgagtttcccggtggcgctgttgttttcactgttttaa

SEQ ID NO: 38294 - protein, 82 aa, Shigella flexneri 2a str. 301
MKKLDARQKMAHICARFIHMAGRPYMFLYQHMLVFYAVMAAIAFLITWFLSHDKKRIRFLSAFLVGATWPMSFPVALLFSLF

SEQ ID NO: 38295 - DNA, 222 bp, Escherichia coli B
  CDS (1)..(222): transl_table=11
atgacgcatatttgcgcgcgttttattcatctggctggacgcccgtacatgtctctctatcaacacatgcttgttttttatgcggttatggcagcaatcgcatttcttatcacctggtttctttctcacgataagaaacgcatccgtttcttaagcgcctttctggtgggggcaacatggccgatgagtttcccggtggcgctgttgttttcactgttttaa

SEQ ID NO: 38296 - protein, 73 aa, Escherichia coli B
MTHICARFIHLAGRPYMSLYQHMLVFYAVMAAIAFLITWFLSHDKKRIRFLSAFLVGATWPMSFPVALLFSLF

SEQ ID NO: 38297 - DNA, 27 bp, Artificial sequence
  primer
atgaaaaaacttgatgcacgtcaaaaa

SEQ ID NO: 38298 - DNA, 25 bp, Artificial sequence
  primer
ttaaaacagtgaaaacaacagcgcc

SEQ ID NO: 38299 - protein, 70 aa, Artificial sequence
  consensus sequence
  Variant (4)..(4): Xaa in position 4 is any amino acid
  Variant (6)..(8): Xaa in position 6 to 8 is any amino acid
  Variant (10)..(11): Xaa in position 10 to 11 is any amino acid
  Variant (13)..(13): Xaa in position 13 is any amino acid
  Variant (15)..(15): Xaa in position 15 is any amino acid
  Variant (17)..(17): Xaa in position 17 is any amino acid
  Variant (19)..(20): Xaa in position 19 to 20 is any amino acid
  Variant (22)..(22): Xaa in position 22 is any amino acid
  Variant (29)..(29): Xaa in position 29 is any amino acid
  Variant (31)..(32): Xaa in position 31 to 32 is any amino acid
  Variant (39)..(39): Xaa in position 39 is any amino acid
  Variant (59)..(59): Xaa in position 59 is any amino acid
CARXFXXXAXXPXMXLXQXXLXFYAVMAXIXXLITWFLXHDKKRIRFLSAFLVGATWPXSFPVALLFSLF

SEQ ID NO: 38300 - DNA, 336 bp, Escherichia coli
  CDS (1)..(336): transl_table=11
atgaaaaaacaaattgagggtatgacaatgaaaaaagtattagctctggttgttgccgctgctatgggtctgtcttctgccgcctttgctgcagagactacgaccacacctgctccgactgcgacgaccaccaaagcagcgccggcgaaaactacacatcataaaaaacagcataaagcagcacctgcccagaaagcgcaggcggctaaaaagcatcataaaaatacgaaagctgaacagaaagcccctgaacaaaaagcgcaggcagcgaagaaacacgccaagaaacacagccatcagcaaccggcaaaacctgctgcacaacccgcagcgtaa

SEQ ID NO: 38301 - protein, 111 aa, Escherichia coli
MKKQIEGMTMKKVLALVVAAAMGLSSAAFAAETTTTPAPTATTTKAAPAKTTHHKKQHKAAPAQKAQAAKKHHKNTKAEQKAPEQKAQAAKKHAKKHSHQQPAKPAAQPAA

SEQ ID NO: 38302 - DNA, 336 bp, Escherichia coli O157:H7 EDL933
  CDS (1)..(336): transl_table=11
atgaaaaaacaaattgagggtatgacaatgaaaaaagtattagctctggttgttgccgctgctatgggtctgtcttctgccgcctttgctgcagagactgcgaccacacctgctccgactgcgacgaccaccaaagcagcgccggcgaaaactacacatcataaaaaacagcataaagcagcacctgcccagaaagcgcaggcggctaaaaagcatcataaaaatacgaaagctgaacagaaagccccagaacaaaaagcgcaggcagcgaagaaacacgccaagaaacacagccatcagcaaccggcaaaacctgctgcacaacccgcagcgtaa

SEQ ID NO: 38303 - protein, 111 aa, Escherichia coli O157:H7 EDL933
MKKQIEGMTMKKVLALVVAAAMGLSSAAFAAETATTPAPTATTTKAAPAKTTHHKKQHKAAPAQKAQAAKKHHKNTKAEQKAPEQKAQAAKKHAKKHSHQQPAKPAAQPAA

SEQ ID NO: 38304 - DNA, 372 bp, Yersinia pestis KIM
  CDS (1)..(372): transl_table=11
ttgaaaatgaaaaaagtattagcattaatggttgccgccaccctgggtctatcttcagttgctttcgctgctgacacaacagcaacggctacacctgcggcaaccagtacgacagccacagttgctgctcaaactaaagcaactcaacatcaaaaacataaagtgacgaagaaaaccacagaacagaaagcacaggctgctaaaaaacacgagaaaaaagcatcagttcaaaaaacacccgtgcagaaagcacaagcagcgaaaaagcatgtgaaaaaagcatcagttcaaaaagcgcccgtgcaaaaagcacaggcagcgaaaaagcaccataaaacggctaaaaaaccagtagcggcacccgcagcataa

SEQ ID NO: 38305 - protein, 123 aa, Yersinia pestis KIM
MKMKKVLALMVAATLGLSSVAFAADTTATATPAATSTTATVAAQTKATQHQKHKVTKKTTEQKAQAAKKHEKKASVQKTPVQKAQAAKKHVKKASVQKAPVQKAQAAKKHHKTAKKPVAAPAA

SEQ ID NO: 38306 - DNA, 309 bp, Yersinia pestis KIM
  CDS (1)..(309): transl_table=11
atgaaaacagtattgactctgattgttgctgcaaccctgagtttattctctgttgcttttgcagccgacacagtagtaccgcaaaccacaccaacggcgacagcaccagcaccagcaccagcaccagcaccagcaccagcagtgcataacgcatcagctaaaaccatgcaccacaaaaaagcacaaaaaccaaacacaataaaaaatacgcataaaaccgcccctgaacaaaaagcccaggcagcccaaaaacaccataaagcggcacatagccacaaagcacctaccgtagcaccagcggctaaatag

SEQ ID NO: 38307 - protein, 102 aa, Yersinia pestis KIM
MKTVLTLIVAATLSLFSVAFAADTVVPQTTPTATAPAPAPAPAPAPAVHNASAKTMHHKKAQKPNTIKNTHKTAPEQKAQAAQKHHKAAHSHKAPTVAPAAK

SEQ ID NO: 38308 - DNA, 336 bp, Shigella flexneri 2a str. 301
  CDS (1)..(336): transl_table=11
atgaaaaaacaaattgagggtatgacaatgaaaaaagtattagctctggttgttgccgctgctatgggtctgtcttctgccgcctttgctgcagagactgcgaccacacctgctccgactgcgacgaccaccaaagcagcgccagcgaaaactacacatcataaaaaacagcataaagcagcacctgcccagaaagcgcaggcggctaaaaagcatcataaaaatacgaaagctgaacagaaagcccctgaacaaaaagcgcaggcagcgaagaaacacgccgggaaacacggccatcagcaaccggcaaaacctgctgcacaacccgcagcgtaa

SEQ ID NO: 38309 - protein, 111 aa, Shigella flexneri 2a str. 301
MKKQIEGMTMKKVLALVVAAAMGLSSAAFAAETATTPAPTATTTKAAPAKTTHHKKQHKAAPAQKAQAAKKHHKNTKAEQKAPEQKAQAAKKHAGKHGHQQPAKPAAQPAA

SEQ ID NO: 38310 - DNA, 336 bp, Escherichia coli CFT073
  CDS (1)..(336): transl_table=11
atgaaaaaacaaattgagggtatgacaatgaaaaaagtattagctctggttgttgccgctgctatgggtctgtcttctgctgcctttgctgcagagactgcgaccacacctgctccgactgcgacgaccaccaaagcagcgcctgcgaaaaccacacatcataaaaaacagcataaagcagcacctgcccagaaagcgcaggcggctaaaaagcatcataaaaatgccaaagctgaacagaaagctcctgaacaaaaagcgcaggcagcgaagaaacacgccaagaaacacagccatcagcaaccggcaaaacctgctgcacaacccgcagcgtaa

SEQ ID NO: 38311 - protein, 111 aa, Escherichia coli CFT073
MKKQIEGMTMKKVLALVVAAAMGLSSAAFAAETATTPAPTATTTKAAPAKTTHHKKQHKAAPAQKAQAAKKHHKNAKAEQKAPEQKAQAAKKHAKKHSHQQPAKPAAQPAA

SEQ ID NO: 38312 - DNA, 282 bp, Salmonella enterica subsp. enterica serovar Typhi Ty2
  CDS (1)..(282): transl_table=11
ttgaatgaaaaccaaatcgagggtatcaaaatgaaaaaagtattagctctggttgttgccgctgcaatgggtctctcttccgcagcattcgcggctgagactgcaacgcctgcaaaaaccgcagcgcctgccaaaacaacccagaccacccagcaccacaaaaaacagcataaaaaaaccgttgagcaaaaagcgcaggcggctaaaaagcaccagaaaaaagatggcaaaaaagccccagccaaatctacgtcaaaaacaacttcgcaaccagctgcgtaa

SEQ ID NO: 38313 - protein, 93 aa, Salmonella enterica subsp. enterica serovar Typhi Ty2
MNENQIEGIKMKKVLALVVAAAMGLSSAAFAAETATPAKTAAPAKTTQTTQHHKKQHKKTVEQKAQAAKKHQKKDGKKAPAKSTSKTTSQPAA

SEQ ID NO: 38314 - DNA, 297 bp, Yersinia pestis biovar Microtus str. 91001
  CDS (1)..(297): transl_table=11
atgaaaacagtattgactctgattgttgctgcaaccctgagtttattctctgttgcttttgcagccgacacagtagtaccgcaaaccacaccaacggcgacagcaccagcaccagcaccagcaccagcagtgcataacgcatcagctaaaaccatgcaccacaaaaaagcacaaaaaccaaacacaataaaaaatacgcataaaaccgcccctgaacaaaaagcccaggcagcccaaaaacaccataaagcggcacatagccacaaagcacctaccgtagcaccagcggctaaatag

SEQ ID NO: 38315 - protein, 98 aa, Yersinia pestis biovar Microtus str. 91001
MKTVLTLIVAATLSLFSVAFAADTVVPQTTPTATAPAPAPAPAVHNASAKTMHHKKAQKPNTIKNTHKTAPEQKAQAAQKHHKAAHSHKAPTVAPAAK

SEQ ID NO: 38316 - DNA, 366 bp, Erwinia carotovora subsp. atroseptica SCRI1043
  CDS (1)..(366): transl_table=11
atgatgaataaagtattagttatgatcgcaggtgctgcactgggtctgtcctctgtagcctttgccgcggataccgtaaccagcgcacctgttcagccttcggcgaccactaccacctctgctccggctaaagccgttcatcataaaaagcagatgaagaaagctaaaccagccgctgaacagaaagcgcaagcggccaagaaacatgtgaaaaaagctaaaccagcccctgcacagaaagcgcaggctgctaagaaacatgtgaaaaaagctaaaccagcccctgcacagaaagcgcaagctgctaagaaacacgtgaagaaagctaaaacggtaaaacctgctgataccacgccagcagcgtaa

SEQ ID NO: 38317 - protein, 121 aa, Erwinia carotovora subsp. atroseptica SCRI1043
MMNKVLVMIAGAALGLSSVAFAADTVTSAPVQPSATTTTSAPAKAVHHKKQMKKAKPAAEQKAQAAKKHVKKAKPAPAQKAQAAKKHVKKAKPAPAQKAQAAKKHVKKAKTVKPADTTPAA

SEQ ID NO: 38318 - DNA, 297 bp, Yersinia pseudotuberculosis IP 32953
  CDS (1)..(297): transl_table=11
atgaaaacagtattggctctgattgttgctgcaaccctgagtttatcctctgttgcttttgcagccgacacagtagtaccgcaaaccacaccaacggcgacagcaccagcaccagcaccagcaccagcagtgcataacgcatcagctaaaaccatgcaccacaaaaaagcacaaaaaccaaacacaataaaaaatacgcataaaaccgcccctgaacaaaaagcccaggcagcccaaaaacaccataaagcggcacatagccacaaagcacctaccgtagtaccagcggctaaatag

SEQ ID NO: 38319 - protein, 98 aa, Yersinia pseudotuberculosis IP 32953
MKTVLALIVAATLSLSSVAFAADTVVPQTTPTATAPAPAPAPAVHNASAKTMHHKKAQKPNTIKNTHKTAPEQKAQAAQKHHKAAHSHKAPTVVPAAK

SEQ ID NO: 38320 - DNA, 366 bp, Yersinia pseudotuberculosis IP 32953
  CDS (1)..(366): transl_table=11
atgaaaaaagtattagcattaatggttgccgccaccctgggtctatcttcagttgctttcgctgctgacacaacagcaacggctacacctgcggcaaccagtacgacagccactgttgctgctcaaactaaagcaactcaacatcaaaaacataaagtgacgaagaaaaccacagaacagaaagcacaggctgctaaaaaacacgagaaaaaagcatcagttcaaaaagcacccgtgcagaaagcacaagcagcgaaaaagcatgtgaaaaaagcatcagttcaaaaagcgcccgtgcaaaaagcacaggcagcgaaaaagcaccataaaacggctaaaaaaccagtagcggcacccgcagcataa

SEQ ID NO: 38321 - protein, 121 aa, Yersinia pseudotuberculosis IP 32953
MKKVLALMVAATLGLSSVAFAADTTATATPAATSTTATVAAQTKATQHQKHKVTKKTTEQKAQAAKKHEKKASVQKAPVQKAQAAKKHVKKASVQKAPVQKAQAAKKHHKTAKKPVAAPAA

SEQ ID NO: 38322 - DNA, 285 bp, Yersinia pestis
  CDS (1)..(285): transl_table=11
atgaaaacagtattgactctgattgttgctgcaaccctgagtttattctctgttgcttttgcagccgacacagtagtaccgcaaaccacaccaacggcgacagcaccagcaccagcagtgcataacgcatcagctaaaaccatgcaccacaaaaaagcacaaaaaccaaacacaataaaaaatacgcataaaaccgcccctgaacaaaaagcccaggcagcccaaaaacaccataaagcggcacatagccacaaagcacctaccgtagcaccagcggctaaatag

SEQ ID NO: 38323 - protein, 94 aa, Yersinia pestis
MKTVLTLIVAATLSLFSVAFAADTVVPQTTPTATAPAPAVHNASAKTMHHKKAQKPNTIKNTHKTAPEQKAQAAQKHHKAAHSHKAPTVAPAAK

SEQ ID NO: 38324 - DNA, 366 bp, Yersinia pestis
  CDS (1)..(366): transl_table=11
atgaaaaaagtattagcattaatggttgccgccaccctgggtctatcttcagttgctttcgctgctgacacaacagcaacggctacacctgcggcaaccagtacgacagccacagttgctgctcaaactaaagcaactcaacatcaaaaacataaagtgacgaagaaaaccacagaacagaaagcacaggctgctaaaaaacacgagaaaaaagcatcagttcaaaaaacacccgtgcagaaagcacaagcagcgaaaaagcatgtgaaaaaagcatcagttcaaaaagcgcccgtgcaaaaagcacaggcagcgaaaaagcaccataaaacggctaaaaaaccagtagcggcacccgcagcataa

SEQ ID NO: 38325 - protein, 121 aa, Yersinia pestis
MKKVLALMVAATLGLSSVAFAADTTATATPAATSTTATVAAQTKATQHQKHKVTKKTTEQKAQAAKKHEKKASVQKTPVQKAQAAKKHVKKASVQKAPVQKAQAAKKHHKTAKKPVAAPAA

SEQ ID NO: 38326 - DNA, 336 bp, Escherichia coli O6; identical to SEQ ID NO: 38310
  CDS (28)..(336): transl_table=11

SEQ ID NO: 38327 - protein, 102 aa, Escherichia coli O6
MKKVLALVVAAAMGLSSAAFAAETATTPAPTATTTKAAPAKTTHHKKQHKAAPAQKAQAAKKHHKNAKAEQKAPEQKAQAAKKHAKKHSHQQPAKPAAQPAA

SEQ ID NO: 38328 - DNA, 309 bp, Escherichia coli
  CDS (1)..(309): transl_table=11
atgaaaaaagtattagctctggttgttgccgctgctatgggtctgtcttctgccgcctttgctgcagagactacgaccacacctgctccgactgcgacgaccaccaaagcagcgccggcgaaaactacacatcataaaaaacagcataaagcagcacctgcccagaaagcgcaggcggctaaaaagcatcataaaaatacgaaagctgaacagaaagcccctgaacaaaaagcgcaggcagcgaagaaacacgccaagaaacacagccatcagcaaccggcaaaacctgctgcacaacccgcagcgtaa

SEQ ID NO: 38329 - protein, 102 aa, Escherichia coli
MKKVLALVVAAAMGLSSAAFAAETTTTPAPTATTTKAAPAKTTHHKKQHKAAPAQKAQAAKKHHKNTKAEQKAPEQKAQAAKKHAKKHSHQQPAKPAAQPAA

SEQ ID NO: 38330 - DNA, 541 bp, Enterobacter cloacae
  CDS (197)..(502): transl_table=11
tgaatatccgctacttccgcgaacacctgacgtcccgctacctgtaaccgaacgcgccggggggccgccccggcgttgtacatatggttacacgccgataccaatcactcacggaaaccccgaatttacagggatatagttatttcaacggccccgcagtggggttaaatgaaaaaccaaattcgagggtatgaaaatgaaaaaagtattagctctggttgttgccgctgctatgggtctgtcttccgctgcattcgcggctgaaactaccgccaccgcagcgcctgcggcatccaccgctgctccggccaaaacggttcaccataaaaaacatcacaaagcggctaaaccagcggcagaacagaaagcgcaggccgcgaaaaagcaccataaaaaagcggcaaaacctgcggtagagcagaaagcccaggcggctaaaaagcatcacaaaaaagcagcaaaacacgaagcggctaaacctgctgcacagccagcagcgtaagagtacaagcttaaccgtgccttcggggcacgttggtaa

SEQ ID NO: 38331 - protein, 101 aa, Enterobacter cloacae
MKKVLALVVAAAMGLSSAAFAAETTATAAPAASTAAPAKTVHHKKHHKAAKPAAEQKAQAAKKHHKKAAKPAVEQKAQAAKKHHKKAAKHEAAKPAAQPAA

SEQ ID NO: 38332 - DNA, 734 bp, Klebsiella pneumoniae
  CDS (212)..(631): transl_table=11
ttaatagccgctacttccgcgagcacctgaccactcgctacctgtaatcatacgcgccgggctacccggcgcgtcctgtcgttcctgccttgtacattcggttacacgccgataccaaacactcacggaaagctcgaaaagacaagcatatagtgatttcaccggccccgcagtggggttgaaattaagaaaacttttcgaggatatcagaatgaaaaaagtattagctctggtcgttgccgctgctatgggtctctcttccgccgctttcgctgctgacgcagtaagcaccactcaggcaccggctgccacccacagcacggctgccaagaccacccatcacaaaaaacaccacaaagccgcggcaaaaccggccgcagagcagaaagctcaggctgccaaaaaacacaaaaaagcagaagctaaaccagccgctgctcagaaagcccaggccgctaaaaaacacaaaaaagtagcagctaaaccagctgctccgcagaaagctcaggcggcgaaaaagcatcacaaagctgcggctaaaccggcagcccagaaagcgcaggcagcgaaaaaacaccacaaaaccactaaacaccaggccgctaaaccgactgcacagccggcagcataattcctcccggtgaaccaaccttcttaataatcggcgctgtttcagcgccgttttttctggagagcactatgctgcggcgctatcgttttgagctcatcctgat

SEQ ID NO: 38333 - protein, 139 aa, Klebsiella pneumoniae
MKKVLALVVAAAMGLSSAAFAADAVSTTQAPAATHSTAAKTTHHKKHHKAAAKPAAEQKAQAAKKHKKAEAKPAAAQKAQAAKKHKKVAAKPAAPQKAQAAKKHHKAAAKPAAQKAQAAKKHHKTTKHQAAKPTAQPAA

SEQ ID NO: 38334 - DNA, 252 bp, Salmonella typhi
  CDS (1)..(252): transl_table=11
atgaaaaaagtattagctctggttgttgccgctgcaatgggtctctcttccgcagcattcgcggctgagactgcaacgcctgcaaaaaccgcagcgcctgccaaaacaacccagaccacccagcaccacaaaaaacagcataaaaaaaccgttgagcaaaaagcgcaggcggctaaaaagcaccagaaaaaagatggcaaaaaagccccagccaaatctacgtcaaaaacaacttcgcaaccagctgcgtaa

SEQ ID NO: 38335 - protein, 83 aa, Salmonella typhi
MKKVLALVVAAAMGLSSAAFAAETATPAKTAAPAKTTQTTQHHKKQHKKTVEQKAQAAKKHQKKDGKKAPAKSTSKTTSQPAA

SEQ ID NO: 38336 - DNA, 285 bp, Salmonella typhimurium
  CDS (37)..(285): transl_table=11
gtggggttgaatgaaaaccaaatcgagggtatcaaaatgaaaaaagtattagctctggttgttgccgctgcaatgggtctctcttccgcagcattcgcggctgagactgcaacgcctgcgaaaaccgcagcgcctgccaaaacaacccagaccacccagcaccacaaaaaacagcataagaaaaccgttgagcaaaaagcgcaggcggctaaaaagcaccagaaaaaaggtggtaaagcgccagccaaaaccacgtcaaaaccaactactcaaccggctgcgtaa

SEQ ID NO: 38337 - protein, 82 aa, Salmonella typhimurium
MKKVLALVVAAAMGLSSAAFAAETATPAKTAAPAKTTQTTQHHKKQHKKTVEQKAQAAKKHQKKGGKAPAKTTSKPTTQPAA

SEQ ID NO: 38338 - DNA, 309 bp, Shigella flexneri
  CDS (1)..(309): transl_table=11
atgaaaaaagtattagctctggttgttgccgctgctatgggtctgtcttctgccgcctttgctgcagagactgcgaccacacctgctccgactgcgacgaccaccaaagcagcgccagcgaaaactacacatcataaaaaacagcataaagcagcacctgcccagaaagcgcaggcggctaaaaagcatcataaaaatacgaaagctgaacagaaagcccctgaacaaaaagcgcaggcagcgaagaaacacgccgggaaacacggccatcagcaaccggcaaaacctgctgcacaacccgcagcgtaa

SEQ ID NO: 38339 - protein, 102 aa, Shigella flexneri
MKKVLALVVAAAMGLSSAAFAAETATTPAPTATTTKAAPAKTTHHKKQHKAAPAQKAQAAKKHHKNTKAEQKAPEQKAQAAKKHAGKHGHQQPAKPAAQPAA

SEQ ID NO: 38340 - DNA, 26 bp, Artificial sequence
  primer
atgaaaaaacaaattgagggtatgac

SEQ ID NO: 38341 - DNA, 21 bp, Artificial sequence
  primer
ttacgctgcgggttgtgcagc

SEQ ID NO: 38342 - protein, 148 aa, Artificial sequence
  consensus sequence
  Variant (8)..(8): Xaa in position 8 is any amino acid
  Variant (12)..(13): Xaa in position 12 to 13 is any amino acid
  Variant (18)..(18): Xaa in position 18 is any amino acid
  Variant (23)..(23): Xaa in position 23 is any amino acid
  Variant (25)..(30): Xaa in position 25 to 30 is any amino acid
  Variant (31)..(33): Xaa in position 31 to 33 is any or no amino acid
  Variant (35)..(37): Xaa in position 35 to 37 is any amino acid
  Variant (38)..(45): Xaa in position 38 to 45 is any or no amino acid
  Variant (47)..(49): Xaa in position 47 to 49 is any amino acid
  Variant (51)..(55): Xaa in position 51 to 55 is any amino acid
  Variant (57)..(59): Xaa in position 57 to 59 is any amino acid
  Variant (60)..(83): Xaa in position 60 to 83 is any or no amino acid
  Variant (93)..(93): Xaa in position 93 is any amino acid
  Variant (95)..(98): Xaa in position 95 to 98 is any amino acid
  Variant (99)..(101): Xaa in position 99 to 101 is any or no amino acid
  Variant (104)..(104): Xaa in position 104 is any amino acid
  Variant (111)..(111): Xaa in position 111 is any amino acid
  Variant (114)..(115): Xaa in position 114 to 115 is any amino acid
  Variant (116)..(141): Xaa in position 116 to 141 is any or no amino acid
  Variant (143)..(145): Xaa in position 143 to 145 is any amino acid
MKKVLALXVAAXXGLSSXAFAAXTXXXXXXXXXAXXXXXXXXXXXAXXXHXXXXXKXXXXXXXXXXXXXXXXXXXXXXXXXXXQKAQAAKKHXKXXXXXXXAPXQKAQAAXKHXXXXXXXXXXXXXXXXXXXXXXXXXXXXPXXXPAA

SEQ ID NO: 38343 - protein, 27 aa, Artificial sequence
  protein pattern
  Variant (3)..(3): Xaa in position 3 is any amino acid
  Variant (8)..(8): Xaa in position 8 is any or no amino acid
  Variant (12)..(14): Xaa in position 12 to 14 is any amino acid
  Variant (18)..(18): Xaa in position 18 is any or no amino acid
  Variant (23)..(23): Xaa in position 23 is Asp or Glu
  Variant (24)..(24): Xaa in position 24 is Ala or Thr
  Variant (25)..(25): Xaa in position 25 is Ala, Thr or Val
  Variant (26)..(26): Xaa in position 26 is Ala, Ser, Thr or Val
  Variant (27)..(27): Xaa in position 27 is Pro or Thr
MKXVLALXVAAXXXLSSXAFAAXXXXX

SEQ ID NO: 38344 - protein, 17 aa, Artificial sequence
  protein pattern
  Variant (2)..(5): Xaa in position 2 to 5 is any amino acid
  Variant (6)..(6): Xaa in position 6 is Ala, Pro or Thr
  Variant (7)..(7): Xaa in position 7 is Ala, Pro, Thr or Val
  Variant (8)..(8): Xaa in position 8 is Ala or Glu
KXXXXXXXQKAQAAKKH

SEQ ID NO: 38345 - DNA, 582 bp, Escherichia coli
  CDS (1)..(582): transl_table=11
atgactgactacctgttactgtttgtcggaactgtactggtcaataactttgtactggtcaagtttctcggtctctgtccgtttatgggggtttccaaaaaactggaaaccgcgatgggcatggggctggcaacaacgtttgtgatgacgctggcgtctatttgcgcctggcttatcgatacgtggattttgatcccacttaatctgatttacctgcgcaccctggcatttattctggtgattgctgtggtcgtgcagttcaccgagatggtggtgcgcaaaaccagcccggtgctttaccgtctgctggggatttttttgccgcttatcaccaccaactgtgcagtgctcggcgtggcgttgctgaatatcaatctcgggcacaatttcttgcagtcggcgctgtacggtttttccgccgctgtcggtttctcgctggtgatggtgctcttcgccgccatccgcgaacgccttgctgtggctgatgtcccggcaccttttcgcggtaatgccattgcgttaattaccgcaggtcttatgtctctggcctttatgggctttagtggtttggtgaagttgtaa

SEQ ID NO: 38346 - protein, 193 aa, Escherichia coli
MTDYLLLFVGTVLVNNFVLVKFLGLCPFMGVSKKLETAMGMGLATTFVMTLASICAWLIDTWILIPLNLIYLRTLAFILVIAVVVQFTEMVVRKTSPVLYRLLGIFLPLITTNCAVLGVALLNINLGHNFLQSALYGFSAAVGFSLVMVLFAAIRERLAVADVPAPFRGNAIALITAGLMSLAFMGFSGLVKL

SEQ ID NO: 38347 - DNA, 633 bp, Dichelobacter nodosus VCS1703A
  CDS (1)..(633): transl_table=11
atgataaatgataaacattctaattgccctgctcatcgtttttttatagaggcttttgtgcattacatcagtattattttcgccacaacgttggtgaataatttcgttttgagtcaatttttaggattatgcccatttatgggcgtttcgcgcaaaatcgacggcgccatcggcatgggatttgccacggcatttgtattaacgctttccgcgtgcgcaacatatcttattgataactatattcttattccttatcacttaacatttctgcgcaccattatttttatcgtcaccatcgcggcgctcgtgggactcaccgaactttttatcgctaaaaccagtccactgctgcatcgcttgctcggcatttatttgccgctgattacgaccaattgcgccgttttaggcgtggcattattaaacagccatcgccatcatcatttgctggaatccgcgtgctacggttttggcgccgctttaggttttacgttcgttctcgtgatttttgccgcgctgcgtgaacgtctgcaaactgctgatattccgcgtccttttcgcggcccgcctattgctttaatcaccgccggcattctcgcgctcgcatttatgggttttggaggttggacggcatga

SEQ ID NO: 38348 - protein, 210 aa, Dichelobacter nodosus VCS1703A
MINDKHSNCPAHRFFIEAFVHYISIIFATTLVNNFVLSQFLGLCPFMGVSRKIDGAIGMGFATAFVLTLSACATYLIDNYILIPYHLTFLRTIIFIVTIAALVGLTELFIAKTSPLLHRLLGIYLPLITTNCAVLGVALLNSHRHHHLLESACYGFGAALGFTFVLVIFAALRERLQTADIPRPFRGPPIALITAGILALAFMGFGGWTA

SEQ ID NO: 38349 - DNA, 582 bp, Escherichia coli O157:H7 EDL933
  CDS (1)..(582): transl_table=11
  misc_feature (563)..(563): r is g or a
  misc_feature (576)..(576): r is g or a
atgactgactacctgttactgtttgtcggaactgtactggtcaataactttgtactggtcaagtttctcggtctctgtccgtttatgggggtttccaaaaagctggaaaccgcgatgggcatggggctggcaacaacgtttgtgatgacgctggcgtctatttgcgcctggcttatcgatacgtggattttgatcccacttaatctgatttacctgcgcaccctggcatttattctggtgattgctgtggtcgtgcagttcaccgagatggtggtgcgcaaaaccagcccggtgctttaccgtttgctggggatttttttgccgcttatcaccaccaactgtgccgtgctcggcgtggcgttgctgaatatcaatctcgggcacaatttcttgcagtcggcgctgtacggtttttccgccgctgtcggtttttcgctggtgatggttctcttcgcagccatccgcgaacgccttgctgtggctgatgtcccggcaccttttcgcggtaatgccattgcgttaattaccgcaggtcttatgtctctggcctttatgggctttartggtttggtgaarttgtaa

SEQ ID NO: 38350 - protein, 193 aa, Escherichia coli O157:H7 EDL933
  misc_feature (188)..(188): The Xaa at location 188 stands for Asn, or Ser.
MTDYLLLFVGTVLVNNFVLVKFLGLCPFMGVSKKLETAMGMGLATTFVMTLASICAWLIDTWILIPLNLIYLRTLAFILVIAVVVQFTEMVVRKTSPVLYRLLGIFLPLITTNCAVLGVALLNINLGHNFLQSALYGFSAAVGFSLVMVLFAAIRERLAVADVPAPFRGNAIALITAGLMSLAFMGFXGLVKL

SEQ ID NO: 38351 - DNA, 597 bp, Yersinia pestis CO92
  CDS (1)..(597): transl_table=11
atggaacattatatcagtctgttggtccgcgcagtgtttgtggagaatatggcgttagcgttctttctgggaatgtgtactttcctggccgtctctaaaaaagtgtcaacggcctttggcttaggcattgcggtaacggttgttctgggcatctccgtgccagccaataatttggtttataacctggttctacgagatggcgcattggttgaaggggttgaccttagcttcctgaatttcattaccttcattggggtcattgccgccattgttcaggtgttggagatgatcctcgatcgttacttccctgcgttatataacgcgctgggtatttttctgccgctaatcaccgtgaactgcgccatctttggtggcgtgtcgtttatggcacagcgtgattacaacttccctgaatccatcgtttatggctttggttctggtatggggtggatgctggcgattgttgcattagcggggatccgcgaaaaaatgaaatatgccaatgtgcctgcgggcttacaggggctagggatcacctttatctcaaccggattgatggcattaggttttatgtctttcgccggtgtgaacctataa

SEQ ID NO: 38352 - protein, 198 aa, Yersinia pestis CO92
MEHYISLLVRAVFVENMALAFFLGMCTFLAVSKKVSTAFGLGIAVTVVLGISVPANNLVYNLVLRDGALVEGVDLSFLNFITFIGVIAAIVQVLEMILDRYFPALYNALGIFLPLITVNCAIFGGVSFMAQRDYNFPESIVYGFGSGMGWMLAIVALAGIREKMKYANVPAGLQGLGITFISTGLMALGFMSFAGVNL

SEQ ID NO: 38353 - DNA, 576 bp, Clostridium perfringens str. 13
  CDS (1)..(576): transl_table=11
atggaattatttctgatttttattggagctatgcttgttaataactttgttttatcacaatttttaggaatatgttcatttataggagtttcaaaaaagaaggaagctgcagtaggaatgggacttgcagttacctttgtaatggtattagctagtataatttcttggcttgtttataacttgattttagataagtttaatataacttatttgaaaacaatagtttttgttcttgttatagcttccttggttcaatttgttgagatggttgttaaaaaatatagtcctagtttatataaagcattaggtatatttttacctttaataactacaaattgtgctgttttaggaatggccgttactaatgttgaagaagtatataatcttattcaatcaatagtacatgctttaggggctgctggaggatatatgcttgctatagtattaatgtcatttttaagagaaaagatagatgacaatgaagaaatacatccttattttagagggttaccaataactctttttacagcagcacttatgtctatagcctttttaggattccaaggacttatataa

SEQ ID NO: 38354 - protein, 191 aa, Clostridium perfringens str. 13
MELFLIFIGAMLVNNFVLSQFLGICSFIGVSKKKEAAVGMGLAVTFVMVLASIISWLVYNLILDKFNITYLKTIVFVLVIASLVQFVEMVVKKYSPSLYKALGIFLPLITTNCAVLGMAVTNVEEVYNLIQSIVHALGAAGGYMLAIVLMSFLREKIDDNEEIHPYFRGLPITLFTAALMSIAFLGFQGLI

SEQ ID NO: 38355 - DNA, 585 bp, Fusobacterium nucleatum subsp. nucleatum ATCC 25586
  CDS (1)..(585): transl_table=11
atgagtataggtggattatttagtataattattacttcaatatttataaataacataatatttgctaagttcttaggttgctgtccatttatgggagtttctaaaaaggttgactcatcattaggaatggggatggctgttaccttcgttattacaatagcttcaggagtaacttggatagtttacagaaagatattagaacctcttggtttaggatatttacaaacaatagcttttatattaataatagcttctcttgtacaattcgttgaaatggcaattaaaaagacatcaccaagtctatataaagcacttggagtatttttaccattaatcacaacaaactgtgctgttctaggggttgctataataaatatccaagaaggatataattttatagaaacaatagtaaatggttttggagttgcagtaggtttctcactagcattgttacttttagctggaatcagagaaagattagaatatgcaaacattcctaaaaacttcaaaggagttccaatagcatttatcacagctggacttttagctatggcatttatgggatttagtggaatgcaaatttaa

SEQ ID NO: 38356 - protein, 194 aa, Fusobacterium nucleatum subsp. nucleatum ATCC 25586
MSIGGLFSIIITSIFINNIIFAKFLGCCPFMGVSKKVDSSLGMGMAVTFVITIASGVTWIVYRKILEPLGLGYLQTIAFILIIASLVQFVEMAIKKTSPSLYKALGVFLPLITTNCAVLGVAIINIQEGYNFIETIVNGFGVAVGFSLALLLLAGIRERLEYANIPKNFKGVPIAFITAGLLAMAFMGFSGMQI

SEQ ID NO: 38357 - DNA, 600 bp, Methanosarcina acetivorans C2A
  CDS (1)..(600): transl_table=11
gtggttaaaatggcagaatctctatttacaatctttcttgaaggagtgttcatcaagaactttcttctcattcagttcctgggtctatgttcttttgtgggcgtgaccaaggacttgaaaagtgcttcagggatgtcgggcgctgtagtcttcgtcatggcgatggcagcaaccgtatcctttgctctgtataatttcattttagtacccctcaagctggagttcctgcggactatcgctttcatcgtggttatcgcagcacttgtgcagcttgtagagtttatcgtcaggaaacatgtgcctgccctctaccgttccctcgggatctacctgcctctgattaccaccaactgtgcggtgctcggggctgtgctcctcaatgtcatgaacgattacgatctcgctcagagcgttgtcttcggagttgccgcagggcttggctatacggttgctatgctgatgatggctgcaataagggaaaggagcgacctggtagaagtgccgaagtccgtaggaaggggtgtaacatacgccttcttcattgcgactattatgtcaatgtctttcgtgaacttcttcggggtgattccgcttgagtag

SEQ ID NO: 38358 - protein, 199 aa, Methanosarcina acetivorans C2A
MVKMAESLFTIFLEGVFIKNFLLIQFLGLCSFVGVTKDLKSASGMSGAVVFVMAMAATVSFALYNFILVPLKLEFLRTIAFIVVIAALVQLVEFIVRKHVPALYRSLGIYLPLITTNCAVLGAVLLNVMNDYDLAQSVVFGVAAGLGYTVAMLMMAAIRERSDLVEVPKSVGRGVTYAFFIATIMSMSFVNFFGVIPLE

SEQ ID NO: 38359 - DNA, 603 bp, Yersinia pestis KIM
  CDS (1)..(603): transl_table=11
ttgacgatggaacattatatcagtctgttggtccgcgcagtgtttgtggagaatatggcgttagcgttctttctgggaatgtgtactttcctggccgtctctaaaaaagtgtcaacggcctttggcttaggcattgcggtaacggttgttctgggcatctccgtgccagccaataatttggtttataacctggttctacgagatggcgcattggttgaaggggttgaccttagcttcctgaatttcattaccttcattggggtcattgccgccattgttcaggtgttggagatgatcctcgatcgttacttccctgcgttatataacgcgctgggtatttttctgccgctaatcaccgtgaactgcgccatctttggtggcgtgtcgtttatggcacagcgtgattacaacttccctgaatccatcgtttatggctttggttctggtatggggtggatgctggcgattgttgcattagcggggatccgcgaaaaaatgaaatatgccaatgtgcctgcgggcttacaggggctagggatcacctttatctcaaccggattgatggcattaggttttatgtctttcgccggtgtgaacctataa

SEQ ID NO: 38360 - protein, 200 aa, Yersinia pestis KIM
MTMEHYISLLVRAVFVENMALAFFLGMCTFLAVSKKVSTAFGLGIAVTVVLGISVPANNLVYNLVLRDGALVEGVDLSFLNFITFIGVIAAIVQVLEMILDRYFPALYNALGIFLPLITVNCAIFGGVSFMAQRDYNFPESIVYGFGSGMGWMLAIVALAGIREKMKYANVPAGLQGLGITFISTGLMALGFMSFAGVNL

SEQ ID NO: 38361 - DNA, 645 bp, Yersinia pestis KIM
  CDS (1)..(645): transl_table=11
ttgtcgtcgggccgtcaattttggataataggcggcttttatttttttaggtcccgcaatgcaatgactgaatacctgctcctatttgtcggcacagttttggtaaataactttgttctggtcaagtttcttggcctgtgcccgtttatgggcgtctctaaaaaactggaaaccgccattggtatgggtctggcgaccactttcgtgctgacattggcatcggtttgcgcctggatggtcaatagctttattttgctgccactcggcctgatctatttgcgaacactggccttcattttagttatcgctgtcgtggtgcaattcaccgagttggtggtccgcaaaaccagcccgacactttaccgcttgctgggtatctttctccccctgatcaccaccaattgtgccgttttaggggtcgcactactcaatgtgaatcaatcgcataatttcatgcaatccgcggtctatggttttagtgctgctgcgggtttctctttggtcatggtgttatttgccgctattcgtgagcgcctggctgtggcggatgtccctgcgcccttccgtgggtcttctatcgccttaatcactgccgggctgatgtctctggcctttatgggctttaccggtttggtgaagttctaa

SEQ ID NO: 38362 - protein, 214 aa, Yersinia pestis KIM
MSSGRQFWIIGGFYFFRSRNAMTEYLLLFVGTVLVNNFVLVKFLGLCPFMGVSKKLETAIGMGLATTFVLTLASVCAWMVNSFILLPLGLIYLRTLAFILVIAVVVQFTELVVRKTSPTLYRLLGIFLPLITTNCAVLGVALLNVNQSHNFMQSAVYGFSAAAGFSLVMVLFAAIRERLAVADVPAPFRGSSIALITAGLMSLAFMGFTGLVKF

SEQ ID NO: 38363 - DNA, 582 bp, Shigella flexneri 2a str. 301
  CDS (1)..(582): transl_table=11
atgactgactacctgttactgtttgtcggaactgtactggtcaataactttgtactggtcaagtttctcggtctctgtccgtttatgggggtttccaaaaaactggaaaccgcgatgggcatggggctggcaacaacgtttgtgatgacgctgacgtctatttgcgcctggcttatcgatacgtggattttgatcccacttaatctgatttacctgcgcaccctggcatttattctggtgattgctgtggtcgtgcagttcaccgagatggtggtgcgcaaaaccagcccggtgctttaccgtctgctggggatttttttgccgcttatcaccaccaactgtgcagtgctcggcgtggcgttgctgaatatcaatctcgggcacaatttcttgcagtcggcgctgtacggtttttccgccgctgtcggtttctcgctggtgatggtgctcttcgccgccatccgcgaacgccttgctgtggctgatgtcccggcaccttttcgcggtaatgccattgcgttaattaccgcaggtcttatgtctctggcctttatgggctttagtggtttggtgaagttgtaa

SEQ ID NO: 38364 - protein, 193 aa, Shigella flexneri 2a str. 301
MTDYLLLFVGTVLVNNFVLVKFLGLCPFMGVSKKLETAMGMGLATTFVMTLTSICAWLIDTWILIPLNLIYLRTLAFILVIAVVVQFTEMVVRKTSPVLYRLLGIFLPLITTNCAVLGVALLNINLGHNFLQSALYGFSAAVGFSLVMVLFAAIRERLAVADVPAPFRGNAIALITAGLMSLAFMGFSGLVKL

SEQ ID NO: 38365 - DNA, 609 bp, Shewanella oneidensis MR-1
  CDS (1)..(609): transl_table=11
atggaacactatattaatctgtttatacaggccactttcttagacaacatggcgctgtcgttcttcctcggtatgtgtaccttcttagcggtgtctaaaaaggtgtcgaccgccttcggcttaggcgttgcagttattgtggtaatgaccttagccgtgcccttaaaccaactgatctatgcgaaggtgttagcacctggcgctctggcttgggcgggtatgcctggcatcgatttaagctatctgcaactgatcacctttatcggtgtgattgcagccttagtgcaaattttggaaatgtttttagataaatacattccaagcctgtatgactcacttgggatcttcttgccactgctcaccgtaaactgcgcgatttttgctggggtgatctttatggctaaccgcgattacaactttgccgaatcggcggtatttgccatgggttcgggcacaggttgggcgttggcgattgtgatgctggctggacttcgtgagcgcatgaagttccatgcgattcccgaaggcttacaggggattggtatcacctttattaccacagggttgatggcgctaggctttatgtctttctcggggatctcgctgtaa

SEQ ID NO: 38366 - protein, 202 aa, Shewanella oneidensis MR-1
MEHYINLFIQATFLDNMALSFFLGMCTFLAVSKKVSTAFGLGVAVIVVMTLAVPLNQLIYAKVLAPGALAWAGMPGIDLSYLQLITFIGVIAALVQILEMFLDKYIPSLYDSLGIFLPLLTVNCAIFAGVIFMANRDYNFAESAVFAMGSGTGWALAIVMLAGLRERMKFHAIPEGLQGIGITFITTGLMALGFMSFSGISL

SEQ ID NO: 38367 - DNA, 609 bp, Shewanella oneidensis MR-1
  CDS (1)..(609): transl_table=11
atggaacattatattagcctgttaattcgctctgttttcattgaaaacatggcactggccttcttcctcggtatgtgtactttcttagctgtatcgaagaaagtgaccactgcgatgggcctagggattgcggtagttgtagtgttaactatctctgttcctgctaaccaagttatttaccaagggctgttagcacctggcgcattggcttgggccggcgcacctgaagctgacctaagcttcttgaaattcattacctttatcggtgtgatcgcggctttagttcaaattctggaaatggcactggataagtactttcctcctttgtataacgcgttaggtatcttcttacctctgatcactgtgaactgtgcgattttcggtgcggtatcatttatggttgagcgtgactataaactgggtgaaagtctggtgtttggtttcggctctggagtaggttgggcattagctatcgtattgatggccggtatccgtgagaagctgaagtatgccgatgtgcctaatggcctgcgtggtttgggtattacctttattactgctggtttaatggccttaggtttcatgtcgttttctggtgtgtctctataa

SEQ ID NO: 38368 - protein, 202 aa, Shewanella oneidensis MR-1
MEHYISLLIRSVFIENMALAFFLGMCTFLAVSKKVTTAMGLGIAVVVVLTISVPANQVIYQGLLAPGALAWAGAPEADLSFLKFITFIGVIAALVQILEMALDKYFPPLYNALGIFLPLITVNCAIFGAVSFMVERDYKLGESLVFGFGSGVGWALAIVLMAGIREKLKYADVPNGLRGLGITFITAGLMALGFMSFSGVSL

SEQ ID NO: 38369 - DNA, 576 bp, Clostridium tetani E88
  CDS (1)..(576): transl_table=11
atgaagatatttaccatatttttaagtgcgctattagttaataacttcgttttatctagattcttaggaatatgtcctttccttggtgtttccaaaaaagtagaaactgctacaggaatgggggcagcagttacgtttgttatggcgttagcgtctattatgacttatttagttgaaaaatttatactagtaaaatttgagataacatatttatcaacattggcatttatacttgttatagcatctctagttcaatttgttgagatggtaattaaaaaggtaagtcctgatttgtataaagcattaggtatattcttacctttaataacaacaaactgtgctgttctaggagttgcagttattaacagtgatgaaggatatactttaattgaatcattagtaaactctgtaggagcggcactaggatttacattagcccttgttttacttgcaggaattagagaaaagttagatactaacgaatatataccagaagcactaaaaggtctaccaataacacttgttacagcaggattaatggctatagcgtttctaggattccaaggactaatataa

SEQ ID NO: 38370 - protein, 191 aa, Clostridium tetani E88
MKIFTIFLSALLVNNFVLSRFLGICPFLGVSKKVETATGMGAAVTFVMALASIMTYLVEKFILVKFEITYLSTLAFILVIASLVQFVEMVIKKVSPDLYKALGIFLPLITTNCAVLGVAVINSDEGYTLIESLVNSVGAALGFTLALVLLAGIREKLDTNEYIPEALKGLPITLVTAGLMAIAFLGFQGLI

SEQ ID NO: 38371 - DNA, 639 bp, Vibrio parahaemolyticus RIMD 2210633
  CDS (1)..(639): transl_table=11
ttgttattggtgtcacaaaacacgataatattgagatcggattttaagaacgtaataactatgaccgaatatgttttgttgttggtcggcactgtgctggtgaacaactttgtactggtgaagtttttgggcttgtgtccatttatgggcgtgtctaaaaaactggaaacagcaataggcatggggttagcaaccacttttgtgctaacccttgcatctgtgtgtgcgtacttagtggaaagctatatcttgcgaccgctcggtatcgagtacttaagaaccatgagctttattttggtgatcgctgtcgtggtacagttcaccgagatggttgtacacaaaactagcccgaccctttatcgcttgcttggtatcttcttaccactaatcacgaccaactgtgccgtattgggtgttgcacttctcaacatcaatgagaatcataacttcatcgaatctatcatttatggttttggtgcagccgtcggtttttcacttgtattgatcctttttgcttctatgcgtgagcgtatcgctgcggctgacgtgcctgttccatttaaaggtgcatcgattgcaatgatcacagcgggtttaatgtcgcttgctttcatgggctttacaggtttggtgaagtaa

SEQ ID NO: 38372 - protein, 212 aa, Vibrio parahaemolyticus RIMD 2210633
MLLVSQNTIILRSDFKNVITMTEYVLLLVGTVLVNNFVLVKFLGLCPFMGVSKKLETAIGMGLATTFVLTLASVCAYLVESYILRPLGIEYLRTMSFILVIAVVVQFTEMVVHKTSPTLYRLLGIFLPLITTNCAVLGVALLNINENHNFIESIIYGFGAAVGFSLVLILFASMRERIAAADVPVPFKGASIAMITAGLMSLAFMGFTGLVK

SEQ ID NO: 38373 - DNA, 573 bp, Bacteroides thetaiotaomicron VPI-5482
  CDS (1)..(573): transl_table=11
atggaatatatattgatatttatctcggcaatctttgtaaacaacattgtgttgtcgcagttcctgggaatctgtccgttcctgggtgtttccaagaaggtggaaacagcgatgggtatgagtgcggcagttgctttcgtgctgactatcgctaccatcgtcacattcctgattcagaagtttgtgttggacgctttcggattggggtacttacagacaatcacttttattctggttattgccggactggtgcagatggtagaaattattctgaagaaagtttctccttctttgtatcaggcactgggtgtgttcctgccgttgattacaacgaactgctgtattctcggtgtggcaatcctggtcatccagaaagactttgatctgctgacaggtgttgtatacgcattctctactgctcttggctttggtctggcactggtattgtttgccggattgcgtgagcagatgaccctggtgaagattccgaaaggaatgcaggggactccgattgctttgattaccgcaggtttgctggcaatggcattcatgggcttctctggcgtcgtgtaa

SEQ ID NO: 38374 - protein, 190 aa, Bacteroides thetaiotaomicron VPI-5482
MEYILIFISAIFVNNIVLSQFLGICPFLGVSKKVETAMGMSAAVAFVLTIATIVTFLIQKFVLDAFGLGYLQTITFILVIAGLVQMVEIILKKVSPSLYQALGVFLPLITTNCCILGVAILVIQKDFDLLTGVVYAFSTALGFGLALVLFAGLREQMTLVKIPKGMQGTPIALITAGLLAMAFMGFSGVV

SEQ ID NO: 38375 - DNA, 627 bp, Bacteroides thetaiotaomicron VPI-5482
  CDS (1)..(627): transl_table=11
atggaacatttattaagtttattcgtccgctccatctttgtggacaacatgatattcgcgttcttcttgggtatgtgctcatatctggctgtatcgaagaatgtgaagactgccgtaggactgggtatagccgtaacattcgtgttgctggttacgcttccggtgaactatttattgcaaaccaaggtgctggctgccaacgctatcattgaaggtgttgacctcagcttcctgagttttattcttttcattgccgttattgccggtatcgtgcaattggtggagatggtggtagaacgtttcagcccgtcgctgtatgcttcactgggtatctttctgccgttgatcgccgttaactgtgctatcatgggtgcttctttgtttatgcaacaacgcatcaatctgggtgcaagcgatccgaaatacatcggtgatgtatgggatgcgctgtcttacgcactcggttcgggtatcggctggctgctggctatcgtcggtctggctgctatccgtgagaaaatggcttactctgatgtacctgctccgctaaaaggtctgggtatcacatttatcactgtaggtctgatggcaatcgcatttatgtgtttctctggtttgaacatctaa

SEQ ID NO: 38376 - protein, 208 aa, Bacteroides thetaiotaomicron VPI-5482
MEHLLSLFVRSIFVDNMIFAFFLGMCSYLAVSKNVKTAVGLGIAVTFVLLVTLPVNYLLQTKVLAANAIIEGVDLSFLSFILFIAVIAGIVQLVEMVVERFSPSLYASLGIFLPLIAVNCAIMGASLFMQQRINLGASDPKYIGDVWDALSYALGSGIGWLLAIVGLAAIREKMAYSDVPAPLKGLGITFITVGLMAIAFMCFSGLNI

SEQ ID NO: 38377 - DNA, 609 bp, Nitrosomonas europaea ATCC 19718
  CDS (1)..(609): transl_table=11
atgaacagtctggccggtttatttattaccgcagttttcgtcgagaatcttgcgcttactttttttcttggcatgtgcacttttctggccatttccaaaaaaatagaggtggcgttcggcatgggaattgccgtgatcgtcgtccagacattgacggttcccatcaataatctggtttatcagtacctgcttcgtgacggtgctctggtctgggcaggtctggcggagattgatttaactttcctcgggctcgtcagttatcttggggttatcgccgcgatagtacagattctggaaatgtttctggatcgtttcatgccggctctgcacagtgcattgggcatctatctgccactgattgccgtgaattgtgccattctgggtggttcattgttcatggtggaacgtgactataattttactgagagccttgtatatggtctcggctccggtttcggttgggcgttggcaattgttgcgctggctggtgtacgtgaaagactcaaatattcggatgtgccagacggtttacagggactgggcattacttttatcagtgcgggattgatggctatgggattcatggccttctccggcattcggctttaa

SEQ ID NO: 38378 - protein, 202 aa, Nitrosomonas europaea ATCC 19718
MNSLAGLFITAVFVENLALTFFLGMCTFLAISKKIEVAFGMGIAVIVVQTLTVPINNLVYQYLLRDGALVWAGLAEIDLTFLGLVSYLGVIAAIVQILEMFLDRFMPALHSALGIYLPLIAVNCAILGGSLFMVERDYNFTESLVYGLGSGFGWALAIVALAGVRERLKYSDVPDGLQGLGITFISAGLMAMGFMAFSGIRL

SEQ ID NO: 38379 - DNA, 573 bp, Porphyromonas gingivalis W83
  CDS (1)..(573): transl_table=11
atggaatttttcatgttattcatagcggcggttttcgttaataacgtcgtgctgtcgcagttcctcggtatatgcccattcttaggcgtatcgaagaaggtagacacctcaatcggtatgggtgcagccgtgacattcgtattggcactggctaccttggttaccttcctgattcagaagttcgttttggatcgtttcggattgggctttatgcagaccattgcatttattttggtcattgccgccttggtgcagatggtggagatcatactcaagaaagtatctcctcccctctatcaggcactgggtgtattcttgcccttgattacgacgaactgctgtgtgctcggtgtggctattttggttatccagaaggattataccctgctccagagcttcgtctatgcaatatccacggctatcggtttcaccttggcaatggttactttcgcaggtattcgagagcaactcgatatgaccaatctccccaaagctatgaagggaataccttcggcactcttggctgccggtatattggctatggctttcatgggcttcagcggtatcgcctaa

SEQ ID NO: 38380 - protein, 190 aa, Porphyromonas gingivalis W83
MEFFMLFIAAVFVNNVVLSQFLGICPFLGVSKKVDTSIGMGAAVTFVLALATLVTFLIQKFVLDRFGLGFMQTIAFILVIAALVQMVEIILKKVSPPLYQALGVFLPLITTNCCVLGVAILVIQKDYTLLQSFVYAISTAIGFTLAMVTFAGIREQLDMTNLPKAMKGIPSALLAAGILAMAFMGFSGIA

SEQ ID NO: 38381 - DNA, 615 bp, Porphyromonas gingivalis W83
  CDS (1)..(615): transl_table=11
atggattacataagtatgtttgtccgctcgatattcgtggacaatatggtttttgcctactacttgggaatgtgttctttcttggccgtttccaagaatgtgaagacctctatcggactcggagctgccgtgactttcatcttggtctgcaccttgcccatcaactatctgttacagaactatattttcaaggccggtgctctttcttggctcggatcccaatatgccgaagtggatctgagcttcctctcactgatcatctttatcgcggtgattgcatcctttacgcagctcgtggaaatggtggtggagagattcagcccctccctctatgcttcgctgggtatcttccttcccttgatcgcggtgaactgcgcgatcctcggaggatcgcttttcatgcagcagcgtgagtttatcaatgtcgggatggctaccgtctatggattcggctccggtatcggctggatgctggctatcgtagggatggctgccatacgcgagaagctggcatattccaacgtccccaaaccgttgagagggttgggtatcacttttattatcaccggtctcatgggtattgctttcctgagcttctccggcgtgaaactctaa

SEQ ID NO: 38382 - protein, 204 aa, Porphyromonas gingivalis W83
MDYISMFVRSIFVDNMVFAYYLGMCSFLAVSKNVKTSIGLGAAVTFILVCTLPINYLLQNYIFKAGALSWLGSQYAEVDLSFLSLIIFIAVIASFTQLVEMVVERFSPSLYASLGIFLPLIAVNCAILGGSLFMQQREFINVGMATVYGFGSGIGWMLAIVGMAAIREKLAYSNVPKPLRGLGITFIITGLMGIAFLSFSGVKL

SEQ ID NO: 38383 - DNA, 597 bp, Photorhabdus luminescens subsp. laumondii TTO1
  CDS (1)..(597): transl_table=11
atggaacattttataagcctgtttgtccgcgctgtctttattgagaacatggcgttggctttcttcctcggtatgtgcacctttttggccgtatcgaaaaatgtcacaacagcgtttggtctgggtattgccgtcacggtggttttagggatctcggttcctgctaataacctggtgtataacttggtattgcgtgacggtgcattggttgaaggggttgatctcagctttctgaactttattacatttattggcgtgattgctgcattagtgcagattcttgaaatgatccttgatcgttatttcccttcactctataacgcgcttggcatttttttaccactgattacggttaactgtgcgatttttggtggtgtctctttcatggcgcagcgtgactataacttttctgaatccatcgtgtatggttttggctcaggtataggttggatgttggcaattgttctgctggcttctatccgtgaaaaaatgaaatatgctgatgttccagcgggtctgaaaggattggggatcacctttgtcactacgggtttgatggcattgggttttatgtccttctctggtgtccagttataa

SEQ ID NO: 38384 - protein, 198 aa, Photorhabdus luminescens subsp. laumondii TTO1
MEHFISLFVRAVFIENMALAFFLGMCTFLAVSKNVTTAFGLGIAVTVVLGISVPANNLVYNLVLRDGALVEGVDLSFLNFITFIGVIAALVQILEMILDRYFPSLYNALGIFLPLITVNCAIFGGVSFMAQRDYNFSESIVYGFGSGIGWMLAIVLLASIREKMKYADVPAGLKGLGITFVTTGLMALGFMSFSGVQL

SEQ ID NO: 38385 - DNA, 582 bp, Photorhabdus luminescens subsp. laumondii TTO1
  CDS (1)..(582): transl_table=11
atgactgactattttcttttatttgtcggaaccgtattggttaacaatttcgtcttggtgaaattcctcggcttatgccctttcatgggcgtatctaaaaagctggaaactgccatcgggatgggatttgcgacaacatttgttatgacactagcctctgtatgttcatggctggtgaatacttttattctattaccactggacttaatctatttgcgtactctgagctttattcttgtcattgcggtcgtagtgcaattcacagagcttgttgtacgcaaaaccagcccgacgttataccggttattaggtattttcttgccgttgattacgacgaactgtgctgtactgggtgtggcgctgctgaatatcaatcaatcacacgattttttacaatccgctatctatggtttcggtgctgccgccggtttctctctcgttatggtactgtttgccgctattcgcgaacgtctggctgttgctgatgtacccgcccctttcaaggggtcatctattggtcttattactgcgggtttaatgtccttggcttttatgggctttagtggtttggtgaaattctga

SEQ ID NO: 38386 - protein, 193 aa, Photorhabdus luminescens subsp. laumondii TTO1
MTDYFLLFVGTVLVNNFVLVKFLGLCPFMGVSKKLETAIGMGFATTFVMTLASVCSWLVNTFILLPLDLIYLRTLSFILVIAVVVQFTELVVRKTSPTLYRLLGIFLPLITTNCAVLGVALLNINQSHDFLQSAIYGFGAAAGFSLVMVLFAAIRERLAVADVPAPFKGSSIGLITAGLMSLAFMGFSGLVKF

SEQ ID NO: 38387 - DNA, 639 bp, Vibrio vulnificus YJ016
  CDS (1)..(639): transl_table=11
ttgttattacccggacaaagcacgataatatcgggatcggatttgcagaacgtaataattatgaccgaatatattttgttgttgattggcaccgtcctcgtaaacaactttgtactggtgaagtttctcggattgtgtcccttcatgggcgtgtcaaaaaaattggaaaccgcaattggtatgggcttggcaacgacctttgtccttactatggcttccgtgtgcgcttatcttgttgaaagctacattcttgagccattgcacatcgaatacctacgaaccatgagctttattttggtgattgcggtggtggtccagtttacggaaatggtggttcacaagaccagcccaaccctctatcgcctgctgggtatttttctacctttgattaccaccaactgtgccgtgttgggggttgctctactgaatatcaatgaaaaccactcgtttgttgaatccatcatctatggttttggtgcagcggttggtttttctttagtactgattctgtttgcttcgatgcgtgagcgcatttctgcagcggatgtgcccgcgccttttaaaggggcttccattgcgatgattactgcaggattaatgtcgctagcgtttatgggctttacggggttggtgaaataa

SEQ ID NO: 38388 - protein, 212 aa, Vibrio vulnificus YJ016
MLLPGQSTIISGSDLQNVIIMTEYILLLIGTVLVNNFVLVKFLGLCPFMGVSKKLETAIGMGLATTFVLTMASVCAYLVESYILEPLHIEYLRTMSFILVIAVVVQFTEMVVHKTSPTLYRLLGIFLPLITTNCAVLGVALLNINENHSFVESIIYGFGAAVGFSLVLILFASMRERISAADVPAPFKGASIAMITAGLMSLAFMGFTGLVK

SEQ ID NO: 38389 - DNA, 573 bp, Treponema denticola ATCC 35405
  CDS (1)..(573): transl_table=11
atgcccgaaacacttagtatttttctttctgcaatccttgtaaaaaacgtagttttaatgcgctttttagccctttgcccctttataggaatgtcctccgacgtaaaaaaatcggtaggcatgggctgggccgtactcttcgttactcttttggccacagccgtaacctatcccatatacaattacgtattgataggaaacctcgaattccttcagacccttatctttatcttggtaattgcaagcttggttcagctggtagaattctatctaaaaaaagcggctcctgccctttacagctcgatgggggtttatttggccctgattacgacaaactgtgcaatccttgcagttacaatcgatgccattgatgaaggctatacctttgtacaagcccttgttcatgctgcaggttcagctttcggctttatgatttcgctcttgcttttggcaggcttaagacaaagaatagataatgcccctgttccgaaattcttaaaaggaacgcccattctctttattgctgcagcccttctatccatggcatttgaaggtttcaaaggactgatttaa

SEQ ID NO: 38390 - protein, 190 aa, Treponema denticola ATCC 35405
MPETLSIFLSAILVKNVVLMRFLALCPFIGMSSDVKKSVGMGWAVLFVTLLATAVTYPIYNYVLIGNLEFLQTLIFILVIASLVQLVEFYLKKAAPALYSSMGVYLALITTNCAILAVTIDAIDEGYTFVQALVHAAGSAFGFMISLLLLAGLRQRIDNAPVPKFLKGTPILFIAAALLSMAFEGFKGLI

SEQ ID NO: 38391 - DNA, 588 bp, Clostridium thermocellum ATCC 27405
  CDS (1)..(588): transl_table=11
atgagtgatgctagtttgatgattataattatatcagctttgctggtaaagaattttgtgctttcgcagtttttaggaatttgcccgtttttgggggtttccacgaagctttccacagccatgggaatgggctgtgcggtaacctttgttatgacgattgcgtcctttgttacaaaactcttgtatgacggcttgcttgttacttttgaacttcaatacctgcaaactatattgtttattcttgttatagcggcacttgtacagcttgttgagattatattgaagaagtttgtgcctcctctttacagggcgctgggtatttatcttcctctcattactaccaactgcgccgtgctgggagtggcactgcttaatatcgacgagggatttgaccttttgaggtccacggtttatggttttgcagccgggcttggatttactcttgccttgattctgtttgcgggggtaagggaaagattggagtacagtaatataccggaatccttcaagggacttccgatagcgctgatttcagcagcttttgtttccctggcattctttggtttccaaggacttctgggtatataa

SEQ ID NO: 38392 - protein, 195 aa, Clostridium thermocellum ATCC 27405
MSDASLMIIIISALLVKNFVLSQFLGICPFLGVSTKLSTAMGMGCAVTFVMTIASFVTKLLYDGLLVTFELQYLQTILFILVIAALVQLVEIILKKFVPPLYRALGIYLPLITTNCAVLGVALLNIDEGFDLLRSTVYGFAAGLGFTLALILFAGVRERLEYSNIPESFKGLPIALISAAFVSLAFFGFQGLLGI

SEQ ID NO: 38393 - DNA, 594 bp, Clostridium difficile 630
  CDS (1)..(594): transl_table=11
atgaatttagctaaagtatttaaaaatgggctaatagatgagaacccaacatttgttcaagttataggtatgtgtccaacactagccgttacaacttcagcaataaatggaattggtatgggtctttcaacagcagcagttttaatatgtgcaaatttagttatatctttaataagaaaaattacaccagataagataagaatacctatatttatagtagttatagctacatttgttacaatagtaggtatgcttttaaaagcatatgttcctgctcttgataaggctcttggtatatatataccattaatagttgttaactgtttaatattagctcgtgcagaaagttttgctttcaaaacaggagctatgccttcaatagttgatggtgtaggtcaaggtcttggatttactgttgcacttacaataataggtgcagtaagagaattacttggaaatggtagtttatttggaatgacattatttggagcatctttccaaccagtattaatatttatattaccaccaggtgcattcttaacattaggattcttatttgcaggatttaataaattaagaagtaaaaaagcatag

SEQ ID NO: 38394 - protein, 197 aa, Clostridium difficile 630
MNLAKVFKNGLIDENPTFVQVIGMCPTLAVTTSAINGIGMGLSTAAVLICANLVISLIRKITPDKIRIPIFIVVIATFVTIVGMLLKAYVPALDKALGIYIPLIVVNCLILARAESFAFKTGAMPSIVDGVGQGLGFTVALTIIGAVRELLGNGSLFGMTLFGASFQPVLIFILPPGAFLTLGFLFAGFNKLRSKKA

SEQ ID NO: 38395 - DNA, 576 bp, Clostridium difficile 630
  CDS (1)..(576): transl_table=11
atgaatttaatacttttatttttaagtatcgttcttgttaataacgttataacatctcaattcttgggtatatgtcctttcttgggagtttctaagaaggttgatacagcagtagggatgggagttgcagttacgttcgttttaactctagcttcaattataacttattttatacagattttattagtaaaaactggaactggattcttacaaacaatagcttttatattggttatagcttctatagttcagttcgttgaaatggtaattcaaaagatgagtccatctttatatcaagcattaggagtttatttacctcttataactacaaactgtgcagttcttggtatagctctagttaatgttcaaaaaagttataatttagtagaaacaataataaacggatttggagccggagctggatttactttagcaatagtaatattcgcaggtataagagaaagactagaattagctgatataccagaagcatttaaaggtttccctataacgcttatatcagcaggtttaatgtcaatagctttcttaggatttacaggacttataaagctataa

SEQ ID NO: 38396 - protein, 191 aa, Clostridium difficile 630
MNLILLFLSIVLVNNVITSQFLGICPFLGVSKKVDTAVGMGVAVTFVLTLASIITYFIQILLVKTGTGFLQTIAFILVIASIVQFVEMVIQKMSPSLYQALGVYLPLITTNCAVLGIALVNVQKSYNLVETIINGFGAGAGFTLAIVIFAGIRERLELADIPEAFKGFPITLISAGLMSIAFLGFTGLIKL

SEQ ID NO: 38397 - DNA, 612 bp, Dichelobacter nodosus VCS1703A
  CDS (1)..(612): transl_table=11
atggaacactatctcagtctactgattaaatcgatttttattgaaaatatggcgctttcctttttcttgggaatgtgcacttttttagcggtttctaaaaaaattagtacggcaatcggtttgggtactgctgttattgtggtgcaaactttaaccgtgccgctgaataatttgctttatgtgtacttattaaaagataacgccattttatggcaacatttaggcgtcaacgttgatatcagctttttgggattaattgcttacattggcgtgattgccgccgtggtgcaaatcttagaaatgtttttggataaatacgttccggctttgtattctgctttaggaatttttctgccattgattacggtcaattgcgcgattcttgctggctcgttgtttatggttgaaagaaattacactttccaagaatccatggtttatggagtagggagcggtgttggttgggcgttggctattgccgtgatggcaggcgtgcgcgaaaaaatgcgttacgctgatgttcctaaaggtcttgaaggattaggaattacgtttatcaccgctggtttgatggcaataggttttatgtcattttcaggcattcaactgtaa

SEQ ID NO: 38398 - protein, 203 aa, Dichelobacter nodosus VCS1703A
MEHYLSLLIKSIFIENMALSFFLGMCTFLAVSKKISTAIGLGTAVIVVQTLTVPLNNLLYVYLLKDNAILWQHLGVNVDISFLGLIAYIGVIAAVVQILEMFLDKYVPALYSALGIFLPLITVNCAILAGSLFMVERNYTFQESMVYGVGSGVGWALAIAVMAGVREKMRYADVPKGLEGLGITFITAGLMAIGFMSFSGIQL

SEQ ID NO: 38399 - DNA, 744 bp, Candidatus Protochlamydia amoebophila UWE25
  CDS (1)..(744): transl_table=11
atgtggatgggaccctacagcgtgctaaacctttttggtttgttattacaagctgtatttattgagaactttttacttgtcaatttcttaggaatgtgtacctatttagcctgttctaataagctaaaaacagctaatggattgggtatcgctgttgtttttgtattgacagtttctggagttttaaattggtttgtgcatcgttttgtgacaggcccgggagctttaacctggctaagtgcattcggaatagatagttctcaagtcaatctcggttttttggagtttctactatttatctctgtgattgcaggttttacacaaatcctcgaaatcatcattgaaaaagtctctcccgccctttatatgtcgcttggactctatcttcctctcattgcagtcaattgtgcgattttaggagcttgcttatttgcagtgactcgagattatccttttttccctaaccttatttacgtctttggttcagctgtaggctggtggcttgccattgctttgattgcagctattcgagaaaaaatagcgatatctaatgtggttcccgaattaaaaggaatggggattacttttatcatgtcaggattaatgtctatggcatttatggggtttactggtatcaagcttgctgatccttcgccaccagaagctacttctgaacaacctttaaaagaattggcgttatcggatgattcttcctctcaggaaacattgacgttaagcaaataa

SEQ ID NO: 38400 - protein, 247 aa, Candidatus Protochlamydia amoebophila UWE25
MWMGPYSVLNLFGLLLQAVFIENFLLVNFLGMCTYLACSNKLKTANGLGIAVVFVLTVSGVLNWFVHRFVTGPGALTWLSAFGIDSSQVNLGFLEFLLFISVIAGFTQILEIIIEKVSPALYMSLGLYLPLIAVNCAILGACLFAVTRDYPFFPNLIYVFGSAVGWWLAIALIAAIREKIAISNVVPELKGMGITFIMSGLMSMAFMGFTGIKLADPSPPEATSEQPLKELALSDDSSSQETLTLSK

SEQ ID NO: 38401 - DNA, 576 bp, Desulfovibrio vulgaris subsp. vulgaris str. Hildenborough
  CDS (1)..(576): transl_table=11
atggacgtattcgagattttcatctcagccatcttcgtcaacaacatcgtcctcgcccagtatctcggcaactgcccgtatctcggctgttcccgcgagaagggcgtggccctcggcatgggggcggcggttgtcttcgtcatcatcatggcgacgctgtgcacatggctcatccagtaccatgtgctggttcccttcgacctcgcctatctccagaccatcgtgttcattctggtcatcgcggggcttgtgcagttcgtcgagatgttcctcaagaagatggtgccccccctgtatgcggcactgggcatcttccttccgctcatcaccaccaactgcgccgtcatgggcgtgaccatcctcgtacagcgcgaagaatacgacctcatgacctcgctcacgtacggtctggcttccagcctcggcttcgtgctggcgctgctgctcatggcgggcatccgcgagcgactcgacacggcgcgggtacccaaggccatgataggcacgcccatcgcgctcatcatggcggggctcatgtcgctggcgttcatggccttcaagggcatgacctcgtag

SEQ ID NO: 38402 - protein, 191 aa, Desulfovibrio vulgaris subsp. vulgaris str. Hildenborough
MDVFEIFISAIFVNNIVLAQYLGNCPYLGCSREKGVALGMGAAVVFVIIMATLCTWLIQYHVLVPFDLAYLQTIVFILVIAGLVQFVEMFLKKMVPPLYAALGIFLPLITTNCAVMGVTILVQREEYDLMTSLTYGLASSLGFVLALLLMAGIRERLDTARVPKAMIGTPIALIMAGLMSLAFMAFKGMTS

SEQ ID NO: 38403 - DNA, 582 bp, Erwinia carotovora subsp. atroseptica SCRI1043
  CDS (1)..(582): transl_table=11
atgaccgaatacgcattgctctttgttagcatccttctggtaaataatttcgtcttagtgaagtttcttgggctgtgcccctttatgggcgtgtccaaaaaactagagacggcgattggcatgggaatggcgaccacgtttgtgatgacgctgggctcgatgttttcctggctgatcaacgaatttattcttgtcccgctcgacattctctatttacgcaccatggcttttattctggtgctcgccgttgtggtgcagttctccgagatgttcgtgcgcaaagttagccctgagctgtatcgcctgctggggattttcctaccgctgatcaccaccaactgtgccgtgcttggcgtcgtcttgctcaacatcaacctgtcgcacggttttctgcaatcgacaatttatggtttcggcggtgccgcaggattctcactggtgatggtccttttcgccgccatccgcgagcgcctcgccgtgtcggacattcccgcgccgttccgaggttcgtctatcgcactgatcaccgctggcctgatgtcgctggcatttatgggctttaccggactggtgaaattctga

SEQ ID NO: 38404 - protein, 193 aa, Erwinia carotovora subsp. atroseptica SCRI1043
MTEYALLFVSILLVNNFVLVKFLGLCPFMGVSKKLETAIGMGMATTFVMTLGSMFSWLINEFILVPLDILYLRTMAFILVLAVVVQFSEMFVRKVSPELYRLLGIFLPLITTNCAVLGVVLLNINLSHGFLQSTIYGFGGAAGFSLVMVLFAAIRERLAVSDIPAPFRGSSIALITAGLMSLAFMGFTGLVKF

SEQ ID NO: 38405 - DNA, 609 bp, Desulfotalea psychrophila LSv54
  CDS (1)..(609): transl_table=11
atggcccactatcttgatattatcgtccgcgctatattcatagagaacctgcctcttagtttttttctgggtatgtgtacctttcttgccatctctaagcaggtgaagacagccatggggctgggctttgccgtcttggttctgcagattataaccgtgcccattaacaatctcctgcttacccatgttctcaagccgggggccctggcatggcttggtcagcccgatcttgacctgcgctttcttggtttgctcacctatatctctattattgccgccgtggtgcaggtactggaaatggtcctggaccgttttatccccgccctttacaacagtcttggtatttttctgcccttgctcaccgtcaactgtgcaattttgggagcaagcctctttatggtggagagaaactatacttttgccgagagtgcggcctatggtgtcggggccgggggaggtttttttctggccgtggtctgtcttgccggcattcgggaacgtcttgaatatgccaatcctcctgctggtctgaaggggctgggcttgacctttattactacagggctcattgccatcgcctttatgggctttgccggtatggaaatataa

SEQ ID NO: 38406 - protein, 202 aa, Desulfotalea psychrophila LSv54
MAHYLDIIVRAIFIENLPLSFFLGMCTFLAISKQVKTAMGLGFAVLVLQIITVPINNLLLTHVLKPGALAWLGQPDLDLRFLGLLTYISIIAAVVQVLEMVLDRFIPALYNSLGIFLPLLTVNCAILGASLFMVERNYTFAESAAYGVGAGGGFFLAVVCLAGIRERLEYANPPAGLKGLGLTFITTGLIAIAFMGFAGMEI

SEQ ID NO: 38407 - DNA, 588 bp, Symbiobacterium thermophilum IAM 14863
  CDS (1)..(588): transl_table=11
atggagatcctggcgatcctgatcggcggcatcctggtcaacaactatatcttctcccgcttcctgggcctctgcccgttcttcggcgtctccaacaagctggagacggtctacggaatgggcgccgcggtcgtcttcgtcatgacgctggcctcggccatcacctggccgctgcagcatctccttctggagccgctggggctgggctacctgcagacggtggccttcatcctggtgatcgccgccctggtgcagacggtggagatggtcatccagcgggtcagccccaccctgtacgccgccctgggcatcttcctcccgctgctcaccaccaactgcgccgttctgggcgccgcgctgctgaatatcacccagggttacggcttcatgacgtccgtgctgaacggcttcgcctgcggcgttggctggaccctggcgacgctgctcttcgccggcgtgcgggagcggatcgagggggcgcacatcccgccggcgatgcggggtatgcccatcgcgttcgtcgcggccggcctgatggcgctggccttcatgggcttccagggcctctttcgcgggatcctcttctaa

SEQ ID NO: 38408 - protein, 195 aa, Symbiobacterium thermophilum IAM 14863
MEILAILIGGILVNNYIFSRFLGLCPFFGVSNKLETVYGMGAAVVFVMTLASAITWPLQHLLLEPLGLGYLQTVAFILVIAALVQTVEMVIQRVSPTLYAALGIFLPLLTTNCAVLGAALLNITQGYGFMTSVLNGFACGVGWTLATLLFAGVRERIEGAHIPPAMRGMPIAFVAAGLMALAFMGFQGLFRGILF

SEQ ID NO: 38409 - DNA, 597 bp, Mannheimia succiniciproducens MBEL55E
  CDS (1)..(597): transl_table=11
atggaacattacattagtctatttgtaaagtctgtgttcattgagaacatggcgctttctttcttccttggtatgtgtacattcctcgcggtgtcgaagaaagtttcaacagcattcggcttaggtattgccgttatcgtcgtattaggtatttcagtaccggtaaaccaactagtttatacccatatattaaaagacggtgcactaattgaaggtgtggatttaagtttcttaaacttcatcactttcatcggcgttattgcggcattagtacaaatcctagaaatgttcctggataaattcgtaccgtcactttatgaagcgttaggtattttcttaccgttaatcacagtaaactgtgcaattttcggtggcgtatcatttatggttcaacgtgaatataatttcccggaatccgtagtatatggtatcggcgcaggtacgggctggatgttagcgattgtggcattagccggtttgacggaaaaaatgaaatatgcggatgttccggcaggcctacgcggtttagggatcacctttatcaccgtcggtctaatggcattaggtttcatgtcattctccggcattcaattataa

SEQ ID NO: 38410 - protein, 198 aa, Mannheimia succiniciproducens MBEL55E
MEHYISLFVKSVFIENMALSFFLGMCTFLAVSKKVSTAFGLGIAVIVVLGISVPVNQLVYTHILKDGALIEGVDLSFLNFITFIGVIAALVQILEMFLDKFVPSLYEALGIFLPLITVNCAIFGGVSFMVQREYNFPESVVYGIGAGTGWMLAIVALAGLTEKMKYADVPAGLRGLGITFITVGLMALGFMSFSGIQL

SEQ ID NO: 38411 - DNA, 630 bp, Mannheimia succiniciproducens MBEL55E
  CDS (1)..(630): transl_table=11
ttgcaaaaacaggataataacgcgcttactcaaacgaattacaccaatatgacagactatatattattaattattagtactgcgctcattaataactttgtcctggttaaatttttagggctttgtccgttcatgggcgtttccaaaaaagtcgaaactgcaatcggcatggggcttgctacaacctttgtattaacggttgcctcactttgtacctatcttgcggacagttatattcttgcaccgttaaacgcatctttcttgcgcacgttagtctttattttggttattgcggtcgtagtacaatttactgaaatggtaatcaacaaaaccagtccgacgctctatcgtttgttaggtatttttcttccgcttattaccacaaactgtgccgtattaggggttgcgctgcttaatattaatttagctcataatttaaccgagtctgtcatttatggatttggcgcctcattaggttttgctctggtccttgttcttttcgcctctttacgcgaacgcctggcggcggcagatgtaccggcgccttttaaaggcgcgtctatcgcattagttaccgccggcttgatgtccttggttttcatgggctttaccgggcttattcgggtttaa

SEQ ID NO: 38412 - protein, 209 aa, Mannheimia succiniciproducens MBEL55E
MQKQDNNALTQTNYTNMTDYILLIISTALINNFVLVKFLGLCPFMGVSKKVETAIGMGLATTFVLTVASLCTYLADSYILAPLNASFLRTLVFILVIAVVVQFTEMVINKTSPTLYRLLGIFLPLITTNCAVLGVALLNINLAHNLTESVIYGFGASLGFALVLVLFASLRERLAAADVPAPFKGASIALVTAGLMSLVFMGFTGLIRV

SEQ ID NO: 38413 - DNA, 609 bp, Methylococcus capsulatus str. Bath
  CDS (1)..(609): transl_table=11
atggaagcctacatcaatctgttcatcaagtcggtcttcatcgagaacatggccctgtcgttcttcctgggcatgtgcaccttcatcgcggtgtcgaagaagatcgaaacggccgtgggcttgggcatcgccgtggtgatcgtgcagaccctgacggtgccggccaacaacctgatctacacctatctgctcaaggaaggtgccttgtcctgggctggcctgcacgacgtcgacctcagcttcatcgcgctgatggcctgtatcggcgtgatcgccgccatggtccagattctggagatggtgctcgacaagttcttcccggccctttacaacgccttgggtattttcctgccgctgattacggtgaactgtgccatcctggccggttcgctgttcatgatcgaacgtgattacaacttctcggagagcgtggtgtatggcgtgggcagcggtttcggctgggcgctcgccatcactgcgatggccggcgtgcgcgagaagctcaagtacagcgacgttccggcgggcctgcgcggcctgggcatcaccttcatctccgcgggtctgatggcactgggtttcatggccttctccggcatacagttataa

SEQ ID NO: 38414 - protein, 202 aa, Methylococcus capsulatus str. Bath
MEAYINLFIKSVFIENMALSFFLGMCTFIAVSKKIETAVGLGIAVVIVQTLTVPANNLIYTYLLKEGALSWAGLHDVDLSFIALMACIGVIAAMVQILEMVLDKFFPALYNALGIFLPLITVNCAILAGSLFMIERDYNFSESVVYGVGSGFGWALAITAMAGVREKLKYSDVPAGLRGLGITFISAGLMALGFMAFSGIQL

SEQ ID NO: 38415 - DNA, 582 bp, Methylococcus capsulatus str. Bath
  CDS (1)..(582): transl_table=11
gtgaacgactacctgatgctgctgctcggcacggccctggtcaacaacgtggtgctggtcaagttcctcggactgtgccctttcatgggggtgtccaggaagctcgattccgccgtcggcatgggattcgcgacgaccttcgtgctgaccctgaccgcggtggcgagctggctcatcgagcatttcgtcctgatgccgctgggcatcggcttcctgcgcatcctctcgttcatcctggtgatcgcagcggtggtccagttcaccgagatggtggtgaagaagaccagcccggtgctgtatcaggtgctgggcatcttcctgccgctgatcaccaccaactgcgcggtgctgggagtggcgctgctgaacatccagcaggaatacgatttcattcacagcgcgctgttcggtttcggttcggcgctggggttcaccctggtcatggtgatcttcgccggcatccgagagcggctggccctgatgagcgtgcccgaggcattcaccggcccgcccattgccttcatcaccgcgggcatcctctccctggcgttcatggggttcgcaggattggccacgcattga

SEQ ID NO: 38416 - protein, 193 aa, Methylococcus capsulatus str. Bath
MNDYLMLLLGTALVNNVVLVKFLGLCPFMGVSRKLDSAVGMGFATTFVLTLTAVASWLIEHFVLMPLGIGFLRILSFILVIAAVVQFTEMVVKKTSPVLYQVLGIFLPLITTNCAVLGVALLNIQQEYDFIHSALFGFGSALGFTLVMVIFAGIRERLALMSVPEAFTGPPIAFITAGILSLAFMGFAGLATH

SEQ ID NO: 38417 - DNA, 582 bp, Methylococcus capsulatus str. Bath
  CDS (1)..(582): transl_table=11
atgaaagactatctgttgatcctcgtcagcacgaccctggtgaacaacttcgtcctggtgaagttcctgggactttgccccttcatgggcgtgtcccgcaaatcggagacggcgatcggtatgggactggcgacgaccttcgtgctgaccctgtcttcggtcagcagttacctggtcgaccgtttcctactggagccgatggggctgcaatacctgcgcaccctggccttcatcgtggtgatcgcggtggtggtccagttcaccgaaatggtcgtaaaaaagaccagcccgctgctataccaggtgctggggatttttctgccgctgatcaccaccaactgtgcagtgctcggcgtggccttgctcaatgtccaggcgggccatgatttcatcgaatccttcctctacggcttcggcgccgccgccggcttcaccctggtgctggtgctgttcgccggcctgcgcgagcggatcgatgccgcggacgtgccggcgccgttccgcggcagtgccatcgcactggtcaccgcgggcctgatttccgtcgccttcatgggcttctccggcctggtcagaggctga

SEQ ID NO: 38418 - protein, 193 aa, Methylococcus capsulatus str. Bath
MKDYLLILVSTTLVNNFVLVKFLGLCPFMGVSRKSETAIGMGLATTFVLTLSSVSSYLVDRFLLEPMGLQYLRTLAFIVVIAVVVQFTEMVVKKTSPLLYQVLGIFLPLITTNCAVLGVALLNVQAGHDFIESFLYGFGAAAGFTLVLVLFAGLRERIDAADVPAPFRGSAIALVTAGLISVAFMGFSGLVRG

SEQ ID NO: 38419 - DNA, 582 bp, Azoarcus sp. EbN1
  CDS (1)..(582): transl_table=11
atgcacgaatatgcgctcctgctgctgtcgaccgcgctcgtcaacaacgtcgtgctggtcaaattcctcggcctgtgcccggcgatgggcgtatcgaaaagcatggatgccgcgctcggcatggggttggcgacgactttcgtcatcacgctcgcggcagcggcgagctggatgctcgagcactggctgctggcgccgttcgacctcggcttcctgcgcatcctgagcttcatcctggtcatcgcggcggcggtgcaattcaccgaaatggcgatccgcaagatgagcccggcgctgtaccagagcctcggcatctacttgccgctgatcacgacgaactgcgcagtgctgggcgttgcgctgctcaacgtccagcagggctacggcttcttcaagagcgtgctgttcggctttggttcggcgctcggcttcacgctcgtactgctgatcttcgccggcctgcgcgaacgcctcgccctcgcgtccgtcccggccgctttcgccggcgccccggccgcattcatcacgatcagcctgctgagcctcgccttcatggggctgtccgggctggtcgccacctga

SEQ ID NO: 38420 - protein, 193 aa, Azoarcus sp. EbN1
MHEYALLLLSTALVNNVVLVKFLGLCPAMGVSKSMDAALGMGLATTFVITLAAAASWMLEHWLLAPFDLGFLRILSFILVIAAAVQFTEMAIRKMSPALYQSLGIYLPLITTNCAVLGVALLNVQQGYGFFKSVLFGFGSALGFTLVLLIFAGLRERLALASVPAAFAGAPAAFITISLLSLAFMGLSGLVAT

SEQ ID NO: 38421 - DNA, 585 bp, Azoarcus sp. EbN1
  CDS (1)..(585): transl_table=11
atgagtagttacatctttgtcgtcatcggcgcggtcctggtcaataacgtcgtttttgtccgcatcctcgggctgtgtccgttcatgggggtgtcgaaaaaactcgagacggcgatcggcatgggtgcggcgacgacgttcgtgctgaccctgggctcgggcacgagctacctgatcgaccactacctgctgcagccgtacgacctcgcctacctgcgcacgctgtcgttcatcgtcgtgatcgcggcgatcgtgcagctcaccgagctggtgatccagaagacgagcccgctgctgcaccaggtgctgggaatctacctgccgttgatcacgacgaactgcgcagtgctcggcgtcccgctgctgagcgtcgcgctcgactacaacctgctcgagtcgctgctgttcggcttcggctcgtcgatcggattcacgctcgcgctgatcctgttcgccggcatccgcgagcgcctggacggcgccgacgtccccgcgcccttcaagggaaccgcgatcgcgatgatcaccgcgggattcatgagtctcgcgttcatgggtttcgcgggcctggaccggttccagtaa

SEQ ID NO: 38422 - protein, 194 aa, Azoarcus sp. EbN1
MSSYIFVVIGAVLVNNVVFVRILGLCPFMGVSKKLETAIGMGAATTFVLTLGSGTSYLIDHYLLQPYDLAYLRTLSFIVVIAAIVQLTELVIQKTSPLLHQVLGIYLPLITTNCAVLGVPLLSVALDYNLLESLLFGFGSSIGFTLALILFAGIRERLDGADVPAPFKGTAIAMITAGFMSLAFMGFAGLDRFQ

SEQ ID NO: 38423 - DNA, 609 bp, Silicibacter pomeroyi DSS-3
  CDS (1)..(609): transl_table=11
atggaagggctgatttccctcgcggtcaaggccgtattcgtcgagaacctggcgctcagcttctttctcggcatgtgtaccttcatcgcggtgtccaagaagatctcgaccgcattgggcctgggtatctcggtcatggtggtgcaggcgatcaccgtgccggccaacaacctgctgctgaatacgctcttgaaaccgggagcgctggcctgggcgggtttcccggatgtggacctgaccttccttggtctgatctcgtatatcggggtgatcgcggcgatggtgcagatcctcgagatgatcctcgataagtatttcccgccgctctataacgcacttggcatcttcctgccgctgatcacggtgaactgcgccattctgggcggttctctgttcatggtggagcgtgactacaactttgccgaggcgacgacctatggcctgtcctcgggctttggctgggcgctggccatcaccgccatggcgggcgtgcgcgagaagctgaaatattccgacgtgccggacgggcttcagggtctgggcatcaccttcattaccgcggggctgatggcgatggccttcatgtccttctcgggcgtcaaactgtaa

SEQ ID NO: 38424 - protein, 202 aa, Silicibacter pomeroyi DSS-3
MEGLISLAVKAVFVENLALSFFLGMCTFIAVSKKISTALGLGISVMVVQAITVPANNLLLNTLLKPGALAWAGFPDVDLTFLGLISYIGVIAAMVQILEMILDKYFPPLYNALGIFLPLITVNCAILGGSLFMVERDYNFAEATTYGLSSGFGWALAITAMAGVREKLKYSDVPDGLQGLGITFITAGLMAMAFMSFSGVKL

SEQ ID NO: 38425 - DNA, 597 bp, Haemophilus influenzae 86-028NP
  CDS (1)..(597): transl_table=11
atggaacattatattagcctatttgttaaggcagtcttcattgaaaatatggcactttctttcttcttaggaatgtgtactttcttagcggtatctaaaaaggtgtccactgcgtttggtcttgggattgcggtaactttcgttcttggtatcgcagtgccagtaaaccaattaatttatgcaaatgtactaaaagaaaatgctttaattgaaggtgtagatttatcattcttaaacttcatcactttcattggggttattgctggtttagtgcaaattcttgaaatggtgttagataaatttatgccatctctttataacgcattagggattttcttacctttaatcgcagtaaactgtgcgatctttggtggggtatctttcatggttcaacgtgattacaatttccctgaatctatcgtgtatggtttcggctcaggtttaggttggatgttagcgattgtagcgcttgctggcttaacggaaaaaatgaaatacgctgatattcctgctggattaaaaggtttaggtattacctttatctctgttggtttaatggcactaggctttatgtctttctctggtattcaattataa

SEQ ID NO: 38426 - protein, 198 aa, Haemophilus influenzae 86-028NP
MEHYISLFVKAVFIENMALSFFLGMCTFLAVSKKVSTAFGLGIAVTFVLGIAVPVNQLIYANVLKENALIEGVDLSFLNFITFIGVIAGLVQILEMVLDKFMPSLYNALGIFLPLIAVNCAIFGGVSFMVQRDYNFPESIVYGFGSGLGWMLAIVALAGLTEKMKYADIPAGLKGLGITFISVGLMALGFMSFSGIQL

SEQ ID NO: 38427 - DNA, 579 bp, Haemophilus influenzae 86-028NP
  CDS (1)..(579): transl_table=11
atgacgcactatattttattgattatcggcaccgcattaattaacaattttgtattggtaaaattcttaggactttgcccttttatgggtgtatccaaaaaaattgaaaccgctgtgggaatgggattagcaacaatgtttgttttaactgttgcttccctttgtgcatatttggtcgatcactatattctaattcccttaaatgccacttttttacgtacattagtgtttattttagttattgctgtagtggtgcaatttaccgaaatggcaataaacaaaacaagtccaacattatatcgtttactcggcattttcttgcctttgataactacaaactgcgcagtacttggtgtcgcattattaaatgtaaatctcgctcataatttaacagagtctgtcgtttatggttttggtgcatctctcggtttttccttagtattggtactttttgccgcacttcgtgaacgtttagtcgccgctgatatacctgccacttttcgcggttcagccattgctttaattaccgcaggcttaatgtccctcgcttttatgggatttacaggacttgtaaaataa

SEQ ID NO: 38428 - protein, 192 aa, Haemophilus influenzae 86-028NP
MTHYILLIIGTALINNFVLVKFLGLCPFMGVSKKIETAVGMGLATMFVLTVASLCAYLVDHYILIPLNATFLRTLVFILVIAVVVQFTEMAINKTSPTLYRLLGIFLPLITTNCAVLGVALLNVNLAHNLTESVVYGFGASLGFSLVLVLFAALRERLVAADIPATFRGSAIALITAGLMSLAFMGFTGLVK

SEQ ID NO: 38429 - DNA, 624 bp, Colwellia psychrerythraea 34H
  CDS (1)..(624): transl_table=11
atggaacattatttaagtatttttattaaaaccattttcattgagaatatggcgttaagcttcttcttaggtatgtgtactttcttagcagtatcaaagaaagttagcacagcgattggcttaggtgttgcagttgttgtagtgctcggtttagcggttcctgctaaccaaatcatctaccaagcaattttagcaccgggtgcacttgacagcttaatggggattactgatccgaaagaatcaattgaccttagctttttgtcatttattacctttatcggggtaattgctgctttagtacaaattttagaaatgcttttagataagtatttcccagctttgtatcaagcgcttggcatcttcctacctttaatcacggttaactgtgccatttttggtgccgtttcctttatggttgcgaaaaaccttacccttggcgaaagtgtcgtttacggcgttggctcaggtataggttggatgttagccattgtattgatggctggtttgcgcgaaaagatgaaatattctgatgtaccaaacggtttgaaaggtttaggtattacatttattactgctggattgatggcttttggctttctttctttcggtggtatttcgttataa

SEQ ID NO: 38430 - protein, 207 aa, Colwellia psychrerythraea 34H
MEHYLSIFIKTIFIENMALSFFLGMCTFLAVSKKVSTAIGLGVAVVVVLGLAVPANQIIYQAILAPGALDSLMGITDPKESIDLSFLSFITFIGVIAALVQILEMLLDKYFPALYQALGIFLPLITVNCAIFGAVSFMVAKNLTLGESVVYGVGSGIGWMLAIVLMAGLREKMKYSDVPNGLKGLGITFITAGLMAFGFLSFGGISL

SEQ ID NO: 38431 - DNA, 582 bp, Colwellia psychrerythraea 34H
  CDS (1)..(582): transl_table=11
atgactgattatctgttacttctcgttggcactgtactcgtaaacaactttgttttagtacaatttcttggcctatgcccttttatgggtgtttcgtcacgtactgaaacagctataggcatgtcattcgccactgttttcgtcatgactttagcctctctactgagttatttagttaccacatatctgcttgtaccactaaaccttgaatacctaaccaccatgagttttatattggtgatagccgtcgtcgtacaatttactgaaatggttgttcataaaaccagtgctagcctttatcgcttattaggtattttcttacccttgatcaccacaaactgtgcggtcttgggtgttgccttgctgaatttaaggttacaacacggcttttttgaatcaattatttatggctttggtgctgcgctaggtttttcattggtattaattatgttttctgccatgcgtgaaaagttagccaatgccgatgtacctgcaccttttaaaggtactgctattgcaatgataaccgcaggtttaatgtcattagcattccttggttttaccggtttggtgaaaatttaa

SEQ ID NO: 38432 - protein, 193 aa, Colwellia psychrerythraea 34H
MTDYLLLLVGTVLVNNFVLVQFLGLCPFMGVSSRTETAIGMSFATVFVMTLASLLSYLVTTYLLVPLNLEYLTTMSFILVIAVVVQFTEMVVHKTSASLYRLLGIFLPLITTNCAVLGVALLNLRLQHGFFESIIYGFGAALGFSLVLIMFSAMREKLANADVPAPFKGTAIAMITAGLMSLAFLGFTGLVKI

SEQ ID NO: 38433 - DNA, 585 bp, Dechloromonas aromatica RCB
  CDS (1)..(585): transl_table=11
atgagccactatatattcatcctcatcggcacggtgctggtcaacaatgtggtgttggtcagaattctcggcctttgccccttcatgggcgtgtccaaaaagctggaaacagcctacggcatgggtgccgccacgacgttcgtgctcaccgtgggcacgggggccagctggatcatcgaccactacctgctgatgccgtttgacctgatgtatctgcgcatcatcgccttcatcgtcaccatcgccgcctttgtccagctgaccgaactggtcatccagaagaccagtccgatgctgcatcagacgctcggcatctacctgccactgatcaccaccaactgcgccgtactcggtgtgcccttgctggcgctcggcgccaagtacgatttcgtcgaatcactgctcttcggtgccggcagctccgtcggcttctcgctcgccctgatcctttttgccggcctgcgcgaacgtatcgagggcgccgacgtcccgacctatttcaagggcaccgccatcgccctcgtcaccggcggcttgatgtcgctggccttcatgggcttcgccggactggataaataccaatga

SEQ ID NO: 38434 - protein, 194 aa, Dechloromonas aromatica RCB
MSHYIFILIGTVLVNNVVLVRILGLCPFMGVSKKLETAYGMGAATTFVLTVGTGASWIIDHYLLMPFDLMYLRIIAFIVTIAAFVQLTELVIQKTSPMLHQTLGIYLPLITTNCAVLGVPLLALGAKYDFVESLLFGAGSSVGFSLALILFAGLRERIEGADVPTYFKGTAIALVTGGLMSLAFMGFAGLDKYQ

SEQ ID NO: 38435 - DNA, 582 bp, Dechloromonas aromatica RCB
  CDS (1)..(582): transl_table=11
atgaaagaatttgccctgatgatgataggcgcggcactggtgaacaacgtgatcctggcgcgcttcctcggcctctgttcgttcatgggagtgacgacgcgggtcgataccgcggccggtatggggctggcgaccaccttcgtgatcactgtctcgtcgatggctgattgggcggtgcagacctacctgctcgatgcctacggcttgggcttcctgcgcacggtgaccttcatcctggtcattgccagcgcggtgcaatttaccgaaatgacgatcaagaaggtgtcgcccagcctgttccagatgctcggtatctacctgccgctgatcacgaccaattgcgcggtgctcggtgttgcgctgctgctggtcgaaggcaagatgggcttcctgagctcgacgatgttcgctttcgcctcgtcggtcggctacagcctggtcatgatcattttcgccggactgcgtgagcgccttgtcctggcccatgtcccccgcttgttcgccggtccccccatcgccttcatcgtcgccggcatgctggccatggcgttcatggggttttccggcatcgccacgagctga

SEQ ID NO: 38436 - protein, 193 aa, Dechloromonas aromatica RCB
MKEFALMMIGAALVNNVILARFLGLCSFMGVTTRVDTAAGMGLATTFVITVSSMADWAVQTYLLDAYGLGFLRTVTFILVIASAVQFTEMTIKKVSPSLFQMLGIYLPLITTNCAVLGVALLLVEGKMGFLSSTMFAFASSVGYSLVMIIFAGLRERLVLAHVPRLFAGPPIAFIVAGMLAMAFMGFSGIATS

SEQ ID NO: 38437 - DNA, 576 bp, Thiobacillus denitrificans ATCC 25259
  CDS (1)..(576): transl_table=11
gtggaaacctatatcctcattctcatctccacggtgttcgtgaacaacatcgtgatggccaagattctcggcttgtgtcccttcatgggggtgtcgaagaaactcgaaacggcgatcggcatggggctcgcgaccaccttcgtgctgacgctggcctcggggtcgagctacctgatcaacgaatacctgctcggcaccgacctgttctatctgcgcacgctgtccttcatcgtcgtgattgcgggcatcgtgcagttcaccgagatgttcatccacaagacgagcccggtgctgtatcaggtactcgggatctatctcccgctcatcacgacgaactgcgccgtgctcggaattccgctcctcaacgtccaggcgcagaacggcttcgtcgaatcgctgttcttcggcgccggcggcgcgatcggattcacgctcgtgctgatccttttcgccggcatccgcgagcgtctcgacacctgtgacgtgcctgccccgttcaagggcacgagcatcgcgatggtcaccgcgggactgatgtcgctcgccttcatgggcttctcgggcctggtcaagtaa

SEQ ID NO: 38438 - protein, 191 aa, Thiobacillus denitrificans ATCC 25259
METYILILISTVFVNNIVMAKILGLCPFMGVSKKLETAIGMGLATTFVLTLASGSSYLINEYLLGTDLFYLRTLSFIVVIAGIVQFTEMFIHKTSPVLYQVLGIYLPLITTNCAVLGIPLLNVQAQNGFVESLFFGAGGAIGFTLVLILFAGIRERLDTCDVPAPFKGTSIAMVTAGLMSLAFMGFSGLVK

SEQ ID NO: 38439 - DNA, 582 bp, Rhodobacter sphaeroides 2.4.1
  CDS (1)..(582): transl_table=11
atgggcgatttcttcttcatcctgctcagcaccgcgctcgtgaacaacgtggttctggtcaagtttctggggctctgtcccttcatgggcgtgtcgcgcaagaccgacgcggccatcggcatgggcctcgccaccaccttcgtgctgacccttgccgccggcgcgagctggatggtcgaggcgctgatcctcgagccgctcgatctcaccttcctgcgcatcctgagcctcatcctcgtgatcgcggcgatcgtgcagttcatcgaagtggtgatgcgcaagctggccccggggctgcacagggcgctcgggatctacctgccgctcatcacgaccaactgtgccgtcctcggcgtggcgctcctgaacatccaggaggggcacgggcttgcctcgagcctgctctacggcttcggttcggcctcgggcttcaccctcgtcctcgtgatcttcgccggtatgcgcgagcgtctggcgcagctttcggtgcccggtcccttcgcgggcgcgcccatcgccttcatttccgcaggtctcctgtcgatggccttcatgggcttcgcgggacttgccccgaactga

SEQ ID NO: 38440 - protein, 193 aa, Rhodobacter sphaeroides 2.4.1
MGDFFFILLSTALVNNVVLVKFLGLCPFMGVSRKTDAAIGMGLATTFVLTLAAGASWMVEALILEPLDLTFLRILSLILVIAAIVQFIEVVMRKLAPGLHRALGIYLPLITTNCAVLGVALLNIQEGHGLASSLLYGFGSASGFTLVLVIFAGMRERLAQLSVPGPFAGAPIAFISAGLLSMAFMGFAGLAPN

SEQ ID NO: 38441 - DNA, 576 bp, Desulfovibrio desulfuricans G20
  CDS (1)..(576): transl_table=11
atggattatttcctgcttttgatctcggcgatctttgtcaacaacattgttcttgcccagtatctcggtcagtgcccctaccttggctgttccaaggaaaaaggtgtcagtctgggcatgggcggcgccgtcatattcgtcatgatgctggctacccccatcacatggctgctgcagaagtttgtgcttaccccgctgcatcttgattatctgcagaccattatgttcattctggtcattgcgtctcttgtgcagctggtcgagatgttccttaaaaagatggtgcccccgctgtacagctcactgggcatttttctgccgctcattaccaccaactgcgcggttctcggtgtggccattctggtgcagcgcaaagagttcgacctcggcacgtcggtcttttacgcgtttgcggcagggctcggctttatgctggctctggtgctgcttgccggtctgcgcgagcggctggagatcacccgtgtgccgcgcgcccttgcgggtgtgccggtggggctggttatggcggggcttatgtccatggctttcatggccttccagggcatgatttcctag

SEQ ID NO: 38442 - protein, 191 aa, Desulfovibrio desulfuricans G20
MDYFLLLISAIFVNNIVLAQYLGQCPYLGCSKEKGVSLGMGGAVIFVMMLATPITWLLQKFVLTPLHLDYLQTIMFILVIASLVQLVEMFLKKMVPPLYSSLGIFLPLITTNCAVLGVAILVQRKEFDLGTSVFYAFAAGLGFMLALVLLAGLRERLEITRVPRALAGVPVGLVMAGLMSMAFMAFQGMIS

SEQ ID NO: 38443 - DNA, 576 bp, Saccharophagus degradans 2-40
  CDS (1)..(576): transl_table=11
atgaccgaatttgccgtcatattattaagcactgtattggtaaacaacttcgtgcttgtgcaatttcttggcctgtgcccatttatgggggtttccaacaaactggaaacagccataggcatgagcacggccaccaccttcgtgttaactctggcgtctatttgtagctttatggttcacagttgggtgctagagccgctcgggcttacctacttaaaaaccatttcgtttattttggttattgccgctgtagtgcaatttgccaaaatgtttattgaaaaaaccagccctctactcaatcgagtgctgggcgtgtttctaccccttattaccaccaactgtgcggtactcggcgtagcattacaaaacaccaatcgcgcccacaactttttagaatccacactctatgggtttggtgccgcactgggtttctcacttgttcttattctattttcagccatgcgcgaacgccttgccgttgccgatgtgcccaccccatttaaaggggcagcaatcggaatgataaccgctgggttaatgtcactcgcatttatgggcttcgcaggactcgtttaa

SEQ ID NO: 38444 - protein, 191 aa, Saccharophagus degradans 2-40
MTEFAVILLSTVLVNNFVLVQFLGLCPFMGVSNKLETAIGMSTATTFVLTLASICSFMVHSWVLEPLGLTYLKTISFILVIAAVVQFAKMFIEKTSPLLNRVLGVFLPLITTNCAVLGVALQNTNRAHNFLESTLYGFGAALGFSLVLILFSAMRERLAVADVPTPFKGAAIGMITAGLMSLAFMGFAGLV

SEQ ID NO: 38445 - DNA, 591 bp, Methanococcoides burtonii DSM 6242
  CDS (1)..(591): transl_table=11
atggctgctgatgtaagtcttttccagatattcatggatggtgtgttcatcaagaacttcctcatcatccagttccttggtctgtgttcctttgtaggtgtaaccaaggatacaaagagtgctgcgggaatgtccggagctgtcattttcgtaatgacactggcagctaccgtgtccttcctcatctataactttgtacttgttccactaaagctagagttccttgatcttattagcttcattgtggtaattgcagcacttgtgcagcttgtagagttcgttgtaaggaagaatgtgccatcactctatcgttcacttggtatctacctgcctctcattacgacaaattgtgcagttctcggtgtagtattgctcaatgttctgaatgaatattctttcatacagagtgtcgttttcggtgtttcagcaggtattggttatgcactggtaatgttgatgatgtccggcatcagggaaagaacgacccttgtgaacgttccgtcatcaatgcgtggtttacctcatgcgttccttattgcgacaatgctgtctatggcgtttgttaactactttggagtgatccccttatga

SEQ ID NO: 38446 - protein, 196 aa, Methanococcoides burtonii DSM 6242
MAADVSLFQIFMDGVFIKNFLIIQFLGLCSFVGVTKDTKSAAGMSGAVIFVMTLAATVSFLIYNFVLVPLKLEFLDLISFIVVIAALVQLVEFVVRKNVPSLYRSLGIYLPLITTNCAVLGVVLLNVLNEYSFIQSVVFGVSAGIGYALVMLMMSGIRERTTLVNVPSSMRGLPHAFLIATMLSMAFVNYFGVIPL

SEQ ID NO: 38447 - DNA, 609 bp, Silicibacter sp. TM1040
  CDS (1)..(609): transl_table=11
atggaaggcttactgtccctcgcggtcaaggcgatctttgttgagaacctggccctgtcgttcttccttggcatgtgtaccttcctggcggtgtccaagaagatctccactgcaatcggtcttggggtttcggtcatgctggtgcagggcatcaccgtgcctgcaaacaacctgatcctgacctaccttctggcgccgggcgcactggcctgggccgggtttggcgatgtggatctgaccttcctgggtctgatctcatacatcggtgtgatcgcggccatggtgcagatcctcgagatgctgctcgataagtatttcccgccgctttacaacgccttgggtgtgttcttgccgctcatcaccgtgaactgcgcgatccttgggggctcgctcttcatggtggaacgcaactatgatttcgccgaggcggcgacatatggtctctcgtccgggtttggctgggcgctggcgatcaccgccatggcgggcgtgcgcgagaagctcaaatactctgacattcccgacgggcttcagggtctcggcatcactttcatcaccgcaggtctgatggcgctggccttcatgtccttcagcggcgtgaaactctga

SEQ ID NO: 38448 - protein, 202 aa, Silicibacter sp. TM1040
MEGLLSLAVKAIFVENLALSFFLGMCTFLAVSKKISTAIGLGVSVMLVQGITVPANNLILTYLLAPGALAWAGFGDVDLTFLGLISYIGVIAAMVQILEMLLDKYFPPLYNALGVFLPLITVNCAILGGSLFMVERNYDFAEAATYGLSSGFGWALAITAMAGVREKLKYSDIPDGLQGLGITFITAGLMALAFMSFSGVKL

SEQ ID NO: 38449 - DNA, 597 bp, Haemophilus somnus 129PT
  CDS (1)..(597): transl_table=11
atggaacattatattagccttttcgtaaaatccgtatttatcgaaaacatggctctttctttcttccttggtatgtgtacattccttgcagtttcaaagaaagtatcaacagcttttggtttaggtgttgcggtgactgttgtattaggcatttctgtgcctgtaaatcaattggtttattctctcattcttaaagatggagctttaattgatggtgttgatttaagtttcttaaatttcatcactttcattggggtaattgctgcattagttcaaattcttgaaatgattttagacaaatatttccccgcactttataacgcattagggattttccttcctttaattacggtaaactgtgcaatctttggtggggtatcttttatggttcagcgtgactataactttgccgagtctgttgtttatggtattggtgcagggaccggttggatgttagctatagttgctcttgccggtattacagagaaaatgaaatatgctgatgttccggcaggtcttcgtgggttaggtatcactttcatcactgttggcttaatggctcttgggtttatgtcattttccggtgttcagttgtaa

SEQ ID NO: 38450 - protein, 198 aa, Haemophilus somnus 129PT
MEHYISLFVKSVFIENMALSFFLGMCTFLAVSKKVSTAFGLGVAVTVVLGISVPVNQLVYSLILKDGALIDGVDLSFLNFITFIGVIAALVQILEMILDKYFPALYNALGIFLPLITVNCAIFGGVSFMVQRDYNFAESVVYGIGAGTGWMLAIVALAGITEKMKYADVPAGLRGLGITFITVGLMALGFMSFSGVQL

SEQ ID NO: 38451 - DNA, 579 bp, Shewanella sp. MR-4
  CDS (1)..(579): transl_table=11
atgagtgaatatctcctgttgttgatcagcacagtgctggttaacaatttcgttttagtgaaattcttaggtttatgtccatttatgggggtctccagcaagttggagtccgctatcggcatgtctatggccacgacctttgtgttgaccttagcgtcaatcctcagttacctcgtcaaccaatatctgttattgccctttgacttaggttacctgcgtaccatgagctttattctggtgattgccgtggtggtgcaatttactgagatggtggtgcaaaaaaccagtgcggctttacaccgcgccctcggtatctatctgccgctcatcaccactaactgcgccgtactcggggttgccctgttaaacgtgaacgaaaaacacgattttattcaatctgctatctatggttttggtgcagcggtgggtttttccttagtgttaattctgttttccgcgatgcgtgaacgtttagctgcggccgacgtgcctatgcctttcaaaggtggcgcgattgccatgatcaccgcagggctgatgtccttggcctttatgggattcacaggattggttaaatag

SEQ ID NO: 38452 - protein, 192 aa, Shewanella sp. MR-4
MSEYLLLLISTVLVNNFVLVKFLGLCPFMGVSSKLESAIGMSMATTFVLTLASILSYLVNQYLLLPFDLGYLRTMSFILVIAVVVQFTEMVVQKTSAALHRALGIYLPLITTNCAVLGVALLNVNEKHDFIQSAIYGFGAAVGFSLVLILFSAMRERLAAADVPMPFKGGAIAMITAGLMSLAFMGFTGLVK

SEQ ID NO: 38453 - DNA, 582 bp, Alkalilimnicola ehrlichei MLHE-1
  CDS (1)..(582): transl_table=11
gtgacggaactggcgctcattctggtctccacagtcctggtcaataatttcgtcctggtcaagttcctggggctctgccccttcatgggcgtctcgcgacagttggagaccgccatggggatggccctggcgaccaccttcgtgctgacgctctcggcggtgtgcagctacctggcctatgagtacctgctggcgccactgggtgtggagtacctgcgcacgatcaccttcatcatggtgatcgccgtggtcgtgcagttcacggagatggcggtgcgcaagaccagtccgttgctgcaccaggtgctgggcatctatctgccgctgatcaccaccaactgcgcggtgctgggcgtggccctgctcaatctgcaggagcagaactctctgctgcaatcggcagtgtacgggttcggcgctgccgctggtttctcactggtgctggtgctgtttgccgctttacgcgagcggttggaggtggcggacgtgcccctgccctttcggggcgcctcggtggcactggttacggcgggcattttgtcgatggggttcatgggttttgccgggctggttcgcctctag

SEQ ID NO: 38454 - protein, 193 aa, Alkalilimnicola ehrlichei MLHE-1
MTELALILVSTVLVNNFVLVKFLGLCPFMGVSRQLETAMGMALATTFVLTLSAVCSYLAYEYLLAPLGVEYLRTITFIMVIAVVVQFTEMAVRKTSPLLHQVLGIYLPLITTNCAVLGVALLNLQEQNSLLQSAVYGFGAAAGFSLVLVLFAALRERLEVADVPLPFRGASVALVTAGILSMGFMGFAGLVRL

SEQ ID NO: 38455 - DNA, 594 bp, Magnetococcus sp. MC-1
  CDS (1)..(594): transl_table=11
atgaccgaagtctccttttccaatttcctgttgatcttgatcagcaccgtgtttgttaacaactatgtgttggcgaagtttcttggcatttgcccctttttgggggtttccaaaaaagtagaaaccgccgtgggcatgacccaagcggtgatgtttgtgatgacattggcctcggttatttcgtggctggtgcagcactatattttggacccgctcaatctgggttatctacaaaccatctcctttattttgatcatcgcttcgttggtgcagctgacggagatggtggtacacaagacctcgccggtactgtacgcctcgttggggatctttttaccgctgatcaccaccaactgtgcggtattgggggtggccctgcttaacattcagcaggaaaacaatctcatcaatgccagtttctatggggtaggtgccgggttgggttttggactggtgcttattctgtttgccggtatgcgggagcgtgtggatctgtcggatgtaccacgattgtttaagggctccccgatttccctgatcaatgctggcctgatgtcgctcgcgtttatgggttttgctggactggtcaaatag

SEQ ID NO: 38456 - protein, 197 aa, Magnetococcus sp. MC-1
MTEVSFSNFLLILISTVFVNNYVLAKFLGICPFLGVSKKVETAVGMTQAVMFVMTLASVISWLVQHYILDPLNLGYLQTISFILIIASLVQLTEMVVHKTSPVLYASLGIFLPLITTNCAVLGVALLNIQQENNLINASFYGVGAGLGFGLVLILFAGMRERVDLSDVPRLFKGSPISLINAGLMSLAFMGFAGLVK

SEQ ID NO: 38457 - DNA, 582 bp, Azoarcus sp. BH72
  CDS (1)..(582): transl_table=11
atgagcgaatggttgatgctgctgctggggaccgccctggtaaataacgtggtgctggtcaagttcctgggcctgtgccccttcatgggggtgtccaagaaggtcgacagcgcgatcggcatgggcatggccaccactttcgtgctgacgctcgcaagcgcgctgacctggctgatcgaacacttcctgctggtgccgttcgacttcggctacctgcgcatcctgtccttcatcctggtgatcgcggcgacggtgcagttcgtcgagatggtcatcaagaagaccgcgcccgacctctacaaggtgctgggcatctacctgccgctgatcaccaccaactgcgcggtgctcggcgtcgcgctgctcaatgccggcgaaggcgccggcttcgtccgcagcgtgctgtacggcttcggctcggcgctcggcttcacgatggtgatggtgctgttcgccggtctgcgcgaacgccttgccctcacctcggtgccggcggccttctccggcgcgccgatcagcttcatcaccgccggcctgctgtcgctcgccttcatgggctttgccggcctcaccaaccactga

SEQ ID NO: 38458 - protein, 193 aa, Azoarcus sp. BH72
MSEWLMLLLGTALVNNVVLVKFLGLCPFMGVSKKVDSAIGMGMATTFVLTLASALTWLIEHFLLVPFDFGYLRILSFILVIAATVQFVEMVIKKTAPDLYKVLGIYLPLITTNCAVLGVALLNAGEGAGFVRSVLYGFGSALGFTMVMVLFAGLRERLALTSVPAAFSGAPISFITAGLLSLAFMGFAGLTNH

SEQ ID NO: 38459 - DNA, 585 bp, Azoarcus sp. BH72
  CDS (1)..(585): transl_table=11
atgagcagctatcttttcgtcgtcatcggcgccgttctggtcaacaacgtcgtcttcgtccgcatcctcgggctgtgccccttcatgggcgtgtcgaagaagctcgaaacggcgatcggcatgggcgccgccaccaccttcgtgctgaccctgggcgccggcagcagctacctgatcgaccactacctgctggtcccggcggacctcggctacctgcgcacgctggcgttcatcgtggtgatcgccgccatcgtgcagctgaccgaactcgtcatccagaagaccagcccgctgctgcatcaggtgctcggcatctacctgccgctgatcaccaccaactgcgcggtgctcggcgttccgctgctcaacgtcggcctcggccacaacctgctcgaatcgctgctgttcgggttcggctcctcggtgggcttcacgttcgcgctggtgctgttcgccggcatccgcgagcggcttgaaggcgccgacgtgccgcagcccttccgcggcaccgcgatcgcgatgatcaccgccggcttcatgagcctcgctttcatgggctttgccggcctcgaccgtttccactga

SEQ ID NO: 38460 - protein, 194 aa, Azoarcus sp. BH72
MSSYLFVVIGAVLVNNVVFVRILGLCPFMGVSKKLETAIGMGAATTFVLTLGAGSSYLIDHYLLVPADLGYLRTLAFIVVIAAIVQLTELVIQKTSPLLHQVLGIYLPLITTNCAVLGVPLLNVGLGHNLLESLLFGFGSSVGFTFALVLFAGIRERLEGADVPQPFRGTAIAMITAGFMSLAFMGFAGLDRFH

SEQ ID NO: 38461 - DNA, 594 bp, Neisseria meningitidis FAM18
  CDS (1)..(594): transl_table=11
atggaacactatttgagcctcttcatcaaatccgtcttcattgaaaatatggcactatccttctttttgggtatgtgcacgtttttggcggtatccaaaaaagtatccaccgcattcggtttgggtgtggcggtaattttcgtactcgggctgtccgtccctgtcaaccaactcgtttactcgctgctcaaagacggcgcgattgtcgaaggcgtggatttgacctttttgaaattcatcaccttcatcggcgtgattgccgctttggtgcagattttggaaatgttcttggataaattcgtccccgccctctataacgcattgggcatctacctgccgctgattaccgtgaactgcgcgattttcggcgccgtatcgtttatggcgcaacgcgaatacaacttcggcgagtccgttgtatacggcttcggcgcgggcttgggctggatgttggcgattgtcgctttggcgggcattaccgaaaaaatgaaatattcggacgctcccaaaggcctcaaaggcttgggcattacctttatcgccgccggcctgatggcgatggcgtttatgtcgttctctggcatccagttataa

SEQ ID NO: 38462 - protein, 197 aa, Neisseria meningitidis FAM18
MEHYLSLFIKSVFIENMALSFFLGMCTFLAVSKKVSTAFGLGVAVIFVLGLSVPVNQLVYSLLKDGAIVEGVDLTFLKFITFIGVIAALVQILEMFLDKFVPALYNALGIYLPLITVNCAIFGAVSFMAQREYNFGESVVYGFGAGLGWMLAIVALAGITEKMKYSDAPKGLKGLGITFIAAGLMAMAFMSFSGIQL

SEQ ID NO: 38463 - DNA, 582 bp, Magnetospirillum magnetotacticum MS-1
  CDS (1)..(582): transl_table=11
atgcaacattaccttctgctgatcatcagcgccgccctggtcagcaatgtcgtgctgatgcggttcctgggcctgtgttccttcatgggcgtcaccacccgggtcgataccgccgtgggcatgggggccgccaccaccttctgcatcaccatttcggccatgctggactggggtctcgagcactatctgctggagccttacgaactgggctatctgcgcaccgtggccttcatcctggtcatcgcggccgccgtgcagttcaccgaggccgtggtccgcaaggtctcgcccgtcatgttccagatgctgggcatctatctgccgctgatcaccaccaactgcgccgtgctgggcgtcaatctgctgctggttgaaggcaagatgaacttcatcgagagcacgctgttcgccctggcctcgtcgctgggctattcgctggtcatggtgctgttcgccggcctcagagagcgtatcgcgctcaacgccgtgccacgcctgttcgccggtccgcccatcggcttcatcaccgccagcttgctggccctggccttcatgggcttttccggtatgagcaccaattag

SEQ ID NO: 38464 - protein, 193 aa, Magnetospirillum magnetotacticum MS-1
MQHYLLLIISAALVSNVVLMRFLGLCSFMGVTTRVDTAVGMGAATTFCITISAMLDWGLEHYLLEPYELGYLRTVAFILVIAAAVQFTEAVVRKVSPVMFQMLGIYLPLITTNCAVLGVNLLLVEGKMNFIESTLFALASSLGYSLVMVLFAGLRERIALNAVPRLFAGPPIGFITASLLALAFMGFSGMSTN

SEQ ID NO: 38465 - DNA, 582 bp, Haemophilus somnus 2336
  CDS (1)..(582): transl_table=11
atgatagattatattttactgattattagtaccgcactgattaataactttgttctagttaaattcttaggactctgtccgtttatgggcgtttcaaaaaaaattgaaactgcgattggcatgggattagcgacaatgtttgtacttactgttgcctcgttgtgtgcttatttagttgagcgttatttactcactccactccatgcaaatttcttacgcaccttgatttttattcttgttatcgctgttgtcgtacaatttactgaaatggtcattcataaaacgagcccaacactttatcgtttactaggtatttttctccctttaattactactaattgtgcagttctcggtgttgcactcctcaatataaacttagcccataacttaactcaatccgtcatttatggattttccgcttcacttggcttttctcttgttcttgttctgtttgccgctttgcgtgaacgccttactgcggcagatattccacttccctttcgaggagcctctattgcgttaattaccgcaggattgatgtctcttgcttttatgggcttttccggtttagtgagagtttaa

SEQ ID NO: 38466 - protein, 193 aa, Haemophilus somnus 2336
MIDYILLIISTALINNFVLVKFLGLCPFMGVSKKIETAIGMGLATMFVLTVASLCAYLVERYLLTPLHANFLRTLIFILVIAVVVQFTEMVIHKTSPTLYRLLGIFLPLITTNCAVLGVALLNINLAHNLTQSVIYGFSASLGFSLVLVLFAALRERLTAADIPLPFRGASIALITAGLMSLAFMGFSGLVRV

SEQ ID NO: 38467 - DNA, 597 bp, Haemophilus influenzae R2866
  CDS (1)..(597): transl_table=11
atggaacattatattagcctatttgttaaggcagtcttcattgaaaatatggcactttctttcttcttaggaatgtgtactttcttagcggtatctaaaaaggtgtccactgcgtttggtcttgggattgcggtaactttcgttcttgggatcgcagtgccagtaaaccaattaatttatgcaaatgtactaaaagaaaatgctttaattgaaagtgtagatttatcattcttaaacttcatcactttcattggggttattgctggtttagtgcaaattcttgaaatggtgttagataaatttatgccatctctttataacgcattagggattttcttaccgttaatcgcagtaaactgtgcgatctttggtggggtatctttcatggttcaacgtgattacaatttccctgaatctatcgtgtatggtttcggctcaggtttaggttggatgttagcgattgtagcgcttgctggcttgacggaaaaaatgaaatacgctgatattcctgctgggttaaaaggtttaggtattacctttatctctgttggtttaatggcactaggctttatgtctttctctggtattcaattataa

SEQ ID NO: 38468 - protein, 198 aa, Haemophilus influenzae R2866
MEHYISLFVKAVFIENMALSFFLGMCTFLAVSKKVSTAFGLGIAVTFVLGIAVPVNQLIYANVLKENALIESVDLSFLNFITFIGVIAGLVQILEMVLDKFMPSLYNALGIFLPLIAVNCAIFGGVSFMVQRDYNFPESIVYGFGSGLGWMLAIVALAGLTEKMKYADIPAGLKGLGITFISVGLMALGFMSFSGIQL

SEQ ID NO: 38469 - DNA, 579 bp, Haemophilus influenzae R2866
  CDS (1)..(579): transl_table=11
atgacgcactatattttattgattatcggcaccgcattaattaacaattttgtattggtaaaattcttaggtctttgcccttttatgggtgtatccaaaaaaattgaaacggctgtgggaatgggattagcaacaatgtttgttttaactgttgcttccctttgtgcatatttggtcgatcactatattctaattcccttaaatgccacttttttacgtacattagtgtttattttagttattgctgtagtggtgcaatttaccgaaatggcaataaacaaaacaagtccaacattatatcgtttactcggcattttcttgcctttgataactacaaactgcgcagtacttggtgtcgcattattaaatgtaaatctcgctcataatttaacagagtctgtcgtttatggttttggtgcatctctcggtttttccttagtattggtactttttgccgcgcttcgtgaacgtttaatcgccgctgatatacctgccacttttcgcggttcatccattactttaattaccgcaggcttaatgtccctcgcttttatgggatttacaggacttgtaaaataa

SEQ ID NO: 38470 - protein, 192 aa, Haemophilus influenzae R2866
MTHYILLIIGTALINNFVLVKFLGLCPFMGVSKKIETAVGMGLATMFVLTVASLCAYLVDHYILIPLNATFLRTLVFILVIAVVVQFTEMAINKTSPTLYRLLGIFLPLITTNCAVLGVALLNVNLAHNLTESVVYGFGASLGFSLVLVLFAALRERLIAADIPATFRGSSITLITAGLMSLAFMGFTGLVK

SEQ ID NO: 38471 - DNA, 579 bp, Prosthecochloris aestuarii DSM 271
  CDS (1)..(579): transl_table=11
atggctgaaattctgcttgttattgtcagtgcgatattcgttaacaacgttgtcttcgcacgctttcttggcatctgtccctatctcggtgtttccagaaacattgaaaccgctctcggtatgggctttgctgtcacctttgtgatgaccatcgcaacagctctcggttacgtcctccagaaagcggttctgattccgtttcacattgagttcatgcagaccgtgatgttcattctggtcatcgcctcgctggtacagcttgtcgagatcattctgaaaaaagtcagcaaatcgctctacagatccctggggatctttctccccctgatcacgaccaactgcgctattctcggtgtcgcccttatctctattcaggaagactacgacctgctcacctcagttgtcttcgcattcttctccgcgatgggcttcattcttgccattctgatgtttgcagggatcagggtaaaactcgaagaagccgacgtcccggcggtgtttaaaaacgttccgatcgggtttatttccgcagcaattctctcgcttgccttcatgggcttctccggactcgtgaagtaa

SEQ ID NO: 38472 - protein, 192 aa, Prosthecochloris aestuarii DSM 271
MAEILLVIVSAIFVNNVVFARFLGICPYLGVSRNIETALGMGFAVTFVMTIATALGYVLQKAVLIPFHIEFMQTVMFILVIASLVQLVEIILKKVSKSLYRSLGIFLPLITTNCAILGVALISIQEDYDLLTSVVFAFFSAMGFILAILMFAGIRVKLEEADVPAVFKNVPIGFISAAILSLAFMGFSGLVK

SEQ ID NO: 38473 - DNA, 627 bp, Prosthecochloris aestuarii DSM 271
  CDS (1)..(627): transl_table=11
atgagcggattgacccattatctcagcctggcggttgagaccatctttatcaagaatattctgctggcatattttctcgggatgtgttcgttccttgccatttcgcgaaaagtggagacctcaataggacttggtcttgccgttgttttcgtcaatggcattaccgtgccggtgaactggatgatcaggcaatacctgcttgggccgggagctctggagtggaccggtattgccgggatggcggctgttgatctgagttttctcaactatatcgttttcattgccaccattgcagcaatggtgcagcttgtcgagatggtactcgacaaggtgagcccgacactctaccagtcgcttgggatctttctgccgcttatcgccgtcaactgcgcgattcttggctcatcgctctttatggtggagcgcgagtatgatttcatggagtcctcggtgttcggggtcagcgcaggcattggcttttttcttgccattataaccttggccaccattcgctacaaactcaagtactccaatgttccgccggggcttcgcggtctggggatcgccatgctgattaccggtcttatctcgatggcgtatatgtcgttttcgggaataaacttgtaa

SEQ ID NO: 38474 - protein, 208 aa, Prosthecochloris aestuarii DSM 271
MSGLTHYLSLAVETIFIKNILLAYFLGMCSFLAISRKVETSIGLGLAVVFVNGITVPVNWMIRQYLLGPGALEWTGIAGMAAVDLSFLNYIVFIATIAAMVQLVEMVLDKVSPTLYQSLGIFLPLIAVNCAILGSSLFMVEREYDFMESSVFGVSAGIGFFLAIITLATIRYKLKYSNVPPGLRGLGIAMLITGLISMAYMSFSGINL

SEQ ID NO: 38475 - DNA, 729 bp, Croceibacter atlanticus HTCC2559
  CDS (1)..(729): transl_table=11
atggaacatttagaattatttttcaagtcaatttttgttgacaatatggtattcgcatatttcttaggaatgtgttcttaccttgccgtttctaagaaagtgagcacagctgtaggattaggtgctgctgttattttcgtattaactgtaactgtaccgttaaactggttgttggatcaatatgtactacaagaaggtgctcttacttggttaggaccagaatttgcagactatgatttaagtttcctttcattcatcttatttattgctaccattgctacaatggttcagttagttgagatagttgtagaaaaattttcaccatcactttatacatcattaggtattttcttacctcttattgctgtaaactgtgctattttaggtggttctttatttatgcaatcaagagagatagaaacttttactttagcgcttaactatggatttagctcaggtattggttggtttttagctatccttgctattgcagctattcgcgaaaaaattagatactctaatgtacctgctccattacgtggattaggaattacatttattatcactggtcttatggctattggttttatgagttttggaggaatgcttactggtggcgatggagaaacaccatctactgaaggtactccagacgatttaggagtaaagatagaagagagtgtaaaaactaatgaaaccgcagaggtttctaacataactataaaataa

SEQ ID NO: 38476 - protein, 242 aa, Croceibacter atlanticus HTCC2559
MEHLELFFKSIFVDNMVFAYFLGMCSYLAVSKKVSTAVGLGAAVIFVLTVTVPLNWLLDQYVLQEGALTWLGPEFADYDLSFLSFILFIATIATMVQLVEIVVEKFSPSLYTSLGIFLPLIAVNCAILGGSLFMQSREIETFTLALNYGFSSGIGWFLAILAIAAIREKIRYSNVPAPLRGLGITFIITGLMAIGFMSFGGMLTGGDGETPSTEGTPDDLGVKIEESVKTNETAEVSNITIK

SEQ ID NO: 38477 - DNA, 609 bp, Pseudoalteromonas tunicata D2
  CDS (1)..(609): transl_table=11
atggaacattatattagtttatttgttaaagcggttttcattgaaaacttagcattatcatttttcttaggtatgtgtactttcttagctgtatctaaaaaagtaacaacttcaatcggccttggtatcgcagttattattgttttaggtatttcagtacctgtaaataacttagttttccacgccgtacttgctccaggtgcacttgagtggttaggttacccagaagctgacttaagcttcttacgtttcttaacctttatcggtgttatcgctgcattagttcaaattcttgaaatggccttagataaatatttccctgcgctttataacgctcttgggattttcttaccgttaatcacagtaaactgtgcaattttcggtgcggtttctttcatggttgaacgtaattacaactttggtgagtcggttgtttatggtgtaggtgcaggggtaggctgggctttagctatcgcaacacttgctggtattcgtgagaaaatgaaatatgcagacgttcctgatggcttacgtggtttaggtattacctttattactgtaggtttaatgggcttaggctttatgtcattctctggtatttcactataa

SEQ ID NO: 38478 - protein, 202 aa, Pseudoalteromonas tunicata D2
MEHYISLFVKAVFIENLALSFFLGMCTFLAVSKKVTTSIGLGIAVIIVLGISVPVNNLVFHAVLAPGALEWLGYPEADLSFLRFLTFIGVIAALVQILEMALDKYFPALYNALGIFLPLITVNCAIFGAVSFMVERNYNFGESVVYGVGAGVGWALAIATLAGIREKMKYADVPDGLRGLGITFITVGLMGLGFMSFSGISL

SEQ ID NO: 38479 - DNA, 582 bp, Pseudoalteromonas tunicata D2
  CDS (1)..(582): transl_table=11
atgtctgaatacctgttacttttaatagcaacagtgctggttaataattttgtgttagtgcaatttcttggactttgcccttttatgggggtgtcgggtaaattggaaacggccattggtatgtctttggcgaccacatttgtattaaccttagcgtcagtttgcagttatcttgtcagccattatattttaattccgcttgatttagcgtttcttcgcacaatgagctttatcttggtgattgctgtggtagttcagttcaccgaaatggtggttaaaaaaaccagccctactctctatcgtttattgggtatctttttacctctaataaccacgaactgtgccgttttaggggttgcattgctcaacgtcaacaaaaaccataattttattgagtctgcgatttatggttttggtgcggctgttggtttttcattggtgctggttttatttgcggcgctgcgcgaacgcttaacagctgccgatgtaccctctccttttaaaggtgcatcgattgcgatgatcaccgcaggattaatgtctatggcctttatgggctttactggtttggttaagttttaa

SEQ ID NO: 38480 - protein, 193 aa, Pseudoalteromonas tunicata D2
MSEYLLLLIATVLVNNFVLVQFLGLCPFMGVSGKLETAIGMSLATTFVLTLASVCSYLVSHYILIPLDLAFLRTMSFILVIAVVVQFTEMVVKKTSPTLYRLLGIFLPLITTNCAVLGVALLNVNKNHNFIESAIYGFGAAVGFSLVLVLFAALRERLTAADVPSPFKGASIAMITAGLMSMAFMGFTGLVKF

SEQ ID NO: 38481 - DNA, 597 bp, Photobacterium sp. SKA34
  CDS (1)..(597): transl_table=11
atggaacattatctaagcctattagttcgttcgatctttatcgagaacatggcattatctttcttcttaggtatgtgtacattccttgcggtatctaagaaagttaagacctcgtttggtctgggtgttgcagtaatcgtagtacttacgattgctgtacctgtaaacaaccttgtttacacgtacttattgaaagatggtgcattagttcaaggtgttgaccttagcttcctgaactttattacattcatcggtgttattgcagcgttagtacagatcctagaaatgattctagatcgcttcttcccgccgctatataacgcactaggtattttccttccgctgatcacagttaactgtgcaatcttcggtggtgtatcgttcatggtacagcgtgattacaactttgtagaatctatcgtatacggcttcggctcaggtacgggttggatgctagcgattgttgcacttgcaggtattcgtgaaaagatgaaatattcagatgtaccggcaggtcttcgtggtttaggtattacctttatcaccgttggtttgatggcgttaggctttatgtctttctctggcgtacaactgtaa

SEQ ID NO: 38482 - protein, 198 aa, Photobacterium sp. SKA34
MEHYLSLLVRSIFIENMALSFFLGMCTFLAVSKKVKTSFGLGVAVIVVLTIAVPVNNLVYTYLLKDGALVQGVDLSFLNFITFIGVIAALVQILEMILDRFFPPLYNALGIFLPLITVNCAIFGGVSFMVQRDYNFVESIVYGFGSGTGWMLAIVALAGIREKMKYSDVPAGLRGLGITFITVGLMALGFMSFSGVQL

SEQ ID NO: 38483 - DNA, 582 bp, Photobacterium sp. SKA34
  CDS (1)..(582): transl_table=11
atgactgaatacctcctattacttattggtacagtgttggttaacaactttgtactcgttaaatttttaggtttatgtccctttatgggcgtatctaaaaaattagaaacagctattggaatgggcttagcaaccacttttgtgctaacgcttgcttctgtttgtgcttatcttgttgaaacttacattttggatccattagggattcagtacctacgcacacttagctttattctagtcattgccgttgttgtgcaattcacagaaatggtcgtacataaaacaagcccaacgctttatcgtttattaggtattttcctaccacttatcaccactaactgtgctgtactaggtgtggccttattaaacgtaaatgagcatcatgactttattgaatctgttatttatggttttggtgctgcagtggggttctcacttgtgcttgttttatttgcttctatgcgtgagcgcattgctgcagctgatgtacctgagccctttaaaggcgcatccattgcgatgatcaccgcagggctaatgtctcttgcatttatgggctttactggattggtgaaattgtaa

SEQ ID NO: 38484 - protein, 193 aa, Photobacterium sp. SKA34
MTEYLLLLIGTVLVNNFVLVKFLGLCPFMGVSKKLETAIGMGLATTFVLTLASVCAYLVETYILDPLGIQYLRTLSFILVIAVVVQFTEMVVHKTSPTLYRLLGIFLPLITTNCAVLGVALLNVNEHHDFIESVIYGFGAAVGFSLVLVLFASMRERIAAADVPEPFKGASIAMITAGLMSLAFMGFTGLVKL

SEQ ID NO: 38485 - DNA, 582 bp, Oceanospirillum sp. MED92
  CDS (1)..(582): transl_table=11
atgacagaatatcttctgatcgtaatcagcactgtgctggttaataactttgtactggttcagtttctggggctatgtccatttatgggggtgtccaataagctggaaaccgctatgggcatgtcactggcgacaacgttcgtacttacactgtcatccgtgtgtagttatcttgcctatacctatctgttgcaaccactcgcgcttgagtatctgcaaacaatcacctttattttggtgattgcggtcgtcgtgcagtttaccgagatggtggtacggaaaacgagtcctttattatataaagtattgggcatatttctgcctctcatcacgactaactgtgctgtattaggtgtggcgctgctcaacatcaaaaagctgaacggttttatcgattctattgtctatggtttcggtgctgcagtaggtttttctctggcactaattctattttctgcaatgcgtgagcgaatcgctgttgcggacgtcccggctccttttcagggtgcggccattggcatggtgactgcagggctgatgtccctggcgttcatgggctttaccggtctggttcagatataa

SEQ ID NO: 38486 - protein, 193 aa, Oceanospirillum sp. MED92
MTEYLLIVISTVLVNNFVLVQFLGLCPFMGVSNKLETAMGMSLATTFVLTLSSVCSYLAYTYLLQPLALEYLQTITFILVIAVVVQFTEMVVRKTSPLLYKVLGIFLPLITTNCAVLGVALLNIKKLNGFIDSIVYGFGAAVGFSLALILFSAMRERIAVADVPAPFQGAAIGMVTAGLMSLAFMGFTGLVQI

SEQ ID NO: 38487 - DNA, 609 bp, Oceanospirillum sp. MED92
  CDS (1)..(609): transl_table=11
atggaacagtacatcagccttgccgttaaggcgattttcgttgaaaacatggcgttggcattcttccttgggatgtgtactttcctggctatctccaagaaagttcagacatctctgggtctgggtattgctgttgtcgttgtgttggcaatcacaactcctgtaaacaacctgatttataacttgctgctgcgtgaaggcgcactggcgtgggctggctatcctgaagtggatcttagcttcctgggttatatctcatacatcggtgtaatcgcggcgatggtacagatcctggagatgttcctggataagtatgtgcctgcgctttataactctctgggcgtgttcctgcctctgatcacagtaaactgtgcgatcatgggtgcagcgctgttcatggttgagcgtgattataacttcggtgaatccgttgtttacggtgtaagtgcaggtatcggttgggcgctggcgattacagcgctggcaggtatccgtgaaaaactaaaatacagcgacgtaccagaaggtctacgtggtctgggcatcaccttcattactgttggtttgatgtcactgggcttcatgtctttctctggcgtatcgctttaa

SEQ ID NO: 38488 - protein, 202 aa, Oceanospirillum sp. MED92
MEQYISLAVKAIFVENMALAFFLGMCTFLAISKKVQTSLGLGIAVVVVLAITTPVNNLIYNLLLREGALAWAGYPEVDLSFLGYISYIGVIAAMVQILEMFLDKYVPALYNSLGVFLPLITVNCAIMGAALFMVERDYNFGESVVYGVSAGIGWALAITALAGIREKLKYSDVPEGLRGLGITFITVGLMSLGFMSFSGVSL

SEQ ID NO: 38489 - DNA, 735 bp, Flavobacteria bacterium BBFL7
  CDS (1)..(735): transl_table=11
atggaacatatagaattatttttcaaatcaatctttatagataatatggtgtttgctacattccttgggatgtgttcataccttgctgtatctaagaaagtgtctacggcagttggattaggtgctgctgtaatttttgtacttgcgattacggtaccgttaaactggatgctagatcagtatatattgcagcctggagctttaaagtggttaggagcagagtacgcttcttatgacttaagcttcttatcttttataatgtttattgcaactattgctaccatggtgcaactagtagaaattatagtagagaaattttcgccatcactatataattcactaggtatatttttaccacttattgcagttaactgtgcgatactaggtggatcattattcatgcaatctagagagattgctactctaggattagctaccacttatggtgtaggttctggtatagggtggtttttagcaatattagctattgcagcgatacgtgaaaaaatacgttactcatcagtaccagcaccgttaagaggattaggaattacatttatcattactggattaatggccatcggtttcatgagctttggtggaatgttaactggcggtgatgaagaagaaaaatcagatactaatgaattatctgtaatgccggtagatgaaagtaatgagttgactatacaagcgactgcattagaagacaaactaacacaagtaaaccagtaa

SEQ ID NO: 38490 - protein, 244 aa, Flavobacteria bacterium BBFL7
MEHIELFFKSIFIDNMVFATFLGMCSYLAVSKKVSTAVGLGAAVIFVLAITVPLNWMLDQYILQPGALKWLGAEYASYDLSFLSFIMFIATIATMVQLVEIIVEKFSPSLYNSLGIFLPLIAVNCAILGGSLFMQSREIATLGLATTYGVGSGIGWFLAILAIAAIREKIRYSSVPAPLRGLGITFIITGLMAIGFMSFGGMLTGGDEEEKSDTNELSVMPVDESNELTIQATALEDKLTQVNQ

SEQ ID NO: 38491 - DNA, 576 bp, marine gamma proteobacterium HTCC2207
  CDS (1)..(576): transl_table=11
atgcaagaatttgcagtcattctggtcagttcgatcctgatcaacaactatgtactggtgcagttcctcggactctgcccgtttatgggtgtctccaataaacttgaatcagccataggcatggctgcggctaccaccttcgttctaactctcacggccatggccagctatatagtcaatgctatggtgctggagcctctgggcctgatctatttgcgcaccatcgcgtttattttggtgattgctgccgtggtgcagttcactaaaatgtttatcgaaaaaaccagcccgctgctctatcgcgtgctcggtgtgtttctgccgctgattaccaccaactgtgcagtgctgggtgtggccttgcaaaacacatctaaagatctcaattttgtccaatcatccctctatggttttggtgccggcgcaggcttttcactggtactgattttcttctcagccatgcgcgagcgcctagccgcagcagacgtacccgagtcatttaaaggcgccgccattgccatgattaccgccggactgatgtcactggcctttatgggattcagtggactcgtttaa

SEQ ID NO: 38492 - protein, 191 aa, marine gamma proteobacterium HTCC2207
MQEFAVILVSSILINNYVLVQFLGLCPFMGVSNKLESAIGMAAATTFVLTLTAMASYIVNAMVLEPLGLIYLRTIAFILVIAAVVQFTKMFIEKTSPLLYRVLGVFLPLITTNCAVLGVALQNTSKDLNFVQSSLYGFGAGAGFSLVLIFFSAMRERLAAADVPESFKGAAIAMITAGLMSLAFMGFSGLV

SEQ ID NO: 38493 - DNA, 609 bp, gamma proteobacterium HTCC2207
  CDS (1)..(609): transl_table=11
atggaatattatttaagcttgttagcccgctcgatctttatcgacaatatcgccctgagcctgttcttgggtatgtgtacttatttggcactgtcgaagaagatcaatgcggcattcggcctgggtattgcagtgatcgtagtgcaaaccattaccgttcctgtaaacaacctgctgctcggttatctgttatccgatggcgctctggcttgggccggtctgccagatgttgatctgagcttcttggtttacctgtgctttatcggtgttatcgccgccatcgttcagatactggaaatgtttctcgataagtatgtaccagctctctacaacgccctcggcgtgtttctgccactgattacagtgaactgtgcgattctcggtggttccttattgatggcagaacgtggttataacttcaccgagagtgtggtttacggctttggttccggtacttcttgggctctggcaattgttgttctcgccggaattcgagaaaaattgaaatatagcgatattccagaaggcctccaggggctgggcatcgtatttatcactgtaggtctaatatccttaggctttatgtcgttcggcggcatagatatctga

SEQ ID NO: 38494 - protein, 202 aa, gamma proteobacterium HTCC2207
MEYYLSLLARSIFIDNIALSLFLGMCTYLALSKKINAAFGLGIAVIVVQTITVPVNNLLLGYLLSDGALAWAGLPDVDLSFLVYLCFIGVIAAIVQILEMFLDKYVPALYNALGVFLPLITVNCAILGGSLLMAERGYNFTESVVYGFGSGTSWALAIVVLAGIREKLKYSDIPEGLQGLGIVFITVGLISLGFMSFGGIDI

SEQ ID NO: 38495 - DNA, 603 bp, delta proteobacterium MLMS-1
  CDS (1)..(603): transl_table=11
atggcccactatttcgacatttttttcaccgccctgtttgtcgaaaacctggtactgaccttttttctggggatgtgcaccttcctggccatttcccgccaggtcaagaccgccctggggctggggctggcggtggtgattatccaggccatcaccgtaccgttgaacaactttatcctcaacacggtgttaaaacccgacgccctgggctggctgggggttgaaggtatcgacctgagtttcctggggttgctggtctatatcggggtgatcgcggccacggtccagatcctggaaatggtgctggatcgcttcgtgccggcgctgtacaacaccctggggatttttctgcccctgctcaccgtcaactgcgccattttgggagccagcctcttcatggtcgaacgtgattacaacctgggcgagagttttgcctacggcctgggggccgggggtggctttctggtggcggtggtgctgctggccgggattcgggaaaaactggagtacgccgatcccccaccggccatgcgcggcctgggggtgacctttgtcgccgccggcctgatggccctggcctttatggggattgccgggatttaa

SEQ ID NO: 38496 - protein, 200 aa, delta proteobacterium MLMS-1
MAHYFDIFFTALFVENLVLTFFLGMCTFLAISRQVKTALGLGLAVVIIQAITVPLNNFILNTVLKPDALGWLGVEGIDLSFLGLLVYIGVIAATVQILEMVLDRFVPALYNTLGIFLPLLTVNCAILGASLFMVERDYNLGESFAYGLGAGGGFLVAVVLLAGIREKLEYADPPPAMRGLGVTFVAAGLMALAFMGIAGI

SEQ ID NO: 38497 - DNA, 582 bp, Oceanobacter sp. RED65
  CDS (1)..(582): transl_table=11
atggttgattacattttaatcttggtttctaccatcctcgtgaacaacttcgtgctggttcagttcttgggcttgtgtccattcatgggggtttccaacaaattagaaactgccatcggcatgtcggccgccactacattcgtattaacactggcttcgttaagcgcttacttggtttacgaatatctattagtgccgctggaaatagaatacttacgaaccatctcgttcatcatggtgatcgcggtagtggttggcttcactgaaatggccatccgcaaaaccagtccactgctttatcgcgtactgggtatcttcttgccgctcattacaactaactgcgcggttctgggcgtggcgttattaaatatcaaacgtcaaaacgattttatggaatccattctttatggcttcggtgccgccgtgggtttctctcttgtattagtgttattcagcgcaatgcgtgaacgtattgcagttgccgatgtacctcaagtattccaaggcagtgccattgccatgatcaccgctggcattatgtctctagcgttcttgggcttcacaggtttggtatcgatttaa

SEQ ID NO: 38498 - protein, 193 aa, Oceanobacter sp. RED65
MVDYILILVSTILVNNFVLVQFLGLCPFMGVSNKLETAIGMSAATTFVLTLASLSAYLVYEYLLVPLEIEYLRTISFIMVIAVVVGFTEMAIRKTSPLLYRVLGIFLPLITTNCAVLGVALLNIKRQNDFMESILYGFGAAVGFSLVLVLFSAMRERIAVADVPQVFQGSAIAMITAGIMSLAFLGFTGLVSI

SEQ ID NO: 38499 - DNA, 609 bp, Oceanobacter sp. RED65
  CDS (1)..(609): transl_table=11
atggaacagatgatctccttattcgttaaggccgtatttgtagaaaatatggcactggccttcttcttagggatgtgtactttcttggctatatccaagaagattcagacgtctttaggcttgggcatcgcggtaattgttgttttgacaattactgtgcctgtaaacaacctgatctatacctacttactaaaagaaggtgcattggcttgggcaggtctacctaatgtggatctaagcttccttggtctattgagctacatcggcgtaatcgctgcgatcgtacaaatcttagaaatgttcttggataagtatgtacctgcactgtataacgcattgggtgtgttcttaccattgatcacggttaactgtgcaatcttgggtgcgtccttgttcatggttgagcgtgattaccagttaggtgagtctgttgtatacggacttggtgctggtgtgggttgggcacttgcgattacagccttggccggtattcgtgaaaaactgaagtacagtgacgtacctaaaggccttgaaggtttgggtattacctttatgaccgtaggcctaatgtcacttggcttcatgtcattctccggcgtatctctataa

SEQ ID NO: 38500 - protein, 202 aa, Oceanobacter sp. RED65
MEQMISLFVKAVFVENMALAFFLGMCTFLAISKKIQTSLGLGIAVIVVLTITVPVNNLIYTYLLKEGALAWAGLPNVDLSFLGLLSYIGVIAAIVQILEMFLDKYVPALYNALGVFLPLITVNCAILGASLFMVERDYQLGESVVYGLGAGVGWALAITALAGIREKLKYSDVPKGLEGLGITFMTVGLMSLGFMSFSGVSL

SEQ ID NO: 38501 - DNA, 609 bp, Alteromonadales bacterium TW-7
  CDS (1)..(609): transl_table=11
gtggaacattatattagtttatttgtaaaagccgtttttattgaaaacttagctttagcgttcttcctaggtatgtgtacatttttagccgtgtctaaaaaagtaactacatcaattggcctaggcgtagcggttattgttgtacttggtatttctgtaccagttaacaacttggtttaccacgcggtattagcaccaggttcacttgagtggcttggttacccagaagctgatcttagctttttacgtttcttaactttcattggtgttattgcagcactagtgcaaattcttgaaatggcattagataagttctttccaccactatacaacgcattaggtattttcttaccattgatcacagttaactgtgcaatctttggtgcggtagccttcatggttgagcgtaactataacttcggcgagtctgttgtatatggtattggcgctggtgtgggctgggcgcttgcaattacattacttgcaggtatccgtgagaaaatgaagtattcagacgtaccagatggtttacgtggtttaggtattacctttatcactgttggcttgatgggtcttggctttatgtcattttctggtatttcactgtaa

SEQ ID NO: 38502 - protein, 202 aa, Alteromonadales bacterium TW-7
MEHYISLFVKAVFIENLALAFFLGMCTFLAVSKKVTTSIGLGVAVIVVLGISVPVNNLVYHAVLAPGSLEWLGYPEADLSFLRFLTFIGVIAALVQILEMALDKFFPPLYNALGIFLPLITVNCAIFGAVAFMVERNYNFGESVVYGIGAGVGWALAITLLAGIREKMKYSDVPDGLRGLGITFITVGLMGLGFMSFSGISL

SEQ ID NO: 38503 - DNA, 579 bp, marine gamma proteobacterium HTCC2143
  CDS (1)..(579): transl_table=11
atgatcgcagattacttcctgctattgatcggcgccatcctggtcaacaattttgtgctagtgcaatttcttgggctctgccctttcatgggcgtctccaataaactggaaaccgcaattggcatgtccagtgcaaccacctttgtgctcacgctcgcgtccattgtcagctggctgacgtacaactggctgctactaccgttagggcttgaatatctaaagaccatctcatttattttggtaatcgcagttgtcgttcagttcaccgaaatggtcgttcgtaaaaccagcccaatgctgtataaagttctgggggtgttcctgccgctcatcacgaccaattgtgccgtactaggggtggccctactcaatattaacaaacaacatagttttctcgagtctgctctctatggtttcggtgctgctgtcggcttttcattggtactgattttgtttgcagcaatgcgggagcgtctcaccgttgctgatgtgcccgcacccttcaaaggcgccgcgataggaatgataacagctggacttatgtcactcgcctttatgggcttcgcgggactggtatag

SEQ ID NO: 38504 - protein, 192 aa, marine gamma proteobacterium HTCC2143
MIADYFLLLIGAILVNNFVLVQFLGLCPFMGVSNKLETAIGMSSATTFVLTLASIVSWLTYNWLLLPLGLEYLKTISFILVIAVVVQFTEMVVRKTSPMLYKVLGVFLPLITTNCAVLGVALLNINKQHSFLESALYGFGAAVGFSLVLILFAAMRERLTVADVPAPFKGAAIGMITAGLMSLAFMGFAGLV

SEQ ID NO: 38505 - DNA, 615 bp, marine gamma proteobacterium HTCC2143
  CDS (1)..(615): transl_table=11
atggagcattatctgagtctgttcgtcagcgctatatttattaagaatatggcactgagcttgtttctgggtatgtgtaccttgcttgcgctttctaagaagatgaatgctgcgattggtttgggtatcgcagttgtcgtcgtgttgtctattacggtcccggttaattatctgatctatacctatttgctgcgcgaaggtgcgttagtgtggctgagtccagagtttgcatcggttgatcttagttttctcggtctgttgagctacataggtgttatcgctgcgctggtacaaattttggagatgttccttgataaatttgtaccggctttatacaacgcgctaggggtgtttttaccgctaattacggtcaactgtgccattttgggtgcatcgttgcttatggtagagcgtgaacatgattttggtgagtctgtagtgtttggagtgggcgcgggtgttggctgggccattgctatcattttattagcgggaatacgtgaaaaaatgaaatacagcgatgtacccgccggacttcagggtcttggcattacctttatcacagtgggtttaatgtcgttgggctttatgtccttcggtggaatagatatctag

SEQ ID NO: 38506 - protein, 204 aa, marine gamma proteobacterium HTCC2143
MEHYLSLFVSAIFIKNMALSLFLGMCTLLALSKKMNAAIGLGIAVVVVLSITVPVNYLIYTYLLREGALVWLSPEFASVDLSFLGLLSYIGVIAALVQILEMFLDKFVPALYNALGVFLPLITVNCAILGASLLMVEREHDFGESVVFGVGAGVGWAIAIILLAGIREKMKYSDVPAGLQGLGITFITVGLMSLGFMSFGGIDI

SEQ ID NO: 38507 - DNA, 618 bp, marine gamma proteobacterium HTCC2080
  CDS (1)..(618): transl_table=11
atgtactattcgcaaacgccatggctgcgggagctgcacatgctggccgattacgcactgctcttagcaggcacagtgctcgtcaataattttgttttagtacagtttcttgggctgtgcccgtttatgggcgtctctaacaagctggaaaccgccatgggcatgtcggccgccacaacatttgtgctgaccctcgcctcagtatgcagctacctgacctacacctggcttttagtgccgctggatctcacctatttgcgcaccatcagctttatcctagtcattgccgtggttgtgcagtttactgaaatggtggtgcgcaaatctagcccgctcctccaccgcgtcctgggggtttatctacctttaattaccaccaactgcgcggtattgggcgttgcattactcaacatcaaccaagcgcataatttcacccaatcgttactgtatgggtttggcgccgctgttggtttttctttagtactcgttctattcgctgcgatgcgcgaacggcttacggtcgctgacgtacctgaacccttccaaggcgccgctataggcatgatcaccgcggggcttgcctctcttgccttcatgggctttgcgggattggtgtaa

SEQ ID NO: 38508 - protein, 205 aa, marine gamma proteobacterium HTCC2080
MYYSQTPWLRELHMLADYALLLAGTVLVNNFVLVQFLGLCPFMGVSNKLETAMGMSAATTFVLTLASVCSYLTYTWLLVPLDLTYLRTISFILVIAVVVQFTEMVVRKSSPLLHRVLGVYLPLITTNCAVLGVALLNINQAHNFTQSLLYGFGAAVGFSLVLVLFAAMRERLTVADVPEPFQGAAIGMITAGLASLAFMGFAGLV

SEQ ID NO: 38509 - DNA, 609 bp, Candidatus Desulfococcus oleovorans Hxd3
  CDS (1)..(609): transl_table=11
atgcaggacctgatcaccatatttttaaactcggtctttgtgggcaacatcctgctggcctattttctgggcatgtgctcctttgtggcggtctcgaaaaacattcacaccgccacgggcctgggatttgccgtggtgttcgtactgaccatcaccacgcccctcaactggctggtctacacgttccttctggcccccggcgccctggcctgggccggcctgcccaacgtggatttgagttttttaaaattcatcacctttatcgccaccattgcagccatggtccaggccattgagatggtcatcgaccggttttcccagggactctacacggccctgggcgtgttcctgcccctgatcgcggtgaactgcgccatcctgggaacatccctcttcatggtggagcgccagtatacttttctcgaatccctggtgttcggcttcggctcgggcctgggatggctgatggccattgtctccatggccgccattcgcaaaaagctgcactacgccgacatgccccacggcctggaaggatacggcatcaccatggtggtgaccgggctgatggccatggcctttatgctgttttcaggaatcacactatga

SEQ ID NO: 38510 - protein, 202 aa, Candidatus Desulfococcus oleovorans Hxd3
MQDLITIFLNSVFVGNILLAYFLGMCSFVAVSKNIHTATGLGFAVVFVLTITTPLNWLVYTFLLAPGALAWAGLPNVDLSFLKFITFIATIAAMVQAIEMVIDRFSQGLYTALGVFLPLIAVNCAILGTSLFMVERQYTFLESLVFGFGSGLGWLMAIVSMAAIRKKLHYADMPHGLEGYGITMVVTGLMAMAFMLFSGITL

SEQ ID NO: 38511 - DNA, 576 bp, Candidatus Desulfococcus oleovorans Hxd3
  CDS (1)..(576): transl_table=11
atgaccgaatatattcttctggccatcagttgtattctgatcaacaacattctgctggcccagttcctgggtaactgtccgtttctgggcacctccaagaaaatggagaccgcggtgggcatgtccatggccgtggtgttcgtcctggtcatggccggcatgatcacctggtgcgtggacgtgttcctgctcaagtggcttgaccttgaatttctgcgcaccctggcctttatcctggtgatcgcctccctggtccagtttgtggagatgttcctgaaaaagagcattccggccctctacgcgggcctgggcatctttctgcccctgatcaccaccaactgcgccgtgatgggcgcctgcctgatcaacatcaaggaggagtataattttctgcaggccctggtggcctccttctcctacgcggtgggtttcggcctggccctgatcctgtttgccggcgtgcgggagcggatcaacctgggcaaggtgcccaagccgctgcaggatacctccatcggtctggtgaccgcgggcatgatcgcgctggcgtttttcgcgttcaaaggcatggcttaa

SEQ ID NO: 38512 - protein, 191 aa, Candidatus Desulfococcus oleovorans Hxd3
MTEYILLAISCILINNILLAQFLGNCPFLGTSKKMETAVGMSMAVVFVLVMAGMITWCVDVFLLKWLDLEFLRTLAFILVIASLVQFVEMFLKKSIPALYAGLGIFLPLITTNCAVMGACLINIKEEYNFLQALVASFSYAVGFGLALILFAGVRERINLGKVPKPLQDTSIGLVTAGMIALAFFAFKGMA

SEQ ID NO: 38513 - DNA, 609 bp, Marinobacter sp. ELB17
  CDS (1)..(609): transl_table=11
atggaacactacatcagtctgctgattaaggctattttcgttgaaaacatggctttggccttctttctgggcatgtgtaccttcctggcgatctccaagaaaatcgaagccgcaacgggcttgggtattgccgtggtggtggttctgacactcaccgtgccagtgaataacctgatctacaacaacatcctgcgtgaaggtgcgttgtcttgggccggattgcccaacacagacctgagctttttgggattgattacgtacattggtgtaatcgctgcgattgtgcagatcatggaaatggttctggataagtacataccggcgctatatgccgcacttggggtttttctaccgcttattaccgtgaactgcgccattttgggtgcggctctgttcatggtagagcgtgactacaccttcggcgagagtgtggtgtacggtttcggtgccggcgtaggctgggcactggcgattgtggctttggccggcattcgggaaaaactcaagtacagcgacgtaccggaaggcctgcggggcttgggcataacctttattactgtcggtttgatgtcattgggctttatgtctttctccggcatctccctgtaa

SEQ ID NO: 38514 - protein, 202 aa, Marinobacter sp. ELB17
MEHYISLLIKAIFVENMALAFFLGMCTFLAISKKIEAATGLGIAVVVVLTLTVPVNNLIYNNILREGALSWAGLPNTDLSFLGLITYIGVIAAIVQIMEMVLDKYIPALYAALGVFLPLITVNCAILGAALFMVERDYTFGESVVYGFGAGVGWALAIVALAGIREKLKYSDVPEGLRGLGITFITVGLMSLGFMSFSGISL

SEQ ID NO: 38515 - DNA, 582 bp, Marinobacter sp. ELB17
  CDS (1)..(582): transl_table=11
atgtccgagtacctgctcatactggtcagtaccatactggtcaacaatttcgtgctggttcaatttttgggcctgtgcccgtttatgggggtgtccagcaaactggaaaccgccatgggcatgtcgctggcgaccacctttgtgctgacattgtcgtcggtgtgcagctatctggcgtacacctatttattagagcctttgaatctggcgtttttgaaaaccatcaccttcattttggtgatagcggtggtggtgcagttcaccgaaatggtggtacgcaaaaccagccccttgctgtaccgggtgctgggcatttttctgccgctgattaccactaactgtgcggtgttgggtgtggccctgctaaacctgaaccgcaacaacaatttcgtcgaatcgttgctttatgggtttggtgccgcacttgggttttccctggtgctgattttttttgccgccatgcgcgagcgtatcgcggtatccgatgtgcccgttgcctttcgcggcgcagccatcggtatggtgaccgcagggctcatggccctggcgtttttaggttttaccggcctggtcagcgtgtaa

SEQ ID NO: 38516 - protein, 193 aa, Marinobacter sp. ELB17
MSEYLLILVSTILVNNFVLVQFLGLCPFMGVSSKLETAMGMSLATTFVLTLSSVCSYLAYTYLLEPLNLAFLKTITFILVIAVVVQFTEMVVRKTSPLLYRVLGIFLPLITTNCAVLGVALLNLNRNNNFVESLLYGFGAALGFSLVLIFFAAMRERIAVSDVPVAFRGAAIGMVTAGLMALAFLGFTGLVSV

SEQ ID NO: 38517 - DNA, 597 bp, Pasteurella haemolytica
  CDS (1)..(597): transl_table=11
atggaacatcttctgagtatctttgttaagtccatatttattgaaaatatggcactttctttcttccttggtatgtgtacattccttgcggtgtctaagaaagtttcaactgcttttggtttaggtattgcggtaattgtagtacttggcattgcagttccagctaaccaattagtttatacccacgtattaaaagagggtgcattagtagaaggtgtggatttaagcttcttaaactttatcactttcatcggggttattgcggcacttgttcaaattctggaaatgattttagacaagtttttcccggcactttatagtgcattaggtatcttcttaccacttatcaccgtaaactgtgcgatttttggtggtgtatcgtttatggtacaacgtgagtataactttgtagaatctgtggtttatggcgtaggtgcaggtacaggctggatgttagccatcgttgcccttgcaggtttaaccgagaaaatgaaatattccgacgtgccggcaggcttacgtggtttaggtattacctttattacggtaggcttaatggcgttaggctttatgtcattctcaggcattcaattataa

SEQ ID NO: 38518 - protein, 198 aa, Pasteurella haemolytica
MEHLLSIFVKSIFIENMALSFFLGMCTFLAVSKKVSTAFGLGIAVIVVLGIAVPANQLVYTHVLKEGALVEGVDLSFLNFITFIGVIAALVQILEMILDKFFPALYSALGIFLPLITVNCAIFGGVSFMVQREYNFVESVVYGVGAGTGWMLAIVALAGLTEKMKYSDVPAGLRGLGITFITVGLMALGFMSFSGIQL

SEQ ID NO: 38519 - DNA, 585 bp, Halorhodospira halophila
  CDS (1)..(585): transl_table=11
atgacggaatacctgctactgctgctcggcgtcgccctggtgaacaatgtggtcctgacccagttcctggggctgtgcccgttcatgggtgtgtcgaaccgactggataccgccctgggcatgggcctggccaccaccttcgtactcacgttggcggcggcggccgggtgggtgatcgagcacgccctgctcatccccctggacctggagttcctgcgcatcctcagcttcatcctcgtcatcgccgggaccgtgcagttcaccgagatggccgtcgcccgggtcagccccgccctgcaccaggttctgggcgtcttcctgccgctgatcaccaccaactgcgccgtgctcggcgtggccctgctcaacatccaggaagcgcacacgttcgccgagagcctggtcttcggcgtcggagcggcgctcggtttcacgctggttctggtcctgttcgccggcctgcgcgagcggctggccacggcggcggtaccggccgcctttgccggtgcccccatcggcttcgtggtcgccgggctgctgtcgctggcgttcatgggactgaccggactgcccgaaggagggtga

SEQ ID NO: 38520 - protein, 194 aa, Halorhodospira halophila
MTEYLLLLLGVALVNNVVLTQFLGLCPFMGVSNRLDTALGMGLATTFVLTLAAAAGWVIEHALLIPLDLEFLRILSFILVIAGTVQFTEMAVARVSPALHQVLGVFLPLITTNCAVLGVALLNIQEAHTFAESLVFGVGAALGFTLVLVLFAGLRERLATAAVPAAFAGAPIGFVVAGLLSLAFMGLTGLPEGG

SEQ ID NO: 38521 - DNA, 735 bp, Chlamydia trachomatis
  CDS (1)..(735): transl_table=11
atgtggttgggagactattctttattaaatctcttagggatctttttacaagccacgtttattcagaatattttgctgtccacatttttaggaatgtgtagctatttggcctgttcatctcgcttgtcaacagccaacggcttggggatgtctgtggctctcgtgcttacaattacaggaagcattaactggttggtacattattttatcacaaaaccgggcgccttggcttggttatcacctgcattagcaaatattgatctcagcttcctagaattaatcatgtttattgttgttatcgcagcattcacacaaattttagaagtactcctcgaaagattttccagaaacctttacctagctttgggaatatttcttccccttattgcagtaaactgcgctatcctaggtggagtattatttggaattactcgaaactatccttttctacctatggtggtattctccttgggctcaggatgtggctggtggcttgcgatcgttctttttgcaactattagagaaaaattagcttactccgatgttcctcaacacttacgagggacagggatttccttcattacgacaggactgatggctatggcttttatgggattaacaggaattgatatttccaaacccacaacatctaaacctgcatttgtcacgaatatagccactgatagcccacaaccaaatacacattctagctcagaagaacccaaggcttcataa

SEQ ID NO: 38522 - protein, 244 aa, Chlamydia trachomatis
MWLGDYSLLNLLGIFLQATFIQNILLSTFLGMCSYLACSSRLSTANGLGMSVALVLTITGSINWLVHYFITKPGALAWLSPALANIDLSFLELIMFIVVIAAFTQILEVLLERFSRNLYLALGIFLPLIAVNCAILGGVLFGITRNYPFLPMVVFSLGSGCGWWLAIVLFATIREKLAYSDVPQHLRGTGISFITTGLMAMAFMGLTGIDISKPTTSKPAFVTNIATDSPQPNTHSSSEEPKAS

SEQ ID NO: 38523 - DNA, 597 bp, Haemophilus influenzae
  CDS (1)..(597): transl_table=11
atggaacattatattagcctatttgttaaggcagtcttcattgaaaatatggcactttctttcttcttaggaatgtgtactttcttagcggtatctaaaaaggtgtcccctgcgtttggtcttgggattgcggtaactttcgttcttgggatcgcagtgccagtaaaccaattaatttatgcaaatgtactaaaagagaatgctttaattgaaggtgtagatttatcattcttaaacttcatcactttcattggggttattgctggtttagtgcaaattcttgaaatggtattagataaatttatgccatctctttataacgcattagggattttcttacctttaatcgcagtaaactgtgcgatctttggtggggtatctttcatggttcaacgtgattacaatttccctgaatctatcgtgtatggtttcggctcaggtttaggttggatgttagcgattgtagcgcttgctggcttaacggaaaaaatgaaatacgctgatattcctgctggattaaaaggtttaggtattacctttatctctgttggtttaatggcactaggctttatgtctttctctggtattcaattataa

SEQ ID NO: 38524 - protein, 198 aa, Haemophilus influenzae
MEHYISLFVKAVFIENMALSFFLGMCTFLAVSKKVSPAFGLGIAVTFVLGIAVPVNQLIYANVLKENALIEGVDLSFLNFITFIGVIAGLVQILEMVLDKFMPSLYNALGIFLPLIAVNCAIFGGVSFMVQRDYNFPESIVYGFGSGLGWMLAIVALAGLTEKMKYADIPAGLKGLGITFISVGLMALGFMSFSGIQL

SEQ ID NO: 38525 - DNA, 594 bp, Neisseria meningitidis serogroup A
  CDS (1)..(594): transl_table=11
atggaacactatttgagcctctttatcaaatccgtcttcatcgaaaatatggcgctatccttctttttgggtatgtgtacgtttttggcggtatccaaaaaagtatccaccgcattcggtttgggtgtggcggtgattttcgtactcggactgtccgtccccgccaaccaattggtttactcgctgctcaaagacggcgcgattgtcgaaggcgtggatttgacctttttgaaattcatcaccttcatcggcgtgattgccgctttggtgcagattttggaaatgttcttggataaattcgtccccgccctctataacgcgctgggcatctacctgccgctgattaccgtaaactgcgcgattttcggtgccgtatcgtttatggcgcagcgcgaatacggcttcggcgaatccgtcgtgtacggcttcggtgcgggcttgggctggatgttggcgattgtcgctttggcgggcattaccgaaaaaatgaaatattcggacgctcccaaaggcctcaaaggcttgggcattacctttatcgccgccggcctgatggcgatggcgtttatgtcgttctctggcatccagttataa

SEQ ID NO: 38526 - protein, 197 aa, Neisseria meningitidis serogroup A
MEHYLSLFIKSVFIENMALSFFLGMCTFLAVSKKVSTAFGLGVAVIFVLGLSVPANQLVYSLLKDGAIVEGVDLTFLKFITFIGVIAALVQILEMFLDKFVPALYNALGIYLPLITVNCAIFGAVSFMAQREYGFGESVVYGFGAGLGWMLAIVALAGITEKMKYSDAPKGLKGLGITFIAAGLMAMAFMSFSGIQL

SEQ ID NO: 38527 - DNA, 594 bp, Neisseria meningitidis serogroup B
  CDS (1)..(594): transl_table=11
atggaacactatttgagcctcttcatcaaatccgtcttcattgaaaatatggcactatccttctttttgggtatgtgcacgtttttggcggtatccaaaaaagtatccaccgcattcggtttgggtgtggcggtaattttcgtactcgggctgtccgtccctgtcaaccaactcgtttactcgctgctcaaagacggcgcgattgccgaaggcgtggatttgacctttttgaaattcatcaccttcatcggcgtgattgccgctttggtgcagattttggaaatgttcttggataaattcgtccccgccctctataacgcattgggcatctacctgccgctgattaccgtgaactgcgcgattttcggcgccgtatcgtttatggcgcaacgcgaatacaacttcggcgagtccgttgtatacggcttcggcgcgggcttgggctggatgttggcgattgtcgctttggcgggcattaccgaaaaaatgaaatattcggacgctcccaaaggcctcaaaggcttgggcattacctttatcgccgccggcctgatggcgatggcgtttatgtcgttctctggcatccagttataa

SEQ ID NO: 38528 - protein, 197 aa, Neisseria meningitidis serogroup B
MEHYLSLFIKSVFIENMALSFFLGMCTFLAVSKKVSTAFGLGVAVIFVLGLSVPVNQLVYSLLKDGAIAEGVDLTFLKFITFIGVIAALVQILEMFLDKFVPALYNALGIYLPLITVNCAIFGAVSFMAQREYNFGESVVYGFGAGLGWMLAIVALAGITEKMKYSDAPKGLKGLGITFIAAGLMAMAFMSFSGIQL

SEQ ID NO: 38529 - DNA, 597 bp, Pasteurella multocida
  CDS (1)..(597): transl_table=11
atggaacattatattagccttttcgttaaatccgtttttatcgaaaacatggcactttctttcttcttaggaatgtgtactttccttgctgtatcgaaaaaagtgtctactgcatttggtttggggattgcggttatcgtggtattaggtattgcggtacctgtaaaccaattagtgtatagctttatcttaaaagacagtgcattagttcaaggtattgatctcagtttcttaaacttcattacctttatcggtgtgattgccgcattagttcaaattcttgagatggtattggataagtatttccctgcactttataacgcgttagggatcttcttaccattaattaccgtaaactgtgcgatttttggtggggtatccttcatggttcaacgtgattatacctttgttgaatccgttgtatacggtattggcgcagggacgggttggatgttagccattgttgcgcttgcaggcatcacggaaaaaatgaaatatgctgatgtaccagcagggttacgtggtttaggcattacctttatcactgtaggtctgatggcacttggttttatgtcattttcaggtattcagttgtaa

SEQ ID NO: 38530 - protein, 198 aa, Pasteurella multocida
MEHYISLFVKSVFIENMALSFFLGMCTFLAVSKKVSTAFGLGIAVIVVLGIAVPVNQLVYSFILKDSALVQGIDLSFLNFITFIGVIAALVQILEMVLDKYFPALYNALGIFLPLITVNCAIFGGVSFMVQRDYTFVESVVYGIGAGTGWMLAIVALAGITEKMKYADVPAGLRGLGITFITVGLMALGFMSFSGIQL

SEQ ID NO: 38531 - DNA, 609 bp, Pseudomonas aeruginosa
  CDS (1)..(609): transl_table=11
atggagcactacatcagcctgttcgtgaaagccgtgttcgtcgagaacatggcgctggcgttcttcctcggcatgtgtaccttcatcgccatctcgaagaaggtggagaccgccatcggcctgggtatcgcggtgatcgtggtgcagaccatcaccgtgccggccaacaacctgatctacacctacctgctcaaggacggcgcgctggcctgggccgggctgcccgaggtggacctgagcttcctcggcctgctcagctacatcggggtgatcgccgccatcgtgcagatcctcgagatgctcctcgacaagtacgtacccagcctctacaacgcgctgggcgtgttcctgccgctgatcacggtgaactgcgcgatcatggccggctcgctgttcatggtcgagcgcgactacaaccttgccgagagcacggtgtacggcgtcggctcgggcttttcctgggcgctggcgatcgccgcgctggcgggtatccgcgagaagctcaagtacagcgacgtccccgagggcctgcagggcctggggatcaccttcatcaccatcggcctgatgtcgttgggcttcatgtcgttctccggcgtgcagttgtaa

SEQ ID NO: 38532 - protein, 202 aa, Pseudomonas aeruginosa
MEHYISLFVKAVFVENMALAFFLGMCTFIAISKKVETAIGLGIAVIVVQTITVPANNLIYTYLLKDGALAWAGLPEVDLSFLGLLSYIGVIAAIVQILEMLLDKYVPSLYNALGVFLPLITVNCAIMAGSLFMVERDYNLAESTVYGVGSGFSWALAIAALAGIREKLKYSDVPEGLQGLGITFITIGLMSLGFMSFSGVQL

SEQ ID NO: 38533 - DNA, 642 bp, Rhodopirellula baltica
  CDS (1)..(642): transl_table=11
atggtcgaacaatacctcagcgtctttttgaaggcggtcttcgtcgagaaccttgcactcgcattctttcttggaatgtgcaccttcttggctgtcagtaaaaacgtcaaaacggcaatcggcttgggcatcgcggtcatcgcgattgaaaccatcaccgtgcctgccaaccaattgatttacagcctgttgctgaagaaaggtgcgttgacctgggtcaatgattacctgatcagcactgacacgtacaacttcgcggaggtcgacctgaccttcctcgggttcatcagttacatcggtgtgattgccgccatggttcagatcttggaaatgttcctcgatcgattcatgcccagcctttacaacgccctggggatcttccttcccctgatcacggtgaactgtgccatcctgggtgcgtcgctgttcatggagcaacgcgagtatccgttcggcgaatcggtcgtcttcggattcggatgtggtgtcggttgggctttggcgatcatggctttggccggtattcgcgaaaaattgaagtacagcgacgttcctccgccacttcgcggtttgggaatcacgtttatcacggttggattgatgtccctggcattcatgtcgtttagcggcatccagctgtaa

SEQ ID NO: 38534 - protein, 213 aa, Rhodopirellula baltica
MVEQYLSVFLKAVFVENLALAFFLGMCTFLAVSKNVKTAIGLGIAVIAIETITVPANQLIYSLLLKKGALTWVNDYLISTDTYNFAEVDLTFLGFISYIGVIAAMVQILEMFLDRFMPSLYNALGIFLPLITVNCAILGASLFMEQREYPFGESVVFGFGCGVGWALAIMALAGIREKLKYSDVPPPLRGLGITFITVGLMSLAFMSFSGIQL

SEQ ID NO: 38535 - DNA, 597 bp, Vibrio alginolyticus
  CDS (1)..(597): transl_table=11
atggaacattacattagtctgttagttaaatcgattttcatcgaaaacatggctctgtctttcttcctaggtatgtgtactttccttgccgtatctaagaaggttaagacctctttcggcctaggtgttgcagttgtggtagtactgactatcgctgttcctgtgaacaacctagtatacaacctagttctgagagagaacgcgttagttgagggcgtggaccttagcttcctaaacttcatcacctttatcggtgtaattgcagcacttgtacagattctagagatggttctagaccgtttcttcccacctttgtacaacgcgctaggcatcttcctaccgctgatcacagtaaactgtgcaatcttcggtggtgtatctttcatggtacaacgtgactacaactttgctgaatctatcgtttacggtttcggctctggtgtgggctggatgctagcaatcgttgctcttgcaggtatccgtgagaagatgaagtactctgacgtacctccaggtctacgtggtcttggtatcacatttatcactgtaggtcttatggcgttaggctttatgtctttctctggtgttcaactgtaa

SEQ ID NO: 38536 - protein, 198 aa, Vibrio alginolyticus
MEHYISLLVKSIFIENMALSFFLGMCTFLAVSKKVKTSFGLGVAVVVVLTIAVPVNNLVYNLVLRENALVEGVDLSFLNFITFIGVIAALVQILEMVLDRFFPPLYNALGIFLPLITVNCAIFGGVSFMVQRDYNFAESIVYGFGSGVGWMLAIVALAGIREKMKYSDVPPGLRGLGITFITVGLMALGFMSFSGVQL

SEQ ID NO: 38537 - DNA, 597 bp, Vibrio anguillarum
  CDS (1)..(597): transl_table=11
atggaacattatatcagtttgcttgttcgatcgatttttatcgaaaacatggcactctctttcttcttgggtatgtgtacatttcttgctgtatctaagaaagtaaagacatcgtttggtttagggattgcggttactgttgttctgaccatttcagtaccagtgaataacttggtttataacttgttacttaaaccgggtgcattgggtgaaaatattgatcttacatttctaaatttcattacctttatcggtgttattgccgcattggtacagatcttagagatgatattggatcgttttttcccacctttgtataacgcgctgggcattttcttacctttaatcacagtgaactgcgccatttttggtggtgtatctttcatggttcagcgtgattataactttgctgaatccgtcgtttacggtttcggttcgggtgtgggttggatgttagcgattgtcgctcttgccggtatccgtgagaaaatgaaatattcagatgtacctccgggtttacgtggtttagggattaccttcatcacggcgggtctaatggcgttaggctttatgtctttctctggtgttcaactgtaa

SEQ ID NO: 38538 - protein, 198 aa, Vibrio anguillarum
MEHYISLLVRSIFIENMALSFFLGMCTFLAVSKKVKTSFGLGIAVTVVLTISVPVNNLVYNLLLKPGALGENIDLTFLNFITFIGVIAALVQILEMILDRFFPPLYNALGIFLPLITVNCAIFGGVSFMVQRDYNFAESVVYGFGSGVGWMLAIVALAGIREKMKYSDVPPGLRGLGITFITAGLMALGFMSFSGVQL

SEQ ID NO: 38539 - DNA, 597 bp, Vibrio cholerae
  CDS (1)..(597): transl_table=11
atggaacattatattagtctgctggtgaaatcgattttcatcgagaacatggcactctctttcttcctagggatgtgtacattcttggcggtgtcgaagaaagttaagacatcattcggcttaggtattgcggtaatcgtagtactgactatctctgtaccagttaacaatctggtgtacaaccttgtgcttaagccagatgcactggttgaaggggtagatcttagcttcctcaactttattacctttatcggtgttattgcggcattagtacagattctggaaatgatcctcgatcgcttcttcccgcctctgtataacgcactgggcatcttccttccgctgatcacagtaaactgtgcgatcttcggtggtgtgtctttcatggtgcagcgcgactacagctttgctgaatcagtggtatacggtttcggttctggtgtgggttggatgctggctatcgtcgctcttgcaggtatccgtgagaagatgaagtattcagacgttcctccaggtctgcgtggtttaggtattacctttatcacggctggcttgatggcgttgggcttcatgtctttctctggtgttcaactgtaa

SEQ ID NO: 38540 - protein, 198 aa, Vibrio cholerae [sequence omitted]

SEQ ID NO: 38541 - DNA, 597 bp, Vibrio parahaemolyticus
  CDS (1)..(597): transl_table=11
atggaacattacatcagtctgttagttaaatcgattttcatcgagaacatggcactgtctttcttcctaggtatgtgtactttccttgccgtatctaagaaagttaagacctctttcggtctaggtgttgcagttgtggtagttttgactatcgctgttcctgtgaacaacctagtttacaacctagttctgaaagaaaatgcgttagttgagggcgtggaccttagcttcctaaacttcatcacctttatcggtgtaattgcagcacttgtacagatcctagagatggttcttgaccgtttcttcccacctttgtacaacgcgctaggcatcttcctaccgttgatcacagtaaactgtgcgatcttcggtggtgtatctttcatggtacaacgtgactacaactttgctgaatctgttgtttacggtttcggttctggtgtgggttggatgctagcaatcgttgctcttgcaggtatccgtgagaagatgaagtactctgacgtacctccaggtctacgtggtcttggtatcacattcatcactgtaggtcttatggcgttaggctttatgtctttctctggtgttcaactgtaa

SEQ ID NO: 38542 - protein, 198 aa, Vibrio parahaemolyticus
MEHYISLLVKSIFIENMALSFFLGMCTFLAVSKKVKTSFGLGVAVVVVLTIAVPVNNLVYNLVLKENALVEGVDLSFLNFITFIGVIAALVQILEMVLDRFFPPLYNALGIFLPLITVNCAIFGGVSFMVQRDYNFAESVVYGFGSGVGWMLAIVALAGIREKMKYSDVPPGLRGLGITFITVGLMALGFMSFSGVQL

SEQ ID NO: 38543 - DNA, 600 bp, Yersinia pestis
  CDS (1)..(600): transl_table=11
atgaccgagagttatttgaccatttttattagagctgtttttgttgaaaatatggcattaaatttctttcttggaatgtgcacatttctggcaatatctaaaaaagtagaaacagcctttggccttgggttgacagttacagccctgctggcgatagcaacacctctcaataatcttatttacacctatatactcagagagaatgctctgattgatggagtggatcttagttttcttgatttcattaccttcatcggggtgcttgcggcattagtccaaatacttgaaatggtacttgagcgatttttgccaagcttacatcacaccctgggggcctttttaccactactgacgatccactgtgcaatatttggtgcaaccatttttatggttcagcgagaatatacgttcaccgaatcttttgtttacgggactggctgtggtttaggttggatgctggccattatatccatggcaggtttacgagaaaaaatgaagtactctaacattccaaaagggttgcaagggctcggcatcgtctttatgacggcagggctgatgtccttaggatttatgtcattttcaggtattcggctctaa

SEQ ID NO: 38544 - protein, 199 aa, Yersinia pestis
MTESYLTIFIRAVFVENMALNFFLGMCTFLAISKKVETAFGLGLTVTALLAIATPLNNLIYTYILRENALIDGVDLSFLDFITFIGVLAALVQILEMVLERFLPSLHHTLGAFLPLLTIHCAIFGATIFMVQREYTFTESFVYGTGCGLGWMLAIISMAGLREKMKYSNIPKGLQGLGIVFMTAGLMSLGFMSFSGIRL

SEQ ID NO: 38545 - DNA, 582 bp, Buchnera aphidicola subsp
  CDS (1)..(582): transl_table=11
atgaaacattatattttattttttatttctaatatattaattgaaaattttattctagtaaaatttctcggtttgtgtccttttttaggagcgtcgagtaatattgaaactgcttttggaatgagttgcgcaactactttcgttatactcacatcatcagtattattatggtgtgttaattttttcattttgttacctctggatttaatttatttgagaattattgcttatatgttaattgtttcagttagtgttcaatttttagaaatagtgttacgaaagacgagtcctattttatatcgtttacttgggatttttctcccattaattacaactaattgtacagtgttagctattccattattcagtttatatgaacatcatacatttttagaatctatattttatgggttaagtgcatcgttaggatttgctttagtgatgattattttttcttgtattcgtgaacgtatagtattatctgatattcctttgccatttcaaggtgctcctattattttaattactgtaagtttaatatctattacatttatgggttttaagggtttgataaaaatttga

SEQ ID NO: 38546 - protein, 193 aa, Buchnera aphidicola subsp
MKHYILFFISNILIENFILVKFLGLCPFLGASSNIETAFGMSCATTFVILTSSVLLWCVNFFILLPLDLIYLRIIAYMLIVSVSVQFLEIVLRKTSPILYRLLGIFLPLITTNCTVLAIPLFSLYEHHTFLESIFYGLSASLGFALVMIIFSCIRERIVLSDIPLPFQGAPIILITVSLISITFMGFKGLIKI

SEQ ID NO: 38547 - DNA, 582 bp, Buchnera aphidicola subsp
  CDS (1)..(582): transl_table=11
atgaaaagttactttttttttattttatcaaatatattaattgataattttattttagtaaaatttcttggtttatgtcccttcataggtgcgtcaaatcaaataaaacaagcttttggaataagtttcgccacttcttttgttgtagttgtatcgacagttttattatggtttgttaacttttttattttgttaccttttgatttagtttatttaagaattatagtgtatatgttaattatttcttttggtgttcaattaatagaaattattttacgagggactagtcctatcttatatcgtatacttggtatttttctccctttaattacaactaattgtgccgttttagctattccattgtttagtctctatttaaatcatacattcttagaatctattctttatgcagtcagtgcctcttttggttttactttagtgatggttatattttctagtattcgtgaacgtatattattatctgacgttcctttagcatttcaagggtcgcctattgttcttattactgtaagtttaatatctattgtatttatggggtttaaaggtttagtgagaatttaa

SEQ ID NO: 38548 - protein, 193 aa, Buchnera aphidicola subsp
MKSYFFFILSNILIDNFILVKFLGLCPFIGASNQIKQAFGISFATSFVVVVSTVLLWFVNFFILLPFDLVYLRIIVYMLIISFGVQLIEIILRGTSPILYRILGIFLPLITTNCAVLAIPLFSLYLNHTFLESILYAVSASFGFTLVMVIFSSIRERILLSDVPLAFQGSPIVLITVSLISIVFMGFKGLVRI

SEQ ID NO: 38549 - DNA, 582 bp, Haemophilus ducreyi
  CDS (1)..(582): transl_table=11
atggtcgattatattctgttagtgatcagtacagccttaattaataactttgtacttgtgaagtttttagggctttgtccatttatgggcgtatcaaaaaaagtggaaaccgcaattggtatgggaatggcgactacatttgtgttaacacttgcttcgttatctgcttatttagttgaaaggtttatcttgatcccattagatgcacaattcttgcggactttagtgtttattttggttattgcagttattgtgcaattgactgaaatgatcgtacataaaacgagcccaacgctatatcgtttactcgggatctatttaccgctgattactacaaattgtgccgtgcttggtgttgccttattgaatgtgaatttatcgaataatttaattgagtctgtcttatatggttttggtgcagcggttggtttttcattagtgttagtcttattcgcagcattacgtgagcgtttagctgccgcggatgtgcctcgtcctttccaaggagcgtcgattgccttgatcacggcaggtttgatgtctttggcgtttatgggctttacgggcttggtgaaactctaa

SEQ ID NO: 38550 - protein, 193 aa, Haemophilus ducreyi
MVDYILLVISTALINNFVLVKFLGLCPFMGVSKKVETAIGMGMATTFVLTLASLSAYLVERFILIPLDAQFLRTLVFILVIAVIVQLTEMIVHKTSPTLYRLLGIYLPLITTNCAVLGVALLNVNLSNNLIESVLYGFGAAVGFSLVLVLFAALRERLAAADVPRPFQGASIALITAGLMSLAFMGFTGLVKL

SEQ ID NO: 38551 - DNA, 579 bp, Haemophilus influenzae
  CDS (1)..(579): transl_table=11
atgacgcactatattttattgattatcggcaccgcattaattaacaattttgtattggtaaaattcttaggtctttgcccttttatgggtgtatccaaaaaaattgaaacggctgtgggaatgggattagcaacaatgtttgttttaactgttgcttccctttgtgcatatttggtcgatcactatattctaattcccttaaatgccacttttttacgtacattagtgtttattttagttattgctgtagtggtgcaatttaccgaaatggcaataaacaaaacaagtccaacattatatcgtttactcggcattttcttgcctttgataactacaaactgcgcagtacttggtgtcgcattattaaatgtaaatctcgctcataatttaacagagtctgtcgtttatggttttggtgcatctctcggcttttccttagtattggtactttttgccgcgcttcgtgaacgtttagtcgccgctgatatacctgccacttttcgcggttcatccattgctttaattaccgcaggcttaatgtccctcgcttttatgggatttacaggacttgtaaaataa

SEQ ID NO: 38552 - protein, 192 aa, Haemophilus influenzae
MTHYILLIIGTALINNFVLVKFLGLCPFMGVSKKIETAVGMGLATMFVLTVASLCAYLVDHYILIPLNATFLRTLVFILVIAVVVQFTEMAINKTSPTLYRLLGIFLPLITTNCAVLGVALLNVNLAHNLTESVVYGFGASLGFSLVLVLFAALRERLVAADIPATFRGSSIALITAGLMSLAFMGFTGLVK

SEQ ID NO: 38553 - DNA, 579 bp, Pasteurella multocida
  CDS (1)..(579): transl_table=11
atgacagaatacattctccttattattagtacagccttaattaataactttgtcctggtgaaatttctagggctttgtccttttatgggcgtttctaaaaaaattgaaaccgcaattggcatgagtttagcgaccatgtttgtccttactgttgcctcaatctctgcttatttaattgatacctatattcttactcccttaagcgcgacttttttacgtactctcgtctttattttagtaattgctgtggtggtacaatttactgaaatggtaatcaataaaaccagtcctacactgtatcgtttattagggatttttctcccactcattacgacaaattgtgctgtacttggcgtcgcactgttaaatattaatcaagcacacaccctgacccaatcagtgatttatggttttggtgcgtcattaggttttggcttagtgcttgttctctttgctgccttacgtgaacgcttagccgcggcagacgtgcctcatgtttttaaaggtgcctcgattgccttaatcacagcagggttaatgtcacttgcctttatgggctttacaggattggtgagatga

SEQ ID NO: 38554 - protein, 192 aa, Pasteurella multocida
MTEYILLIISTALINNFVLVKFLGLCPFMGVSKKIETAIGMSLATMFVLTVASISAYLIDTYILTPLSATFLRTLVFILVIAVVVQFTEMVINKTSPTLYRLLGIFLPLITTNCAVLGVALLNINQAHTLTQSVIYGFGASLGFGLVLVLFAALRERLAAADVPHVFKGASIALITAGLMSLAFMGFTGLVR

SEQ ID NO: 38555 - DNA, 585 bp, Pseudomonas aeruginosa
  CDS (1)..(585): transl_table=11
atgactgaactcgccctgatcctggtcagcgccatcctggtcaacaactttgtcctggtgcagttcctcggcctgtgcccgttcatgggcgtgtcgcggaagatcgagacggccatcggcctgtccctcgccaccaccttcgtcctgaccctggcggcgatgtgcagccatatcctgcaacgctacgtgctgcgcccgctggacctggagtacctgcgcaccatcggctttatcctggtgatcgcggtggtggtgcagttcaccgagatgctggtgaagaagaccagcccgctgctgtaccgggtgctcggcatcttcctgccgctgatcaccaccaattgcatcgtcctcggcgtcgccctgctcaacgccaacaaggctgaatacggcttcctccaggccactacccagggcttcggcgccgggctgggcttttccctggtactggtgctgttcgccgccctgcgcgagcgcatcgccatcgccgacgtgccggcgccgttccgcggcgcggccatcggcatgatcaccgccggcctgatgtcgctggcgttcatgggcttcagcgggttggtccggccatga

SEQ ID NO: 38556 - protein, 194 aa, Pseudomonas aeruginosa
MTELALILVSAILVNNFVLVQFLGLCPFMGVSRKIETAIGLSLATTFVLTLAAMCSHILQRYVLRPLDLEYLRTIGFILVIAVVVQFTEMLVKKTSPLLYRVLGIFLPLITTNCIVLGVALLNANKAEYGFLQATTQGFGAGLGFSLVLVLFAALRERIAIADVPAPFRGAAIGMITAGLMSLAFMGFSGLVRP

SEQ ID NO: 38557 - DNA, 582 bp, Rhodobacter capsulatus
  CDS (1)..(582): transl_table=11
atgcaagacttccttctcgtcctcttgagcaccgcgctcgtgaacaacgtcgtgctggtgaaattcctcgggctctgcccgttcatgggcgtctcgcgcaagaccgatgccgcgatcggcatggggctggccacgaccttcgtgatcaccgtcgcctcggccgcctgctggctggtcgaggcgctgatcctggaaccgctcgacctgaaattcctgcgcatcctgagcatgatcctggtcatcgccgcgatcgtgcagttcatcgagacggtgatgcgcaaggtcacccccgacctgcacaaggcgctcggcatctatctgccgctgatcaccacgaactgcgccgtcctcggcctgccgctgatgtacattcagggccatctgagccttgcgatgagcacgctgagcggctttggcgcctcggtcggtttcacgctcgttctggtgatctttgcgggcatgcgcgaacggctggcgcagctttcggtgcccgcggcctttgccggaacccccatcgccttcgtgtccgcagggcttctgggcctcgccttcatgggctttgccgggctcgtgcacgtctga

SEQ ID NO: 38558 - protein, 193 aa, Rhodobacter capsulatus
MQDFLLVLLSTALVNNVVLVKFLGLCPFMGVSRKTDAAIGMGLATTFVITVASAACWLVEALILEPLDLKFLRILSMILVIAAIVQFIETVMRKVTPDLHKALGIYLPLITTNCAVLGLPLMYIQGHLSLAMSTLSGFGASVGFTLVLVIFAGMRERLAQLSVPAAFAGTPIAFVSAGLLGLAFMGFAGLVHV

SEQ ID NO: 38559 - DNA, 582 bp, Vibrio cholerae
  CDS (1)..(582): transl_table=11
atgaccgaatatcttttgttgttaatcggcaccgtgctggtcaataactttgtactggtgaagtttttgggcttatgtccttttatgggcgtatcaaaaaaactagagaccgccattggcatggggttggcgacgacgttcgtcctcaccttagcttcggtgtgcgcttatctggtggaaagttacgtgttacgtccgctcggcattgagtatctgcgcaccatgagctttattttggtgatcgctgtcgtagtacagttcaccgaaatggtggtgcacaaaaccagtccgacactctatcgcctgctgggcattttcctgccactcatcaccaccaactgtgcggtgttaggggttgcgctgctcaacatcaacgaaaatcacaactttattcaatcgatcatttatggttttggcgctgcagttggcttctcgctggtgctcatcttgttcgcttcgatgcgtgagcgaatccatgttgccgatgtccccgctccctttaagggcgcatccattgcgatgatcaccgcaggtttaatgtctttggcctttatgggctttaccggattggtgaaactgtaa

SEQ ID NO: 38560 - protein, 193 aa, Vibrio cholerae
MTEYLLLLIGTVLVNNFVLVKFLGLCPFMGVSKKLETAIGMGLATTFVLTLASVCAYLVESYVLRPLGIEYLRTMSFILVIAVVVQFTEMVVHKTSPTLYRLLGIFLPLITTNCAVLGVALLNINENHNFIQSIIYGFGAAVGFSLVLILFASMRERIHVADVPAPFKGASIAMITAGLMSLAFMGFTGLVKL

SEQ ID NO: 38561 - DNA, 582 bp, Yersinia pestis
  CDS (1)..(582): transl_table=11
atgactgaatacctgctcctatttgtcggcacagttttggtaaataactttgttctggtcaagtttcttggcctgtgcccgtttatgggcgtctctaaaaaactggaaaccgccattggtatgggtctggcgaccactttcgtgctgacattggcatcggtttgcgcctggatggtcaatagctttattttgctgccactcggcctgatctatttgcgaacactggccttcattttagttatcgctgtcgtggtgcaattcaccgagttggtggtccgcaaaaccagcccgacactttaccgcttgctgggtatctttctccccctgatcaccaccaattgtgccgttttaggggtcgcactactcaatgtgaatcaatcgcataatttcatgcaatccgcggtctatggttttagtgctgctgcgggtttctctttggtcatggtgttatttgccgctattcgtgagcgcctggctgtggcggatgtccctgcgcccttccgtgggtcttctatcgccttaatcactgccgggctgatgtctctggcctttatgggctttaccggtttggtgaagttctaa

SEQ ID NO: 38562 - protein, 193 aa, Yersinia pestis
MTEYLLLFVGTVLVNNFVLVKFLGLCPFMGVSKKLETAIGMGLATTFVLTLASVCAWMVNSFILLPLGLIYLRTLAFILVIAVVVQFTELVVRKTSPTLYRLLGIFLPLITTNCAVLGVALLNVNQSHNFMQSAVYGFSAAAGFSLVMVLFAAIRERLAVADVPAPFRGSSIALITAGLMSLAFMGFTGLVKF

SEQ ID NO: 38563 - DNA, 25 bp, Artificial sequence
  primer
atgactgactacctgttactgtttg

SEQ ID NO: 38564 - DNA, 25 bp, Artificial sequence
  primer
ttacaacttcaccaaaccactaaag

SEQ ID NO: 38565 - protein, 210 aa, Artificial sequence
  consensus sequence
  Variant (2)..(3): Xaa in position 2 to 3 is any amino acid
  Variant (5)..(6): Xaa in position 5 to 6 is any amino acid
  Variant (10)..(10): Xaa in position 10 is any amino acid
  Variant (12)..(12): Xaa in position 12 is any amino acid
  Variant (14)..(15): Xaa in position 14 to 15 is any amino acid
  Variant (18)..(22): Xaa in position 18 to 22 is any amino acid
  Variant (24)..(24): Xaa in position 24 is any amino acid
  Variant (26)..(26): Xaa in position 26 is any amino acid
  Variant (28)..(28): Xaa in position 28 is any amino acid
  Variant (30)..(32): Xaa in position 30 to 32 is any amino acid
  Variant (34)..(47): Xaa in position 34 to 47 is any amino acid
  Variant (48)..(48): Xaa in position 48 is any or no amino acid
  Variant (50)..(51): Xaa in position 50 to 51 is any amino acid
  Variant (52)..(76): Xaa in position 52 to 76 is any or no amino acid
  Variant (78)..(81): Xaa in position 78 to 81 is any amino acid
  Variant (84)..(84): Xaa in position 84 is any amino acid
  Variant (88)..(89): Xaa in position 88 to 89 is any amino acid
  Variant (92)..(93): Xaa in position 92 to 93 is any amino acid
  Variant (95)..(98): Xaa in position 95 to 98 is any amino acid
  Variant (100)..(101): Xaa in position 100 to 101 is any amino acid
  Variant (103)..(103): Xaa in position 103 is any amino acid
  Variant (106)..(107): Xaa in position 106 to 107 is any amino acid
  Variant (111)..(111): Xaa in position 111 is any amino acid
  Variant (117)..(117): Xaa in position 117 is any amino acid
  Variant (121)..(122): Xaa in position 121 to 122 is any amino acid
  Variant (124)..(136): Xaa in position 124 to 136 is any amino acid
  Variant (137)..(147): Xaa in position 137 to 147 is any or no amino acid
  Variant (149)..(151): Xaa in position 149 to 151 is any amino acid
  Variant (153)..(157): Xaa in position 153 to 157 is any amino acid
  Variant (159)..(160): Xaa in position 159 to 160 is any amino acid
  Variant (162)..(166): Xaa in position 162 to 166 is any amino acid
  Variant (168)..(169): Xaa in position 168 to 169 is any amino acid
  Variant (172)..(178): Xaa in position 172 to 178 is any amino acid
  Variant (179)..(179): Xaa in position 179 is any or no amino acid
  Variant (181)..(184): Xaa in position 181 to 184 is any amino acid
  Variant (185)..(189): Xaa in position 185 to 189 is any or no amino acid
  Variant (191)..(192): Xaa in position 191 to 192 is any amino acid
  Variant (194)..(198): Xaa in position 194 to 198 is any amino acid
  Variant (201)..(204): Xaa in position 201 to 204 is any amino acid
  Variant (207)..(207): Xaa in position 207 is any amino acid
  Variant (209)..(209): Xaa in position 209 is any amino acid
NXXLXXFLGXCXFXXVSXXXXXAXGXGXAXXXVXXXXXXXXXXXXXXXLXXXXXXXXXXXXXXXXXXXXXXXXXXXLXXXXFIXVIAXXVQXXEXXXXKXXPXLYXXLGIXLPLITXNCAXXGXXXXXXXXXXXXXXXXXXXXXXXXSXXXGXXXXXGXXLXXXXXAXXREXXXXXXXXPXXXXXXXXXGXXIXXXXXGLXXXXFMXFXG

SEQ ID NO: 38566 - protein, 60 aa, Artificial sequence
  protein pattern
  Variant (2)..(7): Xaa in position 2 to 7 is any amino acid
  Variant (8)..(12): Xaa in position 8 to 12 is any or no amino acid
  Variant (14)..(14): Xaa in position 14 is any amino acid
  Variant (15)..(15): Xaa in position 15 is Ala, Ile, Leu or Val
  Variant (16)..(16): Xaa in position 16 is any amino acid
  Variant (17)..(17): Xaa in position 17 is Ala, Ser, Thr or Val
  Variant (18)..(18): Xaa in position 18 is any amino acid
  Variant (22)..(22): Xaa in position 22 is any amino acid
  Variant (24)..(24): Xaa in position 24 is Pro, Ser or Thr
  Variant (25)..(25): Xaa in position 25 is any amino acid
  Variant (26)..(26): Xaa in position 26 is Phe, Ile, Leu, Met or Val
  Variant (27)..(27): Xaa in position 27 is Ala or Gly
  Variant (28)..(28): Xaa in position 28 is any amino acid
  Variant (30)..(34): Xaa in position 30 to 34 is any amino acid
  Variant (35)..(35): Xaa in position 35 is Ala, Ser or Val
  Variant (36)..(36): Xaa in position 36 is any amino acid
  Variant (38)..(38): Xaa in position 38 is Ile, Leu or Met
  Variant (39)..(39): Xaa in position 39 is Ala, Gly, Ser or Thr
  Variant (40)..(40): Xaa in position 40 is any amino acid
  Variant (42)..(42): Xaa in position 42 is Thr or Val
  Variant (43)..(43): Xaa in position 43 is any amino acid
  Variant (44)..(44): Xaa in position 44 is Phe, Ile or Val
  Variant (46)..(48): Xaa in position 46 to 48 is any amino acid
  Variant (49)..(49): Xaa in position 49 is Ala, Gly, Ser or Thr
  Variant (50)..(59): Xaa in position 50 to 59 is any amino acid
  Variant (60)..(60): Xaa in position 60 is Ile, Leu or Val
LXXXXXXXXXXXNXXXXXFLGXCXXXXXSXXXXXXXGXXXAXXXVXXXXXXXXXXXXXXX

SEQ ID NO: 38567 - protein, 64 aa, Artificial sequence
  protein pattern
  Variant (2)..(13): Xaa in position 2 to 13 is any amino acid
  Variant (14)..(15): Xaa in position 14 to 15 is any or no amino acid
  Variant (17)..(22): Xaa in position 17 to 22 is any amino acid
  Variant (23)..(23): Xaa in position 23 is any or no amino acid
  Variant (26)..(26): Xaa in position 26 is any amino acid
  Variant (28)..(28): Xaa in position 28 is Pro, Ser or Thr
  Variant (29)..(29): Xaa in position 29 is Phe or Tyr
  Variant (30)..(30): Xaa in position 30 is Phe, Ile, Leu, Met or Val
  Variant (31)..(31): Xaa in position 31 is Ala or Gly
  Variant (32)..(32): Xaa in position 32 is any amino acid
  Variant (34)..(38): Xaa in position 34 to 38 is any amino acid
  Variant (39)..(39): Xaa in position 39 is Ala, Ser or Val
  Variant (40)..(40): Xaa in position 40 is any amino acid
  Variant (42)..(42): Xaa in position 42 is Ile, Leu or Met
  Variant (43)..(43): Xaa in position 43 is Ala, Gly or Ser
  Variant (44)..(44): Xaa in position 44 is any amino acid
  Variant (46)..(46): Xaa in position 46 is Thr or Val
  Variant (47)..(47): Xaa in position 47 is any amino acid
  Variant (48)..(48): Xaa in position 48 is Phe, Ile or Val
  Variant (49)..(49): Xaa in position 49 is Ile, Leu or Val
  Variant (50)..(52): Xaa in position 50 to 52 is any amino acid
  Variant (53)..(53): Xaa in position 53 is Ala, Gly, Ser or Thr
  Variant (54)..(59): Xaa in position 54 to 59 is any amino acid
  Variant (60)..(60): Xaa in position 60 is Ala, Ile, Leu or Val
  Variant (61)..(63): Xaa in position 61 to 63 is any amino acid
  Variant (64)..(64): Xaa in position 64 is Ile, Leu or Val
MXXXXXXXXXXXXXXNXXXXXXXLGXCXXXXXSXXXXXXXGXXXAXXXXXXXXXXXXXXXXXXX

SEQ ID NO: 38568 - protein, 47 aa, Artificial sequence
  protein pattern
  Variant (2)..(9): Xaa in position 2 to 9 is any amino acid
  Variant (12)..(12): Xaa in position 12 is Ala, Gly, Ser, Thr or Val
  Variant (13)..(13): Xaa in position 13 is any amino acid
  Variant (15)..(15): Xaa in position 15 is Gly or Gln
  Variant (16)..(16): Xaa in position 16 is Phe, Ile, Leu or Val
  Variant (17)..(17): Xaa in position 17 is any amino acid
  Variant (19)..(20): Xaa in position 19 to 20 is any amino acid
  Variant (21)..(21): Xaa in position 21 is Ile, Leu, Met or Val
  Variant (22)..(22): Xaa in position 22 is any amino acid
  Variant (23)..(23): Xaa in position 23 is Lys or Arg
  Variant (24)..(25): Xaa in position 24 to 25 is any amino acid
  Variant (27)..(27): Xaa in position 27 is any or no amino acid
  Variant (29)..(29): Xaa in position 29 is Phe, His or Tyr
  Variant (30)..(31): Xaa in position 30 to 31 is any amino acid
  Variant (34)..(34): Xaa in position 34 is Ile or Val
  Variant (35)..(35): Xaa in position 35 is Phe or Tyr
  Variant (39)..(39): Xaa in position 39 is Ile or Leu
  Variant (40)..(40): Xaa in position 40 is Ala or Thr
  Variant (41)..(41): Xaa in position 41 is Thr or Val
  Variant (45)..(45): Xaa in position 45 is Ile or Val
  Variant (46)..(46): Xaa in position 46 is Phe, Leu or Met
  Variant (47)..(47): Xaa in position 47 is Ala or Gly
LXXXXXXXXIAXXVXXXEXXXXXXXPXLXXXLGXXLPLXXXNCAXXX

SEQ ID NO: 38569 - protein, 45 aa, Artificial sequence
  protein pattern
  Variant (2)..(3): Xaa in position 2 to 3 is any amino acid
  Variant (6)..(6): Xaa in position 6 is Ala, Gly, Ser, Thr or Val
  Variant (7)..(7): Xaa in position 7 is any amino acid
  Variant (9)..(9): Xaa in position 9 is Gly or Gln
  Variant (10)..(11): Xaa in position 10 to 11 is any amino acid
  Variant (13)..(14): Xaa in position 13 to 14 is any amino acid
  Variant (15)..(15): Xaa in position 15 is Ile, Leu, Met or Val
  Variant (16)..(16): Xaa in position 16 is any amino acid
  Variant (17)..(17): Xaa in position 17 is Lys or Arg
  Variant (18)..(19): Xaa in position 18 to 19 is any amino acid
  Variant (21)..(21): Xaa in position 21 is any or no amino acid
  Variant (23)..(23): Xaa in position 23 is Phe, His or Tyr
  Variant (24)..(25): Xaa in position 24 to 25 is any amino acid
  Variant (28)..(28): Xaa in position 28 is Ile or Val
  Variant (29)..(29): Xaa in position 29 is Phe or Tyr
  Variant (33)..(33): Xaa in position 33 is Ile or Leu
  Variant (34)..(34): Xaa in position 34 is Ala or Thr
  Variant (35)..(35): Xaa in position 35 is Thr or Val
  Variant (39)..(39): Xaa in position 39 is Ile or Val
  Variant (40)..(40): Xaa in position 40 is Phe, Leu or Met
  Variant (41)..(41): Xaa in position 41 is Ala or Gly
  Variant (42)..(44): Xaa in position 42 to 44 is any amino acid
  Variant (45)..(45): Xaa in position 45 is Phe, Ile, Leu, Met or Val
IXXIAXXVXXXEXXXXXXXPXLXXXLGXXLPLXXXNCAXXXXXXX

SEQ ID NO: 38570 - protein, 21 aa, Artificial sequence
  protein pattern
  Variant (2)..(4): Xaa in position 2 to 4 is any amino acid
  Variant (5)..(6): Xaa in position 5 to 6 is any or no amino acid
  Variant (8)..(8): Xaa in position 8 is Phe, Trp or Tyr
  Variant (9)..(9): Xaa in position 9 is any amino acid
  Variant (11)..(11): Xaa in position 11 is Ala or Val
  Variant (12)..(12): Xaa in position 12 is Ile, Leu, Met or Val
  Variant (13)..(14): Xaa in position 13 to 14 is any amino acid
  Variant (15)..(15): Xaa in position 15 is Phe, Ile, Leu or Met
  Variant (16)..(16): Xaa in position 16 is Ala or Ser
  Variant (17)..(17): Xaa in position 17 is any amino acid
  Variant (18)..(18): Xaa in position 18 is Ile, Leu, Met or Val
  Variant (19)..(19): Xaa in position 19 is any amino acid
  Variant (21)..(21): Xaa in position 21 is Lys or Arg
GXXXXXGXXLXXXXXXXXXEX

SEQ ID NO: 38571 - protein, 16 aa, Artificial sequence
  protein pattern
  Variant (2)..(2): Xaa in position 2 is Phe or Trp
  Variant (3)..(3): Xaa in position 3 is any amino acid
  Variant (4)..(4): Xaa in position 4 is Phe, Ile, Leu, Met or Val
  Variant (5)..(5): Xaa in position 5 is Ala or Val
  Variant (6)..(8): Xaa in position 6 to 8 is any amino acid
  Variant (9)..(9): Xaa in position 9 is Phe, Ile, Leu or Met
  Variant (10)..(10): Xaa in position 10 is Ala, Gly or Ser
  Variant (11)..(11): Xaa in position 11 is Ala, Cys, Gly, Ser or Thr
  Variant (12)..(12): Xaa in position 12 is Ile, Leu, Met or Val
  Variant (15)..(15): Xaa in position 15 is any amino acid
  Variant (16)..(16): Xaa in position 16 is Ile, Leu, Met or Val
GXXXXXXXXXXXREXX

SEQ ID NO: 38572 - protein, 18 aa, Artificial sequence
  protein pattern
  Variant (2)..(2): Xaa in position 2 is Ala, Gly or Thr
  Variant (3)..(3): Xaa in position 3 is Phe, Leu or Met
  Variant (4)..(4): Xaa in position 4 is Ile or Val
  Variant (5)..(6): Xaa in position 5 to 6 is any amino acid
  Variant (7)..(7): Xaa in position 7 is Ala, Gly or Ser
  Variant (8)..(8): Xaa in position 8 is Phe, Ile, Leu or Met
  Variant (9)..(9): Xaa in position 9 is any amino acid
  Variant (10)..(10): Xaa in position 10 is Ala, Gly or Ser
  Variant (11)..(11): Xaa in position 11 is Phe, Ile, Leu, Met or Val
  Variant (12)..(12): Xaa in position 12 is Ala, Gly or Val
  Variant (14)..(14): Xaa in position 14 is Phe, Leu or Met
  Variant (15)..(15): Xaa in position 15 is any amino acid
  Variant (17)..(17): Xaa in position 17 is any amino acid
IXXXXXXXXXXXFXXFXG

SEQ ID NO: 38573 - DNA, 2061 bp, Escherichia coli
  CDS (1)..(2061): transl_table=11
atgctaccaaaagccgcccgcattccccacgccatgacgcttcatggcgatacgcgcatcgataattactactggctgcgggacgatacgcgttctcagccagaagtcctggactacctgcaacaagaaaatagttacggtcatcgggtgatggcctcacaacaagccttgcaggatcgcatcttaaaggaaatcatcgaccgcattccgcaacgagaagtttctgcgccctacatcaaaaatggctaccgctatcggcatatttatgaaccaggctgtgaatatgctatctaccagcgtcaatcggcattcagtgaagagtgggatgagtgggaaacattgctcgatgccaataagcgcgcagctcatagtgagttttattcgatgggcggaatggcgattacgcccgataacaccattatggcgctggcagaagattttctttcccgacgccagtacggcattcgttttcgtaatctggaaactggtaactggtacccggaactgctggataacgttgaacccagctttgtctgggcaaatgactcctggattttctactatgttcgcaagcatccggtgacgctgctgccttatcaggtctggcgtcacgccatcggtacgccagcatcgcaagataaactgatctacgaagaaaaagacgatacctattacgtcagcctgcataaaacgacctcgaagcactatgtagtcattcatttggccagcgccaccaccagtgaagttcgcctgctggacgcggaaatggccgatgccgagccgtttgtttttctgccgcgccgcaaagatcacgaatacagccttgatcactaccagcatcgtttttatctgcgttccaaccgccacggcaaaaactttggcttataccgtacccgtatgcgtgatgagcaacagtgggaagagttaattccgccacgcgaaaacatcatgctggaagggtttacgctgtttaccgactggctggtggttgaagagcgtcagcgcgggttaaccagtttgcgccaaattaaccgcaagacccgggaagtcattggtattgcctttgatgatccggcctatgtgacctggattgcctacaatccagaacctgaaaccgcgcgattgcgttatggttattcttccatgactacaccagacactttgtttgaactggatatggataccggtgagcgtcgtgtattaaaacaaacggaagttcctggtttttatgcggcgaattaccgcagtgaacacctgtggatagtcgcccgtgatggcgtcgaagttccggtttcgttggtctaccatcgcaaacattttcgcaaaggacacaacccgttgctggtgtatggctatggttcttacggcgcaagtattgatgccgatttcagttttagccgcttgagtttgttagatcgtggctttgtctacgccattgtccatgttcgcggcggtggtgagctggggcaacaatggtacgaagacggaaaatttctgaagaagaaaaatacgtttaatgattatcttgatgcctgcgatgcattgttaaaactgggctatggctctccttcgctttgttatgcgatgggcgggagtgcggggggcatgttgatgggcgttgcaattaatcaacgcccggaattattccacggcgttatcgcccaggtaccgtttgttgatgttgtaacaacgatgcttgatgaatcaattcctcttaccactggtgagtttgaagagtggggtaacccgcaggatccgcaatattacgagtacatgaaaagctacagcccgtatgacaacgtcaccgcacaggcttatccgcatttactggtaacgaccggtttgcacgattctcaggtgcaatattgggaaccggcaaaatgggtcgctaaattgcgcgagctgaaaaccgatgaccatcttttattgctctgtaccgacatggactcaggccatggcggtaaatctggtcgctttaaatcgtacgaaggcgtagcgatggaatatgcttttctggtcgcgctggcgcagggaacattacccgctacgcctgcggactaa

SEQ ID NO: 38574 - protein, 686 aa, Escherichia coli
MLPKAARIPHAMTLHGDTRIDNYYWLRDDTRSQPEVLDYLQQENSYGHRVMASQQALQDRILKEIIDRIPQREVSAPYIKNGYRYRHIYEPGCEYAIYQRQSAFSEEWDEWETLLDANKRAAHSEFYSMGGMAITPDNTIMALAEDFLSRRQYGIRFRNLETGNWYPELLDNVEPSFVWANDSWIFYYVRKHPVTLLPYQVWRHAIGTPASQDKLIYEEKDDTYYVSLHKTTSKHYVVIHLASATTSEVRLLDAEMADAEPFVFLPRRKDHEYSLDHYQHRFYLRSNRHGKNFGLYRTRMRDEQQWEELIPPRENIMLEGFTLFTDWLVVEERQRGLTSLRQINRKTREVIGIAFDDPAYVTWIAYNPEPETARLRYGYSSMTTPDTLFELDMDTGERRVLKQTEVPGFYAANYRSEHLWIVARDGVEVPVSLVYHRKHFRKGHNPLLVYGYGSYGASIDADFSFSRLSLLDRGFVYAIVHVRGGGELGQQWYEDGKFLKKKNTFNDYLDACDALLKLGYGSPSLCYAMGGSAGGMLMGVAINQRPELFHGVIAQVPFVDVVTTMLDESIPLTTGEFEEWGNPQDPQYYEYMKSYSPYDNVTAQAYPHLLVTTGLHDSQVQYWEPAKWVAKLRELKTDDHLLLLCTDMDSGHGGKSGRFKSYEGVAMEYAFLVALAQGTLPATPAD

SEQ ID NO: 38575 - DNA, 2539 bp, Oryza sativa
  CDS (2)..(2242)
gatgcacctcggccgcatcgcgatccaactccacgcctccgcgccgcttctcttcagccgccgtgcaactgcaactgcacttgtcctcccacattcgcggcgggccgccttcgccatggccgccacgccgccggtggccaggaaggtgccgcgggaactcgcccagcacggcgacgtccgcgtggacaactactactggctccgcgacgactcccgctcccaccccgacgtcctcgcccacctccgtgccgagaatctctacaccgccaccatcatgtctgatgtcaagaacctcgaggatgaaatatatgctgaaattagagcaagaatcaaggaagatgatataggagcgcctcttcgcaaaggccagtattactactataacagaacactgactggcaaggagtatgtgcaacactgcaggcgtctcgtgccaactgatgctcctgttacagtctatgatgtcatgcccacaggacccaatgctcctcatgagcatattattttggatgagaatgtaaaggccgagggccatgactactatagcattggggctttcaaggtcagtcctaatggtaagctagttgcttatgcacaagacactaaaggtgatgaaatttacactgtttatgttattgatgcggagagtggaaaatttgttggccaaccacttgaaggaattacttctgacattgagtgggctggtgatgaccaccttgtttacataacaatggacaccattctccgcccagataaagtatggttgcacatgttagagtctaatcagtcagatgatatttgtttgtatcatgaaaaagatgacatgttttcacttggcctccaaacttctgaaagcaagcagtatttgtttgttgaatctggaagcaaaaacacaagctttatattctacttggatatatccaaacaaagcaaggagcttgtggttttaactccttgtgtttatggtattgatacaacagccagtcatcgtggaaaccatttctatattaagaggagaagtgaggaattctacaactctgagttgattgcttgcccattggataatgtagctgagaccactgtcttgctaccacacagagaaagtgtgaaaatacagagtttccagctctttgagaatcatattgctgtatatgaacgtcaaaatggtctaccgaaagttactgcgtatcgcctaccagccactggagagccaattgggcaacttcagggaggtcgggagattgattttgttgatccagcatatgacgtggaacctgagcaatcacagtttggttcatctgttgttcggttccattatagctcaatgaggaccccaccctcggttttcgactatgacatggattcaggagtgtctgtgctgaagaagattgatactgttttaggtggatttgatgcatcaaactatgtaacagaaagaaaatgggctgccgcttctgatggcactcaaatacccatgaccattctatacagaaaagatcgggtgaatcttgatggctcagacccaatgctgctatatggctatggctcctacgagatatgtatagatccgagttttgggagatcgagattctctctagttgataggggctttatatatgtgatagctcatattcgtggaggtggtgaaatgggacgtaagtggtatgtggatgggaagctgttgaataagagaaacacattcactgatttcattgcttgtgctgagcacttgatagaaaacaagtactgttccaaggaaaagctttgcatcaacggaagaagtgcaggtggcctattgatgggtgctgtcctaaatatgaggcctgatttattcaaggcagctgttgctggagtcccttttgttgatgttcttaccactatgcttgatccaactatcccgttgactacatcggagtgggaggagtggggtgatccaaggaaagaagaatactactactatatgaaatcatattctcccgttgataacttaaaagcacaagggtaccctaacatccttgtcactgctggcttaaatgatcctcgtgtgatgtactcggaaccggcgaaatatgtcgcaaagctaagggaactgaaaacggatgacaatcttctgttattcaagtgcgaacttggtgctgggcacttctcaaaatcgggaaggtttgagaaactacgagaagatgcgtttacttatgcgtttatcctcaaggcactgggaatggctccaaaggcagcgttgtaaaagaaagcccttctgttccgggttaagatggtggcggttctcaagcattgattggctgattgtagtaaaacttaacttgagtcgatcggttgtgttgtgttgtgttgacatattcgactaaggccctgtttagatttcaacttttttctttaaacttccaactttccgtcacatcgaacttttctacacacacaaactttcaacttttctgtcacatcgtttcaatttcttcaaacttacaattttggcgtggaactaaacacagcctaattgatgcaagtcagtcagacattagct

SEQ ID NO: 38576 - protein, 746 aa, Oryza sativa
MHLGRIAIQLHASAPLLFSRRATATALVLPHSRRAAFAMAATPPVARKVPRELAQHGDVRVDNYYWLRDDSRSHPDVLAHLRAENLYTATIMSDVKNLEDEIYAEIRARIKEDDIGAPLRKGQYYYYNRTLTGKEYVQHCRRLVPTDAPVTVYDVMPTGPNAPHEHIILDENVKAEGHDYYSIGAFKVSPNGKLVAYAQDTKGDEIYTVYVIDAESGKFVGQPLEGITSDIEWAGDDHLVYITMDTILRPDKVWLHMLESNQSDDICLYHEKDDMFSLGLQTSESKQYLFVESGSKNTSFIFYLDISKQSKELVVLTPCVYGIDTTASHRGNHFYIKRRSEEFYNSELIACPLDNVAETTVLLPHRESVKIQSFQLFENHIAVYERQNGLPKVTAYRLPATGEPIGQLQGGREIDFVDPAYDVEPEQSQFGSSVVRFHYSSMRTPPSVFDYDMDSGVSVLKKIDTVLGGFDASNYVTERKWAAASDGTQIPMTILYRKDRVNLDGSDPMLLYGYGSYEICIDPSFGRSRFSLVDRGFIYVIAHIRGGGEMGRKWYVDGKLLNKRNTFTDFIACAEHLIENKYCSKEKLCINGRSAGGLLMGAVLNMRPDLFKAAVAGVPFVDVLTTMLDPTIPLTTSEWEEWGDPRKEEYYYYMKSYSPVDNLKAQGYPNILVTAGLNDPRVMYSEPAKYVAKLRELKTDDNLLLFKCELGAGHFSKSGRFEKLREDAFTYAFILKALGMAPKAAL

SEQ ID NO: 38577 - DNA, 3147 bp, Zea mays
  CDS (392)..(2686)
  misc_feature (323)..(323): n is a, g, c or t
  misc_feature (2927)..(2927): n is a, g, c or t
cctgtacggctctgctgcctgagatattttccatcacgcatacatgcgctagcctctggccatggcgttcaagttctgctcggctcctccggccaggttcatctccctgctcccttgactcttccagacctccttcccctgatctttttcctgtaaatatccagccactagccgttcctatctccaaatttcaacctcatcatcttcaggctgccgcgctcacctccgtgagatattccagcgccgcccgtgcttggagaagaagatcctgccgcccgacccgcttttccttagatgtttgtcgccgccgtctctgttctttntatatgcgcggcagcggcccccaagctcaaaagagccggaagcgagaaaaaaatcaataagggaggcgatgctccggctggccggatccttccctcgtctgccccctcccgtgcgccctatctccccagcccccgccccgtcccagctctcactccgccgcgttctcctcctcctctcctccgccggcttcagccccacttcctgttacagcagcccttccttcgcagcgatggcggcggcggcgccgccggtggccaagaaggtcccgcggcagctcgttgagcacggcgacgtccgcgtcgacaactactactggctccgcgacgactctcgatccgacccggacgtcctcgcgcacctccgcgccgagaacgactacaccgccgccgtcatgtccgatgtcaagcaacttgaggatgaaatatatgctgaaatcagaggaagaataaaggaagatgatatagatgcgcctcttcgcaaagggcggtactactattatgaaaggacattgactggcaaggagtatgtgcaacactgtaggcgtcccgtatcgactgatgctcctattacagtccacgatgtgatgcccacaggacctgatgcccctgatgagcatattatcctggatgagaatgttaaggctgagggccacgactactacagcatcggagctttcaaggtcagtcccaacaacaagctagttgcttacgctgaagacactaaaggtgatgaaatctacacggtctatgtcattgacacggagagtggagaatatgttgggcaaccacttaaaggaattacttctgacattgagtgggctggtgacgaccacctcgtttacattacaatggatagtatacttcggccagataaagtatggctacataagttagggtctgaccaatcaagtgatgcttgtttgtatcatgagaaagatgatacattttctctaggccttcaaggttctgaaagcaagagatatttatttgttgaatctggaagcaaaaacacaagctttatattctacctggacatacccaaacagaacaaggaacttgctgttttgacacctcgtgtgtatggcattgatacaacagctagtcatcgtggaaatcatttctttattaagaggcgaagtgatgaattctacaattctgaattggttgcttgtccactggataatgtagctgagaccactatactgctaccacatagagaaagtgtgaaaatacaagacttccagctctttgacaaccatattgctgtatatgagcgtgagaatggccttcccaaagtgatcgtatatcggctacctgctattggagagtcaattggacaactccagggaggtcgagcgattgattttattgatccaacatatgctgtggaccctgaggagtctcagtttcattcatctgttctacgatttcattatagctcaatgcggactccaccctctgtttatgactatgatatggattcaggggtgtctgtgctgaagaagatccatactattttaggcggattcaatgcatcaaattatgtaacagaaagaaaatgggctgctgctgctgatggcactcaggtccccatgtccattctatacagaaatgatcttgtgaagcttgatggctcagaccctatgctactctatggctatggctcctatgagatatgcatagatccgagttttagagggtcacgattctctctggtagataggggctttatatatgtgatagctcatatccgcggtggtggtgaaatgggccggaagtggtacgaggatgggaaactgttgaagaagaaaaacactttcactgatttcattgattgtgctgagcacttgataaaaagcaagtactgctccaggggaaagctttgcattaatggcagaagcgcaggtggcttattgatgggtgctgtcctaaatatgaggcctgacttattcagggcagctgttgctggagtgccttttgttgatgttgtcacaactatgcttgatccaactatcccactgacaacagctgaatgggaggagtggggtgatccaagaaaagaagaattctattattacatgaaatcgtattctcctgttgacaatgtgatggcgcaagagtatcccaacattcttgtcactgcaggcttaaacgatccacgcgtgatgtactctgagcctgcgaaatacgtggcgaagctgagggagctgaagagagatgacaatcttgtgctgttcaagtgcgagctgggagctggacacttctccaaatcgggaaggttcgagaaattacaggaggatgcgtttacttatgcgttcatcctaaaggcgctgggcatgactcggaagctggcatcactgtgaattcgatgggtgtgaggcacctggactggatttgtatcatggcctgccctcttggttgggagatggatggattctgatggaatatgcatttagatttgaatagggacacagatgttatgcaaaagagattgtttgaaactttgaattctgatttgcatttggatatctgtcctagaataattgtgcttctattattcaatatttgcctcatttttaacctatggaccatctaaattttgcntattttctcttctttcaaagtactacaatcattacatgttggtactagtattattttacaggagcatgtatgtaattttataaaaaaaaaaaaaaaaaatctcctgaccactgctctagccctgagttgcaggacctgttgcatacccgacaacagatgttacaacaggtacagatgcatttgcagagagctcaagttcggatgaaacgccaggctggca

SEQ ID NO: 38578 - protein, 764 aa, Zea mays
MLRLAGSFPRLPPPVRPISPAPAPSQLSLRRVLLLLSSAGFSPTSCYSSPSFAAMAAAAPPVAKKVPRQLVEHGDVRVDNYYWLRDDSRSDPDVLAHLRAENDYTAAVMSDVKQLEDEIYAEIRGRIKEDDIDAPLRKGRYYYYERTLTGKEYVQHCRRPVSTDAPITVHDVMPTGPDAPDEHIILDENVKAEGHDYYSIGAFKVSPNNKLVAYAEDTKGDEIYTVYVIDTESGEYVGQPLKGITSDIEWAGDDHLVYITMDSILRPDKVWLHKLGSDQSSDACLYHEKDDTFSLGLQGSESKRYLFVESGSKNTSFIFYLDIPKQNKELAVLTPRVYGIDTTASHRGNHFFIKRRSDEFYNSELVACPLDNVAETTILLPHRESVKIQDFQLFDNHIAVYERENGLPKVIVYRLPAIGESIGQLQGGRAIDFIDPTYAVDPEESQFHSSVLRFHYSSMRTPPSVYDYDMDSGVSVLKKIHTILGGFNASNYVTERKWAAAADGTQVPMSILYRNDLVKLDGSDPMLLYGYGSYEICIDPSFRGSRFSLVDRGFIYVIAHIRGGGEMGRKWYEDGKLLKKKNTFTDFIDCAEHLIKSKYCSRGKLCINGRSAGGLLMGAVLNMRPDLFRAAVAGVPFVDVVTTMLDPTIPLTTAEWEEWGDPRKEEFYYYMKSYSPVDNVMAQEYPNILVTAGLNDPRVMYSEPAKYVAKLRELKRDDNLVLFKCELGAGHFSKSGRFEKLQEDAFTYAFILKALGMTRKLASL

SEQ ID NO: 38579 - DNA, 2154 bp, Dichelobacter nodosus VCS1703A
  CDS (1)..(2154): transl_table=11
atgaaaaaatttttatcactactgatcgcaatgactatgaccacaatacacgctcttcccacgccaccagacatcgcaaaacgtccgcacaccgttgaatctccttttggttcgcggcaagacgaatattattggctccgcgatgatacgcgacaaaatccagaaatcctctcctatctcaatgctgaaaatgcttatgctgatgccgtgctcgcgcccaccaaagcgttgcaagataagatttatcaagaaatggttggacgcataaagcaagatgatagttccgtgcccagccgcgaacatggttggtggtattacagccgttatcaagaaggcaaagaatatccgatttttgcacgccgtcccgataaaccagaacacaatgcgcgcactattgaagagttaaatcaaaaaaatgattttagcgatgaagaaattttgttaaacgtgaatgaattagcgcaaaatcatgattattacatggcgttttacagcgatatcagcaaagaatcgcatcttatggtttgggcggacgatactaacggcaggcggcaatatacgctgcatttcaaagacttaaaaaccggcgccgcattacccgataccatttccggaaccagcggcgaggcgattttcgtcggcgatgggcgcagtgttttatacattgaaaaagatccggaaactttattgggcaaacgcgttaaattgcaccatttaggcagcacagaacccgaccgcgtcatttatgaagaaaaagacgatagtttttatatgggattaggcgtcagccgcgatgaagaatatgcctttatttatctcgccagcacgctttccaatgaacaatattatgcgccgatcaaataccccgaaaaattcacgttatttgccaaaagagcagccgatgttgaatataacgccgatcattttgccggcaaatggatcattaccaccaacgccgacggcgccaaaaattttaaaatcatgaccgccgccgatggcaaaaccgagcgaaacgattggcaaaattgggttgaacataatgatcaagtgctcattgaaggcgttgaattatttaatgattttaccgccatcgaagaacgcagcgaaggattaacgcgcattcgtttactcaaaactgacgatcaaaatccacaaaatcactatataaaaaccgatgaaagcgcttataccatgtcgctggcgagcaatactgaagcggatagtccgtggttgcgttacttttatacatcgatgacgacgcccacgattgtttatgaatataacattcacacgggcgaacggcgcgcgctcaaacaagaatttgttcgcggatacgatcaaaacaattaccaaacggaacgcgtttgggtaccagcgcgcgatggcgtgcaaattcccgtgtcgctcgtatacaaaaaaggcttgaaacgcgacggcagcgcgccgcttttgcaatatgcttacggcagttatggcgcgtccatggatcccagttttagcagttcaatcattagcttgctcgatcggggcgtagtttacgctttggcacatattcgcggcggttctgaaatggggcggtcgtggtatgaagacggaaaattgttgaaaaaactcaatacgtttaatgattttgttgacgttacgcattatttaaccgcgcatcattacgcggataaaaatcgggttgcggcgatgggcggaagcgccggcggattattgatgggcgcggtggcaaatcacgcggctgcagactatcgcgtcattattgcggaagtgccgtttgtggatgtggtcaccaccatgcttgatgaaacgattccgctgacaactaatgaatttgatgaatggggcaatcccgccgccagcgaagaaagttatcgcatgatgctttcttattcaccgtacgacaacatcacagaacaagcatatccggcgatgtttatcggcacgggtttatgggattcacaagtgcaatattgggagccggcaaaatataccgcacgtttacgtgataaaaatacttcaaattatcccattattttgcggacgaatatggaagccggtcacggcggaaaatcaggacggttcggcagcatacgcgaattagcagaaatatatgcatttatgctggatcaattgggtattaaagaataa

SEQ ID NO: 38580 - protein, 717 aa, Dichelobacter nodosus VCS1703A
MKKFLSLLIAMTMTTIHALPTPPDIAKRPHTVESPFGSRQDEYYWLRDDTRQNPEILSYLNAENAYADAVLAPTKALQDKIYQEMVGRIKQDDSSVPSREHGWWYYSRYQEGKEYPIFARRPDKPEHNARTIEELNQKNDFSDEEILLNVNELAQNHDYYMAFYSDISKESHLMVWADDTNGRRQYTLHFKDLKTGAALPDTISGTSGEAIFVGDGRSVLYIEKDPETLLGKRVKLHHLGSTEPDRVIYEEKDDSFYMGLGVSRDEEYAFIYLASTLSNEQYYAPIKYPEKFTLFAKRAADVEYNADHFAGKWIITTNADGAKNFKIMTAADGKTERNDWQNWVEHNDQVLIEGVELFNDFTAIEERSEGLTRIRLLKTDDQNPQNHYIKTDESAYTMSLASNTEADSPWLRYFYTSMTTPTIVYEYNIHTGERRALKQEFVRGYDQNNYQTERVWVPARDGVQIPVSLVYKKGLKRDGSAPLLQYAYGSYGASMDPSFSSSIISLLDRGVVYALAHIRGGSEMGRSWYEDGKLLKKLNTFNDFVDVTHYLTAHHYADKNRVAAMGGSAGGLLMGAVANHAAADYRVIIAEVPFVDVVTTMLDETIPLTTNEFDEWGNPAASEESYRMMLSYSPYDNITEQAYPAMFIGTGLWDSQVQYWEPAKYTARLRDKNTSNYPIILRTNMEAGHGGKSGRFGSIRELAEIYAFMLDQLGIKE

SEQ ID NO: 38581 - DNA, 2241 bp, Oryza sativa (japonica cultivar-group)
  CDS (1)..(2241)
atgcacctcggccgcatcgcgatccaactccacgcctccgcgccgcttctcttcagccgccgtgcaactgcaactgcacttgtcctcccacattcgcggcgggccgccttcgccatggccgccacgccgccggtggccaggaaggtgccgcgggaactcgcccagcacggcgacgtccgcgtggacaactactactggctccgcgacgactcccgctcccaccccgacgtcctcgcccacctccgtgccgagaatctctacaccgccaccatcatgtctgatgtcaagaacctcgaggatgaaatatatgctgaaattagagcaagaatcaaggaagatgatataggagcgcctcttcgcaaaggccagtattactactataacagaacactgactggcaaggagtatgtgcaacactgcaggcgtctcgtgccaactgatgctcctgttacagtctatgatgtcatgcccacaggacccaatgctcctcatgagcatattattttggatgagaatgtaaaggccgagggccatgactactatagcattggggctttcaaggtcagtcctaatggtaagctagttgcttatgcacaagacactaaaggtgatgaaatttacactgtttatgttattgatgcggagagtggaaaatttgttggccaaccacttgaaggaattacttctgacattgagtgggctggtgatgaccaccttgtttacataacaatggacaccattctccgcccagataaagtatggttgcacatgttagagtctaatcagtcagatgatatttgtttgtatcatgaaaaagatgacatgttttcacttggcctccaaacttctgaaagcaagcagtatttgtttgttgaatctggaagcaaaaacacaagctttatattctacttggatatatccaaacaaagcaaggagcttgtggttttaactccttgtgtttatggtattgatacaacagccagtcatcgtggaaaccatttctatattaagaggagaagtgaggaattctacaactctgagttgattgcttgcccattggataatgtagctgagaccactgtcttgctaccacacagagaaagtgtgaaaatacagagtttccagctctttgagaatcatattgctgtatatgaacgtcaaaatggtctaccgaaagttactgcgtatcgcctaccagccactggagagccaattgggcaacttcagggaggtcgggagattgattttgttgatccagcatatgacgtggaacctgagcaatcacagtttggttcatctgttgttcggttccattatagctcaatgaggaccccaccctcggttttcgactatgacatggattcaggagtgtctgtgctgaagaagattgatactgttttaggtggatttgatgcatcaaactatgtaacagaaagaaaatgggctgccgcttctgatggcactcaaatacccatgaccattctatacagaaaagatcgggtgaatcttgatggctcagacccaatgctgctatatggctatggctcctacgagatatgtatagatccgagttttgggagatcgagattctctctagttgataggggctttatatatgtgatagctcatattcgtggaggtggtgaaatgggacgtaagtggtatgaggatgggaagctgttgaataagagaaacacattcactgatttcattgcttgtgctgagcacttgatagaaaacaagtactgttccaaggaaaagctttgcatcaacggaagaagtgcaggtggcctattgatgggtgctgtcctaaatatgaggcctgatttattcaaggcagctgttgctggagtcccttttgttgatgttcttaccactatgcttgatccaactatcccgttgactacatcggagtgggaggagtggggtgatccaaggaaagaagaatactactactatatgaaatcatattctcccgttgataacttaaaagcacaagggtaccctaacatccttgtcactgctggcttaaatgatcctcgtgtgatgtactcggaaccggcgaaatatgtcgcaaagctaagggaactgaaaacggatgacaatcttctgttattcaagtgcgaacttggtgctgggcacttctcaaaatcgggaaggtttgagaaactacgagaagatgcgtttacttatgcgtttatcctcaaggcactgggaatggctccaaaggcagcgttgtaa

SEQ ID NO: 38582 - protein, 746 aa, Oryza sativa (japonica cultivar-group)
MHLGRIAIQLHASAPLLFSRRATATALVLPHSRRAAFAMAATPPVARKVPRELAQHGDVRVDNYYWLRDDSRSHPDVLAHLRAENLYTATIMSDVKNLEDEIYAEIRARIKEDDIGAPLRKGQYYYYNRTLTGKEYVQHCRRLVPTDAPVTVYDVMPTGPNAPHEHIILDENVKAEGHDYYSIGAFKVSPNGKLVAYAQDTKGDEIYTVYVIDAESGKFVGQPLEGITSDIEWAGDDHLVYITMDTILRPDKVWLHMLESNQSDDICLYHEKDDMFSLGLQTSESKQYLFVESGSKNTSFIFYLDISKQSKELVVLTPCVYGIDTTASHRGNHFYIKRRSEEFYNSELIACPLDNVAETTVLLPHRESVKIQSFQLFENHIAVYERQNGLPKVTAYRLPATGEPIGQLQGGREIDFVDPAYDVEPEQSQFGSSVVRFHYSSMRTPPSVFDYDMDSGVSVLKKIDTVLGGFDASNYVTERKWAAASDGTQIPMTILYRKDRVNLDGSDPMLLYGYGSYEICIDPSFGRSRFSLVDRGFIYVIAHIRGGGEMGRKWYEDGKLLNKRNTFTDFIACAEHLIENKYCSKEKLCINGRSAGGLLMGAVLNMRPDLFKAAVAGVPFVDVLTTMLDPTIPLTTSEWEEWGDPRKEEYYYYMKSYSPVDNLKAQGYPNILVTAGLNDPRVMYSEPAKYVAKLRELKTDDNLLLFKCELGAGHFSKSGRFEKLREDAFTYAFILKALGMAPKAAL

SEQ ID NO: 38583 - DNA, 2370 bp, Oryza sativa (japonica cultivar-group)
  CDS (1)..(2370)
atgctccgccggcgccaccacctccccgccgtcctccgcctcttctccacttcctgccgccgcggccaccccacgcagccgccgcagcatccgagccccgccccgctcccgctcccgccgccggtggcgaagaaggtccccttcacggcgtcggcgcacgggaggtcgtggagcgacccctaccactggatgcgcgacacctccgaccccgacctcgcggcgctcctcgaggccgagaacgcctacgcggacgccttcgtcgactccgccggcgagggcggcggcggcctccgcgcgcgcctcgcggccgagatgcgcgcgcggctgcccccttccgccgcctccccgcctcagccctggggcccctggttatattaccagtatgttccagagggtaaggaatacccagttttatccagaagattgaggtcttctggtggtctagcaagagctgcccttgatttcatttctggttcaaaaaaggagcaggtgttgcttgactggaatgagattgcagaaaaatttggttatgtgcacatcgggagttgtcgaatctctcctgatcataggtttctcgcatatactcttgatatatctggggatgagttcttttccttagaagtgaaagatattcagtcgacaaacaccattttttgttcaccccacaagggaatagttagcttagcatggtctcgcaacagcgacaacttattttacacagtctgtgatgagactctacgacctaatcaggttctctgtaaagatctgcaatcagatcaggcaggttttttggttttcatggagaaagatataaactgttgtgtggatatcacaagcacaaaagatttcaagtatgtcactatcaattcaaacactaggacatcatccgaggtgtacgtgatggagtctggtcatgtaagaggtggcttatggcccgtacagaaacgttctgacaaagtgcagtactttctggagcatcataatgggtttttctacatccttactaatgcacccttagaaggtactgaaacagcaaatggtggttactacctggccaggtgcagagctgaaaagtcagaaatggataaatggcaggttgttgcactccctggatcatattatacctttcaggatatggacatttttcatgaacaattagttctatttattcgaaaaagcggtcttcctcttatttgctccatcaatttgccaattgatgttgactttcaggagcaaaaggaacttgatgatcttgatccatggtttttccctgtaccgtcagacttatgcagcattgttcctggatccaacaatgacttcatgtcatctacttatcgtctggttttgtcatcaccagtgcttccagacttaacagtggactataacatgagaatgaggacatttgcaatccttcaccaagaggaagtaactggcctttcctcaaatctatgcacagttgggctgcaatccaatattacaggcatccaacaaaaccttcagcttattgaagactcacagagttggagtgatctatccaagctattttcttgtgaaagggtccaagttatttcacacgatggtgtctcagtacctttagtgatcctgtattcacgggaagcacatcgtcgtggagaatcacctggcgtcttgtatggatatggagcttatggagaagatctggacaagagctggtgttctgataggttaagtctgcttgctcgaggttgggttgtcgcatttgcagacgttaggggtggtggggattcatcatggcatcttgcaggcaccaaagctaacaagataaattctatcaaagattttgctgcatgtggtacacatctcatcaaggaaggatttgttcacaaaaatagactttgtgctataggttgcagtgctggtggcctgttggttggtgcagtcatcaatatgctgccggatttattttctgctgcagttctaaaggtcccttttcttgatatctgcaatacaatgatggattctactttgcctctaaccatcttggattatgaagaatttggtgaccctaatatctccactgaatttgatactattcgtagttattctccttatgacaatttatctcctgacatatgctacccaccggttctggtaactgcctcatttaatgatacaagggtaggagtctgggaagctgctaaatgggtttcaaaagtgagagatattacatgccaatcctgttcctggtctgtcattctcaaaactaatatgcaaagtggtcattttggtgagggtggacgcttcatgcattgcgatgagacagcttttgagtatgcatttctcatgaaagccttggggttggatgacaatgacagctgcaaaatagtgtga

SEQ ID NO: 38584 - protein, 789 aa, Oryza sativa (japonica cultivar-group)
MLRRRHHLPAVLRLFSTSCRRGHPTQPPQHPSPAPLPLPPPVAKKVPFTASAHGRSWSDPYHWMRDTSDPDLAALLEAENAYADAFVDSAGEGGGGLRARLAAEMRARLPPSAASPPQPWGPWLYYQYVPEGKEYPVLSRRLRSSGGLARAALDFISGSKKEQVLLDWNEIAEKFGYVHIGSCRISPDHRFLAYTLDISGDEFFSLEVKDIQSTNTIFCSPHKGIVSLAWSRNSDNLFYTVCDETLRPNQVLCKDLQSDQAGFLVFMEKDINCCVDITSTKDFKYVTINSNTRTSSEVYVMESGHVRGGLWPVQKRSDKVQYFLEHHNGFFYILTNAPLEGTETANGGYYLARCRAEKSEMDKWQVVALPGSYYTFQDMDIFHEQLVLFIRKSGLPLICSINLPIDVDFQEQKELDDLDPWFFPVPSDLCSIVPGSNNDFMSSTYRLVLSSPVLPDLTVDYNMRMRTFAILHQEEVTGLSSNLCTVGLQSNITGIQQNLQLIEDSQSWSDLSKLFSCERVQVISHDGVSVPLVILYSREAHRRGESPGVLYGYGAYGEDLDKSWCSDRLSLLARGWVVAFADVRGGGDSSWHLAGTKANKINSIKDFAACGTHLIKEGFVHKNRLCAIGCSAGGLLVGAVINMLPDLFSAAVLKVPFLDICNTMMDSTLPLTILDYEEFGDPNISTEFDTIRSYSPYDNLSPDICYPPVLVTASFNDTRVGVWEAAKWVSKVRDITCQSCSWSVILKTNMQSGHFGEGGRFMHCDETAFEYAFLMKALGLDDNDSCKIV

SEQ ID NO: 38585 - DNA, 2118 bp, Mesorhizobium loti MAFF303099
  CDS (1)..(2118): transl_table=11
atgcggaacatacgcctgcagccaccgcttcctcgtgccgagtctcggatcagagtttttcacgacgacgtcacgatcgattcgtatcgttggtttcgcgaccgagagaatcccgatgtcggcgcgtatctggaagccgagaacagctacacagagcaagcgacagctcacctttcagcgcttaaggcggagatcatcgccgagatcgaagggcgtcagcctcgcgagtacacttcaccagcgttgcaagttgggcctttcgagtacttccaaaggcgcgagccgaacttggctcatccggcctggtggcgtcgcccagtaactggcggctcggaggaacaagttcttgacccgaacgcgattcccggtgcggaggtcttctactcactcggtgtgttcgaaccgtgtgacgacgggcgttacgtggccttcagcttcgatgtcattgggaacgagaattacgagcttagggttcgggacatgaagaccggccaagaggtctggcagggatcgaagaaggttgcgatggtggcttgggccgcggatggtaacactttgtttttcacgagcgagcgacccagccgacaacaatgtcaggagcttgtccgcctgaatatagcaaccgggatttctgaggtagtatttgaggaaagcaatgagcaattaaaagttcaggttcgccgttctgatagtggcgcctggttgttcctcgacgtgactgctttctcgggccattcctcttttcccgctcatttcggtgctgaagaggtgtggtgtcttcctgccgacgagccgggaggcaactggcgtcggattgtgaagcggggaaacggacacgagatttatgcagagcattggggcgatagtttcctgtttcgagtgaacgacgctggaccgtattgccggctcgtgtgtgcgccgatagatgacccgtcaccttcgtcttgggaggaggtaatcccccatcgtgaaggcgcgacactcgaagaagtgcacatcttcgagaagcacttggttgtgctggaacgagaaggcctgcgtcctcgcctggtcgcacgtgacagaagcgggcgtgttggaaccacgatcgatcccgaggagtcgagctgcacccttaaggtcggctcgtcagcaggggggacgcattcggtgccacggcatttgttccgaagctccaagttggtttactcaattagctcgtttgtgacacccgacaccttcgtcgagcatgatctcgccgacgaccgttcggtgaccttgtgccgggcccacataccggggtttgaccctgctttatacgtctcgcaggttgtgatggtggaggcggacgacggggttgagataccgatttcgcttgttacacgtcgcgaccgggctaaccctgggccggtcgtactccgcgtctacgggtgttacgggtcaccaagatctccgtcgttcaaggattggccttcattcatgactggtcgcttaagcctgctcgaccgaggggttgctttcggttgggctcacatacgtggtggcggtgaactcggtcgcccctcgcacgaggcagctatggctgaacgaaaacgcactacccacacagatctgatcgccgctgccgagggacttgttaagcagggcttcgccacccgcgacgggatcgccatcgagggagcgagcgctggcggcggcgttgtgcttgctacggccgccttgcggccggacttgttccgcgccgtgattgccgaggttccgctcgccgacatcctggatactgaaatggacgccgcaatgccgtggggtctatgggagagggcggagtatggaaatccccacatcgccaacgaatatcggtacctgctcagctacgacccctactacaacctcagcgccgatcgcccacttccgccgacatatgtcgacgccgcgctcgatgacggccaggtgctgtattatcagcccgctcgttatgtggcgcagcgtcgatcctgtgctgccgatcgcgatcccaagctggttttccgcacgcggatggtcggcggccacagcggcgcttcacatgggcctggggtagctgaggaaagagcatttcgcatggcctgggcgctcgaccagctccgcacgatcaaatag

SEQ ID NO: 38586 - protein, 705 aa, Mesorhizobium loti MAFF303099
MRNIRLQPPLPRAESRIRVFHDDVTIDSYRWFRDRENPDVGAYLEAENSYTEQATAHLSALKAEIIAEIEGRQPREYTSPALQVGPFEYFQRREPNLAHPAWWRRPVTGGSEEQVLDPNAIPGAEVFYSLGVFEPCDDGRYVAFSFDVIGNENYELRVRDMKTGQEVWQGSKKVAMVAWAADGNTLFFTSERPSRQQCQELVRLNIATGISEVVFEESNEQLKVQVRRSDSGAWLFLDVTAFSGHSSFPAHFGAEEVWCLPADEPGGNWRRIVKRGNGHEIYAEHWGDSFLFRVNDAGPYCRLVCAPIDDPSPSSWEEVIPHREGATLEEVHIFEKHLVVLEREGLRPRLVARDRSGRVGTTIDPEESSCTLKVGSSAGGTHSVPRHLFRSSKLVYSISSFVTPDTFVEHDLADDRSVTLCRAHIPGFDPALYVSQVVMVEADDGVEIPISLVTRRDRANPGPVVLRVYGCYGSPRSPSFKDWPSFMTGRLSLLDRGVAFGWAHIRGGGELGRPSHEAAMAERKRTTHTDLIAAAEGLVKQGFATRDGIAIEGASAGGGVVLATAALRPDLFRAVIAEVPLADILDTEMDAAMPWGLWERAEYGNPHIANEYRYLLSYDPYYNLSADRPLPPTYVDAALDDGQVLYYQPARYVAQRRSCAADRDPKLVFRTRMVGGHSGASHGPGVAEERAFRMAWALDQLRTIK

SEQ ID NO: 38587 - DNA, 2274 bp, Arabidopsis thaliana
  CDS (1)..(2274)
atggcagtaacatatcttctccggcgttacaagccggcgacaatatcatcagttttgtctttctcgacgaaatgttttgttggacgaacatcatcactctctgttccaacggaagctcctccggttccaaagaagatcccattcgcaatctcatctcatgggatcacaagacaagatcctttccattggatgaagaatacggacgacaccgatttcgtcgacttcctcaagcgtgagaactcatactctcaagctttcatggctgacacagaaaccctgaggcgtgatttattctccgagatgaaaactcgtattccagaagagattttcactcctcctgagcgttggggacaatggttatatagacaatacatacccaaaggaaaagagtatcctcttctatgtaggagattggagaagggtaaaacaaattggctctctggtctttttcgtggagaagaagaagaagttgtgcttgactggaatcaaattgcagagcagtttggttatgttcatgttggagtttgtcgggtttcacctgatcataactatctggcgtacacggttgatcccgaaggagatggaatcaccttgttttacactgttacagatgaaaaccaaagacctcacagggttgttgtcacaaatgttgaatcagatgggagagatgatgccgtagtgtttaccgaaagagattccagtttctgtgtagacataacgaccacaaaagatggcaagtttgttactatcaattcaaactcaaggacttcatccgaggtttatattgtaaatgctgataagccaatggctggtttgcaaagaactcgcgaacgagttcctggcgtgcagtgttttcttgaacatcacaatgggttcttttacattcttacaaattctccctcaaatgcaattagtgagtggtctggtgaaggctactatttgactagatgcttagtagaggaaattgaagcatctgactggcagactgttttccgtccagatgatgatgtggttatacaagatatggacatgttcaatgactacttagtgctttatcttaataagaaaggcttacctatgctctgttccattgatatgcccataaaagcaaatacgaagcatatggatgatcttgttccctggtattttccacttccagttgattcatgcagtgttgcccctggttcaaaccacgacttccagagctctatataccgagtggtgctttcgtctcctgtgattcctgacactatcgttgactatgacgtgtcaagaagattgttctcaattgtgcagcaggagggaggggttgtagataattctgatagtagtaagccatggtacacagcagatcgctctacagagaataacggtcaacttaatgatagaaccagcgagggagaagatggtcagttagattctcgaatgcctaaatgggaggacttatctgatacatatgtttgtgaaagacaagaagtttcttcacatgacggagttgaagtccctcttacaattctgtattcacgagaagcatggaagaagagtgagtcaccgggaatgttgataggttatggcgcttatggagaagttttggacaaaagctggtgcacaaatcgattgagtatgcttgatcgtggttgggtgattgcttttgctgatgtgaggggaggaggcagtggggagttttcatggcacaaatccggaactagatcgttgaaacaaaattcaatccaagatttcatatacagtgctaaatatctagtcgaaaaaggctatgtgcatagacatcatcttgctgctgttgggtacagtgcaggagctattcttccagctgcagctatgaatatgcacccgagtctatttcaagctgtgattttgaaggttccttttgtagatgtattaaacacattatcggatccaaatttacctctcacactcctggaccatgaagaattcgggaacccagacaaccaaactgacttcggatcgatccttagctattctccatatgataagatacgaaaagatgtttgctatccgtccatgcttgtcactacttcgtttcatgactcaagggttggagtatgggaaggtgcaaaatgggtggctaagataagggatagtacgtgccacgactgctcccgagctgtgattctgaaaacaaatatgaacggagggcattttggtgaaggtggtcgctatgctcaatgcgaagagactgcctttgattatgcttttcttctcaaagttatgggtcatcacaacaatagataa

SEQ ID NO: 38588 - protein, 757 aa, Arabidopsis thaliana
MAVTYLLRRYKPATISSVLSFSTKCFVGRTSSLSVPTEAPPVPKKIPFAISSHGITRQDPFHWMKNTDDTDFVDFLKRENSYSQAFMADTETLRRDLFSEMKTRIPEEIFTPPERWGQWLYRQYIPKGKEYPLLCRRLEKGKTNWLSGLFRGEEEEVVLDWNQIAEQFGYVHVGVCRVSPDHNYLAYTVDPEGDGITLFYTVTDENQRPHRVVVTNVESDGRDDAVVFTERDSSFCVDITTTKDGKFVTINSNSRTSSEVYIVNADKPMAGLQRTRERVPGVQCFLEHHNGFFYILTNSPSNAISEWSGEGYYLTRCLVEEIEASDWQTVFRPDDDVVIQDMDMFNDYLVLYLNKKGLPMLCSIDMPIKANTKHMDDLVPWYFPLPVDSCSVAPGSNHDFQSSIYRVVLSSPVIPDTIVDYDVSRRLFSIVQQEGGVVDNSDSSKPWYTADRSTENNGQLNDRTSEGEDGQLDSRMPKWEDLSDTYVCERQEVSSHDGVEVPLTILYSREAWKKSESPGMLIGYGAYGEVLDKSWCTNRLSMLDRGWVIAFADVRGGGSGEFSWHKSGTRSLKQNSIQDFIYSAKYLVEKGYVHRHHLAAVGYSAGAILPAAAMNMHPSLFQAVILKVPFVDVLNTLSDPNLPLTLLDHEEFGNPDNQTDFGSILSYSPYDKIRKDVCYPSMLVTTSFHDSRVGVWEGAKWVAKIRDSTCHDCSRAVILKTNMNGGHFGEGGRYAQCEETAFDYAFLLKVMGHHNNR

SEQ ID NO: 38589 - DNA, 2379 bp, Arabidopsis thaliana
  CDS (1)..(2379)
atgttgagcaatctctctcggaccttttcccgtcataattgccgtttccggcgacaacaatgtcgctgttacaagcctccgaagtctccaccgcctcctccaccaccaccagcattaccaaaaccgccgaagaagccgcagagtttcaccttccacgacgcgacgtgggaggatccatacagttggatgtctaagctggaagataaagtggcgatgaggcatatggatatctatatggagcaagaggagaagtataccgaagccgttttggctgatactgatcggattcagaccaagcttcagtctgaaatggcttctcgtttgtcctttgagctctccacgcctcctcttcgttggggaccttggttgtattatagaagggttgaagaagggaagcagtatccagtactgtgtaggaggctagcgagcttgcacgaggagttcatttctcataagtctcctgctgcagggtttgattacacatctgggaagaggattgagcagaagctgcttgattacaatcaggaagctgagagatttggaggttatgcttatgaggaaatgtcagagatatctcctgaccataaatttctagcatatactatgtatgataaggataacgattactttaagttgtgtgtgagaaacttgaattctggagctttatgtagtaagcctcacgcagatcgtgtctctaacatagcgtgggcaaagaatgggcaggctttgctctatgtcgttactgatcagaaaaaacggccatgcaggatatattgtagcacgatcgggtcaacggatgaagatgttttgcttcacgaagaattcgagggcaatgttcacgttaacataagacatacaaaagatttccactttgtaactgtaaatacattctctactacgttttcaaaggtctttctgataaatgcagctgacccattttctggtttggcattggtttgggaacacaatgctccagcccactgcataatcgagcatcatcagggattcctgtatttatttacaaatgcttccaatgacggtggaacagtcgaccatcattatcttctccgaagtcctgttcacttctcttcctgtcaaaggatctgggagacagtttttatcaacgaccctgaattaatcatagaggatgttgatttctgcaaaaaacatctatcccttattgtgaaggaaatgcagagctttaaaatttgtgtggttgatctacctcttaagacaaagcgggtacctgtccatctgagagatattaaacctcgttatcttcctcttccaaagcatgtttctcaaatctttcctggcacaaactacgacttcaattctccaacaatgcggtttacaatttcttctctggtgatgcctgatgcagtggttgattacgatctattaaatggaaaatggaatatagtacagcagcaaaacatgcttcacgaaagaacacgggttttatatggcactgcaaactccaccgagagccctaatataccctcaggcaccagaactgtcagttttgatactgaggatactactgccgagaatgacaacttgtggaatgacttgactgagttttacgcttgtgattaccatgaagtatcttctcatgatggagccatggttccattaagtattgtttactcaagagctcagaaagaggagaatcaaaaacctggtctacttcatgttcatggtgcttacggtgaaatgcttgataagagatggcgtagtgaacttaaaagcctcctagatcgtggctgggtactcgcatatgcagacgttagaggtggaggtgggaaaggaaagaagtggcatcaagacggaagaggcgcgaagaaacttaactccattaaagattacattcaatgtgccaagtaccttgttgagaacaatatagtagaagaaaacaagcttgctggttggggatacagtgctggaggactcgttgttgcttcagctatcaatcattgccccgatctcttccaagctgcggttctaaaggttccttttcttgatccaactcatactctaatatatccaatactaccattaacggcagaagattacgaagagtttggatatccaggagatatcaatgattttcacgctatacgtgaatactcaccttatgacaacattcctaaggatgttctttatccagctgttttagtcacttcctcattcaatactagatttggtgtttgggaagctgcgaaatgggttgcaagagtccgtgacaataccttcaatgaccctgaacgaccggtcttactcaacttgacgactgacattgttgaagaaaaccggttcttacagactaaggaatctgcattagaaatcgcatttctcataaagatgatggaatcttga

SEQ ID NO: 38590 - protein, 792 aa, Arabidopsis thaliana
MLSNLSRTFSRHNCRFRRQQCRCYKPPKSPPPPPPPPALPKPPKKPQSFTFHDATWEDPYSWMSKLEDKVAMRHMDIYMEQEEKYTEAVLADTDRIQTKLQSEMASRLSFELSTPPLRWGPWLYYRRVEEGKQYPVLCRRLASLHEEFISHKSPAAGFDYTSGKRIEQKLLDYNQEAERFGGYAYEEMSEISPDHKFLAYTMYDKDNDYFKLCVRNLNSGALCSKPHADRVSNIAWAKNGQALLYVVTDQKKRPCRIYCSTIGSTDEDVLLHEEFEGNVHVNIRHTKDFHFVTVNTFSTTFSKVFLINAADPFSGLALVWEHNAPAHCIIEHHQGFLYLFTNASNDGGTVDHHYLLRSPVHFSSCQRIWETVFINDPELIIEDVDFCKKHLSLIVKEMQSFKICVVDLPLKTKRVPVHLRDIKPRYLPLPKHVSQIFPGTNYDFNSPTMRFTISSLVMPDAVVDYDLLNGKWNIVQQQNMLHERTRVLYGTANSTESPNIPSGTRTVSFDTEDTTAENDNLWNDLTEFYACDYHEVSSHDGAMVPLSIVYSRAQKEENQKPGLLHVHGAYGEMLDKRWRSELKSLLDRGWVLAYADVRGGGGKGKKWHQDGRGAKKLNSIKDYIQCAKYLVENNIVEENKLAGWGYSAGGLVVASAINHCPDLFQAAVLKVPFLDPTHTLIYPILPLTAEDYEEFGYPGDINDFHAIREYSPYDNIPKDVLYPAVLVTSSFNTRFGVWEAAKWVARVRDNTFNDPERPVLLNLTTDIVEENRFLQTKESALEIAFLIKMMES

SEQ ID NO: 38591 - DNA, 2055 bp, Rickettsia prowazekii str. Madrid E
  CDS (1)..(2055): transl_table=11
atgaaaccaccaatcgcaaataaacaaaattatagttttgaaatccacaagcaaacaataaaagatgattataactggctgcgtgatcctaattggccaaatgtagaagaagataaaattttagattacttaaaagccgagaataaatatactgaaaatttttttctcaatctgaaaaaagataaaaaaaagatttttgaagagttaaaaggacgtattaaattagatgatgaatcagtttatattaagaaaaaagattattactattatcagagagtagaacgagataaaaattatcctatatattgtcgaaagcataatagtatcgaggcaactgaagaagtaatattagatgtaaacttacttgcttcaaaagggagttttaccgatattggagaaattgcaatgtcacctgatcaaaatttaatggcttatagcgttaattttacaggtaatgagcaatataatatcaaaatatacaatattaaaaaacaacaatacttatctaatgaagtaaaggatgtcgctcctgttataatttggcatgcgcgacttaacggctttttctatattactattaatgaaaatcaacgctgggatagggtcatatttcatagtttagacagaaatattactcaagacaaattaatatttgaggtaaaaaaccctatccattttattagctgcaaaagatccgcaagtcatgaatatatttttataaattcaggtgatcataatgaaaacgaaatttatgtaatttctatgcaggatgatagttttacacctaaattagtacgtgtagcagaaaataaagtattctatgaagtagaacataatggtgattttttttatattaaaactaattataaagctaaaaattttcatattgtaaaagttccaattaataattttgaaaatgctaattggaatgatatttatattcaagaagaacaggacaaatatttaaaaagctttgatgttacaaaaaattatctaattttaaattatcgttataatggattgccacttattaaaataaaacaatttcaagatcaacatgaaaacataattcattttcccgatgtaagtttccaagcaaatagtttttctactaactttgaagaagataacatcagaatagattattcttctctagcaagaccaaataccacttatagctacgattttgataaaaataaattaacaatattaaaggaccaagaaataccttctggctttaatccagaagagtataaagtagaaagaatatttgcagataatgaaggtgtaaaagtaccgataacattattttataaaaaatctttatttaaaaaagatggttcgaatcctttatatctaataggttatggagcttatggtatcactatgccggttaattttagaaacatagcagtaacgcttacaaatcgtggttttatttatgctattgctcatattagaggtggtgatgatttaggacatgattggtatgaagctgctaaatttttaacaaaaaaaaggacttttgaagattttatcgcatgtagtagaactttaattaaagaaaaatatacaaataataataatatagtaatagcgggcggaagtgctggcggcatgttaatcggttatgttctaaacgaaaaaccagaaatttatagagcagcgatagctcatgtaccatttgtagatgtattaaatactatgcttgatgaaaacttaccactcactctcttagaatataatgaatggggtaatccaaaagagcaagaatattttgattatattaaatcatattcgccttatgataatgtcaaaacacaaaactaccctgctctattcattaggtgtggcatatctgacccgcgcgttggttattgggaaccagctaaatgggtagcaaaattacgagaattaaaaactgataataatcctttattattaaaaataaatatggatacgggacatcaaggtgctgctggtcgttttgattatttgcaagagataactgacgaattagtatttatttttaaaatctttgatgtagagatttaa

SEQ ID NO: 38592 - protein, 684 aa, Rickettsia prowazekii str. Madrid E
MKPPIANKQNYSFEIHKQTIKDDYNWLRDPNWPNVEEDKILDYLKAENKYTENFFLNLKKDKKKIFEELKGRIKLDDESVYIKKKDYYYYQRVERDKNYPIYCRKHNSIEATEEVILDVNLLASKGSFTDIGEIAMSPDQNLMAYSVNFTGNEQYNIKIYNIKKQQYLSNEVKDVAPVIIWHARLNGFFYITINENQRWDRVIFHSLDRNITQDKLIFEVKNPIHFISCKRSASHEYIFINSGDHNENEIYVISMQDDSFTPKLVRVAENKVFYEVEHNGDFFYIKTNYKAKNFHIVKVPINNFENANWNDIYIQEEQDKYLKSFDVTKNYLILNYRYNGLPLIKIKQFQDQHENIIHFPDVSFQANSFSTNFEEDNIRIDYSSLARPNTTYSYDFDKNKLTILKDQEIPSGFNPEEYKVERIFADNEGVKVPITLFYKKSLFKKDGSNPLYLIGYGAYGITMPVNFRNIAVTLTNRGFIYAIAHIRGGDDLGHDWYEAAKFLTKKRTFEDFIACSRTLIKEKYTNNNNIVIAGGSAGGMLIGYVLNEKPEIYRAAIAHVPFVDVLNTMLDENLPLTLLEYNEWGNPKEQEYFDYIKSYSPYDNVKTQNYPALFIRCGISDPRVGYWEPAKWVAKLRELKTDNNPLLLKINMDTGHQGAAGRFDYLQEITDELVFIFKIFDVEI

SEQ ID NO: 38593 - DNA, 2061 bp, Escherichia coli O157:H7 EDL933
  CDS (1)..(2061): transl_table=11
atgctaccaaaagccgcccgcattccccacgccatgacgcttcatggcgatacgcgcatcgataattactactggctgcgggacgatacgcgttctcagccggaagtcctggactacctgcaacaagaaaatagttacggtcatcgggtgatggcctcacaacaagccttgcaggatcgcatcttaaaggaaatcatcgaccgcattccgcaacgagaagtttctgcgccctacatcaaaaatggctaccgctaccggcatatttatgaaccaggctgtgaatatgctatctaccagcgtcaatcggcgttcagtgaagagtgggacgagtgggaaatattgctcgatgccaacaagcgcgcggctcatagtgagttttattcgatgggcggaatggcgattacgcccgataacaccattatggcgctggcagaagattttctttcccgacgccagtacggcattcgttttcgtaatctggaaacaggtaactggtacccggaactgctggataacgttgaacccagctttgtctgggcaaatgactcctggactttctactatgttcgcaagcatccggtgacgctgctgccttatcaggtctggcgtcacgccatcggtacgccagcatcgcaagataaactgatttacgaagaaaaagacgatacctattacgtcagcctgcataaaacgacctcaaagcactatgtagtcattcatttggccagcgccaccaccagtgaagttcgcctgctggacgcggaaatggcagatgccgagccgtttgtttttctgccgcgccgcaaagatcacgaatacagccttgatcactaccagcatcgtttttatctgcgttccaaccgccacggcaaaaactttggcttataccgtacccgtatgcgtgatgagcaacagtgggaagagttaattccgccacgcgaaaacatcatgctggaagggtttacgctgtttaccgactggctggtggttgaagagcgtcagcgcgggttaaccagtttgcgccaaattaaccgcaagacccgggaagtcattggtattgcctttgatgatccagcctatgtgacctggattgcctacaatccagaacctgaaaccgcgcgattgcgttatggttattcttccatgaccacaccagacactttgtttgaactggatatggataccggtgagcgtcgtgtattaaaacaaacagaagttcctggttttgatgcggcgaattaccgcagtgaacacctgtggatagtcgcccgtgatggtgtcgaagttccggtttcgttggtctaccatcgcaatcattttcgcaaaggacacaacccgctgctggtgtatggctacggttcttacggcgcaagtattgatgccgatttcagttttagccgcttgagtttgttagatcgtggctttgtctacgccattgtccatgttcgcggcggcggtgagctggggcaacaatggtacgaagacggtaaatttctgaagaagaaaaatacgtttaatgattatcttgatgcctgcgatgcattgttaaaactgggctatggctctccttcgctttgttatgcgatgggcgggagtgcggggggcatgttgatgggcgttgcaattaatcaacgcccggaattattccacggcgttatcgcccaggtaccgtttgttgatgttgtaacaacgatgcttgatgaatcaattcctcttaccactggtgagtttgaagagtgggggaatccgcaggatctgcaatattacgagtatatgaaaagctacagcccgtatgacaacgtcaccgcacaggcttatccacatttactggtaacgaccggtttacacgattctcaggtgcaatattgggaaccggcaaaatgggtcgctaagttgcgcgagctgaaaaccgataaccatcttttattgctctgtaccgacatggactcaggccatggcggtaaatctggtcgctttaaatcgtacgaaggcgtagcgatggaatatgcttttctggtcgcgctggcgcagggaacattacccgctaggcctgcggattag

SEQ ID NO: 38594 - protein, 686 aa, Escherichia coli O157:H7 EDL933
MLPKAARIPHAMTLHGDTRIDNYYWLRDDTRSQPEVLDYLQQENSYGHRVMASQQALQDRILKEIIDRIPQREVSAPYIKNGYRYRHIYEPGCEYAIYQRQSAFSEEWDEWEILLDANKRAAHSEFYSMGGMAITPDNTIMALAEDFLSRRQYGIRFRNLETGNWYPELLDNVEPSFVWANDSWTFYYVRKHPVTLLPYQVWRHAIGTPASQDKLIYEEKDDTYYVSLHKTTSKHYVVIHLASATTSEVRLLDAEMADAEPFVFLPRRKDHEYSLDHYQHRFYLRSNRHGKNFGLYRTRMRDEQQWEELIPPRENIMLEGFTLFTDWLVVEERQRGLTSLRQINRKTREVIGIAFDDPAYVTWIAYNPEPETARLRYGYSSMTTPDTLFELDMDTGERRVLKQTEVPGFDAANYRSEHLWIVARDGVEVPVSLVYHRNHFRKGHNPLLVYGYGSYGASIDADFSFSRLSLLDRGFVYAIVHVRGGGELGQQWYEDGKFLKKKNTFNDYLDACDALLKLGYGSPSLCYAMGGSAGGMLMGVAINQRPELFHGVIAQVPFVDVVTTMLDESIPLTTGEFEEWGNPQDLQYYEYMKSYSPYDNVTAQAYPHLLVTTGLHDSQVQYWEPAKWVAKLRELKTDNHLLLLCTDMDSGHGGKSGRFKSYEGVAMEYAFLVALAQGTLPARPAD

SEQ ID NO: 38595 - DNA, 2292 bp, Xylella fastidiosa 9a5c
  CDS (1)..(2292): transl_table=11
gtgtttattaagagcgataccgttgcagtgtgcaatgtggttccggttcgttatcggaacgagcattgtttaattgaactagagtggctcgactgtttcctcttgcgtgaaagactgaaatccattgaaacttcagggatgacaatcaaacttcccttcttatttttcgccctgatgaacatgactgctgctgctgcaagtgctcctctccctcctgataccgctaagcatgcccatgcgatcaaagcgccgtttggcgcaatccgcaatgataattattactggttacgtgatgacacgcgtacgaacaaggcggtgctgagttatttgaacgctgaaaatgcgtatgccgacaaggtgttggaaccgctcaagccgttacaggagacgttgtataaggagattgttgctcgcatcaaaaaggatgatgccagtgtgccgtatcggaaacacggttggttttactattccaggttcgaatccggtaaggattatccgattcatgcgcgtcgcaaagatggttctgggcttgatgctgccgcgatcctggcggcgaatgcgtccggtgactttgttggtgaacaagtgttactggacgttaacgcattggctgcaggtaagagttacttcagtgtggctcatgctgaggtgagtcctaatacgcatctgttggcttgggccgaggacggtgtaggtcggcgtcagtacacggttcgcttcaaaaatctggagactggggtgctttatccggatgaaatccatggtgcgtcctctagcgtggtttgggctgacgataataagacgttgttctacattgagaatgatcctaaaacactgctgactaagcgtcttaaaaagcatgtgcttggtacccctgtcagtaccgatgtggtggtttatgaggagcacgacgatagtttctatatggacatcgaacgtacgcgtgatgagaaatacatcgtggtttctatggaaagcacggtttcttccgaaatgcgttatgcacctgtggatctgccgaaggggtttgtcgtgttggctcggcgtgagcgcgatgtgaaatatgggggagatcattttgacaggcgttgggtgatccgtacgaatgccgacggtgccaaaaattacaagttggtcactgcacccagtgatgcgactttgcgtagccagtggcgggactgggtcgtacacgatccagcagtctttattgaggattttgagctgttcgacggttttactgcgatccaagagcgttctcagggcttggagcgggtgcgtctgctcaaggctgatggccaacatactgatgtcgctgcggatgaaccggcgtactcaatgggtctttctgagaattccgagccggacaatctctggttgcgttatacctatacttcgttgacgactccggcgacgacgtatgagttcaacgtgcgtactggtgagcgtcgtcaactcaagcagcagcctgtgattggttacgatccgtcgcagtacgtgacggagcgtctgtgggtgactgcgcgggatggtgtgaaggtgccagtgtcgctggtgtatcgcaaaggttttaagaaagacggcactgccgcgctgtatcagtacgcgtatggcagttacggtttgtccacagatccagggtttaatttgccagtggtcagtttgcttgatcgtggtgttgtctacgcgattgcgcacatccgtggtggccaggagatggggaggcagtggtatgacgatggtaaattgctgcataagcaaaatacgtttaatgattttattgatgtgacgcgggcattggttgcgcaggggtatgccgccaaggggcgtgtggctgcggccggtggcagtgccggtggtttgttgatgggtgtggtggctaatcaggcgccgagtgattaccgtgtgatcgtggcgcaggtgccatttgttgatgtggtgacgacgatgttggacccgagtattccgttgaccaccaatgagtacgatgagtggggtaatcctgagcagaaggtttattacgattacatgctgacgtattcgccttatgacaacgtggtgcatcaggcttatccagcgttgtttgttggcacggggttatgggattcacaggtgcagtattgggagccggctaaatgggtggctaagctgcgtgatgagaatacgggggcgcttccaattgtattcagagtcaatatggatgccggtcatggtgggaagtctgggcgtttcaggcgttaccaggaattggctgagtcctatgctttcgtacttcaccatcttgaagtgaagtga

SEQ ID NO: 38596 - protein, 763 aa, Xylella fastidiosa 9a5c
MFIKSDTVAVCNVVPVRYRNEHCLIELEWLDCFLLRERLKSIETSGMTIKLPFLFFALMNMTAAAASAPLPPDTAKHAHAIKAPFGAIRNDNYYWLRDDTRTNKAVLSYLNAENAYADKVLEPLKPLQETLYKEIVARIKKDDASVPYRKHGWFYYSRFESGKDYPIHARRKDGSGLDAAAILAANASGDFVGEQVLLDVNALAAGKSYFSVAHAEVSPNTHLLAWAEDGVGRRQYTVRFKNLETGVLYPDEIHGASSSVVWADDNKTLFYIENDPKTLLTKRLKKHVLGTPVSTDVVVYEEHDDSFYMDIERTRDEKYIVVSMESTVSSEMRYAPVDLPKGFVVLARRERDVKYGGDHFDRRWVIRTNADGAKNYKLVTAPSDATLRSQWRDWVVHDPAVFIEDFELFDGFTAIQERSQGLERVRLLKADGQHTDVAADEPAYSMGLSENSEPDNLWLRYTYTSLTTPATTYEFNVRTGERRQLKQQPVIGYDPSQYVTERLWVTARDGVKVPVSLVYRKGFKKDGTAALYQYAYGSYGLSTDPGFNLPVVSLLDRGVVYAIAHIRGGQEMGRQWYDDGKLLHKQNTFNDFIDVTRALVAQGYAAKGRVAAAGGSAGGLLMGVVANQAPSDYRVIVAQVPFVDVVTTMLDPSIPLTTNEYDEWGNPEQKVYYDYMLTYSPYDNVVHQAYPALFVGTGLWDSQVQYWEPAKWVAKLRDENTGALPIVFRVNMDAGHGGKSGRFRRYQELAESYAFVLHHLEVK

SEQ ID NO: 38597 - DNA, 2157 bp, Mycobacterium tuberculosis CDC1551
  CDS (1)..(2157): transl_table=11
atgcaccgaaccgcactaccctcaccgcccgtggccaagcgggtgcagacccgccgggagcaccacggcgacgtctttgtcgacccatatgaatggttgcgcgacaaggacagccctgaagtaatcgcctacctcgaagctgaaaacgactacaccgaacggaccaccgcgcaccttgagccattgcggcaaaagatcttccacgaaatcaaagcgcgtaccaaggaaaccgacttatcggtgccgacgcgacgtggcaactggtggtactacgcgcggacctttgagggaaagcagtatggcgtacactgtcgttgcccggtaaccgatcccgacgactggaacccaccagagttcgacgagcgcaccgaaatacccggtgaacagcttctgctcgacgagaacgtggaagctgacggccacgacttcttcgcactgggcgcggccagcgtcagcctggacgataacctcttagcgtattccgttgatgtcgtaggtgacgaacgatataccttgcggttcaaggatttacgcaccggagaacagtacccggacgagatcgccgggatcggagcgggagtcacctgggcagctgacaaccgcactgtctactacaccaccgtggacgcggcctggcgtccggacacagtgtggcgataccgactagggtccggcgaatcgtcggagcgggtttaccacgaagccgatgatcggttctggctcgcggtggggcgtactcgcagcaacgcctatctgctgattgcggcggggtcgtccatcacttcggaggtccgttacgcgcacgcggcagatccgacagcgcagttcagcgtggtgctgccgcgccgcgacggcgtcgagtactcggtggagcatgcggtcatagctggccaggaccggtttctgatcctgcacaacgacggcgcggtgaacttcacactggtagaggccccggtcgaggatcctgcgcggcaacgcaccctcatcgcccaccgcgacgacgtccgactcgacgcggtggatgccttggccggccatctggtagtcagctatcggcgcgaggcgctgccgcgggttcaactgtggccgatcgggcctgacggaaactatggtgagcccgaagagatctcgttcgactccgagctgatgtcggccggactggggcccaaccccaactgggattcgcccaaactgcgggtcggtgccggatctttcgtcaccccggtgcggatctacgacatcgacctggtcactggcgagcgtaccttgctgaaagaacagcccgtactgggcggctaccgccgcgaagactatgtggagcggcgtgactgggcgtacggagacgacggcacccggatcccggtctcgatagtgcaccgagccgatatcgaattcccggcacctgcgttgatctatggctacggcgcctacgagatctgtgaggatccgcggttttccatcgctcggttgtcgctgctggatcgcgggatggtgttcgtcgtcgcccacgttcgcggcggcggtgagatgggcaggctgtggtatgaaaacggcaagctactggacaagaagaacacgttcaccgacttcatcgcggtggcaagacatctggtggacacgggacttacttcccagcagcagctggtggcattggggggtagcgcgggcggtctgctgatgggcgcggtggccaacatggcaccggatctcttcgccggaatccttgcgcaggtgccgttcgtggacccgctgaccaccatcttggatccatcgttgccgctgaccgtcaccgagtgggacgaatggggaaatccgttgaacgacagcgatgtctatgcctatgtgaaatcgtattcgccgtacgagaacgtcacggcccaaaagtacccggccatcctggcaatgacgtcgctgaacgacaccagggtctattacgtggagccggccaagtgggtggccgcgttgcggcacgccaagaccgacggcaattccgtgctgttgaagacccagatgcacgccggtcatggtgggatcagtggccgctacgagcgctggaaggagaccgcgtttcaatacgggtggttgctagctactgccgacagcgaccgttacggcggcggccagggaaacgacctcgatggcgctgcgccagcatag

SEQ ID NO: 38598 - protein, 718 aa, Mycobacterium tuberculosis CDC1551
MHRTALPSPPVAKRVQTRREHHGDVFVDPYEWLRDKDSPEVIAYLEAENDYTERTTAHLEPLRQKIFHEIKARTKETDLSVPTRRGNWWYYARTFEGKQYGVHCRCPVTDPDDWNPPEFDERTEIPGEQLLLDENVEADGHDFFALGAASVSLDDNLLAYSVDVVGDERYTLRFKDLRTGEQYPDEIAGIGAGVTWAADNRTVYYTTVDAAWRPDTVWRYRLGSGESSERVYHEADDRFWLAVGRTRSNAYLLIAAGSSITSEVRYAHAADPTAQFSVVLPRRDGVEYSVEHAVIAGQDRFLILHNDGAVNFTLVEAPVEDPARQRTLIAHRDDVRLDAVDALAGHLVVSYRREALPRVQLWPIGPDGNYGEPEEISFDSELMSAGLGPNPNWDSPKLRVGAGSFVTPVRIYDIDLVTGERTLLKEQPVLGGYRREDYVERRDWAYGDDGTRIPVSIVHRADIEFPAPALIYGYGAYEICEDPRFSIARLSLLDRGMVFVVAHVRGGGEMGRLWYENGKLLDKKNTFTDFIAVARHLVDTGLTSQQQLVALGGSAGGLLMGAVANMAPDLFAGILAQVPFVDPLTTILDPSLPLTVTEWDEWGNPLNDSDVYAYVKSYSPYENVTAQKYPAILAMTSLNDTRVYYVEPAKWVAALRHAKTDGNSVLLKTQMHAGHGGISGRYERWKETAFQYGWLLATADSDRYGGGQGNDLDGAAPA

SEQ ID NO: 38599 - DNA, 2100 bp, Agrobacterium tumefaciens str. C58
  CDS (1)..(2100): transl_table=11
ttgcctattttcaagaacctgcccgccgctccgaccgccgaaaaacggcccgtccaggacacgcatcacggcatcacccgcaccgacgactacgcatggttccgggccgataactggcaggccatgttcaaggaccccaccctgctcgacccggccattcgcgcccatctggaggcggagaatgcctatatggaagccgccatgggcgacaccagggcgcttcaggaaaagctgttcgaggagatgaagggccgcatcaagcaggacgattcctccgttccggtcaatgatgggccttatgcctacggcacgctgttcgtgaccggcggcgagcagccgcattatttccgcaccccgcgtgatggcggcgacaagcatgtgctgctggatggtgacaaggaagcgcaaggcaaggattatttccgtcttgccggcctcaaccagtcgtccgatcacagtcacggcatctggggttatgacgacaagggttcggaatatttcacactgcgcatccgcaacctcgaaaccggtgaagaccttgccgatgtcgtggaaaataccgggggcggcggtgcctgggcgcctgacggcaagagcttcttctatacgctgcaggacgagaaccaccgtccgtcgaaagtcttccaccatatcatcggcgagccgcaatccgccgaccggctggtctatgaggaaaaggacccgggtttcttcatgggcgtcggagcttctgtcctcgacgatttcatcttcatcgatattcacgaccatgaaaccagcgaataccgcattctttccaccaaagacctgacggctgagccaaaggtggtggcggagcgcgaagagggcatcgaatattcgatgtgtgaaggcggcgacgtcttcttcatccttaccaatgatggtgacgccaaggatttccgcatcatggaggcgccggttaccgcgccgggcaaggaaaactggaaagaggtggtaccgcatgagccgggccgcctcattctttccgtcgatgcctatgcccgccatctgatctggctggaacgccgcgacggcctgccgcgcatcgtcatccgcgatcgccgcacaggcgaggaacattccatcgcctttgccgaagaggcctattcgcttggcctgcacggcgcggcggaatacgacaccgatgtcatccgcttctcctattcctcgatgacgacaccgagccagctgttcgattacaacatggtgacgcgcgaccgcacgcttctgaagacgcaggaagtaccatcaggccacaatcctgatgactacatcacccgccgcatcatggcccctgcccatgatggcgagctggtgccggtgtccctgctctaccgcaaggatgtgccgctcgacggttccgctccctgcctgctttatggttatggcgcttacggcatcaccattcccgcctccttctccaccacgacgctatctttggccgaccgaggtttcatctatgccatcgcccatattcgcggcggcaaggacaagggtttcgaatggtacgaaaccggcaagatggaaaacaagcagaacacgttcaaggatttcatcgcggctgccgatcatctggttcaggagggtttcacttcctatgagggcatcatcgcggaaggcggttcggcgggcggcatgctgatgggtgccgtcgccaatatggcgccagagaaattcgctggcatcatcgccgccgttcccttcgtggacgtgctgacgaccatgctcgatgacacgctgccgctcaccccgccggaatggccggaatggggcaatccgctggaatcggaagaggaatatggctggatcgctgcctacagcccctatgacaatgtcggggaaaaatcctatccgccgctgcttgcgctttccggcctcacagacccgcgcgtgacctattgggagccgaccaaatgggtggcgaagctacgcgagaagacgacgggggaagcccccatcctgctcaagaccaacatggcggctggccatggtggcaagtcgggccgtttccagcggctggaggaagtcgccttcgaatatgccttcgccctgaaggtcgcgggcaaggacgccgtgtga

SEQ ID NO: 38600 - protein, 699 aa, Agrobacterium tumefaciens str. C58
MPIFKNLPAAPTAEKRPVQDTHHGITRTDDYAWFRADNWQAMFKDPTLLDPAIRAHLEAENAYMEAAMGDTRALQEKLFEEMKGRIKQDDSSVPVNDGPYAYGTLFVTGGEQPHYFRTPRDGGDKHVLLDGDKEAQGKDYFRLAGLNQSSDHSHGIWGYDDKGSEYFTLRIRNLETGEDLADVVENTGGGGAWAPDGKSFFYTLQDENHRPSKVFHHIIGEPQSADRLVYEEKDPGFFMGVGASVLDDFIFIDIHDHETSEYRILSTKDLTAEPKVVAEREEGIEYSMCEGGDVFFILTNDGDAKDFRIMEAPVTAPGKENWKEVVPHEPGRLILSVDAYARHLIWLERRDGLPRIVIRDRRTGEEHSIAFAEEAYSLGLHGAAEYDTDVIRFSYSSMTTPSQLFDYNMVTRDRTLLKTQEVPSGHNPDDYITRRIMAPAHDGELVPVSLLYRKDVPLDGSAPCLLYGYGAYGITIPASFSTTTLSLADRGFIYAIAHIRGGKDKGFEWYETGKMENKQNTFKDFIAAADHLVQEGFTSYEGIIAEGGSAGGMLMGAVANMAPEKFAGIIAAVPFVDVLTTMLDDTLPLTPPEWPEWGNPLESEEEYGWIAAYSPYDNVGEKSYPPLLALSGLTDPRVTYWEPTKWVAKLREKTTGEAPILLKTNMAAGHGGKSGRFQRLEEVAFEYAFALKVAGKDAV

SEQ ID NO: 38601 - DNA, 2139 bp, Sinorhizobium meliloti 1021
  CDS (1)..(2139): transl_table=11
atgcagcaggaccgatcccggagacataccttgtccgtattcaagaacctgcccgccgcgcccgtcgccccgaaaaagccggtaacggatacccgccacggcatgacccgcaccgacgattacgcctggttgagggccgaaaactggcaggccatgttcaaggatccgtcgatcctggatcccgagatccgccgccatctggaggcggagaatacctatatgaacgccgcgatggcggacacgaaggacctgcagaagacgctgtttgccgaaatgcgcggccggatcaaggaagacaattcatcggttccgatgaaggatggcccttttgcctatgggacgtcttacgtcaccggcggcgagcatccgcgctatttccgtatcccccgcgagggtgcagcgggcgacgagacgatccgccgggtgctgctcgacggcgacagggaggctgaaggaaaaacctatttccgtatcgccggacttgaccattcgagcgatcattcacgcggaatctgggggtacgacgacaagggctcggaatatttcacgctgaaggtgcgcgacctttcgaccggcgaggacctcgaggacctgctcgaaaatacgggtggcggcggcgcctgggcgccggacggcaagagcttcttctataccgtgctcgacgagaaccaccggccatcgaagatcttccaccacgtcatcggcacgccgcagtcggaagaccggctggtttatgaggagcccgatgccggcttcttcatgtccgtcggcggttcgctcctcgatgatttcatctatatcgacatacatgaccacgagacgagcgaataccggctcatcccgaccagggaccttgccgcggagccaaggatcgtggcggtgcgcgtaaccggccttgaatattccatgaccgagggcggcgacgtcttctacattctcaccaatgccgacggcgccaaggatttcaagatcatggaagcgccggtggaagcgccgcagaaggaaaactggcgcgaggtcgtgccgcacaagccgggaaccctgatcctcagccatatggcctatgcccgccatctggtctggctgcagcgccgcaacggcctgccggaaatcgtcatccgcgaccgccgaaccggcgaggaacacgccatcgcattcgccgaggaggcctattctctggggcttgccggtgcggccgaatacggcaccgacatcatccgtttctcctattcgtcgatgacgacgccttcgcagcttttcgactacgacatgcagacgcgcaagcgcacgctgctcaagacgcaggaagtcccctccggccacgatccggacgactatgtgacccgccgggtcttcgctccggcgcacgatggcgagcaggtgccggtcaccctgctctatcgcaaggacacaccgctcgacggatccgccccttgcctgctctacggctacggtgcctatggcatcaccattcccgccagcttcaacaccaattgcctgtcgctcgtcgaccgcggcttcgtctacgcgatcgcccatatccgcggcggcaaggacaaggggttccactggtacgaagacggcaagatggcgaagaagaccaatacgttcaaagacttcatcgcagccgccgactatttgaatcaggaaaagttcacttcctacgcgaacatcgtcgccgagggcggctcggccggaggcatgctgatgggcgccatcgccaatatggcgcctgagaagttccgcggcatcatcgccgcggtgcccttcgtcgacgtgctcagcacgatgctggacgacacgctgccgctgacacccccggaatggcctgaatggggcaatccgatcgacagcccggagttctacgacatcatcgcgagctactcgccctacgacaatgtcggtgccaggccgtatcccgccattctggcgctcggaggcctgaccgatccgcgcgtcacctattgggaaccggcgaaatgggtggcaaagctgcgcgaggagacgaccggcagcgaacccatcctgctcaagaccaacatggacgcgggccacggcggcgcttccggccgctttcagcggctggaggagatcgccttcgaatatgccttcgccatcaaggtcgcaggcaggatgtaa

SEQ ID NO: 38602 - protein, 712 aa, Sinorhizobium meliloti 1021
MQQDRSRRHTLSVFKNLPAAPVAPKKPVTDTRHGMTRTDDYAWLRAENWQAMFKDPSILDPEIRRHLEAENTYMNAAMADTKDLQKTLFAEMRGRIKEDNSSVPMKDGPFAYGTSYVTGGEHPRYFRIPREGAAGDETIRRVLLDGDREAEGKTYFRIAGLDHSSDHSRGIWGYDDKGSEYFTLKVRDLSTGEDLEDLLENTGGGGAWAPDGKSFFYTVLDENHRPSKIFHHVIGTPQSEDRLVYEEPDAGFFMSVGGSLLDDFIYIDIHDHETSEYRLIPTRDLAAEPRIVAVRVTGLEYSMTEGGDVFYILTNADGAKDFKIMEAPVEAPQKENWREVVPHKPGTLILSHMAYARHLVWLQRRNGLPEIVIRDRRTGEEHAIAFAEEAYSLGLAGAAEYGTDIIRFSYSSMTTPSQLFDYDMQTRKRTLLKTQEVPSGHDPDDYVTRRVFAPAHDGEQVPVTLLYRKDTPLDGSAPCLLYGYGAYGITIPASFNTNCLSLVDRGFVYAIAHIRGGKDKGFHWYEDGKMAKKTNTFKDFIAAADYLNQEKFTSYANIVAEGGSAGGMLMGAIANMAPEKFRGIIAAVPFVDVLSTMLDDTLPLTPPEWPEWGNPIDSPEFYDIIASYSPYDNVGARPYPAILALGGLTDPRVTYWEPAKWVAKLREETTGSEPILLKTNMDAGHGGASGRFQRLEEIAFEYAFAIKVAGRM

SEQ ID NO: 38603 - DNA, 2052 bp, Yersinia pestis CO92
  CDS (1)..(2052): transl_table=11
atgatgactcccccaaaagcagataaacgcccttatccgatgacgcgacacggtgatacgcgtgtggatgactattactggctacgtgatgatgaacgtacagatgctgatgtactgaattatttgcaagctgaaaatgctttcacggcggcggtgcttaagccacaacaacagttgcgtgaaaccttgtatcaggaaatggttggccgtattcctccacaagaggagtcagtgccgtatgttcgcaacggctaccgttatcaaacccgttttgagccgggtaacgagtacgctatctatgttcggcaacccgtcagtacagacagcgactgggaaacgctattggatggtaatcagcgtgccgagggccatgagttttataccttaggcggtttagatgtcagtcctgataaccagttactggcggtggcagaagattatctatcacgtcgccaatatgacatcaggataaaaaacctatccagtgggggctggcacgatgaagttatcagtaatacgtcaggcggatttgagtgggcaaatgattcaaaaacgctgtattacgtacgaaaacatgaaaaaacgttattgccttatcaagtgtatcggcatgtggtgggtactgatcctgagcaagataaattaatttatcaggaatcagacgacactttttatgtcagcttggaaaaaaccacgtctgaacgttttattctgattcaccttagcagcacgacgacgtctgagattttgttgctggatgctgatctgcctgagccggtaccgcaggtttttgcgccacgccgtaaagaccatgaatatggtgtagaccactataaacagcacttctatattcgctccaataaagaggggaagaatttcgggctctataaaattgaagacagccaagggtgcagtgactttgccgatgagtctcaatgggcgttactgattgcaccaagaacggacgttatgctggaaggattcagtttattccgcgattggctggtggtcgaagaacgcagtgaagggttgacgcacctacggcaaatccattggtctactggagaagaaaaatccatcacttttgatgatccaacctacgtaacgtggcttgcttacaatccagaaccagaaacggcactgttgcgctatggttactcctcaatgaccacgccaagctccatgtttgagattaatatggacagtggtgagcgccagttactaaagcaacaggaagtaaaggatttcacccctgaaaagtatcgcagtgaacgtatttgggttaccgcatctgatggtgtgaaaataccggtttcgttggtttatcatcgcgactactttgtttctggtagcaatccattattggtgtatgcctatggttcgtacggtagcagtatggatcccgtcttcagcagtagccgtttgagcttattggatcgcggttttgtgtttgctctggcacacattcgtgggggcggagaactggggcagcaatggtatgaagatggcaaattactcaacaaattaaataccttcagcgactttactgatgtaacgaaagccttagtgaacgaaggatatggggatgctcagcgcgtttttgcgatgggaggcagtgccggaggcttgctgatgggcgtcatcgtcaatcaggcccctgaattatataaggcggttgtggcacaggttccctttgttgatgtggtcacgaccatgctggatgagtcgattccactcacgacaggtgaatacgatgagtggggcaaccctaacgataaggtctattacgattatattaagcaatatagcccttacgatcaggttaaagcgcaggattacccgcacatgctggtaacgactgggctgcatgattctcaagtccagtattgggaacccgctaaatgggtcgctaaactgcgtgaaatgaagactgatgaccaccaattactgctttacaccgatatggactcgggccatggcggtaaatcaggtcgcttcaaagcttatgaagatattgctttggagtatgcatttattctgtcgttgatttaa

SEQ ID NO: 38604 - protein, 683 aa, Yersinia pestis CO92
MMTPPKADKRPYPMTRHGDTRVDDYYWLRDDERTDADVLNYLQAENAFTAAVLKPQQQLRETLYQEMVGRIPPQEESVPYVRNGYRYQTRFEPGNEYAIYVRQPVSTDSDWETLLDGNQRAEGHEFYTLGGLDVSPDNQLLAVAEDYLSRRQYDIRIKNLSSGGWHDEVISNTSGGFEWANDSKTLYYVRKHEKTLLPYQVYRHVVGTDPEQDKLIYQESDDTFYVSLEKTTSERFILIHLSSTTTSEILLLDADLPEPVPQVFAPRRKDHEYGVDHYKQHFYIRSNKEGKNFGLYKIEDSQGCSDFADESQWALLIAPRTDVMLEGFSLFRDWLVVEERSEGLTHLRQIHWSTGEEKSITFDDPTYVTWLAYNPEPETALLRYGYSSMTTPSSMFEINMDSGERQLLKQQEVKDFTPEKYRSERIWVTASDGVKIPVSLVYHRDYFVSGSNPLLVYAYGSYGSSMDPVFSSSRLSLLDRGFVFALAHIRGGGELGQQWYEDGKLLNKLNTFSDFTDVTKALVNEGYGDAQRVFAMGGSAGGLLMGVIVNQAPELYKAVVAQVPFVDVVTTMLDESIPLTTGEYDEWGNPNDKVYYDYIKQYSPYDQVKAQDYPHMLVTTGLHDSQVQYWEPAKWVAKLREMKTDDHQLLLYTDMDSGHGGKSGRFKAYEDIALEYAFILSLI

SEQ ID NO: 38605 - DNA, 2193 bp, Caulobacter crescentus CB15
  CDS (1)..(2193): transl_table=11
atggatcgacgtcagatgatgacgggagccgccgcggcgcttacgtcatcgaccgcactcctgtctggaacagcttttggatcgcccatgaccgccgacaacgccgcccgccccacgccgccggtggccaagaaggtccccaagaccatcacccagctgggccgcacgcgcaccgacgactacgcctggatgaaggatgacaactggcagaaggtcctgcgcgaccccagcctgatcaaggccgacgtcaaggaacacctgaccgccgagaacgcctacaccaaggccatgctggccccgaccgaagcgctgcaggcggcgatgttcgaggagatgaagggccgcatcaagcaggacgacgccagcgtcccggccaaggatggtccgttcgaatactatacccgctacgataagggcgcgcagcacccggtccacgcccgcaagcccgtcggcgggggcgccgaagaggtgctgctcgacgaagagaaggaagccaagggcaaggccttctatcaggtcggcgcggccagccattcgcccgatcataagctctatgcctgggcggtcgatgagcagggctcggaagtcttccgcatccatgtgaaggaccttgcgaccggcgccctgctgggcgaggccgtggacagcaccacgggcgacttctgcttctcgcccgacggccagtggttgttctggacgttccgggacgacaatggccgtcccgccaagatctatcgccgcccgatcaagggcgcggccaaggacgacgtgctgatctatgacgagcccgacgagggcttcttcatcggcgtcggcgtctccagctccgagaagtacgtcgtcatctcgtgcggcaaccaggaaaccagcgaggcgctgctgattccggcggcgaacccgacggccaagccggtggtcttccacccgcgcgaggtggggctgcgctacgaggtcgagcactggaacgatcactgggtgatccgcaccaacgccgacggcgccgtcgactggaagctggtcaccacgccggagaccgccaccggcaaggccaactggaaggactgggtggcgcataagcccggccgcctgatctcggggaccatggcctacaaggcctggttcgtgcgcctggagaaggtcgacgccctcaaccgcgtcgtcgtcaccgcccaggacggcgccgagcacgccatcgcctttgacgaggccgcctacgccctgtcgctggaaggcggctatgagtacgacaccgacacggtgcgcttcgtctacaactcgatgaccacgccccgacagtggttcgactacgacatgaagagccgccagcggaccctgcgcaagacgcaggaaatcccgtcgggccatgatccgtcgaagtacgagacccgtcgcctgaacgccaaggccgccgacggcgccgaggtgccgatcttcgtcctgatgaagaaaggaaccaagctggacggctcggcgccgctgctgctgtacggctatggcagctacggcatctcgatggagcccaacttctcgatccgcaatttcagcctggtggatcggggctggatctgggccacggcctgcccgcgcggcggctcggagaagggctggagctggttcctggacggcaagaagttcaagaagaagaacaccttcaccgacttcatcgcctgcgccgagcacctgcacgcggccggctatggcaagcccgccagcacggtggcctatggcggctcggccggcggcctgttgatgggcgcgatcaccaacatgcggcccgacctcttcgccggcatcatcgccgcagtgccgtttgtcgacgtggtcaacaccatgagcgacaccaccctgcccctgaccccgcccgaatggcccgaatggggcaatccgctggaggataaagaggcctacgactacatcgccagctacagcccgtacgacaatatcgggcccaagccctatccggcgatcctggccaccgggggcctgtccgatccgcgcgtcacctactgggagccgcagaagtgggtcgccaagctgcgccccgccacgaccagcggcaatccggtgctactgaagatcaatatggaagccggtcacggcggcgcctcgggccgctttgatttcctcaaggagatcgcgctggactacgccttcgccgtctgggccgtcgagaaaggctggacgaaggcgtga

SEQ ID NO: 38606 - protein, 730 aa, Caulobacter crescentus CB15
MDRRQMMTGAAAALTSSTALLSGTAFGSPMTADNAARPTPPVAKKVPKTITQLGRTRTDDYAWMKDDNWQKVLRDPSLIKADVKEHLTAENAYTKAMLAPTEALQAAMFEEMKGRIKQDDASVPAKDGPFEYYTRYDKGAQHPVHARKPVGGGAEEVLLDEEKEAKGKAFYQVGAASHSPDHKLYAWAVDEQGSEVFRIHVKDLATGALLGEAVDSTTGDFCFSPDGQWLFWTFRDDNGRPAKIYRRPIKGAAKDDVLIYDEPDEGFFIGVGVSSSEKYVVISCGNQETSEALLIPAANPTAKPVVFHPREVGLRYEVEHWNDHWVIRTNADGAVDWKLVTTPETATGKANWKDWVAHKPGRLISGTMAYKAWFVRLEKVDALNRVVVTAQDGAEHAIAFDEAAYALSLEGGYEYDTDTVRFVYNSMTTPRQWFDYDMKSRQRTLRKTQEIPSGHDPSKYETRRLNAKAADGAEVPIFVLMKKGTKLDGSAPLLLYGYGSYGISMEPNFSIRNFSLVDRGWIWATACPRGGSEKGWSWFLDGKKFKKKNTFTDFIACAEHLHAAGYGKPASTVAYGGSAGGLLMGAITNMRPDLFAGIIAAVPFVDVVNTMSDTTLPLTPPEWPEWGNPLEDKEAYDYIASYSPYDNIGPKPYPAILATGGLSDPRVTYWEPQKWVAKLRPATTSGNPVLLKINMEAGHGGASGRFDFLKEIALDYAFAVWAVEKGWTKA

SEQ ID NO: 38607 - DNA, 2052 bp, Salmonella typhimurium LT2
  CDS (1)..(2052): transl_table=11
atgttgccaaaagccaatcgaattccctatgccatgaccgtacatggcgatacgcgcattgataattattactggctgcgagatgacactcgctcgcagccggaagtccttgattacctgcatcaggaaaatgagtatggccggaaggtcatgacctctcagcaggcgttacaggaccgcattctaaaagaaattatcgatcgcatcccgcccagagaagtttccgctccgtatgtgaaaaatggctatcgctaccgttatatctatgaacccggctgcgaatatgccatctatcaacgacaatcggcgttaagcgaagagtgggatgtgtgggaaaccttgctcgatgcgaaccagcgggccgcgcacagcgaattttatacgctcggtggacttgccattacgccggataataccatcatggcgctggcagaagattatttatcccgtcgtcagtatgggttgcgttttcgtaacctcgaaagcggtaactggtatccggaactgctggataacgttgcgcctgaatttgtctgggccaatgattccctgaccctttactatgtgcgtaagcataagaagacgctgctgccctatcaggtttggcggcacacgattggcactccgtcatcgcaagatgaactggtatatgaggagaaagacgataccttttatgtcagcctgcataaaaccacttcgcagcattatgtggtgattcaccttgccagcgccaccactagcgaagtgctattacttgacgcggaactggccgatgccgagccgttttcatttttaccgcgccgcaaagaccatgaatatagtctcgatcactatcaacataagttttacctgcgttctaaccggaacggtaaaaactttgggttgtaccgtacccgcgtgcgcaatgaaaacgcctgggaagagctgatccctccgcgcgagcatattatgctggaagggtttaccctgtttaccgactggttagtggtcgaagagcgtcaacgggggcttaccagcctgcggcaaattaaccgtaaaacccgtgaagtgataggcatcgcctttgacgatccggcttacgtgacgtggcttgcctataatcccgaacctgagacctcccggctgcgttacggctattcttcaatgacgacgccagataccttgtttgaactggatatggataccggagaacgacgggtacttaaacagacggaagtgcctgggtttgattctggctgttatcagagcgaacacctgtggatcaccgcacgcgacggcgtcgaagtgccggtatcgctggtttatcatcagaagtattttcgtaaagggcaaaatccgcttctggtttacggttacggatcttacggttccagtattgacgccgacttcagcagcagccgactgagcttgctggatcgtggctttgtttacgcaatcgtacacgttcgcggcggcggtgagctggggcagcagtggtatgaagatggcaagttcctcaaaaagcggaatacttttaatgactatcttgatgcctgcgatgccttattaaaactgggttacggttcgccgtcgctgtgttatgggatgggcgggagcgcgggcggaatgctaatgggcgtcgctatcaacgaacgccccgagcttttccacggcgttattgcccaggtaccctttgttgatgtattaaccacgatgctggatgagtcgatcccactaacgacaggagagtttgaagagtgggggaacccgcaggatattgagtattatgactatatgaaaagctatagtccttatgacaatgtcaaagcgcaggactatccgcacctgctggtgacgacaggattgcacgactcccaggtgcaatactgggaaccggcgaagtgggtggcaaaattacgcgagctaaaaacggaccaacgtctgctgctgttatgtacggatatggactccgggcacggtggtaagtcggggcggtttaaatcctacgaaggcgtcgcgctggagttcgcctttttaatcggcctggcgcagggaaccttacatagcgcatag

SEQ ID NO: 38608 - protein, 683 aa, Salmonella typhimurium LT2
MLPKANRIPYAMTVHGDTRIDNYYWLRDDTRSQPEVLDYLHQENEYGRKVMTSQQALQDRILKEIIDRIPPREVSAPYVKNGYRYRYIYEPGCEYAIYQRQSALSEEWDVWETLLDANQRAAHSEFYTLGGLAITPDNTIMALAEDYLSRRQYGLRFRNLESGNWYPELLDNVAPEFVWANDSLTLYYVRKHKKTLLPYQVWRHTIGTPSSQDELVYEEKDDTFYVSLHKTTSQHYVVIHLASATTSEVLLLDAELADAEPFSFLPRRKDHEYSLDHYQHKFYLRSNRNGKNFGLYRTRVRNENAWEELIPPREHIMLEGFTLFTDWLVVEERQRGLTSLRQINRKTREVIGIAFDDPAYVTWLAYNPEPETSRLRYGYSSMTTPDTLFELDMDTGERRVLKQTEVPGFDSGCYQSEHLWITARDGVEVPVSLVYHQKYFRKGQNPLLVYGYGSYGSSIDADFSSSRLSLLDRGFVYAIVHVRGGGELGQQWYEDGKFLKKRNTFNDYLDACDALLKLGYGSPSLCYGMGGSAGGMLMGVAINERPELFHGVIAQVPFVDVLTTMLDESIPLTTGEFEEWGNPQDIEYYDYMKSYSPYDNVKAQDYPHLLVTTGLHDSQVQYWEPAKWVAKLRELKTDQRLLLLCTDMDSGHGGKSGRFKSYEGVALEFAFLIGLAQGTLHSA

SEQ ID NO: 38609 - DNA, 2067 bp, Nostoc sp. PCC 7120
  CDS (1)..(2067): transl_table=11
atgatgaataaggacaagatttcgcaaaatcaaatcacgccacccattgccgataaacagccccaagttttagaattgcatggcgatcgccgagtagataattacttttggatgcgcgatatagataacccaaaagtagttgcatatctagaagcagaaaattcatatacaaaagtcatgatgcagcacacagaaacgctgcaaaaaactctttataatgaaatgctctcacgaatcaaagaaactgatttatccgtaccttaccgcaaggataattattattattactctcgaacagaagcaggcaaagactatagaattcattgccgaaaagaaggcgatttagatgctccagaagaagtcattttagacgaaaatgaattagccgccggacatgatttttttgaattaggaatatttgctattagccccaatcatcagatactagcttattcctatgacaccagtggttcggagcaatatacgcttttatttcttgacttaacgacccgtgagttatatccagaaactattgctgatacttatttttctttttgttggtgtaacgataatcaaacatcattttatacaaaaattgatgcagcaaatcgcccttaccagctttttaagcacactttaggaacgccacctacaaaagatgaattaatctaccacgagccagatcatgcttatgctttatatgtagggaaaacccgcagtcaagcatatatattgatgactttgcaaagcagcatcactacagaagttcactatttagatgccaacaatcctgagagtaattttcagataatttatccacgagaacctggagtagaatatgacgttgagcatcatagtgattacttttatatagtcacaaatgaagctgctacaaactttaaattagtaaaaactccattaactatgccatccaaggagaattggcaaactgttattccccaccgtgaagatgtgctgttatctggagtgagcctgtttattaatcacttagtcatctatgaaagaaaagatggactacaaactgctagagtgcaaaatatatctacaggtagtgaaagtaatattattttcccagaaccaacttatcaattttatgaagggaataaccccgaatttaatactaatattttgcggtttaattacacttctttaattacaccgccatctgtatttgattatgatatggaaacccacgaacaggagttaaaaaaacagacagaagttctgggggactatgacaaaaatcaatatcagagtgagtggttacttgctactgctgaagatggtacgcaaattcccatatcaattatttacaaaaaagttactaaaaaagatgggaaaaatcctttactaatgacaggttatggagcctatggtgcatcttacccggcatctttctcatcagctagactagcattgctagaccgaggagtagtgtttgctattgcccacattcgtggtggtgaagaaatggggcgtaaatggtatgaagatggcaaatttttgcagaaaaagaacacctttacagattttatcgcctgtgctgagtatttaatcaaagaaggttggacaacaagcgatcgcctagctattacaggcggtagcgcaggtggtttattgatgggagcggtgattaatttgcgtcccaaattgtttaaagttgtagttgccgatgtacctttcgtagatgtagtgacaacaattttagatacatctttgcccttatcagcaatggagtgggaagaatggggtaatcctaatgatcaaatctactatgagtatatgaaatcttactcaccctatgataatgtcgaagccaaagattatccccatttgttaattactgctggcttaaatgattctcgcgttaaatattgggaaccagccaaatggacagctaaattgcgagaacttaaaacagatcatcatgttctgttgttaaaaactaatatggatgctggtcatagtggcgcatctggacgttatgaaagcctacgggaacttgcttttgagtatgcttttattttggatcgtttagggttgtag

SEQ ID NO: 38610 - protein, 688 aa, Nostoc sp. PCC 7120
MMNKDKISQNQITPPIADKQPQVLELHGDRRVDNYFWMRDIDNPKVVAYLEAENSYTKVMMQHTETLQKTLYNEMLSRIKETDLSVPYRKDNYYYYSRTEAGKDYRIHCRKEGDLDAPEEVILDENELAAGHDFFELGIFAISPNHQILAYSYDTSGSEQYTLLFLDLTTRELYPETIADTYFSFCWCNDNQTSFYTKIDAANRPYQLFKHTLGTPPTKDELIYHEPDHAYALYVGKTRSQAYILMTLQSSITTEVHYLDANNPESNFQIIYPREPGVEYDVEHHSDYFYIVTNEAATNFKLVKTPLTMPSKENWQTVIPHREDVLLSGVSLFINHLVIYERKDGLQTARVQNISTGSESNIIFPEPTYQFYEGNNPEFNTNILRFNYTSLITPPSVFDYDMETHEQELKKQTEVLGDYDKNQYQSEWLLATAEDGTQIPISIIYKKVTKKDGKNPLLMTGYGAYGASYPASFSSARLALLDRGVVFAIAHIRGGEEMGRKWYEDGKFLQKKNTFTDFIACAEYLIKEGWTTSDRLAITGGSAGGLLMGAVINLRPKLFKVVVADVPFVDVVTTILDTSLPLSAMEWEEWGNPNDQIYYEYMKSYSPYDNVEAKDYPHLLITAGLNDSRVKYWEPAKWTAKLRELKTDHHVLLLKTNMDAGHSGASGRYESLRELAFEYAFILDRLGL

SEQ ID NO: 38611 - DNA, 2109 bp, Brucella melitensis 16M
  CDS (1)..(2109): transl_table=11
atgccccaggatttcctacgccctcttcctccgcacgctcccaagcaccccgcaagcgacacacggcacggcatcacccgcacggatgactatgcgtggctgcgcgctgaaaactggcaggaagtgttccgcgatccttctgttctggcgccggaaatccgcgcgcacctggacgcggaaaacgcctatcaagccgccttgatgaaagatacggaaaacctgcaaaaggtgctttttgccgagatgcgcgggcgcatcaaggaagacgattcttccgttccggccaaggacggcccctatgcctatggcgtctcctatcgcactggcggcgaacagccctatttcatccgcacgccgcgcgatggcgggccggaaaccatcctgctcgacggcgacagggaaggcgaaggcaaggcctatttccgcctcgcctccgccgatcatgccccaaaccacaatctcctcatctgggggtatgacgacaagggatcggaattttacaagctgaaggtgcgcgatctcaccaccatggccgaccttgaagatatcgttaccgataccaatggcggcggcgcgtgggatgcgaaaagcgaaggcttcttctacacacggcttgatgaaaaccaccgcccgtcaaaggttttctaccacaagatcggcacacagcaggcagacgacaagctgatttatgaggaaaccgatccgggctttttcctcggtgtgggcggctccgcgctcgacgattatatcttcatcgacattcacgaccacgaaacatccgaatgctggcttttgcccgcagacgatccgtcagccgaaccgaagctcgtcatggcgcgcaaggccggcactgaatatgatatcgcgccgggcggcgatgttttctatattctcaccaatgcggacggagccaaggacttcaagatctgccaggcgccagcttccgcgccacagcctgaaaactggcaggaaatcgtcgccgaaaagccgggccgactgattctctcccattcagcctataagcaccatcttgtctggatcgaacgcgacaacggtctgccgcgcatcgtcatccatgatcgcaagaccggcgaggaacacgccatcgctttcgatgaggaggcctattcgctgggactgcatggcagcgccgaatatgatacggatgtcatccgtttttcctattcgtcgatgacgacgccggaacagctcttcgattataatatgcgcacgcgcgaacgcacgctcctgaagacgcaggaagtgccctcgggccacaatccgcaggactatgtgacgcgccgcattctggcccccgccttcgatggtgaactcgtgccggtttcgctgctctatcacaaggacacgaagctggacggctccgcgccttgccttctctacggctatggctcctatggcatcaccattccggcaagcttcagcacatcgcgcctttcgcttgtcgatcgtggcttcgtttatgcaatcgcgcatattcgcggcggcaaggacaaggggttcgcctggtacgaaaacggaaagcgcgacaagaagaccaatacgttcaaggacttcattgccgcagcgcagcatctcgtcaaggaaggcttcaccagccatgaccgcatcgtcgcccatggcggctcggcgggcgggatgctgatgggcgccatcgccaatatggcgccgcaagcctttggcggcatcattgccgaagtacccttcgtcgatgtgctgaatacaatgctggacgacaccctgccgctcaccccaccggaatggcccgaatggggtaatccgattgcttccgaagcagattatcgcaccattgccagctattcaccctatgacaatgtaacggcgcaggcctatccggccattctggcggttgcggggctcaccgatccacgcgttacctattgggaacccgccaagtgggtggcgaaactgcgtgaattgaagaccgacagccatccggtcctgttccgcatcaatatggatgctggacatgcaggcgcttccggccgcttttcgcgccttgaggaagtcgcctatagtttcgctttcgcattgaaggtggtgggtaaggttccaagcttcaaaaactga

SEQ ID NO: 38612 - protein, 702 aa, Brucella melitensis 16M
MPQDFLRPLPPHAPKHPASDTRHGITRTDDYAWLRAENWQEVFRDPSVLAPEIRAHLDAENAYQAALMKDTENLQKVLFAEMRGRIKEDDSSVPAKDGPYAYGVSYRTGGEQPYFIRTPRDGGPETILLDGDREGEGKAYFRLASADHAPNHNLLIWGYDDKGSEFYKLKVRDLTTMADLEDIVTDTNGGGAWDAKSEGFFYTRLDENHRPSKVFYHKIGTQQADDKLIYEETDPGFFLGVGGSALDDYIFIDIHDHETSECWLLPADDPSAEPKLVMARKAGTEYDIAPGGDVFYILTNADGAKDFKICQAPASAPQPENWQEIVAEKPGRLILSHSAYKHHLVWIERDNGLPRIVIHDRKTGEEHAIAFDEEAYSLGLHGSAEYDTDVIRFSYSSMTTPEQLFDYNMRTRERTLLKTQEVPSGHNPQDYVTRRILAPAFDGELVPVSLLYHKDTKLDGSAPCLLYGYGSYGITIPASFSTSRLSLVDRGFVYAIAHIRGGKDKGFAWYENGKRDKKTNTFKDFIAAAQHLVKEGFTSHDRIVAHGGSAGGMLMGAIANMAPQAFGGIIAEVPFVDVLNTMLDDTLPLTPPEWPEWGNPIASEADYRTIASYSPYDNVTAQAYPAILAVAGLTDPRVTYWEPAKWVAKLRELKTDSHPVLFRINMDAGHAGASGRFSRLEEVAYSFAFALKVVGKVPSFKN

SEQ ID NO: 38613 - DNA, 2133 bp, Arabidopsis thaliana
  CDS (1)..(2133)
atggcggaatcgagatcccctcctgtagcgaagaaggtggagcatgtgatggagatgttcggtgacgttagggttgacaattactactggctccgtgacgattctcgcaccaatcccgacatgctttcttatcttcgtgaagaaaatcactacactgatttcgtcatgtctgggaccaagcaatttgagaatcagctgtttgctgaaataagagggaggatcaaagaagatgatatatctgcacctctacgcaagggtccttactattattatgagaaaaatcttcaaggaaaggaatatattcagcactgtagacgtttgatcactgacaacaaagctgagccttctgtctatgatactatgccaactggtccagatgctcctcctgagcatgtgatattggatgagaataccaaggctcaagagcatgactactacagaattggggccttcaaggcgagtcccgatcataaattggtggcatatgcagaggacacaaaaggtgatgagatatatacagtgaatgtcatcgactctgaagccctaaaaccagtggggcaacagcttaaaggacttacttcttatcttgaatgggctggtaatgatgctttgctctacataacaatggacgaaatcctgcgacctgataaggtttggttacataaattagggacagagcagagcagtgatgtatgcctttaccatgagaaggatgatatgttttctcttgaactccacgcttctgagagccataagtatttatttgttgcatctgaaagcaaaactacaagatttgtcttctcgcttgatgtgtccaagactcaggatggactcagggtgttgacacctcgtgtagatggaattgattcatctgtcagtcatcgtgggaaccactttttcatccagagaaggagcactgaattttacaactcagaactgatcgcctgtccagttgatgacacatcaaagacaactgttctgcttccacatagagaaagtgtaaagattcaggaaattcagcttttccgagatcatcttgcagtcttcgagcgtgaaaacggactgcagaagatcacagttcataggcttcctgctgagggacagccactggaaggtctccaaggtggtcgtaatgtgagctttgttgacccggtctattcagttgactcaaccgagtccgaattttcgtccagggttttaaggtttaaatactgctcaatgaaaacacctccttctgtgtatgactatgacatggacagtggcacttccgttgtcaagaagattgacacagtattgggaggttttgatgcatcaaattatgttacagaaagaaagtgggtcgctgcatcagacggaactcaaattccaatgtctattgtgtataacaaaaaacttgcaaagcttgatggatctgatccattactcctttatggatatggttcatatgagatttctgtggatccttatttcaaggcatcaaggttgtccctgttagatcgtgggtttacctttgtaattgctcatgttcgtgggggcggtgagatggggagacagtggtatgagaatgggaagctgttgaagaagaaaaacacattcactgattttattgcttgtgctgagcgtttaatagaactaaaatattgctcgaaagaaaaactgtgcatggaagggagaagtgctggtggattgctgatgggtgctgttgttaatatgaggcctgacttgttcaaggtggttatcgctggagttccttttgtagatgtcttgacaacaatgctggacccaacaattccgcttacgacatcagagtgggaggagtggggtgaccccagaaaggaagaattttacttctatatgaagtcatattcccctgtagacaatgtaacggcgcagaattatccaaatatgcttgtaactgctgggttaaatgatccaagagttatgtactctgaacctggcaagtgggtggcaaaactgagagaaatgaagaccgacaacaacgtacttctgttcaaatgcgagcttggcgcagggcatttctcaaaatctgggagattcgagaagcttcaagaagatgcatttacgtttgcattcatgatgaaagttttggacatgattcctgcttctgggtga

SEQ ID NO: 38614 - protein, 710 aa, Arabidopsis thaliana
MAESRSPPVAKKVEHVMEMFGDVRVDNYYWLRDDSRTNPDMLSYLREENHYTDFVMSGTKQFENQLFAEIRGRIKEDDISAPLRKGPYYYYEKNLQGKEYIQHCRRLITDNKAEPSVYDTMPTGPDAPPEHVILDENTKAQEHDYYRIGAFKASPDHKLVAYAEDTKGDEIYTVNVIDSEALKPVGQQLKGLTSYLEWAGNDALLYITMDEILRPDKVWLHKLGTEQSSDVCLYHEKDDMFSLELHASESHKYLFVASESKTTRFVFSLDVSKTQDGLRVLTPRVDGIDSSVSHRGNHFFIQRRSTEFYNSELIACPVDDTSKTTVLLPHRESVKIQEIQLFRDHLAVFERENGLQKITVHRLPAEGQPLEGLQGGRNVSFVDPVYSVDSTESEFSSRVLRFKYCSMKTPPSVYDYDMDSGTSVVKKIDTVLGGFDASNYVTERKWVAASDGTQIPMSIVYNKKLAKLDGSDPLLLYGYGSYEISVDPYFKASRLSLLDRGFTFVIAHVRGGGEMGRQWYENGKLLKKKNTFTDFIACAERLIELKYCSKEKLCMEGRSAGGLLMGAVVNMRPDLFKVVIAGVPFVDVLTTMLDPTIPLTTSEWEEWGDPRKEEFYFYMKSYSPVDNVTAQNYPNMLVTAGLNDPRVMYSEPGKWVAKLREMKTDNNVLLFKCELGAGHFSKSGRFEKLQEDAFTFAFMMKVLDMIPASG

SEQ ID NO: 38615 - DNA, 2121 bp, Corynebacterium glutamicum ATCC 13032
  CDS (1)..(2121): transl_table=11
atgtctgaacgcctaaacgctccgcaagcaccaatccatcccatcacccgaacccaccacggtattgatttcgtagacaactatgaatggctgagggataaagaatcccaagaaaccttggactacctggaggcggagaatgcgttcaccaagcaggagactgaacagctagccacactgcgggacaacatctatgaagagattaagtcacgcgttaaagaaaccgacatgtccatcccagtgcgtgccggaaagcactggtattactctcgcactgaagaaggcaagagctacggctattcctgccgcattccagtgactgaagggtcggatgcatggacccctcctgttatccctgagggtgagccagcgcagggtgaaaccatcatcatggatgccaacgagttggcagaaggccacgaattcttctccatgggtgcatcatctgtcaccacctctggccgctaccttgcgtattccaccgatgtcacgggcgaagagcgctttacgttgcgcatcaaggatctagaaactggcgagctgcttcctgataccctgactggcattttctacggtgctacttgggtgggggaggagtacctcttttaccagcgcgttgatgatgcgtggcgtccagatactgtgtggcgccacaaggtgggtaccccggttgaagaagacgtgttggtgtaccacgagcctgatgaacgttattccacctgggtgggcaccactcgttcagaaaagttcatcctttttggttgcgcctccaagatcacctctgaagtccgcgtgcttcctttcgaccagccagagggcacccctgaggtgctgattccgcgcgcggagggtgtggaatacgacgtcgatcatgcagtcgtagacggctccgatatttggttggtcacacacaacgccgagggcccgaacttttcggtggggtgggctggcgtcgacaagctcaattctttggacgcgctggcgccactcgtcgcgcacaaggatgacgtgcgcattgagggtgtcgatacctaccgcgatttcatcatcctgggctacaggtccggcgcgatcggccaggtcgcgatcatgaagcttatcgacggaaccttcggcgatttccaacagctggaatttgacgaggaaatctacaccgtcgcatcgggcggaaacccagaatgggacgcccccgtcattcgcctttcttacggatcattcaccaccccggcgcagctgtttaactactggattgaatccggcgaacgcacgctgctgaagcagcaggaagtgctcggcggatacaagccgtcagactatgtggcctcccgattgtgggtcactgcgaaagatggcgcgcagattccagtgtccttggtgcaccgcaccgacctggatgtatccaagcccaaccccacgttgctctacggctatggttcctacgaatcatccattgatccaggcttctctatcgcgcgtttgtcactgatggatcgtggcatgatttttgcgattgcccacgttcgtggcggtggcgaaatgggtcgtggctggtacgacaacggcaaaaccaccacgaagaaaaacaccttcaccgacttcattgatgttgccgacgccctcatcgagcagaagatttctgcccctgaaatgctggttgcagaaggcggctcagctggtggcatgctcatgggcgccattgccaacatggccggtgaccgcttcaaggcgatcgaagccaacgtgccattcgtcgatccgctgacctctatgctcatgccggaactgccactgacggttatcgaatgggatgagtggggcgatccactccacgataaggacgtctatgaatacatggcgtcgtatgccccatatgaaaacatcgaggcaaagaactaccccaatatcttggccgtaacatcgctcaacgacacccgagtgttgtacgtcgaaccagccaaatgggtagcgcagcttcgggcgactgcaaccggtggagaattccttctgaaaactgaaatggttgccggacacggcggtgtgtcaggacgctacgaaaagtggcgtgagactgcatttgagtacggctggttgatcaaccaagcaaccggtgtgaccgaataa

SEQ ID NO: 38616 - protein, 706 aa, Corynebacterium glutamicum ATCC 13032
MSERLNAPQAPIHPITRTHHGIDFVDNYEWLRDKESQETLDYLEAENAFTKQETEQLATLRDNIYEEIKSRVKETDMSIPVRAGKHWYYSRTEEGKSYGYSCRIPVTEGSDAWTPPVIPEGEPAQGETIIMDANELAEGHEFFSMGASSVTTSGRYLAYSTDVTGEERFTLRIKDLETGELLPDTLTGIFYGATWVGEEYLFYQRVDDAWRPDTVWRHKVGTPVEEDVLVYHEPDERYSTWVGTTRSEKFILFGCASKITSEVRVLPFDQPEGTPEVLIPRAEGVEYDVDHAVVDGSDIWLVTHNAEGPNFSVGWAGVDKLNSLDALAPLVAHKDDVRIEGVDTYRDFIILGYRSGAIGQVAIMKLIDGTFGDFQQLEFDEEIYTVASGGNPEWDAPVIRLSYGSFTTPAQLFNYWIESGERTLLKQQEVLGGYKPSDYVASRLWVTAKDGAQIPVSLVHRTDLDVSKPNPTLLYGYGSYESSIDPGFSIARLSLMDRGMIFAIAHVRGGGEMGRGWYDNGKTTTKKNTFTDFIDVADALIEQKISAPEMLVAEGGSAGGMLMGAIANMAGDRFKAIEANVPFVDPLTSMLMPELPLTVIEWDEWGDPLHDKDVYEYMASYAPYENIEAKNYPNILAVTSLNDTRVLYVEPAKWVAQLRATATGGEFLLKTEMVAGHGGVSGRYEKWRETAFEYGWLINQATGVTE

SEQ ID NO: 38617 - DNA, 2079 bp, Xanthomonas campestris pv. campestris str. ATCC 33913
  CDS (1)..(2079): transl_table=11
atgaccagctctgttccttccgcacttgccgccctcccgacgccgccggacgtggccaagcatccgcacgtggtcaaggccccgttcggtgccacccgtaacgatgactactactggctgcgcgacgacaagcgtgagaacaaggccatgctggcgtatctcaacgccgaaaacacctacgccgacgccttgatggcgccgctgaagccgctggaagacacgctgtataccgagatcgtcgggcgcatcaagcaggacgatgccagcgtgccgtaccgcgagcgtggctactggtattacacgcgctacgaggccggcaaggactacccgatccaggcgcgccgcaagggcagcatggacgcaccggaagagatcctgctcaacgtcaacaccctggccgagggcaagggctacttcagtgttggcgatgccgaagtcagccaggacaaccgcatcctggcctgggccgacgatgcagtgggccgccagcagtacaccatccgtttcaagaacctggagaccggcgaggtctatccggacaccgtggaaggcgtctccgccaacgtggtgtgggccgacgacaacaagaccttgttctatgtggaaaacgacccggaaacgctgctgaccgtgcgcgtcaagaagcacgtgctcggcacgccggccaaggacgacgtgctggtctacgaggaaaaggacgacagcttctacatgggcatctcccgcacccgcgacgacaagtacatcgtcatcggcgtggagagcacggtgtcctcggaaacccgctacgcgccggccgacaaacccgagaccttcaccgtgctggccaagcgcgagcgcgacgtcgaataccacccggagcatttcggtggccgctgggtgatccgcaccaatgccgatggcgccaagaacttcaagctggtcaccgcgcccaccaatgcgaccacgcgcaagcagtggaccgactgggtggcgcacgacccgaacgtgtatatcgaaagctacgcactgttcgatggcttcaccgccatcgaagaacggtccggtggcctggagcgcgtccgcctgctcaagcgcgatggcagccacgagtacgtcaagaccgacgagtcggcgtattcgatggggttgtcggtcaactccgagccggacaccgcgtggttgcgctacacctacacctcgctgaccacaccggccaccacctacgaactcaatacccagaccggcgagcgcaagctgctcatgcagcagccggtgatcggttacgacgccggcaactacgtgaccgaacgcgtctgggtgaccgcgcgcgacggcgtcaagctgccggtgtcgctggtctacaagaaaggcttcaagaaagacggcactgccgcgttgttccagtacgcgtacggcagctacggcatgtcgatggacccggcgttcaacctgccggcggtgagcctgctggatcgcggcgtggtgtacgccatcgcgcacatccgtggcggccaggaaatgggccggcagtggtatgacgacggcaagctgctgcacaagcagaacaccttcaacgactttgtcgatatcacccgcggcctggtggcacagggctacgctgccaaggaccgcgttgcggcttccggcggcagcgccggcggcttgctgatgggcgcggtggccaacatggccccgcaggactaccgggtgatggtggcgcaggtgccgttcgtggacgtggtcaccaccatgctcgatgccagcatcccgctgaccaccaacgaatacgatgaatggggcaacccggaaaccaaggattactacgactacatgctgtcgtattccccgtacgacaacgtgcgcaagcaggcctacccggcgatgttcgtcggaaccggcctgtgggattcgcaggtgcagtactgggaaccggccaagtgggtcgccaagctccgcgacgacaacaccggcacctacccgatcgtcttccgcaccaacatggaagccggccacggcggcaaatccggccgcttccgccgctaccgcgaactggccgaatcgtatgccttcgtgctggaccagctgggcgtcaaatag

SEQ ID NO: 38618 - protein, 692 aa, Xanthomonas campestris pv. campestris str. ATCC 33913
MTSSVPSALAALPTPPDVAKHPHVVKAPFGATRNDDYYWLRDDKRENKAMLAYLNAENTYADALMAPLKPLEDTLYTEIVGRIKQDDASVPYRERGYWYYTRYEAGKDYPIQARRKGSMDAPEEILLNVNTLAEGKGYFSVGDAEVSQDNRILAWADDAVGRQQYTIRFKNLETGEVYPDTVEGVSANVVWADDNKTLFYVENDPETLLTVRVKKHVLGTPAKDDVLVYEEKDDSFYMGISRTRDDKYIVIGVESTVSSETRYAPADKPETFTVLAKRERDVEYHPEHFGGRWVIRTNADGAKNFKLVTAPTNATTRKQWTDWVAHDPNVYIESYALFDGFTAIEERSGGLERVRLLKRDGSHEYVKTDESAYSMGLSVNSEPDTAWLRYTYTSLTTPATTYELNTQTGERKLLMQQPVIGYDAGNYVTERVWVTARDGVKLPVSLVYKKGFKKDGTAALFQYAYGSYGMSMDPAFNLPAVSLLDRGVVYAIAHIRGGQEMGRQWYDDGKLLHKQNTFNDFVDITRGLVAQGYAAKDRVAASGGSAGGLLMGAVANMAPQDYRVMVAQVPFVDVVTTMLDASIPLTTNEYDEWGNPETKDYYDYMLSYSPYDNVRKQAYPAMFVGTGLWDSQVQYWEPAKWVAKLRDDNTGTYPIVFRTNMEAGHGGKSGRFRRYRELAESYAFVLDQLGVK

SEQ ID NO: 38619 - DNA, 2073 bp, Xanthomonas axonopodis pv. citri str. 306
  CDS (1)..(2073): transl_table=11
atgaccactgtccctgccttcgccgcccttccgtcgccgccagacgttgccaagcacccgcatgtggtcaaggcgccgttcggcgcgacccgtaacgacgactattactggttgcgcgacgacaagcgccaagacaaggcgatgctggcgtatctcaacgccgagaatgcctacaccgacaaggtgatggcgccgctgaaacccctggaagaagcgctgtataccgagatcgtcgggcgcatcaagcaggacgatgccagcgtgccgtatcgcgagcgcggctattggtattacacgcggttcgaaaccggcaaggattatccgatccaggcgcgccgcaagggcagcatggaggcgccggaggagatcctgctcgacgtcaaccagatggcgcagggcaagggctacttcagcgtgggcgatgccgcggtgagccaggacaatcgcatcctcgcctgggccgacgatgccgttggccgccgtcaatacaccatccgcttcaagaacctggagaccggcgaactctatccggacacggtggagggcgtctcggccaatgtggtgtgggccgacgacaacaagacgctgttctatatcgaaaacgatccggaaacgctgctcaccgtgcgcgtgaaaaagcacgtgctgggcacgccgtccagggacgatgcgctggtgtacgaagagaaggacgacagcttctacatgggcatcggccgcacgcgcgacgacaagtacatcaccatcgagatggaaagcacggtctcttcggaaacccgctatgcgctggccgccaagccggacgccttcaaggtgctggccaggcgcgagcgcgatgtggaataccacgccgagcatttcgatggccgctgggtgattcgcaccaatgccgacaacgccaggaacttcaagctggtcactgcgcccaccgatgcgaccacacgcacgcattggaccgactgggtagcgcacgacgacaacgtctacatcgaagacttcgaattgttcgatggattcaccgccatcgaagagcgttccggcggactggagcgtgtgcgcttgctcaagcgcgatggcagccatgagtacgtcaaggccgacgaaccggcgtattcgatgggtctatccgtcaactccgagccggataccgcctggctgcgctacagctacacctcgttgaccacgccggggaccacctacgagctcaatacgcagaccggcgagcgcaggttgctcaagcaacaaccggtgatcggctacgacgccagcaaatacgtgaccgaacgcgtgtgggtgaccgcgcgcgacggggtcaaggtgccggtgtcgctggtgtacaaaaagggcttcaagaaggacggcagcgcagcgctgtttcaatatgcgtacggcagttacggcatgtcgatggacccggcattcaatctgccggcgatcagcctgctggaccgcggtgtggtgtatgccatcgcgcacatccgcggcggccaggaaatggggcgccagtggtacgacgatggcaagctgctgcacaagaaaaacaccttcaatgactttatcgatgtcacccgcggtctggtcacccaggggtacgccgccaaggaccgcgttgccgcatccggtggtagcgccggcggcctgctgatgggcgcggtggccaacatggcgccgcaggactatcgcgtgatggtcgcgcaggtgccgttcgtcgatgtggtcaccaccatgctcgacgccagcattccgctcaccaccaacgaatacgacgagtggggcaacccggaaacccaggactattacgcgtacatgctgtcgtactcgccgtacgacaacgtgcgcaagcaggcgtacccggcgctgttcgtgggcaccggcctgtgggattcgcaggtgcagtactgggagccggccaagtgggtggccaagctgcgcgacgacaacaccggcacccagccgatcgtgttccgtaccaatatggaagccgggcatggcggcaaatccggacgcttccgccgctaccgcgagctggccgagtcgtatgcgttcgtgctggatcagctgggcgtgaagtag

SEQ ID NO: 38620 - protein, 690 aa, Xanthomonas axonopodis pv. citri str. 306
MTTVPAFAALPSPPDVAKHPHVVKAPFGATRNDDYYWLRDDKRQDKAMLAYLNAENAYTDKVMAPLKPLEEALYTEIVGRIKQDDASVPYRERGYWYYTRFETGKDYPIQARRKGSMEAPEEILLDVNQMAQGKGYFSVGDAAVSQDNRILAWADDAVGRRQYTIRFKNLETGELYPDTVEGVSANVVWADDNKTLFYIENDPETLLTVRVKKHVLGTPSRDDALVYEEKDDSFYMGIGRTRDDKYITIEMESTVSSETRYALAAKPDAFKVLARRERDVEYHAEHFDGRWVIRTNADNARNFKLVTAPTDATTRTHWTDWVAHDDNVYIEDFELFDGFTAIEERSGGLERVRLLKRDGSHEYVKADEPAYSMGLSVNSEPDTAWLRYSYTSLTTPGTTYELNTQTGERRLLKQQPVIGYDASKYVTERVWVTARDGVKVPVSLVYKKGFKKDGSAALFQYAYGSYGMSMDPAFNLPAISLLDRGVVYAIAHIRGGQEMGRQWYDDGKLLHKKNTFNDFIDVTRGLVTQGYAAKDRVAASGGSAGGLLMGAVANMAPQDYRVMVAQVPFVDVVTTMLDASIPLTTNEYDEWGNPETQDYYAYMLSYSPYDNVRKQAYPALFVGTGLWDSQVQYWEPAKWVAKLRDDNTGTQPIVFRTNMEAGHGGKSGRFRRYRELAESYAFVLDQLGVK

SEQ ID NO: 38621 - DNA, 2052 bp, Yersinia pestis KIM
  CDS (1)..(2052): transl_table=11
atgatgactcccccaaaagcagataaacgcccttatccgatgacgcgacacggtgatacgcgtgtggatgactattactggctacgtgatgatgaacgtacagatgctgatgtactgaattatttgcaatctgaaaatgctttcacggcggcggtgcttaagccacaacaacagttgcgtgaaaccttgtatcaggaaatggttggccgtattcctccacaagaggagtcagtgccgtatgttcgcaacggctaccgttatcaaacccgttttgagccgggtaacgagtacgctatctatgttcggcaacccgtcagtacagacagcgactgggaaacgctattggatggtaatcagcgtgccgagggccatgagttttataccttaggcggtttagatgtcagtcctgataaccagttactggcggtggcagaagattatctatcacgtcgccaatatgacatcaggataaaaaacctatccagtgggggctggcacgatgaagttatcagtaatacgtcaggcggatttgagtgggcaaatgattcaaaaacgctgtattacgtacgaaaacatgaaaaaacgttattgccttatcaagtgtatcggcatgtggtgggtactgatcctgagcaagataaattaatttatcaggaatcagacgacactttttatgtcagcttggaaaaaaccacgtctgaacgttttattctgattcaccttagcagcacgacgacgtctgagattttgttgctggatgctgatctgcctgagccggtaccgcaggtttttgcgccacgccgtaaagaccatgaatatggtgtagaccactataaacagcacttctatattcgctccaataaagaggggaagaatttcgggctctataaaattgaagacagccaagggtgcagtgactttgccgatgagtctcaatgggcgttactgattgcaccaagaacggacgttatgctggaaggattcagtttattccgcgattggctggtggtcgaagaacgcagtgaagggttgacgcacctacggcaaatccattggtctactggagaagaaaaatccatcacttttgatgatccaacctacgtaacgtggcttgcttacaatccagaaccagaaacggcactgttgcgctatggttactcctcaatgaccacgccaagctccatgtttgagattaatatggacagtggtgagcgccagttactaaagcaacaggaagtaaaggatttcacccctgaaaagtatcgcagtgaacgtatttgggttaccgcatctgatggtgtgaaaataccggtttcgttggtttatcatcgcgactactttgtttctggtagcaatccattattggtgtatgcctatggttcgtacggtagcagtatggatcccgtcttcagcagtagccgtttgagcttattggatcgcggttttgtgtttgctctggcacacattcgtgggggcggagaactggggcagcaatggtatgaagatggcaaattactcaacaaattaaataccttcagcgactttactgatgtaacgaaagccttagtgaacgaaggatatggggatgctcagcgcgtttttgcgatgggaggcagtgccggaggcttgctgatgggcgtcatcgtcaatcaggcccctgaattatataaggcggttgtggcacaggttccctttgttgatgtggtcacgaccatgctggatgagtcgattccactcacgacaggtgaatacgatgagtggggcaaccctaacgataaggtctattacgattatattaagcaatatagcccttacgatcaggttaaagcgcaggattacccgcacatgctggtaacgactgggctgcatgattctcaagtccagtattgggaacccgctaaatgggtcgctaaactgcgtgaaatgaagactgatgaccaccaattactgctttacaccgatatggactcgggccatggcggtaaatcaggtcgcttcaaagcttatgaagatattgctttggagtatgcatttattctgtcgttgatttaa

SEQ ID NO: 38622 - protein, 683 aa, Yersinia pestis KIM
MMTPPKADKRPYPMTRHGDTRVDDYYWLRDDERTDADVLNYLQSENAFTAAVLKPQQQLRETLYQEMVGRIPPQEESVPYVRNGYRYQTRFEPGNEYAIYVRQPVSTDSDWETLLDGNQRAEGHEFYTLGGLDVSPDNQLLAVAEDYLSRRQYDIRIKNLSSGGWHDEVISNTSGGFEWANDSKTLYYVRKHEKTLLPYQVYRHVVGTDPEQDKLIYQESDDTFYVSLEKTTSERFILIHLSSTTTSEILLLDADLPEPVPQVFAPRRKDHEYGVDHYKQHFYIRSNKEGKNFGLYKIEDSQGCSDFADESQWALLIAPRTDVMLEGFSLFRDWLVVEERSEGLTHLRQIHWSTGEEKSITFDDPTYVTWLAYNPEPETALLRYGYSSMTTPSSMFEINMDSGERQLLKQQEVKDFTPEKYRSERIWVTASDGVKIPVSLVYHRDYFVSGSNPLLVYAYGSYGSSMDPVFSSSRLSLLDRGFVFALAHIRGGGELGQQWYEDGKLLNKLNTFSDFTDVTKALVNEGYGDAQRVFAMGGSAGGLLMGVIVNQAPELYKAVVAQVPFVDVVTTMLDESIPLTTGEYDEWGNPNDKVYYDYIKQYSPYDQVKAQDYPHMLVTTGLHDSQVQYWEPAKWVAKLREMKTDDHQLLLYTDMDSGHGGKSGRFKAYEDIALEYAFILSLI

SEQ ID NO: 38623 - DNA, 2109 bp, Brucella suis 1330
  CDS (1)..(2109): transl_table=11
atgccccaggatttcctacgccctcttcctccgcacgctcccaagcaccccgcaagcgacgcacggcacggcatcacccgcacggatgactatgcgtggctgcgcgctgaaaactggcaggaagtgttccgcgatccttctgttctgacgccggaaatccgcgcgcacctggacgcggaaaacgcctatcaagccgccttgatgaaagatacggaaaacctgcaaaaggtgctttttgccgagatgcgcgggcgcatcaaggaagacgattcttccgttccggccaaggacggcccctatgcctatggcgtctcctatcgcactggcggcgaacagccctatttcatccgcacgccgcgcgatggcgggccggaaaccatcctgctcgacggcgacagggaaggcgaaggcaaggcctatttccgcctcgcctccgccgatcatgccccaaaccacaatctcctcatctgggggtatgacgacaagggatcggaattttacaagctgaaggtgcgcgatctcaccaccatggccgaccttgaagatatcgttaccgataccaatggcggcggcgcgtgggatgcgaaaagcgaaggcttcttctacacacggcttgatgaaaaccaccgcccgtcaaaggttttctaccacaagatcggcacacagcaggcagacgacaagctgatttatgaggaaaccgatccgggctttttcctcggtgtgggcggctccgcgctcgacgattatatcttcatcgacattcacgaccatgaaacatccgaatgctggcttttgcccgcagacgatccgtcagccgaaccgaagctcgtcatggcgcgcaaggccggcactgaatatgatatcgcgccgggcggcgatgttttctatattctcaccaatgcggacggagccaaggacttcaagatctgccaggcgccagcttccgcgccacagcctgaaaactggcaggaaatcgtcgccgaaaagccgggccgactgattctctcccattcagcctataagcaccatcttgtctggatcgaacgcgacaacggtctgccgcgcatcgtcatccatgatcgcaagaccggcgaggaacacgccatcgctttcgatgaggaggcctattcgctgggattgcatggcagcgccgaatatgatacggatgtcatccgtttttcctattcgtcgatgacgacgccggaacagctcttcgattataatatgcgcacgcgcgaacgcacgctcctgaagacgcaggaagtgccctcgggccacaatccgcaggactatgtgacgcgccgcattctggcccccgccttcgatggtgaactcgtgccggtttcgctgctctatcacaaggacacgaagctggacggctccgcgccttgccttctctacggctatggctcctatggcatcaccattccggcaagcttcagcacatcgcgcctttcgcttgtcgatcgtggcttcgtttatgcaatcgcgcatattcgcggcggcaaggacaaggggttcgcctggtacgaaaacggaaagcgcgacaagaagaccaatacgttcaaggacttcattgctgcagcgcagcatctcgtcaaggaaggcttcaccagccatgaccgcatcgtcgcccatggcggctcggcgggcgggatgctgatgggcgccatcgccaatatggcgccgcaagcctttggcggcatcattgccgaagtacccttcgtcgatgtgctgaatacaatgctggacgacaccctgccgctcaccccaccggaatggcccgaatggggtaatccgattgcttccgaagcagattatcgcaccattgccagctattcaccctatgacaatgtaacggcgcaggcctatccggccattctggcggttgcggggctcaccgatccacgcgttacctattgggaacccgccaagtgggtggcgaaactgcgtgaattgaagaccgacagccatccggtcctgttccgcatcaatatggatgctggacatgcaggcgcttccggccgcttttcgcgccttgaggaagtcgcctatagtttcgctttcgcattgaaggtggtgggtaaggttccaagcttcaaaaactga

SEQ ID NO: 38624 - protein, 702 aa, Brucella suis 1330
MPQDFLRPLPPHAPKHPASDARHGITRTDDYAWLRAENWQEVFRDPSVLTPEIRAHLDAENAYQAALMKDTENLQKVLFAEMRGRIKEDDSSVPAKDGPYAYGVSYRTGGEQPYFIRTPRDGGPETILLDGDREGEGKAYFRLASADHAPNHNLLIWGYDDKGSEFYKLKVRDLTTMADLEDIVTDTNGGGAWDAKSEGFFYTRLDENHRPSKVFYHKIGTQQADDKLIYEETDPGFFLGVGGSALDDYIFIDIHDHETSECWLLPADDPSAEPKLVMARKAGTEYDIAPGGDVFYILTNADGAKDFKICQAPASAPQPENWQEIVAEKPGRLILSHSAYKHHLVWIERDNGLPRIVIHDRKTGEEHAIAFDEEAYSLGLHGSAEYDTDVIRFSYSSMTTPEQLFDYNMRTRERTLLKTQEVPSGHNPQDYVTRRILAPAFDGELVPVSLLYHKDTKLDGSAPCLLYGYGSYGITIPASFSTSRLSLVDRGFVYAIAHIRGGKDKGFAWYENGKRDKKTNTFKDFIAAAQHLVKEGFTSHDRIVAHGGSAGGMLMGAIANMAPQAFGGIIAEVPFVDVLNTMLDDTLPLTPPEWPEWGNPIASEADYRTIASYSPYDNVTAQAYPAILAVAGLTDPRVTYWEPAKWVAKLRELKTDSHPVLFRINMDAGHAGASGRFSRLEEVAYSFAFALKVVGKVPSFKN

SEQ ID NO: 38625 - DNA, 2061 bp, Shigella flexneri 2a str. 301
  CDS (1)..(2061): transl_table=11
atgctaccaaaagccgcccgcattccccacgccatgacgcttcatggcgatacgcgcatcgataattactactggctgcgggacgatacgcgttctcagccaaaagtcctggactacctgcaacaagaaaatagttacggtcatcgggtgatggcctcacaacaagccttgcaggatcgcatcttaaaggaaatcatcgaccgcattccgcaaagagaagtttctgcgccctacataaaaaatggctaccgctatcggcatatttatgaaccaggctgtgaatatgctatctaccagcgtcaatcggcattcagcgaagagtgggatgagtgggaaacattgctcgatgccaacaagcgcgcagctcatagtgagttttattcgatgggcggaatggcgattacgcccgataacaccattatggcgctggcagaagattttctttcccgacgccagtacggcattcgttttcgtaatctggaaacaggtaactggtacccggaactgctggataacgttgaacccagctttgtctgggcaaatgactcctggactttctactatgttcgcaagcatccggtgacgctgctgccttatcaggtctggcgtcacgccatcggtacgccagcatcgcaagatacactgatctacgaagaaaaagacgatacctattatgtcagcctgcataaaacgacgtcgaagcactatgtcgtcattcatctggccagcgccaccaccagtgaagttcgcctgctggacgcggaaatggccgatgccgagccgtttgtttttctgccgcgccgcaaagatcacgaatacagccttgatcactaccagcatcgtttttatctgcgttccaatcgccacggcaaaaactttggcttataccgtacccgtatgcgtgatgagcaacagtgggaagagttaattccgccacgcgaaaacatcatgctggaagggtttacgctgtttaccgactggctggtggttgaagagcgtcagcgcgggttaaccagtttgcgccaaattaaccgcaagacccgggaagtcattggcattgcctttgatgatccggcctatgtgacctggattgcctacaatccagaacctgaaaccgcgcgattgcgttatggttattcttccatgaccacaccagacactttgtttgaactggatatggataccggtgagcgtcgtgtattaaaacaaacagaagtgcctggttttgatgcggcgaattaccgcagtgaacacctgtggatagtcgcccgtgatggcgtcgaagttccggtttcgctggtctatcatcgcaaacattttcgcaaaggacacaacccgttgctggtgtatggctatggttcttacggcgcaagtattgatgccgatttcagttttagccgcttgagtttgttagatcgtggctttgtctacgccattgtccatgttcgcggcggtggtgagctggggcaacaatggtacgaagacggtaaatttctgaagaagaaaaatacgtttaatgattatcttgatgcctgcgatgcattgttaaaactgggctatggctctccttcgctctgttatgcgatgggcggaagtgcggggggcatgttgatgggcgttgcaattaatcaacgcccggaattattccacggcgttatcgcccaggtaccgtttgttgatgttgtaacaacgatgcttgatgaatcaattcctcttaccactggtgagtttgaagagtggggaaatccgcaggatccgcaatattacgagtacatgaaaagctacagcccgtatgacaacgtcaccgcacaggcttatccgcatttactggtaacgaccggtttacacgattctcaggtgcaatattgggaaccggcaaaatgggtcgctaaattgcgcgagctgaaaaccgatgaccatcttttattgctctgtaccgacatggactcaggccatggcggtaaatctggccgctttaaatcgtacgaaggcgtagcgatggaatatgcttttctggtcgcgctggcgcagggaacattacccgctacgcctgcggattaa

SEQ ID NO: 38626 - protein, 686 aa, Shigella flexneri 2a str. 301
MLPKAARIPHAMTLHGDTRIDNYYWLRDDTRSQPKVLDYLQQENSYGHRVMASQQALQDRILKEIIDRIPQREVSAPYIKNGYRYRHIYEPGCEYAIYQRQSAFSEEWDEWETLLDANKRAAHSEFYSMGGMAITPDNTIMALAEDFLSRRQYGIRFRNLETGNWYPELLDNVEPSFVWANDSWTFYYVRKHPVTLLPYQVWRHAIGTPASQDTLIYEEKDDTYYVSLHKTTSKHYVVIHLASATTSEVRLLDAEMADAEPFVFLPRRKDHEYSLDHYQHRFYLRSNRHGKNFGLYRTRMRDEQQWEELIPPRENIMLEGFTLFTDWLVVEERQRGLTSLRQINRKTREVIGIAFDDPAYVTWIAYNPEPETARLRYGYSSMTTPDTLFELDMDTGERRVLKQTEVPGFDAANYRSEHLWIVARDGVEVPVSLVYHRKHFRKGHNPLLVYGYGSYGASIDADFSFSRLSLLDRGFVYAIVHVRGGGELGQQWYEDGKFLKKKNTFNDYLDACDALLKLGYGSPSLCYAMGGSAGGMLMGVAINQRPELFHGVIAQVPFVDVVTTMLDESIPLTTGEFEEWGNPQDPQYYEYMKSYSPYDNVTAQAYPHLLVTTGLHDSQVQYWEPAKWVAKLRELKTDDHLLLLCTDMDSGHGGKSGRFKSYEGVAMEYAFLVALAQGTLPATPAD

SEQ ID NO: 38627 - DNA, 2103 bp, Shewanella oneidensis MR-1
  CDS (1)..(2103): transl_table=11
atgttattacccggctgctccactcaaaaagggcaagtttctgcgcccgttgcggaaaaaatcccccatgtgatgaccttgcatggcgtcacgcgcactgatgattactattggatgcgcgacgataaacgccaagatcccaaagtgttagcgcaccttaaggccgagaatcgttatacccaagcttactttaagccgcttaagtcattgcaggatggattgtttaacgagctgactgggcggttagtggctgatgagtcgagcgtgccgtaccaatggcatcagcatagctattaccgccgatatcaagagggcagcgaatatccgttgatcgcccgcaaggggagcaagggtgttgagcaactgatgctcgatgtgaatgagcgtgccaagggccatgagttttatggtttaggtggcgtcagcgtcagcccagatgaaaccatgctggcctttggtgaagatgtgttaagccgccgcgtgtataacatctattttaaagatatcgaatccggcgccatgatcaccgatgtgcttgaaaacacagagggtcgaatcgtttggggcaatgataatcgccatgtgttttacatcgctaaagatttgcaaaccctgctcggcaaccgggtatatcgccatgaactcggtacgccacagtcccgtgatgtgctggtgtatgaggagcaagatgatgcttattacatctccctcggcaagagtttagacgagtcgcaaattgtgttgttccacgagagcaccaccactagcgaagtgtcagtgctggatgctaacgatcctttaagcctgttcaaacctgtgcttgcgcgggaagaaggccatgaatatagcgtttctaaactgggcgacagctattacgtcctcaccaactggcaggcgacaaactttcgcttaatgaaagtggcgattaaggatgctgccgataaatccaaatggcaggaagtggttgctcacaatcccaatgcgcggcttgaagatgaactggtgctaaaggattacctgattattcaaacccgtgaaaatggcctgacacggattaaagtgatgccattcaatggtcaaaagccctttgaactgagttttgatgaacccgcttatgtgctcggcttggatgttaatgcccagcaagatagcgataagttacgggttttctactcgagcctgaccacgcccgagacgatttatgagtaccacttaagtaatcctgatagacgcgatctgctcaagcaggaacaagtgcttggcggttttgatgccggagcgtaccgcgccgaacgcgtatttgtcaccgcccgcgatggcgctaaggtgccagtgtccttggtgtatcgtaaggataaattcaagaaagacggcaccaatccactgtatcaatatggttatggttcatatggttatacggtagagcctgacttttcgtcgtcggttatcagtctgctcgaccgcggctttgtgtatgccattgcccatgtgcgcggcggtgaaatgctcggccgcccttggtacgatgcgggcaagttgctgaataaaaagaatagcttttatgactttatcgatgtaactacggccttaaccgagcaaggttatggcgataaaaataaagtggtagccgcgggcggcagtgctggtgggctgttaatgggcgcgattgccaatatggcacctgaaaagtactttgccattgcagcgcacgtgccctttgtggatgtggtcacgaccatgctcgatgagtcgattccgctgactaccaacgagtacgatgaatggggtaatccaaacgacaagacctatttcgactatatgctcagctactcaccctacgacaatgttgccgaccatgagtatccccacctattggtgaccacaggtttgcatgattcacaggtgcagtatttcgagcccgctaaatgggtagcaaaactgcgtgaagtgcaaaacaaatggtacaaactggacgataaggtgttgttattccacgttgatatggatgccggccacggtggaaagagtggtcgttaccgccagtaccaagatacagcgcaggaatatgccttcttcttaagcctgctcggcatgactaagtag

SEQ ID NO: 38628 - protein, 700 aa, Shewanella oneidensis MR-1
MLLPGCSTQKGQVSAPVAEKIPHVMTLHGVTRTDDYYWMRDDKRQDPKVLAHLKAENRYTQAYFKPLKSLQDGLFNELTGRLVADESSVPYQWHQHSYYRRYQEGSEYPLIARKGSKGVEQLMLDVNERAKGHEFYGLGGVSVSPDETMLAFGEDVLSRRVYNIYFKDIESGAMITDVLENTEGRIVWGNDNRHVFYIAKDLQTLLGNRVYRHELGTPQSRDVLVYEEQDDAYYISLGKSLDESQIVLFHESTTTSEVSVLDANDPLSLFKPVLAREEGHEYSVSKLGDSYYVLTNWQATNFRLMKVAIKDAADKSKWQEVVAHNPNARLEDELVLKDYLIIQTRENGLTRIKVMPFNGQKPFELSFDEPAYVLGLDVNAQQDSDKLRVFYSSLTTPETIYEYHLSNPDRRDLLKQEQVLGGFDAGAYRAERVFVTARDGAKVPVSLVYRKDKFKKDGTNPLYQYGYGSYGYTVEPDFSSSVISLLDRGFVYAIAHVRGGEMLGRPWYDAGKLLNKKNSFYDFIDVTTALTEQGYGDKNKVVAAGGSAGGLLMGAIANMAPEKYFAIAAHVPFVDVVTTMLDESIPLTTNEYDEWGNPNDKTYFDYMLSYSPYDNVADHEYPHLLVTTGLHDSQVQYFEPAKWVAKLREVQNKWYKLDDKVLLFHVDMDAGHGGKSGRYRQYQDTAQEYAFFLSLLGMTK

SEQ ID NO: 38629 - DNA, 2112 bp, Corynebacterium efficiens YS-314
  CDS (1)..(2112): transl_table=11
atgtcttctgaacgtctcaccccaccggtggccgctgtccgacccaccacccgtaccgtccacgacatcaacttcgtggacgactatgagtggctccgcgacaaggaatcccgcgacaccctcgactacctcgaggcggagaacgcctacaccgaccagcagaccgcccacctgagcgggctccgcgagaatatctacaacgagatcaagtcacgcatcaaggaaaccgacatgtcggtgcccgtgcgtaacggccgctactggtatttcggacgcacggaggagggaaagagctacggcatctactgccgcatccccgtcggcgatgagccctgggtggcaccggagatccccgtggaaccggctccggaggaggaggtcttcctcaacgccaatgagctcgccgagggtcatgagttcttctccctgggcacggccaccgtgaccacctcggggcggtacctggcctattccacggatacctccggtgatgaacgtttcaccctgcgcatcagggacctccacaccggggaacacctcggcgacaccatcacgggcatcttctacggagccacctgggtgggggaggaatacctcttctatcagcgcgtcgatgatgcctggcgtccggacaccatctggcggcacaagatcggtacctccgtcgaggatgacgttctggtctaccgcgaggccgatgaacgttactccacctggatcggcaccacccgttccgaccggttcatcctcctcgggtctgcctccaaggtgacctccgaggtgcagtacatccccttcgaggatcccgaggccgagcccgtggtgctcatcccccgtgaggagggcgtggagtacgacgtcgatcacgcggtcatcgccggcaccgatacctggctggtggtgcacaaccagaacggtcccaacttcgaggtggggcacgcgcccgtcggcaagctctcctcgctggccgcgctcgaaccgctggttccccaccgcgatgatgtgcgcatcgagggcgtggacgcctaccgcgaccacctcaccctcgggtaccgctcgggtgccatcgggcaggttgcggtaatgaagcttgacgacgccggattcacccgcttcgaggaactcaggttcgatgaggagctctacaccgtcgcctcctccggcaaccccgaatgggatgcccccgtgatccgcgtgagctatggatccttcaccacccccggccagctgttcgactactgggtggagtccggggagaaggtgctgctcaaacagcaggaggtccttggcgggtacaaccgggaggactacaccgcgtcccggatgtgggtgaccgcccgtgacggcgaacaggttcccgtctccctggtccaccgcgcggacctggagctcaataacgttccggtgctgctctacggctacggttcctatgaatcctccatcgaccccggtttctccgtcgccaggttgtccctgctcgaccgcggcatggtctttgcggtggcacatgtccgcggtggtggtgagatggggcgtcgctggtatgataacggcaagacgctgaccaagaagaacaccttcacagacttcatcgatgtcgccgatgccctgatcgagcaggggatcacctccccggaccgcctggtggccgagggcggatccgccggcggcatgctcatgggcgccatcgccaacatggcccccgaccgcttcaaggcaatcgaggcggtggttcccttcgttgatccgctgacctccatgctcatgccggagctgccactgaccgtcatcgaatgggatgagtggggcaatcccctcgaggacagggaggtctatgactacatggcctcctacgcaccctatgagaatgtggaggcgaagaactaccccaatatcctcgctgtgacctcgctcaatgacacccgggtgctctatgtcgaacccgcgaagtggatcgcccgcctgcgcgcgaccgccaccggtgggcagttcctgctgaagaccgagatgtccgccggccacggtggtgtatccggacgttatgagaagtggcgccagaccgccttcgaatacgcctggattgtgaatcaggcgacaggcctgacgcagtaa

SEQ ID NO: 38630 - protein, 703 aa, Corynebacterium efficiens YS-314
MSSERLTPPVAAVRPTTRTVHDINFVDDYEWLRDKESRDTLDYLEAENAYTDQQTAHLSGLRENIYNEIKSRIKETDMSVPVRNGRYWYFGRTEEGKSYGIYCRIPVGDEPWVAPEIPVEPAPEEEVFLNANELAEGHEFFSLGTATVTTSGRYLAYSTDTSGDERFTLRIRDLHTGEHLGDTITGIFYGATWVGEEYLFYQRVDDAWRPDTIWRHKIGTSVEDDVLVYREADERYSTWIGTTRSDRFILLGSASKVTSEVQYIPFEDPEAEPVVLIPREEGVEYDVDHAVIAGTDTWLVVHNQNGPNFEVGHAPVGKLSSLAALEPLVPHRDDVRIEGVDAYRDHLTLGYRSGAIGQVAVMKLDDAGFTRFEELRFDEELYTVASSGNPEWDAPVIRVSYGSFTTPGQLFDYWVESGEKVLLKQQEVLGGYNREDYTASRMWVTARDGEQVPVSLVHRADLELNNVPVLLYGYGSYESSIDPGFSVARLSLLDRGMVFAVAHVRGGGEMGRRWYDNGKTLTKKNTFTDFIDVADALIEQGITSPDRLVAEGGSAGGMLMGAIANMAPDRFKAIEAVVPFVDPLTSMLMPELPLTVIEWDEWGNPLEDREVYDYMASYAPYENVEAKNYPNILAVTSLNDTRVLYVEPAKWIARLRATATGGQFLLKTEMSAGHGGVSGRYEKWRQTAFEYAWIVNQATGLTQ

SEQ ID NO: 38631 - DNA, 2043 bp, Pseudomonas putida KT2440
  CDS (1)..(2043): transl_table=11
atgccaaccaagccccaacccccgattgcccaagccgaccaggccaccgacccgtatgcctggctgcaacagcgcgacacccccgaggtactcgcttacctgcaagctgaaaacgcctaccaggaagcctgcctggccgaccaggcaccgttgcgtgagcgcctgttcgaagaaatcaagggccgcatcctggagaccgacctgtcattgccggcgccctggggcccctacctgtactacacccgtaccaccgccggcgacgaatatccgcgtcactaccgctgcccacgtccggccgacgactcgaacaccgtcgatgaaagccaggagcaactgctgctcgaccccaacgccctggccaacggcggtttcctctccctgggcgcgttcaacatcagccccgaccaccgcctgctggcctatagcctcgacaccagcggcgacgaaatctataccctgtacgtcaaagacctggctagtggcagtgtcactaccctgcccttcgacgactgcgacggtagcctgacctgggccaacgacagccagacgctcttcttcgcagagctggacgacacccaccgcccatggcgcctgcgtcgccacaccttgggcaccgacgccgcgcacaccgtgttcgaagagccagatgggcgtttcttcctgcactgctaccgcaccagctccgagcgccagctggtgctgctgctgaacagcaagaccaccagcgaggcctgggtgctggacgccgaaaccccgcaggcgccgttcacctgcctggcgccgcgcgtcgaaggccacgaatacttccccgaccatggccaactcgacggccagtggcgctggttcatccgcaccaaccaggatggcatcaacttcgccctgtaccacgcgccagccgcgccagtgccaagccgcgaacagtggcaggtgctggtggcgcaccgcgacgcggtcatgctcgaaggcctcagcctgaacgccggtgccctcaccctgagcctgcgcgaaggcggcctgccgatcatcgaagtccgcccgcagggcttgccggcctaccgcgtcgaactgccagacgcagcctacagcctgtacgtgcaggacagccttgaatttgccagcactcgcatacgcttgcgctacgaagcgctcaaccgcccggcccaggtgcgccaactgacgttgcccacgggcgcccaggtggtgctcaagcaaaccccggtgctcggtgcattcgatgccgatgactatgtcagtgagcgcctgtgggcaaccgcagcggacggcaccctggtgccgatcagcctggtacgccgccgccaggacctgggcaagaccgtgccactgtacctgtacggctatggtgcctatggcgaaagcctcgacccctggttctcacatgcgcgcctgagcctgctggagcgcggcgtggcctttgccatcgcccacgtgcgaggtggtggtgaactgggggaagcctggtaccgtgccggcaagcaggagtacaagcacaacacgttcagcgacttcatcgcctgcgccgagcacatgatcagccagggcgtgactgccgccgaccgcctggccatcagtggtggcagcgctggcggcctgctgatcggcgcggtgctcaacctgcgcccggcgctgttccgctgcgccattgccgaagtgccgttcgtcgacgtgctcaacaccatgctcgacccggagctgccgcttaccgtgaccgagtacgacgaatggggcaaccctgaggagccggaggtgtatgaacggatcaaggcttatgcgccgtacgagaacctgaaagcgcaggcctacccggcgatgctggtggtggcgggctacaacgacagccgcgtgcagtattgggaggcagccaaatgggtggcgaagttgcgcacactcaagaccgacagcaacctgctgctgctcaagaccgagatgggggctgggcatggcgggatgagcgggcggtaccaggggttgaaggatgtggctctggagtatgcgttcgtgtttggcgagctgggtattctttga

SEQ ID NO: 38632 - protein, 680 aa, Pseudomonas putida KT2440
MPTKPQPPIAQADQATDPYAWLQQRDTPEVLAYLQAENAYQEACLADQAPLRERLFEEIKGRILETDLSLPAPWGPYLYYTRTTAGDEYPRHYRCPRPADDSNTVDESQEQLLLDPNALANGGFLSLGAFNISPDHRLLAYSLDTSGDEIYTLYVKDLASGSVTTLPFDDCDGSLTWANDSQTLFFAELDDTHRPWRLRRHTLGTDAAHTVFEEPDGRFFLHCYRTSSERQLVLLLNSKTTSEAWVLDAETPQAPFTCLAPRVEGHEYFPDHGQLDGQWRWFIRTNQDGINFALYHAPAAPVPSREQWQVLVAHRDAVMLEGLSLNAGALTLSLREGGLPIIEVRPQGLPAYRVELPDAAYSLYVQDSLEFASTRIRLRYEALNRPAQVRQLTLPTGAQVVLKQTPVLGAFDADDYVSERLWATAADGTLVPISLVRRRQDLGKTVPLYLYGYGAYGESLDPWFSHARLSLLERGVAFAIAHVRGGGELGEAWYRAGKQEYKHNTFSDFIACAEHMISQGVTAADRLAISGGSAGGLLIGAVLNLRPALFRCAIAEVPFVDVLNTMLDPELPLTVTEYDEWGNPEEPEVYERIKAYAPYENLKAQAYPAMLVVAGYNDSRVQYWEAAKWVAKLRTLKTDSNLLLLKTEMGAGHGGMSGRYQGLKDVALEYAFVFGELGIL

SEQ ID NO: 38633 - DNA, 2106 bp, Bradyrhizobium japonicum USDA 110
  CDS (1)..(2106): transl_table=11
gtgacccagaccaagacaccttcccagccccccgtcgcccggcgccggccgcacagctttacccggcacggcatcaccgtgaccgacgactatgcctggctgaaggacgagaaatggcaggaggtgctgcgcgaccccggggtgatcgaccccgacatccgcaaatatctggatgaagagaacgtctacaccgagagcctgctcggccataccgcggcgctgcagaagacgctggtgcgcgagatgcgcgggcggatcaaggaggacgattccagcgtgccgtcgccggacggccagttcgcctatttccgcaggtttcgcgagggcgggcagcacgaactgttcggccgcatgccgcgcgagggcggcgacggccatatcgtgctcgacggcgatgcgctcgccaaggaccacaaatatttcaagttcggcggcagccggcattcgcccgatcacaagctgcaggcctggagcgcggacaccaaaggctccgaatatttttcgatccgcgtgcgcgactgggcgacggggaaggactttgacgacctcgtcgaggagaccgacggcggcatcgtctggagcaaggacgcgaaaagcttcttctatgtgaagctcgacgacaatcaccggccgatgcaggtgtggcggcaccggctggggacgaaacaggccaacgacacgctcgtctatgaggagcaggattccggctggttcacccatctgcacgagagcaccagcggccgcttctgcgtgatcgcgggcggcgatcacgagacctccgagcagcggctgatcgatctcgaaagccctgatacgccgccgcggctggtcgcggcgcgtgaggaaggcgtgcaatattcgctggccgatcgcggcgatcagctcttcatcctcaccaatgccgatgacgccatcgacttcaagatcgtcaccgcaccgcttggctcgcccgaacggaagaactggcgcgatctgatcccgtatcgtccgggcatctacatcatcgacctcgatctctatgccggccatctggtgcggctggagcgcgccaatgcgctgccggcgatcgtgatccgcgatctcgcatcgaacgaggagcacgccatcgccttcgacgaagccgcctattcgctcgacacgatgggctcctacgagttcgagacaacgaacttgcgtttcgcctattcgtcgatgacgactccgtcggaggtctatgattacgacatggccaagcggacgcggaccttgcgcaagcgccaggagatcccgtccggccacaatgcgagcgactacgtcaccacgcgcatcatggcgaaggcgcaggacggcgccgaggtgccggtctcgattctctatcgccgcgggctgaagctcgacggatcggcaccgctcctgctctacggctacggctcctatggcatggcgatgccggcctcgttcaacgccaaccgcctgtcgctggtcgatcgcggcttcgtctatgccatcgcccatatccgtggcggcgccgacaagggctggggctggtatctcgacggcaagcgcgagaagaagacgaattcgttcgacgatttcgccgccagcgcccgcgcgctgatcgacgcaagatacaccagcgcaaagcgcatcgtcggccatggcggctcggccggcggcatgctgatgggagcggtggcaaaccgcgccggcgagctgttcgccggcatcgtcgccgaggtcccgttcgtcgacgtgctcaacaccatgctcgacgacacgctgccgctgacgccgccggaatggccggaatggggcaacccgatcgagagcgagaaggattttcgcaccatcctgtcctactcgccctacgacaatgtcgcggcgaaggcctatccggccatccttgcaatgggcggattgaccgatccgcgcgtcacctattgggagcccgccaaatggatcgcccgcctgcgcgccaccatgcgcggcggcggcccggtgctgctgcgcaccaacatgggcgccggccacggcggcgcctcggggcgatttgatcgtctggacgaggtggcgatcgtctatgcgttcgcgctgtgggcggcgggaatggcggaggccggggtgtag

SEQ ID NO: 38634 - protein, 701 aa, Bradyrhizobium japonicum USDA 110
MTQTKTPSQPPVARRRPHSFTRHGITVTDDYAWLKDEKWQEVLRDPGVIDPDIRKYLDEENVYTESLLGHTAALQKTLVREMRGRIKEDDSSVPSPDGQFAYFRRFREGGQHELFGRMPREGGDGHIVLDGDALAKDHKYFKFGGSRHSPDHKLQAWSADTKGSEYFSIRVRDWATGKDFDDLVEETDGGIVWSKDAKSFFYVKLDDNHRPMQVWRHRLGTKQANDTLVYEEQDSGWFTHLHESTSGRFCVIAGGDHETSEQRLIDLESPDTPPRLVAAREEGVQYSLADRGDQLFILTNADDAIDFKIVTAPLGSPERKNWRDLIPYRPGIYIIDLDLYAGHLVRLERANALPAIVIRDLASNEEHAIAFDEAAYSLDTMGSYEFETTNLRFAYSSMTTPSEVYDYDMAKRTRTLRKRQEIPSGHNASDYVTTRIMAKAQDGAEVPVSILYRRGLKLDGSAPLLLYGYGSYGMAMPASFNANRLSLVDRGFVYAIAHIRGGADKGWGWYLDGKREKKTNSFDDFAASARALIDARYTSAKRIVGHGGSAGGMLMGAVANRAGELFAGIVAEVPFVDVLNTMLDDTLPLTPPEWPEWGNPIESEKDFRTILSYSPYDNVAAKAYPAILAMGGLTDPRVTYWEPAKWIARLRATMRGGGPVLLRTNMGAGHGGASGRFDRLDEVAIVYAFALWAAGMAEAGV

SEQ ID NO: 38635 - DNA, 2112 bp, Xylella fastidiosa Temecula1
  CDS (1)..(2112): transl_table=11
gtgactactgctgttgtaagtgctcctctccctcctgatatcgctaagcatgcccatgcgatcaaagcgccgtttggcgcaatccgcaatgataattattactggttacgtgatgacacgcgtacgaacaaggtggtgttgagttatttgaacgctgaaaatgcgtatgccgacaaggtgttggaaccactcaagccgttacagcagaccttgtataaggagattgttgctcgcatcaagaaggatgatgccagtgttccgtaccggaaacacggttggttttactattccaggtttgaatccggtaaggattatccgattcatgcgcgtcgcaaagatggttctgggcttgatgctgccgtgattctggcggcgaatgcgtccggtgactttgctggtgaacaagtattactggacgttaacgcgttggctgcaggtaagagttacttcagtgtggctcatgctgaggtgagtcctaatactcatctgttggcttgggccgaggacggtgtgggtcgacgtcagtatacggttcgcttcaaaaatctggagactggggtgctttatcaggatgaaatccatggtgcgtcgtctagcgtggtttgggctgacgataataagacgttgttctacattgagaatgatcctaaaacgctgctgactaagcgtgttaaaaagcatgtgcttggtacccctgtcagtaccgatgtggtggtttatgaggagcacgacgatagtttctatatggacatcgaacgtacgcgtgatgagaaatacattgtggtttctatggaaagcacggtttcttccgaaatgcgttatgcacctgcggatctgtcgaaggggtttgtcgtgttggctcggcgtgagcgcgacgtgaaatatgggggagatcattttgacagtcgttgggtgatccgcacgaatgccgacggtgccaaaaattacaagttggtcactgcacccagtgatgcgactttgcgtagtcagtggcgtgacttggtcgtgcacgatccagcagtctttattgaggattttgagctgttcgacggttttactgcgatccaagagcgttctcagggcttggagcgggtgcgtctgctcaaggctgatggccaacacactgatgttgctgcggatgagccggcgtactcaatgggtctttctgagaatcccgagccggacaatccgtggctgcgttatacctatacttcgttaacgactccggcgacgacttatgagttcaacgtgcgtactggtgagcgtcgtcaactcaagcagcagcctgtgattggttacgatccgtcgcagtacgtcacggagcgtctgtgggtgactgcgcgggatggtgtgaaggtgccagtgtcgctggtgtatcgcaaaggttttaagaaagacggcactgctgcgctgtatcagtacgcgtatggcagttacggtttgtccacagatccagggtttaatttgccagtggtcagcttgcttgatcgtggtgttgtctacgcgattgcgcacatccgtggtggtcaggagatgggccggcagtggtatgacgatggtaagttgctgcataagcagaatacgtttaatgattttattgatgtgacgcgggaattggttgcgcagggatatgccgccaagggacgtgtggccgcggccggtggtagtgccggtggtttgttgatgggtgtggtggctaatcaggcgccgagtgattaccgtgtgatcgtggcgcaggtgccatttgttgatgtagtgacgacgatgttggacccgagtattccgttgaccaccaatgagtacgatgagtggggtaatcctgagcagaagacttattacgattacatgttgacgtattcgccttacgacaacgtggtgcatcaggcttatccagcgttgtttgttggcacggggttatgggattcacaggtgcagtattgggagccggctaaatgggtggctaagctgcgtgatgagaatacggggacttttccgattgtattcagagtcaatatggatgccggtcatggtgggaagtctgggcgtttcaggcgttaccaggaattggctgagtcctatgctttcgtacttcaccatcttgaagtgaagtga

SEQ ID NO: 38636 - protein, 703 aa, Xylella fastidiosa Temecula1
MTTAVVSAPLPPDIAKHAHAIKAPFGAIRNDNYYWLRDDTRTNKVVLSYLNAENAYADKVLEPLKPLQQTLYKEIVARIKKDDASVPYRKHGWFYYSRFESGKDYPIHARRKDGSGLDAAVILAANASGDFAGEQVLLDVNALAAGKSYFSVAHAEVSPNTHLLAWAEDGVGRRQYTVRFKNLETGVLYQDEIHGASSSVVWADDNKTLFYIENDPKTLLTKRVKKHVLGTPVSTDVVVYEEHDDSFYMDIERTRDEKYIVVSMESTVSSEMRYAPADLSKGFVVLARRERDVKYGGDHFDSRWVIRTNADGAKNYKLVTAPSDATLRSQWRDLVVHDPAVFIEDFELFDGFTAIQERSQGLERVRLLKADGQHTDVAADEPAYSMGLSENPEPDNPWLRYTYTSLTTPATTYEFNVRTGERRQLKQQPVIGYDPSQYVTERLWVTARDGVKVPVSLVYRKGFKKDGTAALYQYAYGSYGLSTDPGFNLPVVSLLDRGVVYAIAHIRGGQEMGRQWYDDGKLLHKQNTFNDFIDVTRELVAQGYAAKGRVAAAGGSAGGLLMGVVANQAPSDYRVIVAQVPFVDVVTTMLDPSIPLTTNEYDEWGNPEQKTYYDYMLTYSPYDNVVHQAYPALFVGTGLWDSQVQYWEPAKWVAKLRDENTGTFPIVFRVNMDAGHGGKSGRFRRYQELAESYAFVLHHLEVK

SEQ ID NO: 38637 - DNA, 2166 bp, Vibrio parahaemolyticus RIMD 2210633
  CDS (1)..(2166): transl_table=11
atgcgtttcactttaactacgttggccgtatcggtcgcgcttatcgccggatgcagcaatcaaggaactccaaccatgactcaatattcccaatcacagatcgttgctcagcaaactcaagccccggttgcaaaaaaaatccctcacgcgatgaccattcatggtgatactcgcgttgataactactactggatgcgtgacgacgagcgtaaagatccagaaattttgcagcacctagagcaagaaaatcagtatgcggaaaccgttctcaagcacactgaagctcttcaaaatgagctatttgaagaaattaaaggtcgcatagcaaaagacgacaactccgttcctgtgcgtaaaggtaactacttctactcaagtgaagttaccggagataacgaatacgaagttcatcttcgagcgaaagattttgctggtaaagacaaacaagtcatcttagatgtcaatgaacttgcgaaagagcatgaatttttcagtattggtggcctgtacgtcagcccgaatgaaaacttattggcgtatggcgaagatacattaagccgccgtgtttacaccattaagattaaagatctgaccacaggtaattacttacaagatgaaattgaaggggcgtcaagtgctgtcgcatggcagaacgacaacaacgcgttctattacatcaaaaaagatccacaaaccttgctaggctatcaagtttatcgtcacgtattgggcacaccacaaagcagcgatgagctgatttttgaagaaaccgacagcgcctattacacctcactaagcaaaagcaaagatggtgacgaggtttacatttggcattcgagtacagagaccagcggcgtctccatcatcgatgcgaacaatcctaaagcgaaggcggaaccgttctaccctcgtgaagatggcattgaatacagcatttctaagctagacaattggtattacatttataccaactatcaagccgtcaacttccgtttgatgaaagttaagcaagaagagatgcacgatcgttctaaatggcaagatgtgattgccgcagacgacaatactcaacttgtcgacttcgagctgttcgatgaccacctcgtctatgagcagcgctctaacggtctagcgagcgtcactgtgcgtcagctttcaacaggaaaagaattcccgctcacatttaatgacgatgcgttcgcggcatacttaacaggcaacttcgaactggataacaaaaaagttcgcatttactacagtagcttgactactccaggaacctactacgacttcgatctgaaaacgggcaaatctgaaatcatgaagcagacacctgtattgggtgactttgatgcggataactaccaatcagagcgcatcatgatcaaagcacgtgatggaaaagaggtccctgtgtcactggtgtatcgtaaggacttgtttaagaaagatggtacaaatccgctttaccaatacggttacggctcttacggtgcgaccatcgaaccgacgttcggctctgcacgactaagtctgttggaccgtggttttgtatttgcaatcgctcacattcgcggttctgaaatgcttggccgtccttggtatgaggatggtaaaaaactcaccaagcaaaacacattcaacgactttattgatgtaactaaaggtttggttgaacaaggctacggcgcgaaagataaagtcttcgctgttggtggctctgctggcggtttattgatgggtgccattattaatcaagcccctgagttgtatcgcggtattggcgcacatgttccatttgtcgatgttgttacaacgatgcttgatgaatcgattccactcaccactaatgagtatgatgaatggggtaacccgaacaacaaaacatactatgactacatgttgagttattcgccttacgacaatgtcaaagcgcaaaactacccgaacatgttggtgacgacgggcttacacgactctcaagtgcaatactttgaaccgatgaagtgggtagccaagcttcgtgaaatgaaaaccgacgataacatcttgttgttcaaaaccgatatggaagcaggacacggcggcgcatctggccgattcaaacgtttgaaagaagatgcattggagtacgcgttcttcctcgacttgctcaataaaaaataa

SEQ ID NO: 38638 - protein, 721 aa, Vibrio parahaemolyticus RIMD 2210633
MRFTLTTLAVSVALIAGCSNQGTPTMTQYSQSQIVAQQTQAPVAKKIPHAMTIHGDTRVDNYYWMRDDERKDPEILQHLEQENQYAETVLKHTEALQNELFEEIKGRIAKDDNSVPVRKGNYFYSSEVTGDNEYEVHLRAKDFAGKDKQVILDVNELAKEHEFFSIGGLYVSPNENLLAYGEDTLSRRVYTIKIKDLTTGNYLQDEIEGASSAVAWQNDNNAFYYIKKDPQTLLGYQVYRHVLGTPQSSDELIFEETDSAYYTSLSKSKDGDEVYIWHSSTETSGVSIIDANNPKAKAEPFYPREDGIEYSISKLDNWYYIYTNYQAVNFRLMKVKQEEMHDRSKWQDVIAADDNTQLVDFELFDDHLVYEQRSNGLASVTVRQLSTGKEFPLTFNDDAFAAYLTGNFELDNKKVRIYYSSLTTPGTYYDFDLKTGKSEIMKQTPVLGDFDADNYQSERIMIKARDGKEVPVSLVYRKDLFKKDGTNPLYQYGYGSYGATIEPTFGSARLSLLDRGFVFAIAHIRGSEMLGRPWYEDGKKLTKQNTFNDFIDVTKGLVEQGYGAKDKVFAVGGSAGGLLMGAIINQAPELYRGIGAHVPFVDVVTTMLDESIPLTTNEYDEWGNPNNKTYYDYMLSYSPYDNVKAQNYPNMLVTTGLHDSQVQYFEPMKWVAKLREMKTDDNILLFKTDMEAGHGGASGRFKRLKEDALEYAFFLDLLNKK

SEQ ID NO: 38639 - DNA, 2037 bp, Gloeobacter violaceus PCC 7421
  CDS (1)..(2037): transl_table=11
atgaaaccacccattgccgaagtgatccccaaaagccggaccctccacggtgaaaccctggtggacgactacttctggctgcgcgagaaggataacccaattgtcattacttacctggaggcggaaaaccgctacaccgaggcggttatgcaaccgactgagcagttgcagcagacgctttatgccgaaatgctcgcccgcatcaagcaaaccgacctgacggcaccggaactgtggggaggatactactactaccggcgtaccgaagaaggcaagcaatacccgattctctgccgcaaaccgggtagcctcgaagcggccgaagcgatcctgctcgatcagaacgaactggccagggacaagagctactttcgcatcggtacgtaccagatgagccccgaccagcacttcatcgcctacagcgtcactaccaccggtgcggaagtctacacgatctttatcaaagacctcaaaaccggcgaaacgctggccgaacaactgaccaacgcgagcggctacggcttcgactgggccggcgacaacaagacgcttttctataccgtccaggacgccgccaaccgcccctaccgcatctgtcgccacaccctgggcactgagcctaaaaccgatccggtcgccctcgaagaaaaagacgagttgttcattttgagtctggaaaagacccgcagcgatgcttacttgctcgccacatccgtcagcaaacagacctccgaagtctcctacctgcgagccgacgatccgaccggccgctttataacctttgcaccgcgccggacaggggtactctactcggtggatcatcgcggcgaccgcttctacatcctcaccgacgagaacgccaaaaacggcaagctgttgcaggcgccggtggccgatcccgcccacgccaactggcaggaacgactaccccacagaagcgacgtcaaactcgacggcatcgacctgttcaaggggtacatggtagtctacgagcgcgagaacgccctcaagcgcatgcgcgtctacgacttcgcggcccaggcgttccagccggtcgcctttgacgagccggtctacacgttcttcccggcgcgcaaccccgagttcgacaccgagcagttgcgcttcacctacacttcgctagtcaccccgtcctcggtctacgactacgacctgcgccgccgcacccgcgaacttaaaaagcaggagaccgtctacggctacgacccggcgctctataccagcgagcggcagtgggccgtggccccggacggtgagcgcgtgccgatctcgctggtctacaaaaagggccgggccaaagacggcacccaaccgctgctgctctacggctacggcgcctacgggatcagcatggacccgggcttttcgagcggccggctgagcctgctcgagcgcggcttcgcctttgcgattgcccacatccgggggggcggagagatgggccgcgcctggtacgacgacggcaagttgctcaaaaagaaaaacaccttctccgattttattgcctgcgccgagtcagtaatttcagaaaagtacactactgccgaaaagctggccatttacggtggcagcgccgggggattattgatgggggcggttgtcaacctgcggccggaactgttcaaatcggcgatcgccaaggtgcccttcgtcgatgtggtgaacactatgctcgacccgagcctgcccctaaccgtgggcgagtacgaagagtggggcaatccgaacgaactcgaatacttccgctacatccgctcctactcgccctacgacaatatcgaggcgaaggcttaccccaacttgctgcttaccaccggcatcaacgactcccaggtaccctactgggaacccgccaagtgggcagccaaactgcgcaagcgcaaaaccgacaacaacgtgttgttgctcaagaccaacatgggcgttggccacggcggttcctcgggccgctacgacgccctcaaagaagtcgcctttgattatgcgtatttgctgatgacgctgggggtggattga

SEQ ID NO: 38640 - protein, 678 aa, Gloeobacter violaceus PCC 7421
MKPPIAEVIPKSRTLHGETLVDDYFWLREKDNPIVITYLEAENRYTEAVMQPTEQLQQTLYAEMLARIKQTDLTAPELWGGYYYYRRTEEGKQYPILCRKPGSLEAAEAILLDQNELARDKSYFRIGTYQMSPDQHFIAYSVTTTGAEVYTIFIKDLKTGETLAEQLTNASGYGFDWAGDNKTLFYTVQDAANRPYRICRHTLGTEPKTDPVALEEKDELFILSLEKTRSDAYLLATSVSKQTSEVSYLRADDPTGRFITFAPRRTGVLYSVDHRGDRFYILTDENAKNGKLLQAPVADPAHANWQERLPHRSDVKLDGIDLFKGYMVVYERENALKRMRVYDFAAQAFQPVAFDEPVYTFFPARNPEFDTEQLRFTYTSLVTPSSVYDYDLRRRTRELKKQETVYGYDPALYTSERQWAVAPDGERVPISLVYKKGRAKDGTQPLLLYGYGAYGISMDPGFSSGRLSLLERGFAFAIAHIRGGGEMGRAWYDDGKLLKKKNTFSDFIACAESVISEKYTTAEKLAIYGGSAGGLLMGAVVNLRPELFKSAIAKVPFVDVVNTMLDPSLPLTVGEYEEWGNPNELEYFRYIRSYSPYDNIEAKAYPNLLLTTGINDSQVPYWEPAKWAAKLRKRKTDNNVLLLKTNMGVGHGGSSGRYDALKEVAFDYAYLLMTLGVD

SEQ ID NO: 38641 - DNA, 2058 bp, Photorhabdus luminescens subsp. laumondii TTO1
  CDS (1)..(2058): transl_table=11
atgccaccaaaggcaatgaaacaaccacaccatataactacccacggtgatactcgtatagatgattattactggatgcgggacgataatcgtaaagatcaaaaagtcattgattatctgacagccgaaaataaatataccgagcagatgctaaaacccggtgaacagctacgtgatacgttatacgaagaaatggttggcaggatgaagcaggatgatcaatcggtaccctatacttataatgggtatatatatcggacaacctatgaaacgggcaaagattttccgatttatcagcgtaaaccggttgatggctcatcagattggcagatactggtcgatggtaatgaaagggctaaagggcacgaatattaccaactgagtaattttgccatctctctggataataaacgtatggcgattgctgaagatacgcagggacgccgtaattatcagatctcttttaaagatattgctgataaacagtggaataatgatgtaataaaaaatacttctggcaacatggtttgggctaacgacaacaatacgttgttttatgtgcgcaggcattcacaaacgttactgccatatcaggtatttcgtcaccaatatggtagcaataccagtgaagatcataaaatatatcaggaagaagatgagcgtttttatttaagtatatctaagagcacttcccgcgattatattatgttggcgataaccagtaattcgacttccgaatatttgctgattgatgcgaataaaccacaagctgagcttcaactattctctcctcgtcaggaaggcagagagtattatattgaccatttccgcgatcatttctacatccgttcgaatcatgagaatgaaacttatgggctttatcagacggatgccatcaatataccgtggaaaatagtcattgctccgcggcaagatagtgatcttgaagatttcgatctgtttaatgactggttagtcgtacaggagcgaacaaaaggattaccgacaattcgtcagattaattggcagacacagcaagaaaaacagattaagtttgatgatccaagttatatggcatggattgattacaaccctgaacccaatactgattttgtccgttatggttattcatccatgacgacaccaagctcaacattccaatggaatatgaaaacaggtgagcgggaattacttaagcagcaggaagtaaaaggttttgataaacatcattatgagagccagcgtatttgggtgaaggcccgtgatggtgttgaagttccggtatctctggtatatcgtaaatcactgtttaaaaaaggccataacccaatactgatttatggatatggggcttatggtatcagtatggacccttcatttagctcaccgcgattgagtttattagatcgaggctttgtttacgcattagtacatgtgcgtggtggcggtgaattgggtaagaaatggtatttacaaggtaaagtcgaaaataaggaaaatagttttaatgactttattgatgtgactaaggcactgattgcgcaaaaatatggtgacagcaaacgaatttatgcgatggggggcagcgcgggtggtttgttgatgggcgctgtgattaatcaggcaccggaattatatcgcggtgtggttgctcaggttccatttgttgatgccgtgacaaccatgcttgacccttctattccgctgaccgtaggagaatatgaagagtggggtaatcctgaaaataaagaggattatttccggattaaatcatatagtccgtatgacaatataaaacatcaacgttatccgaacttattggttacgagtggattttatgattcacaagtgcaatattgggaacccactaaatgggtggcaaaattacgggatatgaaggaagataactctattttgttattagaaaccaatatgagtgccgggcatggtggtaaatctggccgatttagtcgattaaaagatactgcactggattacagttttattttgatgctggatgatgctaaaaagtattttccgcaattaaaagataactga

SEQ ID NO: 38642 - protein, 685 aa, Photorhabdus luminescens subsp. laumondii TTO1
MPPKAMKQPHHITTHGDTRIDDYYWMRDDNRKDQKVIDYLTAENKYTEQMLKPGEQLRDTLYEEMVGRMKQDDQSVPYTYNGYIYRTTYETGKDFPIYQRKPVDGSSDWQILVDGNERAKGHEYYQLSNFAISLDNKRMAIAEDTQGRRNYQISFKDIADKQWNNDVIKNTSGNMVWANDNNTLFYVRRHSQTLLPYQVFRHQYGSNTSEDHKIYQEEDERFYLSISKSTSRDYIMLAITSNSTSEYLLIDANKPQAELQLFSPRQEGREYYIDHFRDHFYIRSNHENETYGLYQTDAINIPWKIVIAPRQDSDLEDFDLFNDWLVVQERTKGLPTIRQINWQTQQEKQIKFDDPSYMAWIDYNPEPNTDFVRYGYSSMTTPSSTFQWNMKTGERELLKQQEVKGFDKHHYESQRIWVKARDGVEVPVSLVYRKSLFKKGHNPILIYGYGAYGISMDPSFSSPRLSLLDRGFVYALVHVRGGGELGKKWYLQGKVENKENSFNDFIDVTKALIAQKYGDSKRIYAMGGSAGGLLMGAVINQAPELYRGVVAQVPFVDAVTTMLDPSIPLTVGEYEEWGNPENKEDYFRIKSYSPYDNIKHQRYPNLLVTSGFYDSQVQYWEPTKWVAKLRDMKEDNSILLLETNMSAGHGGKSGRFSRLKDTALDYSFILMLDDAKKYFPQLKDN

SEQ ID NO: 38643 - DNA, 2055 bp, Vibrio vulnificus YJ016
  CDS (1)..(2055): transl_table=11
atgaaatttattcatcttcttttgatgctggcatggctcccggcagggttgagttttgctcaaaattcctctgtgacggataaggatgctaaagacaagtatgaatggctgcgagatgattcacgcagttcaccgcgagtgcgtgcttacttagaagtgcagaaccagcttgcagcacaaagactgcttgaaagtgagaatttggcacacatgctggagaagcagtggcaagcgatgctgcctgagaaaggtgaagaaccatggggttatcgtgaaggagaggaatggaagctaaccaaccaaggcggcagtttgcaattgatgcgccgcgacccacttactcaacaagcagaggtggtgttctcgtttgtcgagcgacaaaataataccgcttactatcaagtgggtgagtgggccatatcggacaaacgcacacacttactctttaccgaagatcgtcaaggtagtgagcgatatcaggcggtgttggtcgatttaaagcaaggccatatcgttgaaattgcacaagacttggacacaccagtactgctctctcgcgatggtttgaccgcttatgtgattgagaaagatcaggctcagcgtccatcgaacatcgtggcgattgagctagaaacgggtcgtcagcacagcttatggcaggaaacgcgagcagattggttgatgtcgttttatgccgccagcgatgcaaattacgcgctattgcaaagcaacaatgaaaacagcagcgaacaaaaaatcctcaacttgcgcactggagaagtctccgctgttctgcgtaaagctgagcaagggatggaatattatgcggatatcagccagcaaacgctttttgttcagagcaatcatgctggtgattttcagctttatcaggctccgttgcagacaccgaccgattggcaacgctttagcgatcacgtcacaacgctgaatcagttttatctgttttcggcaggtgttgtggtgagcgcgagtcagggttcagattcattactttcggtattaagctaccgcggtgaactacgcaagcagatccccctgaatcatgctggtgaagcggcttggatttcgagaaatggcgatttttctagcaacaaagtgcgcattcgtagcatgtcgatgaccacgccaccgacatggcgagagctcgacgtgagctcgctgagcatcaaagagattgcccaagatcgctacgccaattaccaagccaatttgtaccatactgagcagattttggttcaatcttctggtgttgaggttccggtcacgctggcgtaccgtcgtgacaagctcacggcaacttccccagtgattctttatggttacggtgcttacggctttaccatgaaaccttattttatgccgcagaccatcagcttacttgatcaaggcgccatatacgcagtggcgcatgttcgagggggcggctactttggcgcgtcatggcacgatgcagggaaagggatccacaaaagtaacgccatcgctgattttgtcgccgccgcgcaaacacttcgtcatgttagcttaaatggggagggagctgagccggtgcagcgcgacatttacctaatgggatccagtgctggcggcacattagtggcggcagcgatcaaccaaaagccggaactgttttcaggggccgtgctcaaagtgccgtttgttgatgtgctcaacagcatgtcagacagccgattaccgctgactgagcagcaatatggagaatggggtaatcccgagcagcctactcaacgaaaagcgatgcaagagtatgacccctacctcaaccttcaaccggtcacttatccgcccatgctggtgcaaattggttggcacgatcagcgtgtgccttattgggaaggggcgaagtacctgacaaaactggcggcgcttagcacgggaaccgggccttatttgttgcaaacggattttgattcaggccacgccatggacaggcgtaaaggattggcacaacaagccaaagagtatgcttttttactttcactgatcgaaacatcgaataaatcggagcaataa

SEQ ID NO: 38644 - protein, 684 aa, Vibrio vulnificus YJ016
MKFIHLLLMLAWLPAGLSFAQNSSVTDKDAKDKYEWLRDDSRSSPRVRAYLEVQNQLAAQRLLESENLAHMLEKQWQAMLPEKGEEPWGYREGEEWKLTNQGGSLQLMRRDPLTQQAEVVFSFVERQNNTAYYQVGEWAISDKRTHLLFTEDRQGSERYQAVLVDLKQGHIVEIAQDLDTPVLLSRDGLTAYVIEKDQAQRPSNIVAIELETGRQHSLWQETRADWLMSFYAASDANYALLQSNNENSSEQKILNLRTGEVSAVLRKAEQGMEYYADISQQTLFVQSNHAGDFQLYQAPLQTPTDWQRFSDHVTTLNQFYLFSAGVVVSASQGSDSLLSVLSYRGELRKQIPLNHAGEAAWISRNGDFSSNKVRIRSMSMTTPPTWRELDVSSLSIKEIAQDRYANYQANLYHTEQILVQSSGVEVPVTLAYRRDKLTATSPVILYGYGAYGFTMKPYFMPQTISLLDQGAIYAVAHVRGGGYFGASWHDAGKGIHKSNAIADFVAAAQTLRHVSLNGEGAEPVQRDIYLMGSSAGGTLVAAAINQKPELFSGAVLKVPFVDVLNSMSDSRLPLTEQQYGEWGNPEQPTQRKAMQEYDPYLNLQPVTYPPMLVQIGWHDQRVPYWEGAKYLTKLAALSTGTGPYLLQTDFDSGHAMDRRKGLAQQAKEYAFLLSLIETSNKSEQ

SEQ ID NO: 38645 - DNA, 2037 bp, Vibrio vulnificus YJ016
  CDS (1)..(2037): transl_table=11
atgcaatacatcaaaacacgtaaagacccaattgttgatcattactttggccatgcggtggccgatccctatcgttggttagaagacgatcgcagtgcagaaaccacagagtgggtatcagggcaaaacgccatcacatttgactatctaggccagattggttttcgccagcaactcagagagcaaatcgccgcgagtcaagattacgaaaaatcttctcagccttttgtgcatggggaatacacctacttctacaaaaatgacggcttacaaaatcaaagtgtcctctatcgccgcaaaggtgacgaagctgcgcaggtatttcttgacccgaacgggttttctgccgatggcacgacctcactttctggcgtgtttttctcaaaagatgactcgctggtggcgtacaccatttctgaagggggaagtgactggcgcaagatttttgtgatcgatgctgaaacaggtgagcaaatcgaacctgaaattgtcgatgcgaaatttaccggtgtgtcgtggttgggcaatcaaggattttattactcgcgttatgacaagccgcaaggcagcgagctgtcagccagaacagaacagcacaaactctattaccatcaactgggcacgccacaatccgatgatgtgttggttttcggcgaggcggaaggcgaactgcatcgctacgtgtatggacagacaagcgaagatgatcgctatctcgtcatcagtggccacgagtcaacgtcgggtaaccgcttgttttatgttgatctgcaaagcgatgagcgccagatttacaccttgttggatcacgttgactctgatacgcatttgctggattcgaccgatcgtgagtttcttctctacaccaacttggatgcgccaaacggtaaagtagtgagtgtggacattgaaagtggtcaatggcgtgatttaatcgccgagcaagatcaaccattagacgctgtagcagcgggtggctatctgtttgccacttacatggttgatgtgctgtcaaaagtcgtgcagtacagctaccaaggggaaaaagttcgagaaattacgctgcccggagaaggcaccgcaacggggctcgaagggaagaagagccaaaccacgctctactacacattcaccaattacgtcacaccgccgacgattttctcgctggatgtgaacagcggtgaatcgcaggtgttccaagagtctaaagcgccgtttgatcgtcaccaatacgaatctcaacaggtgttctacccctcgaaagatggcaccttgatcccgatgatcatctcttataagaaagggattgaactcaacggtaaaaatccgacgattctctatggttacggtggcttcgatgtcagtttgacgcctgccttttcaggcatggtagccagctggcttgagttgggtggcgtttacgcggtcgctaacttacgtggtggcggtgaatacggtaaggcttggcataatgctggaacgcaattgcaaaagcagaatgtgtttgatgacttcattgccgccgcagaatatttaattgaacagcaatacaccagttcggattttcttgcaattcgtggtggttcaaatggtggtttgcttgtgggcgcctgtatgactcagcgaccagatctgttcaaagtggcactgcctgccgttggggtgttggatatgctgcgctaccacactttcacctctggtgaaggttggaaatacgactacggcacctcggcgcaaagtgaagaaatgttccagtatttgttgggctactctccggtacacaacgtgaaggaaggcacagcctacccagcaacccttgtgaccacggccgatcacgatgatcgtgttgtgcctgcgcactcttataagttcattgccgagctgcaagagaagcaccaaggtgcgaatccggtactgatccgaattgatgtcaatgccgggcacggcgcgggtatgccgatgagtaaaatgattgatctctccgcggatatctatgcgtttacgttgttcaatatgggaatcaccgcattaaagtaa

SEQ ID NO: 38646 - protein, 678 aa, Vibrio vulnificus YJ016
MQYIKTRKDPIVDHYFGHAVADPYRWLEDDRSAETTEWVSGQNAITFDYLGQIGFRQQLREQIAASQDYEKSSQPFVHGEYTYFYKNDGLQNQSVLYRRKGDEAAQVFLDPNGFSADGTTSLSGVFFSKDDSLVAYTISEGGSDWRKIFVIDAETGEQIEPEIVDAKFTGVSWLGNQGFYYSRYDKPQGSELSARTEQHKLYYHQLGTPQSDDVLVFGEAEGELHRYVYGQTSEDDRYLVISGHESTSGNRLFYVDLQSDERQIYTLLDHVDSDTHLLDSTDREFLLYTNLDAPNGKVVSVDIESGQWRDLIAEQDQPLDAVAAGGYLFATYMVDVLSKVVQYSYQGEKVREITLPGEGTATGLEGKKSQTTLYYTFTNYVTPPTIFSLDVNSGESQVFQESKAPFDRHQYESQQVFYPSKDGTLIPMIISYKKGIELNGKNPTILYGYGGFDVSLTPAFSGMVASWLELGGVYAVANLRGGGEYGKAWHNAGTQLQKQNVFDDFIAAAEYLIEQQYTSSDFLAIRGGSNGGLLVGACMTQRPDLFKVALPAVGVLDMLRYHTFTSGEGWKYDYGTSAQSEEMFQYLLGYSPVHNVKEGTAYPATLVTTADHDDRVVPAHSYKFIAELQEKHQGANPVLIRIDVNAGHGAGMPMSKMIDLSADIYAFTLFNMGITALK

SEQ ID NO: 38647 - DNA, 2118 bp, Rhodopseudomonas palustris CGA009
  CDS (1)..(2118): transl_table=11
atgacctctgccccgccccgtgccgccaaccagcaaccgccggtcgcgccgcgccgtccgcatagcttcaccacccacggcatcacgctgaccgacgactatgcctggctgaaggatccgaactggcaggaggtgctgcgcgatccgtcgctgctcgatcccgacatccgcgcctatctcgaggcagagaacggctacaccgacagcgtgctcggccacaccacgagtttgcagaagaagctggtcgccgagatgcgcggccggatcaaggaggacgattccagcgtcccctcgccggatggtccttacgcttacttgcgcaagtatcgcgagggcggccagcacccgctgtacggccgcgtcgcgcgcgacggcagcggcgagatcgacatcatcctcgacggtgacgagcttgccaagggccacgactacttccagttcggcgaccgccggcactcgctcgaccacaagctggaaggctggagcgccgacaccaagggctccgaatactacaccatccgcgtccgcgactggacgaccaagcaggacatgcccgacgtggtcgaggagaccgacggcggcctggtgtggactgcggattcgaccgcgttcttctacgtcaagctcgacgacaaccaccgcccgatgcaggtgtggctgcacaagctcggtacccagcaggccgacgatcttctgatctacgaagagccggactccggctggttcacccacatccacgaaagcaccagcggccggttctgcgtgattgccggcggcgatcatgagacctccgagcagcggctgatcgacgtctccgatccgaccgcgccgccgcgcctcgtcgccaagcgcgaactcggcgtgcagtattcgctcggcgaccgcggcgacgaattgttcatcctcaccaatgccgacggtgcgatcgacttcaagatcgtcaccgcaccgctggctgagccgacccgcaacaactggcgcgatttgattccgcaccgcgccgggatctatgtgatcgatttcgacctcaccaccggccatctgatccggctggagcgcgccaatgcgctgccgtcgatcaccatccgcgacctgaagagcggcgaggaacacgccatcgcgttcgccgagaccgcgtattcgctcggcaccatcggcggctacgagttcgacactacgaacttgcggttctcgtattcgtcgatgaccacgccgtcggaagtctatgattacgacatggcgacgcggcagcggaccttgcgcaagcgccaggagattccctccggccacaatccggccgattacgtcaccacccggatcatggcgaaggccggcgacggcgccgaggtgccggtgtcgatcctgcatcgggccggcctcaagctcgacggccaggcgccgctgctgctgtatggctacggctcctacggccatgcgatgggcgccggcttttcggccaatgcgctgtcgctggtcgaccgcggcttcgtctatgcgatcgcccacatccgcggcggcgccgacaagggctggggctggtatctggacggcaagcgcgagaagaagaccaactcgttcgacgacttcgccgccagcgcccgcgcgctgattgcggcgaactacacctcgcccaagcgtatcgtcgcccacggcggcagcgccggtggcatgctgatgggcgcggtcgccaatcgcgccggcgagctgttcgccggcatcgtcgccgaggtgccgttcgtggacgtgctcaacaccatgctcgacgacaccctgccgctgacccctcccgagtggccggagtggggcaatccgattgcgagcgaagccgatttcaagaccatcctgtcgtattcgccctacgacaacgtcgccgccaaggactatccggcgatcctggcgatgggcggcctcaccgatccgcgcgtcacctattgggagccggccaaatgggtggcgcggctgcgcgccaccatgacgggtggcgggccggtgctgctgcgcatcaacatgggcgccggccacggcggcgcctccggccgcttcagccgcctcgacgagatcgcgatcgtctatgcgttcgcgctgtgggcggttggcctggctgacgccaccgcgtga

SEQ ID NO: 38648 - protein, 705 aa, Rhodopseudomonas palustris CGA009
MTSAPPRAANQQPPVAPRRPHSFTTHGITLTDDYAWLKDPNWQEVLRDPSLLDPDIRAYLEAENGYTDSVLGHTTSLQKKLVAEMRGRIKEDDSSVPSPDGPYAYLRKYREGGQHPLYGRVARDGSGEIDIILDGDELAKGHDYFQFGDRRHSLDHKLEGWSADTKGSEYYTIRVRDWTTKQDMPDVVEETDGGLVWTADSTAFFYVKLDDNHRPMQVWLHKLGTQQADDLLIYEEPDSGWFTHIHESTSGRFCVIAGGDHETSEQRLIDVSDPTAPPRLVAKRELGVQYSLGDRGDELFILTNADGAIDFKIVTAPLAEPTRNNWRDLIPHRAGIYVIDFDLTTGHLIRLERANALPSITIRDLKSGEEHAIAFAETAYSLGTIGGYEFDTTNLRFSYSSMTTPSEVYDYDMATRQRTLRKRQEIPSGHNPADYVTTRIMAKAGDGAEVPVSILHRAGLKLDGQAPLLLYGYGSYGHAMGAGFSANALSLVDRGFVYAIAHIRGGADKGWGWYLDGKREKKTNSFDDFAASARALIAANYTSPKRIVAHGGSAGGMLMGAVANRAGELFAGIVAEVPFVDVLNTMLDDTLPLTPPEWPEWGNPIASEADFKTILSYSPYDNVAAKDYPAILAMGGLTDPRVTYWEPAKWVARLRATMTGGGPVLLRINMGAGHGGASGRFSRLDEIAIVYAFALWAVGLADATA

SEQ ID NO: 38649 - DNA, 2163 bp, Mycobacterium avium subsp. paratuberculosis K-10
  CDS (1)..(2163): transl_table=11
atgaccgagacccacctggccacctccgtgccgcccgtcgccaagcgggtggacacccgccgcgagcatcacggcgacgtcttcgttgacccctacgagtggttgcgggagaagaccgaccccgacgtcatcgcccacctcgaggcggagaacgactacgcggaccggatgaccgcccacctggcgccgctgcgccagcagatcttcgacgagatcaaggcgcgcaccaaagagaccgacctgtccgtgccgacccggcagggccggtggtggtactacgcccgcacctatgaaggcaagcagtatcgcgtccaatgccgttgtcccgtagccgatcccgatgactggaatccgccgaacctggacgaggacaccgagatcccgggcgagcagatcatgctcgattcgaacgtcgaagccgagggtcacgagttcttcgcgctcggcgccgccaccgtcagcctggacgggaacctgctggcgtattccgtcgacaccgtcggcgacgaacgttatacgttgcggttcaaggacttacggaccggtgaactgtatccggacgagatcgccgacatagcggcgggagccacctgggccgccgacaaccgcaccgtgtactacctcaccctggatgcggcacaccgtcccgacaaggtgtggcggtaccaagcgggctccggcgaggcgcccgaactggtgtatcacgaagctgacgagaagttctggctcggcgtgggtctcacccggagcgaggcctacgtcatgatcgcctcgggctcctcgatcacctccgaattccgctacgccgacgccgccgacccgcacgcgcagttcaccgtggtgctgccgcgccgcgacggtgtcgagtactcggtcgagcatgcggtggtcggcgggcaggaccggtttttgatcctgcacaacgacggcgcggtgaacttcaccctcaccgaggccccggtcggcgatccgacccggcagcgcaccctgatcccgcaccgcgacgacgtccggctcgacgcggtggacgccttcgaaggccaccttgtcatcagctaccggcgtgccgcgctgccgcggctgcagctgtggcgcatcgacgccgacggcacatacgcgcggcccgaagagatttcgttcgactccgagctgatgtcggccgggctggccggcaacccgaactggtcggcgccccggctgcggatcagggccggctcgttggtcatcccggcgcgggtctacgacatcgacttcgtcaccggggagcggagcctgctgcgcgagcaacccgtgctgggggattaccggcccgccgactacgtcgaacggcgcgactgggccgtcgccgacgacggcacccgcgtcccggtgtccatcgtgcaccgtgccgacattgaattccccgctcccgcactgatttacggctacggcgcctacgagatctgcatcgatccgagcttctccatcgcccggctgtcgctgctggaccgcggcatggtgttcgcgatcgcacacgtgcgcggtggcggcgagatgggccggctgtggtacgagcacggcaagcttctggagaagaagaacaccttcaccgacttcatctcggcggcaaggcatttggtggaatcgaatgtcacccggccggatcggctggtggcgctgggcggcagtgccggcggcttgctggtgggggcggtggccaacctggctccggagctgttcgccgggatactcgcgcaggtgccgttcgtcgatccgctgaccaccatcctggatccgtcgctgccgctgaccgtcaccgagtgggacgaatggggaaacccactggcggacaaggacgtctacttctacatgaagtcctactcgccgtatgaaaacgtcgaggccaggcggtatccggcgatcatggcgatgacgtcgctcaacgacaccagggtgtactacgtggagccggcgaaatgggttgccgcactgcggcatgccaacccggccggcggcccgttcctgttgaagacccagatgaacgccgggcacggtggcgtcagcggccgctacaaggcatgggaggaaaccgcctaccagtacgcgtggctgctagcggccgccgagggcgaccgctacggcggcggccagaaagacgatctccatcccgatccgcaggggtag

SEQ ID NO: 38650 - protein, 720 aa, Mycobacterium avium subsp. paratuberculosis K-10
MTETHLATSVPPVAKRVDTRREHHGDVFVDPYEWLREKTDPDVIAHLEAENDYADRMTAHLAPLRQQIFDEIKARTKETDLSVPTRQGRWWYYARTYEGKQYRVQCRCPVADPDDWNPPNLDEDTEIPGEQIMLDSNVEAEGHEFFALGAATVSLDGNLLAYSVDTVGDERYTLRFKDLRTGELYPDEIADIAAGATWAADNRTVYYLTLDAAHRPDKVWRYQAGSGEAPELVYHEADEKFWLGVGLTRSEAYVMIASGSSITSEFRYADAADPHAQFTVVLPRRDGVEYSVEHAVVGGQDRFLILHNDGAVNFTLTEAPVGDPTRQRTLIPHRDDVRLDAVDAFEGHLVISYRRAALPRLQLWRIDADGTYARPEEISFDSELMSAGLAGNPNWSAPRLRIRAGSLVIPARVYDIDFVTGERSLLREQPVLGDYRPADYVERRDWAVADDGTRVPVSIVHRADIEFPAPALIYGYGAYEICIDPSFSIARLSLLDRGMVFAIAHVRGGGEMGRLWYEHGKLLEKKNTFTDFISAARHLVESNVTRPDRLVALGGSAGGLLVGAVANLAPELFAGILAQVPFVDPLTTILDPSLPLTVTEWDEWGNPLADKDVYFYMKSYSPYENVEARRYPAIMAMTSLNDTRVYYVEPAKWVAALRHANPAGGPFLLKTQMNAGHGGVSGRYKAWEETAYQYAWLLAAAEGDRYGGGQKDDLHPDPQG

SEQ ID NO: 38651 - DNA, 2094 bp, Bdellovibrio bacteriovorus HD100
  CDS (1)..(2094): transl_table=11
atgaaaataagtgtcttggctatcgcacttctgggagtatcctgcatgcacaaaaattatcttgattatccgaaacctgaaaagatcacaactcagctgtccaaacacggcgacatccgtatggacgactatttctggctgcgcgagcgtgaaaatcccaaagtcgtcgactatctgaagaaagaaaacgcctacactgcagaaatgatgaaaccggcactggagctagaggaaaaaatatttcaggagctgaagtcccgcgtgaaagaagacgaatctttcgtgcctgctaaagacggtgactattggtattcagcaagatttgagaaggcccagcagtatccgctgcacacccgccacaaaggcagcccgacagggcctgaagaaattctgatcaacgttccggaactggcaaaaggtcacacctatttcagctcgaccggcccgcgtatgagtccgaaccataagatgatggcctatgcggtggataccgtcggtcgtcgtttctatacaatccatttcaaggatctgaccaccgggaaagttctggcggaaaaaattgaaaatgtcactggcaacctgagctgggccaatgacaacgaaaccatcttctattctgaacagcacccggaaaccctgcgttccgagaaggtctatcgctacaacatcaaaacgcacaagaaggatcttgtttaccacgaaaaagacgacaccttcagcgtttacgtttacaaatccctgtctgaaaaatttatcttcatcgcgtcttacagcactctgacgaccgagacacgtttcatgtcggcggaccacccgctaggaactttcaaggtgttcaacccgcgcgaacgcgcgcacgaatactcagtgacggatggtggcgacaagttctatatcgtttctaacaagaacgcgcgcaattacaaattgatggtggcagacctggagcacaccgaggagaaacactggaaggaactgatcccccaccgggatgacacctatctggaaagcgtcaccgtgtttaaaagcttcatcgctttggatgaacgccataacgggcttacccaggtgcgtattgccgaccgcaatgcccaaaacccttacgaactaaaatttgcggatccaagttacctggcgtctgtgggagacaaccgcgaatacgacaccgaatggctgcgctataactatgaatccatgcgcctgccggattctgtttatgacctgaacgttaaaaccaaagaacaggtgctgagaaaggtgaaggagatcccgaactacaacgccgacttgtataaaaccgagcgtgtcttcctgacggttcgtgacggcaccaaagttccagtgtccctgatcatgaaaaaggattttaagaaggacggcaagtcctcgatgctggtctacggctatggctcttacggtgcgaacatggacccttggttcagcagcaatctgttcagtctggtggatcgtggttttgtctatgccaaagcccacatccgtgggggttccgagatgggccgtcactggtatgaccagggccgcacacattcaaagatgaacaccttcaatgactttattgatgtgaccgaagccttgatcaaagagggctattcctcggccgaacacactttcgccatgggcggaagtgccggcggcctattgatgggagcggtgatgaatctgcgcccggatctttacaagggcatcgtggcgcaagtgccgttcgtggatgtgatctctacgatgctggatgatagcattcccctgaccaccagtgaatacgaccagtggggcaatccgaacgtgaaagaggattacgaatacatccgcaagtattccccttatgacaacgtcaagagccaggcttatccgaatgttttggtgaccactggcttccacgattctcaggtgcagtactgggagccggcgaagtgggtgccgaagcttcgtgaacacaataaagggacttcgatgattcttttgaagaccgacatggagtcaggtcatggaggggcttccggccgcttcgatcaattgaaagaaacggccacggaatatgcgtttattctgatggttaacggaaataagaattag

SEQ ID NO: 38652 - protein, 697 aa, Bdellovibrio bacteriovorus HD100
MKISVLAIALLGVSCMHKNYLDYPKPEKITTQLSKHGDIRMDDYFWLRERENPKVVDYLKKENAYTAEMMKPALELEEKIFQELKSRVKEDESFVPAKDGDYWYSARFEKAQQYPLHTRHKGSPTGPEEILINVPELAKGHTYFSSTGPRMSPNHKMMAYAVDTVGRRFYTIHFKDLTTGKVLAEKIENVTGNLSWANDNETIFYSEQHPETLRSEKVYRYNIKTHKKDLVYHEKDDTFSVYVYKSLSEKFIFIASYSTLTTETRFMSADHPLGTFKVFNPRERAHEYSVTDGGDKFYIVSNKNARNYKLMVADLEHTEEKHWKELIPHRDDTYLESVTVFKSFIALDERHNGLTQVRIADRNAQNPYELKFADPSYLASVGDNREYDTEWLRYNYESMRLPDSVYDLNVKTKEQVLRKVKEIPNYNADLYKTERVFLTVRDGTKVPVSLIMKKDFKKDGKSSMLVYGYGSYGANMDPWFSSNLFSLVDRGFVYAKAHIRGGSEMGRHWYDQGRTHSKMNTFNDFIDVTEALIKEGYSSAEHTFAMGGSAGGLLMGAVMNLRPDLYKGIVAQVPFVDVISTMLDDSIPLTTSEYDQWGNPNVKEDYEYIRKYSPYDNVKSQAYPNVLVTTGFHDSQVQYWEPAKWVPKLREHNKGTSMILLKTDMESGHGGASGRFDQLKETATEYAFILMVNGNKN

SEQ ID NO: 38653 - DNA, 2058 bp, Treponema denticola ATCC 35405
  CDS (1)..(2058): transl_table=11
ttgaaacaatctgattttgaaaagccgcctattgcggaaataaaagaaacacgttttgaaaagtttgggaaaacaagaatcgataattattattggttaaaagacaagaccgataaaaaagttattgactacttaaatgcagaaaatgcttatacggataagataatggcttcttcaaaggatctgcaaaaatctatttatgatgaaattgtaggccgcataaaagaagatgatgaaacctatcctgtttttgaaaacggatattattattacaaccgtgtcgaaaagggaaagcaatacagaacctattgcagaaaaaaagcatctcttgatgcagccgaagaaatcattttcgatgtaaacaaaatggcggaaggaaaacaagcctttatcttcgacgactatgttgtaagccctgacaataaaaaggcttgctatttttataacgaaacaggctcctttgcggaatttattttaaagatacgcgatttggaaaccggaaaagatataggcttcagctatgacggagccgttaccgcagcttgggcatccgacagtaaaactcttttttacagtgcaatcgacagtaccctgcgttcaagcaaggtcttccgtcaaaaacttgatgaagaaaagggtactcttgtctatgaagaaaaagatgtaaaatattcttgctatgtgcatgaaacaaagacaaaggaatttatttttatttcaagttcaagttctaccacctccgaagagcgttttatttatgccgataagcctgaagaagaatttaaaatcttccttccccgcgttaaggataccgaatactccgtttatccgcacaaggaaaagttttttatacgttacaaggacaagcaaaacttaaacggcaaaatctattccgctcctcgttcttcctattccgataaatctacatggaaggaagaacgagctcacgacgaaaatgtacgcattgaggatgtgtccgtatttgaatcctaccttgtattggagcttcgtaaaaacggcctcatcgagattgaaattaaatcgcttaaaaacggtgaggtaaaaaatatttccttccccgaaccggtttatacggcttatttgggcgcaaacccggaatacgtttccgataaggtacgctatatttacacatccttaaaccgcccgagcagcgtatacgattacgatatacttacaggaaaatcggtcttgttaaaacagcaggaagttccctcaggctttaatccagatgattacactgtagaaaggctttgggcgacagcacaggacggagtgaaggtgcctatggctgccgtttacaaaaaaggtttggtaaaggacgggtcctcacccgctcttctttattcttatggaagctacggctccagctccgatgcgtttttcagtccgagtgtttacagccttgtagagaggggctttgtttatgttgttgctcaaatcaggggcggaagcgatatgggagaaaagtggtatgaggacgggaagctcttaaaaaagaaaaatacatttaccgattttattgcttgtgccgagcacctgatttctcaaaaatacacttcttccgataagctcgcaatcatgggcggaagtgcgggcggtcttcttatgggtgctgttacaaatatgaggccggatcttttccattcggtcgttgcagttgttccctttatagatgtcgttaccaccatgctcgacgattcattaccccttacaacgggcgaatatgaagagtggggaaacccgaacgaagaagaatattataactacatgctttcatattctccctacgataatatcgaagcaaaaaattatccgcacatttttgtaacgggcggcttaaacgattcgcaagttcttttccatgagcctgcaaaatatacggcaaagctgcgtgcaaagaaaaccggagataatattctaatcctccgtatgaatatggactccggacacggcggagccacaggccgctatgacaagattaaggatatagcctttgaacaagcctttattcttaatatggtaggaatcaacaagtag

SEQ ID NO: 38654 - protein, 685 aa, Treponema denticola ATCC 35405
MKQSDFEKPPIAEIKETRFEKFGKTRIDNYYWLKDKTDKKVIDYLNAENAYTDKIMASSKDLQKSIYDEIVGRIKEDDETYPVFENGYYYYNRVEKGKQYRTYCRKKASLDAAEEIIFDVNKMAEGKQAFIFDDYVVSPDNKKACYFYNETGSFAEFILKIRDLETGKDIGFSYDGAVTAAWASDSKTLFYSAIDSTLRSSKVFRQKLDEEKGTLVYEEKDVKYSCYVHETKTKEFIFISSSSSTTSEERFIYADKPEEEFKIFLPRVKDTEYSVYPHKEKFFIRYKDKQNLNGKIYSAPRSSYSDKSTWKEERAHDENVRIEDVSVFESYLVLELRKNGLIEIEIKSLKNGEVKNISFPEPVYTAYLGANPEYVSDKVRYIYTSLNRPSSVYDYDILTGKSVLLKQQEVPSGFNPDDYTVERLWATAQDGVKVPMAAVYKKGLVKDGSSPALLYSYGSYGSSSDAFFSPSVYSLVERGFVYVVAQIRGGSDMGEKWYEDGKLLKKKNTFTDFIACAEHLISQKYTSSDKLAIMGGSAGGLLMGAVTNMRPDLFHSVVAVVPFIDVVTTMLDDSLPLTTGEYEEWGNPNEEEYYNYMLSYSPYDNIEAKNYPHIFVTGGLNDSQVLFHEPAKYTAKLRAKKTGDNILILRMNMDSGHGGATGRYDKIKDIAFEQAFILNMVGINK

SEQ ID NO: 38655 - DNA, 2163 bp, Strongylocentrotus purpuratus
  CDS (1)..(2163)
atgcctgctgctgccaaaaaacccaccacgaagactgtctttgggcgtcagtgggtagatgagtatgcttggatgcagcaaggtttttcagagaaatttctacaatacataaaagcagaaaacaacttttcggaacagtacttcaaccatttgaaagctctacaagaaaagttaagagcagagattatccaatgtgaggaaggtgattatggttctgaaaccaacctgaaggtcataggggactatgcttactatcctgacatctcagaaagtggttatagtatcttctgtcggaggaacatcaggacaggtgaagaccaggtcctgttggactccaatcgtctcatggagttatttggttacaaccaggtcgtcatcactggtttcaagatatcgccatgccaacggtatctaggggcggtagtagaaggtagtcctgatgaatatgatgggcatatcgtcaagatggaggttggcggtcagtgtcgcctggtggagtgtatccaagatattaccaatatggagtttcttggtgaggattcagtgctgtatacaaagccattcagcctccaagccagggaagtgtggagacatcggatcggctcctcacagcagggagatgaactggtgtttgaggaaatggatgaaagattctttgtagatttgtcccacaccaaagacagacgatacgtcgtcatcaacagcaactctcgaacttcctctgagctatggttgatcgactgcctcagaagctcatcagaaacacagcccgtgttggtttggccgagacaagatggtgtagaatgctacctagatagctgtggacagactctccttgcgttgtccaatgctggggattcatctgaactaaagctcttcaaagcccaaccttcagatgatatccagagtagccatactgtacaatgggaagagctctacagcccacctcctggtcatgtgatacaggacatggatgtctttgcctcacattttgtcctggctttattggtggacatcattccacaacttgccatagtacagcattctggagaaatggagccattgcatatagagctccctcctgaatataccaccattcttccaggcctcaacgcggacatcaactcgagacattaccagttccaactctcttcccccgtccatccaccaaaagattttgagctagatctacagacgtgcaatattgaggttggggagagtgatgaggatacagggtcagggagcgaggatgaaatacaagaggttcattctattcgtgcacaaagcaggagaaaacccgaggactatgcctgtcaacgattagtggcacaaagtcaggatggaaccaatgtccccatcaccgtcttccaccgagagaacctggtccttgacgggcaacatcccatgctggtcatcgggtacggtgcctatggaaggaatgtggagatggaatacacggcagagaggatggcattgttatctaatggatgggtgcttgccttttgtcatgtcaggggaggtggagagttggggaaagagtggtattattcaggcaagggagaccagaagcatcatagttttgaggacttggagagctgcgtggagttcctgcattcttctggcttctcccggccagctctgacggccggatgggcagccagtgccggggctctgctcttgggggtcttgtgcaaccggagtccacacctactgagagctgcagtcatgagaatgccctttgttgacatcctgtcctccatgttggactctacttcacctttgacctctcaagacatagaagaatggggtgacccctctggcagtgcagctgacatggagtatatctctgcctactgcccttaccacaatctcagatcacagagctatccatccgtactcgtcacatcctccatgaccgaccagcgggtgccttcatgggtccctgcaaagtacatggcaaggttgagggacagaacaagagaccatcatcatgagcaccaccgtcctacattcctgttgagggtgcactcggatggtggtcactttgggcctgacgagggtgatggaggggtggaccaggcgagtaatattgcaaggaacaggagtggtagggcatatgggaccatgcaccaccaaaaagttgcattgtgtggtttcagttag

SEQ ID NO: 38656 - protein, 720 aa, Strongylocentrotus purpuratus
MPAAAKKPTTKTVFGRQWVDEYAWMQQGFSEKFLQYIKAENNFSEQYFNHLKALQEKLRAEIIQCEEGDYGSETNLKVIGDYAYYPDISESGYSIFCRRNIRTGEDQVLLDSNRLMELFGYNQVVITGFKISPCQRYLGAVVEGSPDEYDGHIVKMEVGGQCRLVECIQDITNMEFLGEDSVLYTKPFSLQAREVWRHRIGSSQQGDELVFEEMDERFFVDLSHTKDRRYVVINSNSRTSSELWLIDCLRSSSETQPVLVWPRQDGVECYLDSCGQTLLALSNAGDSSELKLFKAQPSDDIQSSHTVQWEELYSPPPGHVIQDMDVFASHFVLALLVDIIPQLAIVQHSGEMEPLHIELPPEYTTILPGLNADINSRHYQFQLSSPVHPPKDFELDLQTCNIEVGESDEDTGSGSEDEIQEVHSIRAQSRRKPEDYACQRLVAQSQDGTNVPITVFHRENLVLDGQHPMLVIGYGAYGRNVEMEYTAERMALLSNGWVLAFCHVRGGGELGKEWYYSGKGDQKHHSFEDLESCVEFLHSSGFSRPALTAGWAASAGALLLGVLCNRSPHLLRAAVMRMPFVDILSSMLDSTSPLTSQDIEEWGDPSGSAADMEYISAYCPYHNLRSQSYPSVLVTSSMTDQRVPSWVPAKYMARLRDRTRDHHHEHHRPTFLLRVHSDGGHFGPDEGDGGVDQASNIARNRSGRAYGTMHHQKVALCGFS

SEQ ID NO: 38657 - DNA, 2127 bp, Nasonia vitripennis
  CDS (1)..(2127)
atgagtcccaacaagttcacttacccgaaagctcgaagagacgagaccgctgtggatgtttatcacggtgttgagatcaaagatccatacaagtggctggaagatccagagtcggaggagaccaaggcatatgtcgatgctcagaatgccatcactgttccgttcatacaagcctgccccaagcgtcaagctatccatgatagacttaaacaactgtgggactaccccaagtactcttgtcctgcgaagaagggaagcaaatactactttttcatgaacactggtttgcaaaatcaaagtgtattctatgtacaagactcactggacggagagccaagagttttccttgatccaaacacgttttccacggatggaactgttgccatatcaagtggagagtttagtgaagatggtggtatatatgcctatgccttatctgctagtggatctgactggaacactattcactttatcaataccaagacaggtgaaaagtatcctgaagttttggagaaagtaaagtattcttccataacatggacacacgataatgtgggagttttctatgcttgctatcctgaacagcttgagaaagctgatggttccgagacttttgtcaacaagaatcaaaagttgtgttatcacaaagttggcacgccacagtcagaagatgtggtggttgtagattttccagaacatcctttgtggagaatagatgcaaaagtaacagactgtggtcgatggctggttgtcatgccccagcaagagtgccgcgacaacctagtcttctttgccaagcttaatactgcagaaggaatcaaaggaaaactgccactgacagaagtagttggaaatttagaagctgactatgaatacgttacgaatgttggtacaaaagctgtgttcaggacaaataaaaatgctccaaatttcaaattgattgctacagattttgaaaattatcaagaaaatagttggtctgaattaatagcagagcattctcgcaatgttttggattgggctactgctgttgataaggataagcttgttgtttgttatattgaagatgttaagaatgttttgggagttcacagtttagaaactggaaagttgataagacagttacctttagatgtaggaacagtggttggtttttcaggagatctcaagtactctgaaatattttatcagtttacctctttcttaacacctggaattatttatacgttagatcttaaggaaaatgaagagaagccaaaggtgttccgcgaaatcaaagttaatgactttgatgcaagttcgtacaaaacaactcaaatattttattctagtaaagatggaacaaaaatccccatgtttattgtacataaaaaagatctcgtgctggatggttcgtctcctgctcttctttatggatatggaggcttcaatgtcagcattcagcctacctttagcgttacgcggctagtcttcttgcagcaccttaacggtgttttggcaatcccaaatatacgaggaggaggtgaatatggtgaaaagtggcacaacggcggacgtttcacaaacaaacaaaacgtctttgatgacttccaatgcgctgctgagtacttgatcgacaaccgttacacgtcgcccaagaaattaataattcaaggaggcagcaatggtggtcttcttgtaggtgcttgcattaatcagagacctgatctttttggtgctgctattgctcaagtaggagttatggacatgctgaagttccacaaattcaccgtcggctacgcttggacgtccgactacggcagttcggacgatagagaacactttaagaatctgctcaagtactcgcctttgcacaacgtgaaaccgcctaaagatggaggacaatacccagcgacgctgcttttgacggcagatcacgacgatcgtgtagtgccgctgcacagtttaaaactgatagctacactgcaacacgaaattggaagcctgccacagcagactaatcctatactcatcaggatcgacgtcaaagccggacacggaagagggaagccgacgtcgaaagtgattgatgaaagtactgacattttatcctttgtggtacaaacgttgaacctcgaattcaagtag

SEQ ID NO: 38658 - protein, 708 aa, Nasonia vitripennis
MSPNKFTYPKARRDETAVDVYHGVEIKDPYKWLEDPESEETKAYVDAQNAITVPFIQACPKRQAIHDRLKQLWDYPKYSCPAKKGSKYYFFMNTGLQNQSVFYVQDSLDGEPRVFLDPNTFSTDGTVAISSGEFSEDGGIYAYALSASGSDWNTIHFINTKTGEKYPEVLEKVKYSSITWTHDNVGVFYACYPEQLEKADGSETFVNKNQKLCYHKVGTPQSEDVVVVDFPEHPLWRIDAKVTDCGRWLVVMPQQECRDNLVFFAKLNTAEGIKGKLPLTEVVGNLEADYEYVTNVGTKAVFRTNKNAPNFKLIATDFENYQENSWSELIAEHSRNVLDWATAVDKDKLVVCYIEDVKNVLGVHSLETGKLIRQLPLDVGTVVGFSGDLKYSEIFYQFTSFLTPGIIYTLDLKENEEKPKVFREIKVNDFDASSYKTTQIFYSSKDGTKIPMFIVHKKDLVLDGSSPALLYGYGGFNVSIQPTFSVTRLVFLQHLNGVLAIPNIRGGGEYGEKWHNGGRFTNKQNVFDDFQCAAEYLIDNRYTSPKKLIIQGGSNGGLLVGACINQRPDLFGAAIAQVGVMDMLKFHKFTVGYAWTSDYGSSDDREHFKNLLKYSPLHNVKPPKDGGQYPATLLLTADHDDRVVPLHSLKLIATLQHEIGSLPQQTNPILIRIDVKAGHGRGKPTSKVIDESTDILSFVVQTLNLEFK

SEQ ID NO: 38659 - DNA, 2298 bp, Apis mellifera
  CDS (1)..(2298)
atggctctatttgtaattgttgatatgtttgcaaattcatataaaattcaaactaaattttataagaatttgttcaaattcgcagttagtaagcattctcaatttgttcgggcattggctttttcgactgtgaaagtgtttgatcctacggtacaaaaacgtataaatataaataaaaaaatggaaaaattacaataccctgaggcatatcgcgatgaaagtattatcgataattatcatggtattgaggttcaagatccatatagatggttagaagatcctgattctgaaaaaactaaagcatttgttgatgctcaaaattctatcactacaccatatttaacttcatgcaaggcacgtcaagatattcatgatcgattaaaacaattatgggattttccaaaatattcatgtcctgctagatatggaaataaatattatttctataaaaatactggcttacaaaaccaaagtgttctttatgtacaagatacattggatagtgaacctagagtatttttagatccaaatactttatcagaagatggaaccattgcaattactatcagtaaatttagtgaagatggtagcatatatgcatttggtttatctgctagtggatctgattggtgtaccattcattttatgaatacagaaactggtgaaaaatatccagagattttagaaaaagttaaattttctccaataacatggacacatgataattatggaatcttttatggttgttatccagaccaaaaaggtaaaactgatggttcagaaacagaaggtaatcgagatcaaaaactgtgttaccatattattggtacacctcagtcagaagatattatagtagttgaatttcctgaagaacctttatggaggataggtgcacaagtttctgattgtggaaaatggttaattgtcacacctgtgaaagattgtagagataatttagtttattttacggaattaaagccagagatgaaaataagggaaaaattacacttaactcaagtagttgataaacttgaagctgattatgaatatgtaacaaatgatgatacaaaggcaatatttcggactaacaaaaacgcgccaaattataaattaatagctatagatttattggactataaacaagaaaagtgggttgatcttttaccagaacatcctgataatgtattagattgggcatgtgcagttgatggtgataaatttgtagcttgttatattgaacatgttaagaacattttacaattacatagcttaaaaagcggcgatatacttagaacatttcctcttgatgttggtacaatagttaattttgcaggacaaaaaaaatattctgaaatattttatcaatttaaatcatttttaattcctggtattatatatagagttgatttgaaaaatgaagaagaaccacaagtattaagagagattaaagtaaaaaactttgatcccagtttgtataaaactagtcaaatattctatacaagtaaagatggtacaaaaattccaatgtttatagtaatgaaacatgatgcagttttggatggttccatgccggctttattatatggttatggaggctttaatgtgagcattcaaccgacatttagcgttacaaagctggtttttgttcagcatttaaatggagtacttgctgtggcaaatattcgtggtggcggagaatatggagaaaaatggcataatggtggacgattctttaataaacagaatgtatttgatgattttcaaactgctgctgaatatttgattgaaaacggttatactacttcttcaaaattaagtattttaggtgccagtaatggtggtttattaattgctgcatgcataaatcaaagacctgatctttttggtgctgcaattgctcaagttggagtaatggatatgttacgtttccataaatttactattggtgttgcttgggtatctgattatggtagttcagatgactcgaaacattttgaaaatcttataaaatattccccattacataatgtaagagttccagaaaatggacagtatcctgcaacattattgttgactgccgatcacgatgatcgggtagtaccattacatagtctaaaacttattgccactctacagtatacattaggaaaattaccacaacaaacgaatcccttattaattaaaatagagactaaagctggacatggtggtggaaaaccaaccatgaaagtgattgaagaaagtacagatattttagcatttattgtgaaatcattggatttagaattcaaattataa

SEQ ID NO: 38660 - protein, 765 aa, Apis mellifera
MALFVIVDMFANSYKIQTKFYKNLFKFAVSKHSQFVRALAFSTVKVFDPTVQKRININKKMEKLQYPEAYRDESIIDNYHGIEVQDPYRWLEDPDSEKTKAFVDAQNSITTPYLTSCKARQDIHDRLKQLWDFPKYSCPARYGNKYYFYKNTGLQNQSVLYVQDTLDSEPRVFLDPNTLSEDGTIAITISKFSEDGSIYAFGLSASGSDWCTIHFMNTETGEKYPEILEKVKFSPITWTHDNYGIFYGCYPDQKGKTDGSETEGNRDQKLCYHIIGTPQSEDIIVVEFPEEPLWRIGAQVSDCGKWLIVTPVKDCRDNLVYFTELKPEMKIREKLHLTQVVDKLEADYEYVTNDDTKAIFRTNKNAPNYKLIAIDLLDYKQEKWVDLLPEHPDNVLDWACAVDGDKFVACYIEHVKNILQLHSLKSGDILRTFPLDVGTIVNFAGQKKYSEIFYQFKSFLIPGIIYRVDLKNEEEPQVLREIKVKNFDPSLYKTSQIFYTSKDGTKIPMFIVMKHDAVLDGSMPALLYGYGGFNVSIQPTFSVTKLVFVQHLNGVLAVANIRGGGEYGEKWHNGGRFFNKQNVFDDFQTAAEYLIENGYTTSSKLSILGASNGGLLIAACINQRPDLFGAAIAQVGVMDMLRFHKFTIGVAWVSDYGSSDDSKHFENLIKYSPLHNVRVPENGQYPATLLLTADHDDRVVPLHSLKLIATLQYTLGKLPQQTNPLLIKIETKAGHGGGKPTMKVIEESTDILAFIVKSLDLEFKL

SEQ ID NO: 38661 - DNA, 2163 bp, Strongylocentrotus purpuratus
  CDS (1)..(2163)
atgcctgctgccgccaaaaaccccaccaagaagactgtctttgggcatcagtgggtagatgagtatgcttggatgcagcaaggtttctcagaggaattgctacaatacataaaggcagaaaacaacttttcagaacagtacttcaaccatttgaaagctatgcaagaaaagttaagagcagacattatccaatgtgaggaaggtgattatggttctgaaactaacctgaaggtcataggggactatgcttactattctgacatctcagaaagtggttctagtattttctgtcggaggaacatcaggacaggtgaagaccaggtgctgttggattccaatcatctcatggagttatttggttacaaccaggtcatcatcactggtttcaagatatcaccatgccaacggtatctaggggcggtagtagaaggtagtcctgatgcatatgatgggcatattatcaagatggaggttggtggtcagtgtcgcctggtggaatgcatccaagatattaccaatatggagtttcttggtgaggattcagtgctgtatacaaagccattcagcctccaagccagggaagtgtggagacatcggatcggctcctcacagcagggagatgaactggtgtttgaggaaatggatgaaagattctttgtagatctgtcccacaccaaagacagacgatacgtcgtcatcaacagcaactctcgaacttcctctgagctatggttgatcgactgcctcagaagctcatcagaaacgcagcccgtgttggtttggccgagacaagatggtgtagaatgctacctagatagctgtggacagactctccttgcgttgtccaatgctggggattcatctgaactaaaactcttcaaagcccaaccttcagatgatatccagagtagccatactgtacaatgggaagagctctacagcccacctcctggtcatgtgatacaggacatggatgtctttgcctcacattttgtcctggctttattggtggacatcattccacaacttgccatagtacagcattctggagaaatggagccattgcatatagagctccctcctgaatataccaccattcttccaggcctcaacgcggacatcaactcgagacattaccagttccaactctcttcccccgtccatccaccaaaagattttgagctagatctacagacgtgcaatattgaggttggggagagtgatgaggatacagggtcagggagcgaggatgaaatacaagaggttcattctattcgtgcacaaagcaggagaaaacccgaggactatgcctgtcaacgattagtggcacaaagtcaggatggaaccaatgtccccatcaccgtcttccaccgagagaacctggtccttgacgggcaacatcccatgctggtcatcgggtacggtgcctatggaaggaatgtggagatggaatacacggcagagaggatggcattgttatctaatggatgggtgcttgccttttgtcatgtcaggggaggtggagagttggggaaagagtggtattattcaggcaagggagaccagaagcatcatagttttgaggacttggagagctgcgtggagttcctgcattcttctggcttctcccggccagctctgacggccggatgggcagccagtgccggggctctgctcttgggggtcttgtgcaaccggagtccacacctactgagagctgcagtcatgagaatgccctttgttgacatcctgtcctccatgttggactctacttcacctttgacctctcaagacatagaagaatggggtgacccctctggcagtgcagctgacatggagtatatctctgcctactgcccttaccacaatctcagatcacagagctatccatccgtactcgtcacatcctccatgaccgaccagcgggtgccttcatgggtccctgcaaagtacatggcaaggttgagggacagaacaagagaccatcatcatgagcaccaccgtcctacattcctgttgagggtgcactcggatggtggtcactttgggcctgacgagggtgatggaggggtggaccaggcgagtaatattgcaaggaacaggagtggtagggcatatgggaccatgcaccaccaaaaagttgcattgtgtggtttcagttag

SEQ ID NO: 38662 - protein, 720 aa, Strongylocentrotus purpuratus
MPAAAKNPTKKTVFGHQWVDEYAWMQQGFSEELLQYIKAENNFSEQYFNHLKAMQEKLRADIIQCEEGDYGSETNLKVIGDYAYYSDISESGSSIFCRRNIRTGEDQVLLDSNHLMELFGYNQVIITGFKISPCQRYLGAVVEGSPDAYDGHIIKMEVGGQCRLVECIQDITNMEFLGEDSVLYTKPFSLQAREVWRHRIGSSQQGDELVFEEMDERFFVDLSHTKDRRYVVINSNSRTSSELWLIDCLRSSSETQPVLVWPRQDGVECYLDSCGQTLLALSNAGDSSELKLFKAQPSDDIQSSHTVQWEELYSPPPGHVIQDMDVFASHFVLALLVDIIPQLAIVQHSGEMEPLHIELPPEYTTILPGLNADINSRHYQFQLSSPVHPPKDFELDLQTCNIEVGESDEDTGSGSEDEIQEVHSIRAQSRRKPEDYACQRLVAQSQDGTNVPITVFHRENLVLDGQHPMLVIGYGAYGRNVEMEYTAERMALLSNGWVLAFCHVRGGGELGKEWYYSGKGDQKHHSFEDLESCVEFLHSSGFSRPALTAGWAASAGALLLGVLCNRSPHLLRAAVMRMPFVDILSSMLDSTSPLTSQDIEEWGDPSGSAADMEYISAYCPYHNLRSQSYPSVLVTSSMTDQRVPSWVPAKYMARLRDRTRDHHHEHHRPTFLLRVHSDGGHFGPDEGDGGVDQASNIARNRSGRAYGTMHHQKVALCGFS

SEQ ID NO: 38663 - DNA, 2121 bp, Mycobacterium sp. JLS
  CDS (1)..(2121): transl_table=11
atgaccgtcccgccgccgcaggccaaacgggttgaacagcggcgcgaacaccacggcgacgtgttcatcgacccctacgagtggctgcgcgacagatccgatcccgaggtgctggcccacctggaggccgagaacgcctacaccgaggcgcagaccgcgcatctcgcgccgttgcggcagaagatcttcgacgagatcaaggcccgcaccaaggagaccgacctctcggtgcccacccggcgcggcgactggtggtactacgggcgcagcttcgagggtaagcagtacggcgtccactgccgttgccctgtcgcagatcccgaggactggacacctccggtgctcgacgagaacaccaccatcgacggtgaacaggtcctgctcgacgagaacgtcgaagccgagggccacgagttcttcgcgctcggggcggccaccgtcagcatcgacggcaacgtcctggcctactccgtcgacacagtgggcgacgagcggtacacactgcggttcaaagacctccgcaccggcgagcagtacgacgacacgatcgtcgggatcggtgccggcgccacctgggccgccgacaaccgcaccatctactacagcaccgtcgacgacgcctggcggcccgacaccgtatggcgccaccggttgggggcggggctgccggccgaacgggtgtaccacgaacccgacgaacggtactggctgggcgtcggccgcacccgcagcgacaagtacctgatcatcgccgcgggcagcgccgtcacctcggaggtgcgctacgccgacgcgagtgatccggaggcggagttcgccgtggtgtggccgcgccgcgacggggtcgagtactccgtcgaacacgcggtggtcggcggggaggaccggttcctcatcatgcacaacgacggtgcggagaacttcgcactcgtcgacgcgccggtggccgatccgggcgcggcccgcacgctcatcgaacaccgcgaggacgtgcgactcgacgcggtcgacgcgttcgccgaacacctcgtgctgagttaccgcgaagaggcactgcccaagatccaactgtggcccctgggcgccgacggatcatacggtcgcgccgaggacatcaccttcgacaccgaactgacctcggcggggctgggcggcaacccgaactgggacgcgccgaaaatgcgcatcgcggcaacgtctttcgtcaccccggtgcggatctacgacctcgacctcgcaacaggggagcgcacgctgctgcgcgagcagccggtgctcggcggctaccggcccgaggactacgtcgagcgcagggactgggcgatcgccccggacggcgcgcgggtgcccatctcgatcgtccaccgtgccggccttcagtttccggcaccgaccctgctctacggctacggcgcctacgagtcgtgtgaggacccacggttctcgatcgcccggctctccctgctggaccgcggcatggtgttcgccgtcgcccacgtccgcggcggcggggaactcggccggccgtggtacgaacagggcaagatgctggagaagggcaacaccttcaccgacttcatcgcggtggcaaggcatctcatcgccaccgacaccacgcggccgcagaacctggtggcgctcggcggcagcgcaggtgggttgttgatcggtgcggtcgccaacctggcgcccgaactgttcgccggcttcctggcgcaggtgccgttcgtcgatccgttgaccacgatcctcgacccgtcgctgccgctgacggtcaccgagtgggacgaatggggcaacccgctcgagcacgagcacgtctaccactacatgaagtcctactcgccgtacgagaacgtcgtcgccaaggactatccgccgattctggcgatgacctcgctcaacgacacccgggtgtactacgtcgaaccggcgaaatggattgccgcccttcggcacacgaagaccgacgggaacccggtgctgctcaagaccgagatgagcgccggacacggcgggatcagcggacgctacgaacggtggaaggaagccgcgttccagtacgcctgggtgctcgcgaccgccgacccggagacctacgacaaccgaagcccgaactag

SEQ ID NO: 38664 - protein, 706 aa, Mycobacterium sp. JLS
MTVPPPQAKRVEQRREHHGDVFIDPYEWLRDRSDPEVLAHLEAENAYTEAQTAHLAPLRQKIFDEIKARTKETDLSVPTRRGDWWYYGRSFEGKQYGVHCRCPVADPEDWTPPVLDENTTIDGEQVLLDENVEAEGHEFFALGAATVSIDGNVLAYSVDTVGDERYTLRFKDLRTGEQYDDTIVGIGAGATWAADNRTIYYSTVDDAWRPDTVWRHRLGAGLPAERVYHEPDERYWLGVGRTRSDKYLIIAAGSAVTSEVRYADASDPEAEFAVVWPRRDGVEYSVEHAVVGGEDRFLIMHNDGAENFALVDAPVADPGAARTLIEHREDVRLDAVDAFAEHLVLSYREEALPKIQLWPLGADGSYGRAEDITFDTELTSAGLGGNPNWDAPKMRIAATSFVTPVRIYDLDLATGERTLLREQPVLGGYRPEDYVERRDWAIAPDGARVPISIVHRAGLQFPAPTLLYGYGAYESCEDPRFSIARLSLLDRGMVFAVAHVRGGGELGRPWYEQGKMLEKGNTFTDFIAVARHLIATDTTRPQNLVALGGSAGGLLIGAVANLAPELFAGFLAQVPFVDPLTTILDPSLPLTVTEWDEWGNPLEHEHVYHYMKSYSPYENVVAKDYPPILAMTSLNDTRVYYVEPAKWIAALRHTKTDGNPVLLKTEMSAGHGGISGRYERWKEAAFQYAWVLATADPETYDNRSPN

SEQ ID NO: 38665 - DNA, 2097 bp, Bartonella henselae str. Houston-1
  CDS (1)..(2097): transl_table=11
atgacccgttcttctgtacttccacccaaagcatccaaaatcatttataaagacgtatatcacggtatttgtcgcgatgatccctatcattggctgcgtgcatctaattggcaagacgttttaaaagattctagctgtcttgatgaaaatattaggcatcatcttgaaaaagaaaatgcctatcaagctgctcaaatggctgataccaagctattacaagatttgctttttgctgaaatgaaaagccgtatcccggaaaatgacagttctgttcctataaaacatgggccttttgcgtacggattttcttacgttaccggaggccagtatccccattattttcgtacatcaaggaatggagaggaaaaaaatgtttatcttaatggtgatgccttggccgaagggaaagaatatttcaattttggttcagttcaagaatctcctgatcataaacatgttgtatggacctatgatgacaagggatctgaattttacacagctaaaattcgtaatttggaaacattgtctgattatacggatacaatcacggatacatccggacaaattatatgggatgctaaatctgaaggtttcttctatactaagatagatgaaaatcatcggccttcagagctctattatcaccgattaaacaccgaccaatcgcaagataagctgatttttcgtgaagataatccaggattttttttaaatgtaagcggttctaaacttaatgatgttatttatattaatattcatgatcatgaaacgtcagaaatttggctgatccctgcaaaagcacctctcactgttccccaatgtgtacggaagagacaaaaaggtattgaatattctcttacagaaggtggtgatgtcttttatattcttaccaatttagataacgcaaaagatttcaaaattatggtagcgccatacacatctccacaatcagaaaattggtctgagcttgtatcgcaccaacttggatgtttaatcatatgccatgatgcttatcaagattttcttgtttggcttgaacgctttgaggggcttcctcgtataaaagtaatggagcgtaccaccaaacaaattcattccatttctattacagaagaagcttattccttaggtctacaaggtgctgcagaatataatagtcaaactattcgctttacctattcatctatgacaacacctgatcaagtttttgactatgagatgaaaagtcgcaaacgaacacttctaaaaacgcaaataattccctcagggcataacaaagatgagtatataacacggcgtattatggcaattgcagatgatggtgagaaagttcctatttcacttttttatcatagaaccactgctcttgatgggagtgctccttgtttgctctacggttatggtgcttatggaatctctattcctgtaaatttcaatagtactgtattgtctttggttaacagaggttttgtttatgctattgctcatattcgtggaggaaaagaaaaaggagttgaatggtatgagaaagggaaacaccgttttaaatacaatacatttacagattttattacttgtgggcgctaccttgtaaataataaattcacttctcatgatcgacttatcgcccatggtggttcggcaggagggatgttaatgggcgttatcgcaaatatagctccacaggatttttctgggattgtagcgaatgtgccttttgttgatgtcttaacaaccatgttagatgcttcactgccgctaacgcctccagaatggcctgaatggggaaatcctcttgaatcacaagaggattacaatcttatcgcctcctattcaccttacgataacgttaaagctcaaaaatacccttctatccttgcaattgcaggattaactgatcctcgtgtaacctattgggagcctacaaaatgggtggcaaaactgcgcgatttaaaaacagatgataatgcgattttattacgcattaatatggattcaggtcacgcaggtgcagctgggcgtttttcaaagttggaagaaattgcgtatatttatgcatatatcttaaaaataacgggaaaaatgctgctaacttga

SEQ ID NO: 38666 - protein, 698 aa, Bartonella henselae str. Houston-1
MTRSSVLPPKASKIIYKDVYHGICRDDPYHWLRASNWQDVLKDSSCLDENIRHHLEKENAYQAAQMADTKLLQDLLFAEMKSRIPENDSSVPIKHGPFAYGFSYVTGGQYPHYFRTSRNGEEKNVYLNGDALAEGKEYFNFGSVQESPDHKHVVWTYDDKGSEFYTAKIRNLETLSDYTDTITDTSGQIIWDAKSEGFFYTKIDENHRPSELYYHRLNTDQSQDKLIFREDNPGFFLNVSGSKLNDVIYINIHDHETSEIWLIPAKAPLTVPQCVRKRQKGIEYSLTEGGDVFYILTNLDNAKDFKIMVAPYTSPQSENWSELVSHQLGCLIICHDAYQDFLVWLERFEGLPRIKVMERTTKQIHSISITEEAYSLGLQGAAEYNSQTIRFTYSSMTTPDQVFDYEMKSRKRTLLKTQIIPSGHNKDEYITRRIMAIADDGEKVPISLFYHRTTALDGSAPCLLYGYGAYGISIPVNFNSTVLSLVNRGFVYAIAHIRGGKEKGVEWYEKGKHRFKYNTFTDFITCGRYLVNNKFTSHDRLIAHGGSAGGMLMGVIANIAPQDFSGIVANVPFVDVLTTMLDASLPLTPPEWPEWGNPLESQEDYNLIASYSPYDNVKAQKYPSILAIAGLTDPRVTYWEPTKWVAKLRDLKTDDNAILLRINMDSGHAGAAGRFSKLEEIAYIYAYILKITGKMLLT

SEQ ID NO: 38667 - DNA, 2052 bp, Erwinia carotovora subsp. atroseptica SCRI1043
  CDS (1)..(2052): transl_table=11
atgaagacaccgcaagctgaaaaaagaccccacgcgataagtacacatggcgatacgcgtatcgacaactattactggctgcgtgatgacgagcgtgccgatccgcaggtgttagcctatctggaacaggaaaacgcctacagcgaagccatcatggcacctcacgaggcgcgcaaacgatcgctgtatgatgaaatggttaagcgtattccgtcgacggatatgtctgtgccgtatgtcagaaaggggtatcgctaccaaagtcgctatgagcagggtaaagagtacgccatctatctgcgccagcctgagcaggcaacagaagtgtgggaaacgctgttggatggtaatcaacgtgcggaggggcatgaattttatagcctcggcgcgcttgagattagcccgagcaactcgctgctggcactctcggaggattttttatctcgtcggcagtacacgcttcgcttccgtgatctgaaccgcgacgaatggctaccggatgtgatcgaaaatgtgaccgcaggtgctgaatggtcggcagattcaacggtgctgtactacgtgcgtaaacatgagaaaacgctgttaccgtatcaggtctaccgtcatcgcttaggcagcgatccggcgcaggatgagttggtgtatgaagagaaagacgatacttattatgtcagtctgagtaaaacgacatcagagcactatattaccatttatcttagcagcaccacgacgaccgaggttctactgctcgatgcgacgctcccagatgcggtgccgcaggtacacattccgcgtcggaaagatcatgaatatggtattgatcactatcaggaccagttttatctgcgttccaaccgagagggaaagaactttggtctttatcgttcggataagcctgatgagcacgcgctggaaacactgattgccccacgtgaacagtgtgtgctggagagttttgagcttttccgtgattggctggtggtggaagaaagagcgcgcggtttgaccagcttacgtcagattcactggcatacgcaggaagaaaaaacgatcaccttcaatgatgcgagctatgtgacgtggctgtcgtacaaccctacgccagaaacggcattgatgcgatatggttattcatcaatgacaacccccagcacgttgtatgaactgaatctggacacgggcgaacagcagttacttaaacaagccgaggtgaaagatttctccccagatagctatcggagcgaacgcttgtggatcacggtccgagatggtgtcgacgtgcccgtttcgttggtttaccatcgcgaccatttcagcccaggtaagaatccgatactggtctatggctacggcgcatatggtaatagcatggatcctgacttcagcgttagtcgtctgagcctgctagaccgagggtttgtttttgccttaacgcacattcgcggcggtggtgaacttgggcagcagtggtatgacgatggtcggttgctcaataaaatgcattccttcacggatttcatcgatgtgtctcaggcattggtagaaaaaggctatggcgacaggaaaaatatgtttgccatgggtggcagcgcgggaggtctgctgatgggggcggtcgtgaatatcgcccctgatctgtttaaaggcgttgtcgctcaggttccgttcgttgatgtgttgacgacaatgctggatgagtctatcccgctgacgaccggggagtatgacgagtggggcgatccgaatgaacaaacctactatgactatatcaagcagtacagcccctatgatggtgttaccgcacagcactacccacatttgctagtgactactgggttacacgactcgcaggttcagtattgggagcctgcaaagtgggtggcgaaattgcgggaagtcaaaacggacgatagtctagtactgttgtataccgatatggaggctgggcacggcggaaaatccggtcgtttcaaacgttatgatgatatcgcgctggagtatgctttcctgttgatggtgcttgaaaaggctgcagaaagtcatgaataa

SEQ ID NO: 38668 - protein, 683 aa, Erwinia carotovora subsp. atroseptica SCRI1043
MKTPQAEKRPHAISTHGDTRIDNYYWLRDDERADPQVLAYLEQENAYSEAIMAPHEARKRSLYDEMVKRIPSTDMSVPYVRKGYRYQSRYEQGKEYAIYLRQPEQATEVWETLLDGNQRAEGHEFYSLGALEISPSNSLLALSEDFLSRRQYTLRFRDLNRDEWLPDVIENVTAGAEWSADSTVLYYVRKHEKTLLPYQVYRHRLGSDPAQDELVYEEKDDTYYVSLSKTTSEHYITIYLSSTTTTEVLLLDATLPDAVPQVHIPRRKDHEYGIDHYQDQFYLRSNREGKNFGLYRSDKPDEHALETLIAPREQCVLESFELFRDWLVVEERARGLTSLRQIHWHTQEEKTITFNDASYVTWLSYNPTPETALMRYGYSSMTTPSTLYELNLDTGEQQLLKQAEVKDFSPDSYRSERLWITVRDGVDVPVSLVYHRDHFSPGKNPILVYGYGAYGNSMDPDFSVSRLSLLDRGFVFALTHIRGGGELGQQWYDDGRLLNKMHSFTDFIDVSQALVEKGYGDRKNMFAMGGSAGGLLMGAVVNIAPDLFKGVVAQVPFVDVLTTMLDESIPLTTGEYDEWGDPNEQTYYDYIKQYSPYDGVTAQHYPHLLVTTGLHDSQVQYWEPAKWVAKLREVKTDDSLVLLYTDMEAGHGGKSGRFKRYDDIALEYAFLLMVLEKAAESHE

SEQ ID NO: 38669 - DNA, 2157 bp, Leifsonia xyli subsp. xyli str. CTCB07
  CDS (1)..(2157): transl_table=11
atgctcactccccccgccaccccgaagagaccgaccgagcgcagacaccacggggatgtggtggtcgatgagtacgagtggctgcgcgacagggacgaccctgccgtcagcgcgcacctgcacgaagagaacgcctacacgaacgcccgcaccgagcacctggccgtgctgcgcgagcagatcttcgacgagatcaagggacgcacgcgtgaatccgatctgagcgtgccgacgcgcgagggcgactggtggtactacacgcgcacggtggaggggaagcagtacggcatccactgccgcgcgccaatcgcaggcccggacgactgggagcccccggctctggacgagacggcacagcggtcgaggctgcccggcgaacaggtgctgctggatgacaacgcggaggcggaggggcacgcgttctacgcgctcggcagcttcgatgtgagcgccgacgggagccggctgctgtacgccatcgacacggagggcgacgagcggtacacgatccgggtgcggtcgctgaacggcgacggtgacggcttccccgacctgatcgcgggaaccggtgcgggagcgctgttcgaccagagcggcgagtacatcttctacacgacagtggatgacgcctggcgtccgtccaccgtctggcggcaccgggtcggtgaggggccggacgagcaggccgacgcgaccgtgttccacgagccggacgaacgctactggatcggcgtcgggatgacccggagccggcgcttccttgtcatcgaggcaagatcgaacatcaccagcgagacgtggctgctgcgctccgacgacccgaccggtgagttctccgtggtgtggccacgcaaggagggagtggagtacgacgtcgagcactcgatcttcggcgcccacgaccggctgctgctcgtgcataacgacggggcggtgaacttcgagctcgtcagcgtcgccgccgaagcccctcaggggaagcgcagaatgctgctgccgcacaaccccgcggtccgcctcgagagcgtcgacgccttccgcgacttcgtggccctcgagtaccgccgcgacggactgacccggatcgctatcggccgcgtccccgaccccgcggagttcgcagcccacccggactcagcgccggacgacatgctgcacgaactgcgcttcgacgaagagctgttcaccgtcggtgtgggcagcaacccggagtggacccagccgcatctgcgcttggggtacaccagtttcgtgacgccgccgagcgtgtacgactacgacatccgcagccacgaacgggtgctgcgcaagaagcaagccgtgctcggcgcgttcgatccggagctgttcgagcagaagcgcgaatgggcgacggcagacgatgggactcgcatcccgctctcgctggtctaccgccgcgacctggtcacacccggcgagccggcgccactggtgctctacggttacggatcctacgaggcgagcatcgacccgtcgttcggcatcccgcggctgagccttctcgaccgcggcgtggtgttcgcgatcgcgcatgtgcgcggcggcggcgaactgggccggctctggtacgagaacgggaagaagctgcacaagaagaacaccttcaccgacttcgtggccgccgccgagcacctcaccacccagggctggacatcgccggaccggctggccgcacaggggggaagcgcgggtggactgctcatgggggccgtggcgaacctggcgccgcgggccctcgcgggcatcctcgcggaggtgccgttcgtggacccgctgacaagcatcctggacccgtcgctcccgctgaccgtgatcgagtgggacgagtggggcgacccactgcacgacgaggacgtgtactactacatgaagtcgtacgcgccggtggagaacatccacgcgacgcgctacccgcgcatcctggcgatcaccagcctgaacgacacgcgggtgctgtacgtggagccgacgaaatgggtggccacactgcgagaggcgggggcggacgcgctgctgaagacggagatgacggccgggcacggcggcgtctccggccggtacgcggcctggcgcgaacgggcgttcgcactggcgtggctgctggatgtggtgggggtacacccgagcggagcgtga

SEQ ID NO: 38670 - protein, 718 aa, Leifsonia xyli subsp. xyli str. CTCB07
MLTPPATPKRPTERRHHGDVVVDEYEWLRDRDDPAVSAHLHEENAYTNARTEHLAVLREQIFDEIKGRTRESDLSVPTREGDWWYYTRTVEGKQYGIHCRAPIAGPDDWEPPALDETAQRSRLPGEQVLLDDNAEAEGHAFYALGSFDVSADGSRLLYAIDTEGDERYTIRVRSLNGDGDGFPDLIAGTGAGALFDQSGEYIFYTTVDDAWRPSTVWRHRVGEGPDEQADATVFHEPDERYWIGVGMTRSRRFLVIEARSNITSETWLLRSDDPTGEFSVVWPRKEGVEYDVEHSIFGAHDRLLLVHNDGAVNFELVSVAAEAPQGKRRMLLPHNPAVRLESVDAFRDFVALEYRRDGLTRIAIGRVPDPAEFAAHPDSAPDDMLHELRFDEELFTVGVGSNPEWTQPHLRLGYTSFVTPPSVYDYDIRSHERVLRKKQAVLGAFDPELFEQKREWATADDGTRIPLSLVYRRDLVTPGEPAPLVLYGYGSYEASIDPSFGIPRLSLLDRGVVFAIAHVRGGGELGRLWYENGKKLHKKNTFTDFVAAAEHLTTQGWTSPDRLAAQGGSAGGLLMGAVANLAPRALAGILAEVPFVDPLTSILDPSLPLTVIEWDEWGDPLHDEDVYYYMKSYAPVENIHATRYPRILAITSLNDTRVLYVEPTKWVATLREAGADALLKTEMTAGHGGVSGRYAAWRERAFALAWLLDVVGVHPSGA

SEQ ID NO: 38671 - DNA, 2061 bp, Pseudomonas syringae pv. syringae B728a
  CDS (1)..(2061): transl_table=11
atgtccttcccgaatgcaacctccagcgccccgatcgctcgcaaggccgacggttccgacccctacgcctggctgcagaaccgcgacaccgacgaagtgctcgactacctcaaagccgaaaacgcctggcaggagcagcaactggcagagcagaccgggttgcgcgaaagcctgttcgaggaaatcaagggccgcatcctcgaaaccgacctgtcgctgccctccccctggggcccttacctttattacacccgcaccacacaaggcgatgaatacgcccggcactaccgctgcccgcgcccggccgacgacagcaacacagtggacgaaagcgctgaggaattgttgctcgaccctaacgagatggccgatggcggctttttctcgctgggcgcgttcagcatcagtcccgaccaccagcgcctggcctacagcctggacaccagtggcgacgaggtgtacgcgctttacgtcaaggagctgagcaccggccagatcagcagcctgccctttgaaaactgcgacggcagcatgacctgggccaacgacagccagaccctgtttttcggcgagctggacgaaacccatcgcccgggcaggctgcatcgccataccctgggcacggcatcagccgagctggtgttcgacgagccggacggccgcttcttcctgcactgtttccgcagcagctccgagcgccaactgatcattctgctcaacagcaaaaccactagcgaagcctgggtgctggacgccgatcatccacaacaggccttcacctgcctcgcaccgcgcagcgaaggtcacgaatattacccggaccacgggctgctcgacggcgtctggacctggttcatccgcagcaatcagagcggcatcaacttcgcgctgtatcaggctgcgcaacaggacagtggcgtaccggtgcgcgaggactggcagacgctggtcgcgcacaacgacaaggtcatgctcgaaggcgtcagcctcaacgccaaaggcatcagcctgagcctgcgcgagggcggcctgccgatcatcgaagtacgtccgcaagcgctgccgacctatcgcgtgcagctgcctgacgccgcctacagcctgtatgtgcaggacacgctggaattcgacagcgacaaaatccgcctgcgctaccagtcgctgaaccgtccggcccaggtccgtcaactgaccctggccagcggcgagcaagtggtgctcaaggaaacgccggtactgggcaccttcgacgccgatgcctacgtcagccagcgtttgtgggccacggccagcgatggcacccaggtgccgatcagcctggtggtcaagcgcgaactggccggacaggccaccccgctgtacctgtacggctacggcgcctacggcgagagcctcgacccgtggttttcccacgcgcgcctgagcctgctcgaccgtggcgtggcgttcgccatcgcccatgtgcgcggcggcggcgagctgggcgaggcctggtatcgcaacggcaagcaggagcacaaacagaacactttcggcgatttcattgcctgcgccgaacaccttgttgcccagggcctgaccagcgccggacaactggtgatcagcggtggcagcgccggtggcctgctgatcggtgcggtgctcaaccaacggcccgagctgttcaaggcagcgattgccgaagtgccgttcgtcgatgtactgaacaccatgctcgacccggacctgccgctgaccgtcaccgaatacgacgaatggggcaacccgcaggagccggaggtctacgcgcgtatcaaggcctacgcgccctacgaaaacgtcacggctcaggcctatccggccatgctggtcatcgccggttacaacgacagccgtgtgcagtattgggaagccgccaaatgggtggctaaattgcgcgccaccaagaccgacgataatccgttgctgctcaagaccgaactgggcgccgggcacggtggcatgagcggtcgctatcagggcttgcgtgacgtggcgctggagtacgcatttatcttcaaggtattgcagatcgctgaatga

SEQ ID NO: 38672 - protein, 686 aa, Pseudomonas syringae pv. syringae B728a
MSFPNATSSAPIARKADGSDPYAWLQNRDTDEVLDYLKAENAWQEQQLAEQTGLRESLFEEIKGRILETDLSLPSPWGPYLYYTRTTQGDEYARHYRCPRPADDSNTVDESAEELLLDPNEMADGGFFSLGAFSISPDHQRLAYSLDTSGDEVYALYVKELSTGQISSLPFENCDGSMTWANDSQTLFFGELDETHRPGRLHRHTLGTASAELVFDEPDGRFFLHCFRSSSERQLIILLNSKTTSEAWVLDADHPQQAFTCLAPRSEGHEYYPDHGLLDGVWTWFIRSNQSGINFALYQAAQQDSGVPVREDWQTLVAHNDKVMLEGVSLNAKGISLSLREGGLPIIEVRPQALPTYRVQLPDAAYSLYVQDTLEFDSDKIRLRYQSLNRPAQVRQLTLASGEQVVLKETPVLGTFDADAYVSQRLWATASDGTQVPISLVVKRELAGQATPLYLYGYGAYGESLDPWFSHARLSLLDRGVAFAIAHVRGGGELGEAWYRNGKQEHKQNTFGDFIACAEHLVAQGLTSAGQLVISGGSAGGLLIGAVLNQRPELFKAAIAEVPFVDVLNTMLDPDLPLTVTEYDEWGNPQEPEVYARIKAYAPYENVTAQAYPAMLVIAGYNDSRVQYWEAAKWVAKLRATKTDDNPLLLKTELGAGHGGMSGRYQGLRDVALEYAFIFKVLQIAE

SEQ ID NO: 38673 - DNA, 2115 bp, Colwellia psychrerythraea 34H
  CDS (1)..(2115): transl_table=11
gtgccaacatcttcagttacatcagatacgtcaaacaaaaacattaccgcaccaatagctaaaaaaatccctcataaaatggaaattcataatcatcatcgtgtggataattattattggatgcgtgatgaccagcgtagcgatgaagcagtattgaaacacctaaatgatgaaaataactatgctgatgctatgttagccgagcaaaaatcgttacaagagtcattatttgaagagcttaaagcccgtatcgtaaaagacgataataccgtgcctgaaaaagatggtaaatattggtatcacagcgaaattaatggtgaacaagagtattcaaattattaccgttcaaccagctttactggtgaaaacaaaactctgttattagatgttaatgaccgagccaaagaccatgagttttatgatttaggggatttatccatcagccctaatgatcaattaatgacaatatcagaagacattgacagtcgtcgtatttacaccatttactttaaagacctgaacaaatcatctgactctgacgacccttatttacccgatacgctcattgaaactgaaggacaaattgtttgggctaatgacaataaaaccgtattttatgtaaagaaagacttagagaccttattaggtacgcaagtttaccgtcataaattaggctcgccacaatctgatgatgttcttgtttatgaagaagacgattacagtttttacatgagtttagataagagcagagatgactctcaaatttatatttgtttacatgccactgaatcaacacattatttagcactcagtgctgatgagcctgatggtgagtttgatgagctctttccgtatcaagaacaacacgaataccatgcggataaaatgggtgaacacttttatattgtgaccaattttcaagctaaaaactttaagttaatgaaagctgctatcagtcaggttcatgatataaataactggcaagaagtgatccctcacagaaaagatgtattgctagagggtattgaattattccaaaactttactgtggtgaccgaacgtgaacatggccaaattcgttttattgttcacactacacagggtgaaaatgcaggccatcaataccctttgtcttttgatgacccgtgttattttgcttgccttggtgataaccctgagcccaaaagtaccaccgcaagattatattattcaagtttaacaacacctggatctttatttgagtttgacttagctaccggtgagcgaaagctgcttaaacagcaaaaagtcttaggtgactttaccaaagaagattatcaatccgagcgtttgtttattactgcccgtgatggcacagaagtacctgtatccattgtttatcgcagtgatacttttcaaaaggatggctctaacccactattgcaatacggttatggtgcgtatggcattaccatagaccctgacttttccagtcaaacgttaagcttactcgaccgaggttttgtttacgttatcgcccatgttcgtggctcagaaatgttaggaagagaatggtatgaaaccggtaaaatggcgcataaacaaaatacctttaatgatttcattgatgttactaaagccctagttgaacaaggttatggggctaaagataaaatatttgcttctggcggcagtgccggcggtttattaatgggagctgtggtcaatcaagcacctgaactatatttaggtattggcgcacatgtgccctttttagatgtattaacgactatgctcgatgaaagcataccgctaaccaccaatgaatataacgaatggggtaacccgaacgaagcacaggcttatcaaagtattttagcttattcgcccattgataatattagtgctcaacactaccctcatatacttgtcaccacggggttgcacgactcacaagtgcaatactttgaaccaatgaaatgggtagcaaaaatgcgtgagtttaaaacagatgacaacttgttgttatttaaaacagatatggaggccggccatggtggcgcctcgggacgttttaaaagtttaaaagaaaaagccttggagatgagcttttttatctcattattaccaaagtag

SEQ ID NO: 38674 - protein, 704 aa, Colwellia psychrerythraea 34H
MPTSSVTSDTSNKNITAPIAKKIPHKMEIHNHHRVDNYYWMRDDQRSDEAVLKHLNDENNYADAMLAEQKSLQESLFEELKARIVKDDNTVPEKDGKYWYHSEINGEQEYSNYYRSTSFTGENKTLLLDVNDRAKDHEFYDLGDLSISPNDQLMTISEDIDSRRIYTIYFKDLNKSSDSDDPYLPDTLIETEGQIVWANDNKTVFYVKKDLETLLGTQVYRHKLGSPQSDDVLVYEEDDYSFYMSLDKSRDDSQIYICLHATESTHYLALSADEPDGEFDELFPYQEQHEYHADKMGEHFYIVTNFQAKNFKLMKAAISQVHDINNWQEVIPHRKDVLLEGIELFQNFTVVTEREHGQIRFIVHTTQGENAGHQYPLSFDDPCYFACLGDNPEPKSTTARLYYSSLTTPGSLFEFDLATGERKLLKQQKVLGDFTKEDYQSERLFITARDGTEVPVSIVYRSDTFQKDGSNPLLQYGYGAYGITIDPDFSSQTLSLLDRGFVYVIAHVRGSEMLGREWYETGKMAHKQNTFNDFIDVTKALVEQGYGAKDKIFASGGSAGGLLMGAVVNQAPELYLGIGAHVPFLDVLTTMLDESIPLTTNEYNEWGNPNEAQAYQSILAYSPIDNISAQHYPHILVTTGLHDSQVQYFEPMKWVAKMREFKTDDNLLLFKTDMEAGHGGASGRFKSLKEKALEMSFFISLLPK

SEQ ID NO: 38675 - DNA, 2160 bp, Colwellia psychrerythraea 34H
  CDS (1)..(2160): transl_table=11
atgtcacaaatcctatcaaagactaagctaagtttaatagtctcttctgccctgctaatagcagcgtgcagcaatcaaaataatgaagcaacaaatgccatgaacgatattaccgcgcctatagctaaaaaagttccccataaaatggttattcataatcatacgcgtgtcgatgattattactggatgcgtgacgatagtcgtaaaaatccagaggttttagcacatttagccgcagaaaatgattatatgaaagcccagcttcagcatactgaagcaatgcaagaaaagatctttcaagagattaaagcgcgtattgaaaaagacgatagttcagtaccaaccaaaaaaggttatttttactacgcgagtcaaatgcaaggtgaaaatgaataccctatatacgtaagatcatctgatttttcaggcagtaatcttgaagtattacttaacgtcaatgaattagccaaagcacacgattattatcaagtaagtggtttaagtgctagtccagatggcaagctactcgcttacggagaagataccgttagtcgtcgaatttataccgtacaattcaaagatatcgcgggtaaaacattacttgatgacagacttgaaggtaccaatggtggcattgtttggggtaatgacaataaaaccgtgtattacatcaaaaaagatccacaaaccttgttaggttaccaagtatttcgtcataccttaggcaccccccaagcgaccgatgaaatggtctatgaagaaagcaataaagcttattataccggcctgagtaaatctaaagatggcagcagtgtctttatttggcattcaagtaccgaagcaagcggagtttcagttattgatgctgataatgccaaagcaatgcctaaaaaattcattgaacgtgaagaaggtcatgaatactctatctctaagatgaatgactggtattacatcaatactaactggcaagcgactaactttcgtttaatgaaagtaaataaaaagcaccttggtgataaaacacaatggcaagatgtgattccagcaaatgatgcagttaagcttgaggattatgaattatttgctaatcaccttgtttatcaacaacgtgaaaatggcattagccgattgactattcaagaattatcaagcgggaaaaagcaacaacttagctttaatgatactgcgtacaccttatcgctatacggtaataatgaattgaaaaataataaattacgcctttattacactagttttactacgccaggaacacattacgatgtggacttaaatacccttgataagacgcaattaaagcaagcaaaagtattgggtgattttgacagtaataattatgcctctgagcgtatttttgttaaagctcgagatggtaaaaaagtaccggtttctttagtttatcgtaaagataaattcaaaaaagatggcactaacccattataccaatatgcctatggttcatacgggcacacaatcgatccttctttttcagtgagtcgattaagcctattagaccgtggttttgtctatgctgttgcgcatatccgcgggtcagaaatgctgggacgtccttggtatgaagacggtaagaagttaacaaaaatgaatacctttactgatttcattgatgtcactaaagacttaacagcacaaggttacggcgataaagaaaatgtcttcgcagttggtggtagtgctggcggtttactcatgggcgcagttattaatatggctccagagcaatacaaaggcattgccgcagcagtaccatttgttgatgtagtaacgactatgcttgatgaaagtattccactaacaaccaatgagttcaaagaatggggtaacccaaaagaaaaaacttattatgattatatgttgtcctattcaccttatgatcaagtgaaagcacaagactaccctaacattctagttactacaggattgcatgactctcaagtacaatacttcgagccaatgaagtgggtcgctaagttacgtgattataaaactgatgataatttattattgtttaaaactgatatggaagctggacacggtggtgcttctggccgctttaaacgcattcatgataccgctttacaatatagcttcttcattgacttgcttaataagagttaa

SEQ ID NO: 38676 - protein, 719 aa, Colwellia psychrerythraea 34H
MSQILSKTKLSLIVSSALLIAACSNQNNEATNAMNDITAPIAKKVPHKMVIHNHTRVDDYYWMRDDSRKNPEVLAHLAAENDYMKAQLQHTEAMQEKIFQEIKARIEKDDSSVPTKKGYFYYASQMQGENEYPIYVRSSDFSGSNLEVLLNVNELAKAHDYYQVSGLSASPDGKLLAYGEDTVSRRIYTVQFKDIAGKTLLDDRLEGTNGGIVWGNDNKTVYYIKKDPQTLLGYQVFRHTLGTPQATDEMVYEESNKAYYTGLSKSKDGSSVFIWHSSTEASGVSVIDADNAKAMPKKFIEREEGHEYSISKMNDWYYINTNWQATNFRLMKVNKKHLGDKTQWQDVIPANDAVKLEDYELFANHLVYQQRENGISRLTIQELSSGKKQQLSFNDTAYTLSLYGNNELKNNKLRLYYTSFTTPGTHYDVDLNTLDKTQLKQAKVLGDFDSNNYASERIFVKARDGKKVPVSLVYRKDKFKKDGTNPLYQYAYGSYGHTIDPSFSVSRLSLLDRGFVYAVAHIRGSEMLGRPWYEDGKKLTKMNTFTDFIDVTKDLTAQGYGDKENVFAVGGSAGGLLMGAVINMAPEQYKGIAAAVPFVDVVTTMLDESIPLTTNEFKEWGNPKEKTYYDYMLSYSPYDQVKAQDYPNILVTTGLHDSQVQYFEPMKWVAKLRDYKTDDNLLLFKTDMEAGHGGASGRFKRIHDTALQYSFFIDLLNKS

SEQ ID NO: 38677 - DNA, 2061 bp, Pseudomonas syringae pv. phaseolicola 1448A
  CDS (1)..(2061): transl_table=11
atgtccttctcgaatgcaacctccagcgccccgattgctcgcaaggccgacggttccgatccctatgcctggctacagaaccgcgacactgacgaggtgctcgactacctcaaggcggaaaacgcctggcaggagcagcaactggcagagcagaccgggttgcgcgaaaacctgtttcaggagatcaagggccgtatccttgaaaccgatctgtcactgccctccccttgggggccgtacctttattacacgcgcaccacacaaggcgatgaatacgcccgtcactatcgctgcccgcgcccggccgacgactccaataccgtggacgaaagctgtgaagaactgttgctggacccgaacgccatggccgatggcggcttcttttcgctgggcgcgttcagcatcagccccgaccatcagcgcctggcctacagcctggacaccagtggcgacgaggtgtaccagctttacgtcaaggaactgagcaccggccagatcagcagcctgccgtttgaggactgcgacggaagcatgacctgggccaacgacagccagaccctgtttttcggtgagctggacgagacccatcgccccggcaggctgcatcgccacacattgggcaatgcatcggcagagctggtgttcgacgagccggacggtcgattcttcctgcactgcttccgcagcagttccgaacgccaactgatcattctgctcaatagcaaaaccaccagcgaagcgtgggtgctggacgccgatcatccgcaacaggcattcacctgcctcgcgccgcgcagcgaagggcacgagtattatccggatcacgggctgctcgatggtgtgtggagctggttcatccgcagcaatcagagcggcatcaacttcgcgctgtatcacgcagcggaacaggccagtggcgccccggttcgcgaagactggcaaaccctggttgcgcacgatgacaaggtcatgctcgaaggcgtgagcctcaacaccaaggcgatcagtctgagcctgcgcgaaggcggcttgccgatcatcgaagtacgcccgcaggatctgcctgcctatcgcgtgcagttgcccgacgccgcgtacagcctgtatgtgcaggacaccctggagttcgacagcgacagaattcgcctgcgctatcagtcgctgaaccgtccggcacaggtgcgtcaactgaccctggccagcggcgagcaggtagtgctcaaggaaacgccggtgctgggcactttcaacgccgacgcctacgtcagccagcgtctgtgggcgaccgccagtgatggcactcaggtgccgatcagcctggtggtcaagcgcgaactggccggcaaggcgaccccgctgtatctgtacggctatggtgcctacggcgaaagcctcgacccgtggttttcccacgcgcgccttagcctgcttgaacgtggcgtggcctttgccatcgcccatgtacgcggcggtggcgagctgggcgaggcctggtatcgcaatggcaagcaggaacacaagcagaacaccttcggcgacttcattgcctgcgccgaacaccttgttgctcagggcctgaccagcgccgaacagcttgtgataagcggcggcagcgccggtggcctgctgatctgtgccgtgctcaatcagcgacccgagctgttcaaggcagcaattgccgaagtgccgttcgtcgatgtgctgaacaccatgctcgatccggacctgccgttgaccgtcaccgaatacgacgaatggggcaacccgcaggagcctgaggtctatgagcgcatcaagtcctacgcgccttatgagaacgtcagcgctgaggcgtacccggccatgctggtcatcgccggttacaacgacagccgtgtgcagtattgggaagccgccaaatgggtcgcgaagttacgcgcccgcaaaaccgacgataatctgctgctgctcaagaccgaactgggtgccggacacggcggcatgagcggtcgctatcaagggttgcgtgacgtggcgctggagtacgcgtttatcttcaaggtattgcagatcgccgaatga

SEQ ID NO: 38678 - protein, 686 aa, Pseudomonas syringae pv. phaseolicola 1448A
MSFSNATSSAPIARKADGSDPYAWLQNRDTDEVLDYLKAENAWQEQQLAEQTGLRENLFQEIKGRILETDLSLPSPWGPYLYYTRTTQGDEYARHYRCPRPADDSNTVDESCEELLLDPNAMADGGFFSLGAFSISPDHQRLAYSLDTSGDEVYQLYVKELSTGQISSLPFEDCDGSMTWANDSQTLFFGELDETHRPGRLHRHTLGNASAELVFDEPDGRFFLHCFRSSSERQLIILLNSKTTSEAWVLDADHPQQAFTCLAPRSEGHEYYPDHGLLDGVWSWFIRSNQSGINFALYHAAEQASGAPVREDWQTLVAHDDKVMLEGVSLNTKAISLSLREGGLPIIEVRPQDLPAYRVQLPDAAYSLYVQDTLEFDSDRIRLRYQSLNRPAQVRQLTLASGEQVVLKETPVLGTFNADAYVSQRLWATASDGTQVPISLVVKRELAGKATPLYLYGYGAYGESLDPWFSHARLSLLERGVAFAIAHVRGGGELGEAWYRNGKQEHKQNTFGDFIACAEHLVAQGLTSAEQLVISGGSAGGLLICAVLNQRPELFKAAIAEVPFVDVLNTMLDPDLPLTVTEYDEWGNPQEPEVYERIKSYAPYENVSAEAYPAMLVIAGYNDSRVQYWEAAKWVAKLRARKTDDNLLLLKTELGAGHGGMSGRYQGLRDVALEYAFIFKVLQIAE

SEQ ID NO: 38679 - DNA, 2070 bp, Anabaena variabilis ATCC 29413
  CDS (1)..(2070): transl_table=11
atgccctactctgaaaaatccctgaactatccactcagccacaaaattgatcaagttgatgattaccacggtaccttagtagcagatccttatcgttggttagaagatcctgactctgaaacaactagggcttggatcgaggcacaaaatcaagttacttttgcgtatttgggcgaagtttcgactagagagaaaattcaacaacgtcttaacaaactttgggattatgaaaagtatggaattccttttaaagaaggagaaaattatttttatttcaaaaatgatggcttgcaaaatcaaagtgttctgtatacgttgaaatctctggattctgaaccaagagttttactagaccccaacaaactttcggatgatgggactgttgctctttcaggtttagctatcagcgataatggcaagcttttggcgtacggtatagcaacttctggttctgattggcaagaatggaaggttattgatgtagaaactggtgcagattttccagatcatctcaattgggttaaattttccggtgcatcttggacgaatgataatcaaggttttttctatagtcgttatgacgaaccaaatgaaaaaactaaattggaagatgttaactattaccaaaagctatattatcatcagttgggtacaccgcaatctgaagacatactaatttaccaacgtcttgaccaaaaagaatggggttttaatggcgttgtcacggaagatggttgctatctgataatttcagtttggttgggtactgattccagaaatctagttttttataaagacttaactaaccccaatactgaagtcgtagaactaattgatcaatttgaagcagattatagtttcattgataatgatgagagtgttttctacttccgtactgacttggatgcaccacggggtagagtaattgctattgatatagctaatccggctaaagaaatatggcgagaaattatcccccaagctgaagcaactttagaaagtgtcaatatcttaaataatcagtttattgcaggttatttagaagatgcccgatcgcaagtgaaaatttttgacctcaacggtacattagttcggaatgtagaattaccaggattgggtgctgtagatggctttggtggtaagcgtggcgatacagagactttttacaaattcacgagttttactacaccaggaactatttaccgatataacttagtaacaggcaaaagcgaggtttttagagaaacaaatgtagattttaatcctgataattacgaaactaaacaagttttttatcaaagtcaagatggtacacaagtacccatgtttattactcataagaaaggcattcaattagatgggaataaccccacttatctttatgcctacggtggttttaatgtctcactcacgcccaatttttctgtaagtatgttggtatggatggaaatgggtggtgtttatgccatgccaaatatacgcggtggcggagagtatggcgaagaatggcatcaagcagggatgaaggataaaaagcaaaacgtttttgatgactttattgctgctgctgagtggttgatggcaaataattatacaaaaccggaaaaactagcgatcgctggtggtagtaatggtggtttattagtgggtgcttgcatgactcagcgtcctgagttattcggtgcagctttaccagccgttggtgtgatggatatgttacggtttcacaaatttaccattggttgggcttggactgctgaatatggttccccagataacccacaagagtttcctgcaatctacgcttattcgccactgcataatctcaaatcaggtacagcataccccgcaaccttgattaccaccgccgatcacgacgatcgcgttgtccccgcccacagcttcaaatttgccgcagctttgcaaactgctcacaatggtaatgcacctgtattaattagaattgaaactaaagctggacatggtgcaggtaaacctacggcaaagattatcgaagaagccgcagataaatgggcatttttagtgcgggctttagctgttgaggtttag

SEQ ID NO: 38680 - protein, 689 aa, Anabaena variabilis ATCC 29413
MPYSEKSLNYPLSHKIDQVDDYHGTLVADPYRWLEDPDSETTRAWIEAQNQVTFAYLGEVSTREKIQQRLNKLWDYEKYGIPFKEGENYFYFKNDGLQNQSVLYTLKSLDSEPRVLLDPNKLSDDGTVALSGLAISDNGKLLAYGIATSGSDWQEWKVIDVETGADFPDHLNWVKFSGASWTNDNQGFFYSRYDEPNEKTKLEDVNYYQKLYYHQLGTPQSEDILIYQRLDQKEWGFNGVVTEDGCYLIISVWLGTDSRNLVFYKDLTNPNTEVVELIDQFEADYSFIDNDESVFYFRTDLDAPRGRVIAIDIANPAKEIWREIIPQAEATLESVNILNNQFIAGYLEDARSQVKIFDLNGTLVRNVELPGLGAVDGFGGKRGDTETFYKFTSFTTPGTIYRYNLVTGKSEVFRETNVDFNPDNYETKQVFYQSQDGTQVPMFITHKKGIQLDGNNPTYLYAYGGFNVSLTPNFSVSMLVWMEMGGVYAMPNIRGGGEYGEEWHQAGMKDKKQNVFDDFIAAAEWLMANNYTKPEKLAIAGGSNGGLLVGACMTQRPELFGAALPAVGVMDMLRFHKFTIGWAWTAEYGSPDNPQEFPAIYAYSPLHNLKSGTAYPATLITTADHDDRVVPAHSFKFAAALQTAHNGNAPVLIRIETKAGHGAGKPTAKIIEEAADKWAFLVRALAVEV

SEQ ID NO: 38681 - DNA, 2067 bp, Anabaena variabilis ATCC 29413
  CDS (1)..(2067): transl_table=11
atgatgaataaggacaagatttcgcaaaatcaaatcacgccacccattgcggataaacagccccaagttttagaattgcatggcgatcgccgagtagataattacttttggatgcgcgatatagataatccaaaggtagtggcatatctagaagcagaaaattcatatacaaaagtcatgatgcagcacacagaaacgctgcaaaaaactctttataatgaaatgctctcacggatcaaggaaactgatttatccgtaccatatcgcaaggataattattattattattctcgaactgaagccggcaaagattatagaattcattgtcgaaaagaaggcaatttagatgctccagaagaagtacttttagacgagaatgagttagctgccggacacgatttttttgaattaggcatatttgctattagccccaatcatcaaatactagcctattcctatgacaccagtggttccgagcaatatacgcttttatttcttgacttaacaaaccgtgagttatatccagaaactattgctgatacttatttttctttttgttggtgtaatgataatcaaacatcattttatacaaaaattgatgcggcgaatcgtccttaccagctttttaagcacactttaggaacaccacctacacaagatcaattaatctaccatgaaccagatcatgcttatgctttatatgtagggaagacccgcagtcaagcatatatattgatgactttgcaaagcagcatcactacagaagttcactatttagatgccaataatcctgagagtaactttcagataatttatccacgggaacctggagtagaatatgacgttgagcatcatagtgattacttttatatagtcacaaataaagctgctacaaactttaaattagtaagaactcccctaactatgccatccaaggagaattggcaaactgttattccccaccgtgaagatgtgctgttatctggagttagcctgtttattaatcacttagtcatctatgaaagaaaagatggcttacaaactgctagagtacaaaatatatctacaggtagtgaaagtaatattattttcccagaaccaacttaccagttttatgaagggaataacccggaatttaatactaatattttgcggtttaattacacttctttgattacaccgccatctgtgtttgattatgatatggaaacccacgagcaggagttaaaaaaacagacagaagttctgggagactatgacaaaaatcaatatcagagtgagtggttacttgctactgctaaagatggtacacaaattcccatatcaattgtgtacaaaaaagggattgaaaaagatgggaaaaatcctttactgctgacaggttatggagcctatggtgcatcttatccggcatcgttttcatcagctagactagcattgctagaccggggtatagtgtttgctattgcccacattcgaggtggtgaagaaatggggcgcaagtggtatgaagatggcaaatttttacagaaaaagaacacctttacagattttatcgcctgtgctgagtatttaatcaacgaaggttggacaacaagcgatcgcctagctattacaggcggtagtgcaggtggtttattgatgggagcggtgattaatttgcgtcccgaattgtttaaagttgtagttgccgatgtaccttttgtagatgtagtgacaacaattttagatacatctttgcccttatcagcaatggagtgggaagaatggggtaatcctaacgataaagtctactatgagtatatgaaatcttactcaccctacgataatgtcgcagccaaagattatccccatttgttaattactgctggcttaaatgattctcgcgttaaatattgggaaccagccaaatggacagccaaactgcgagaactcaaaacagatgatcatgttctgttgttgaaaactaacatggatgcgggtcatagtggcgcatctggacgttatgaaagcctacgagaacttgcttttgagtatgcttttattttggatcgtttggggttgtag

SEQ ID NO: 38682 - protein, 688 aa, Anabaena variabilis ATCC 29413
MMNKDKISQNQITPPIADKQPQVLELHGDRRVDNYFWMRDIDNPKVVAYLEAENSYTKVMMQHTETLQKTLYNEMLSRIKETDLSVPYRKDNYYYYSRTEAGKDYRIHCRKEGNLDAPEEVLLDENELAAGHDFFELGIFAISPNHQILAYSYDTSGSEQYTLLFLDLTNRELYPETIADTYFSFCWCNDNQTSFYTKIDAANRPYQLFKHTLGTPPTQDQLIYHEPDHAYALYVGKTRSQAYILMTLQSSITTEVHYLDANNPESNFQIIYPREPGVEYDVEHHSDYFYIVTNKAATNFKLVRTPLTMPSKENWQTVIPHREDVLLSGVSLFINHLVIYERKDGLQTARVQNISTGSESNIIFPEPTYQFYEGNNPEFNTNILRFNYTSLITPPSVFDYDMETHEQELKKQTEVLGDYDKNQYQSEWLLATAKDGTQIPISIVYKKGIEKDGKNPLLLTGYGAYGASYPASFSSARLALLDRGIVFAIAHIRGGEEMGRKWYEDGKFLQKKNTFTDFIACAEYLINEGWTTSDRLAITGGSAGGLLMGAVINLRPELFKVVVADVPFVDVVTTILDTSLPLSAMEWEEWGNPNDKVYYEYMKSYSPYDNVAAKDYPHLLITAGLNDSRVKYWEPAKWTAKLRELKTDDHVLLLKTNMDAGHSGASGRYESLRELAFEYAFILDRLGL

SEQ ID NO: 38683 - DNA, 2076 bp, Novosphingobium aromaticivorans DSM 12444
  CDS (1)..(2076): transl_table=11
atgcagcgaatgactcttgccactcctcccgtcgcggcaaggaagccgcacagcttctcgcaccacggcctgaccgtttccgacgactatttctggctgcgcgatcccggctatccggacgtgaccgacaaggacgtgctggcccatctggaagccgagaacgcctggttcgagacgcgcatggccgcgcagaagccggtgatcgacaagctgttcaaggaaatgcgcgggaggatcaaggaagcggacaagtccgtgccgcagaaggacggcaatttcctctactggatcgagtacgaggacggcgccgaatacaagaagtggtggcgccgcccggtcggtgcgcccgatgacggcagcgccgacgaactgatcctcgacgaagtggcgctggccgagggcaaggaatacttccgcctcggcgccatcgcggtctccaacgacggaacgcgcctcgcctggtcggttgacgacaacggatcggagcgcttcaccgcgcggatcaaggtcatcgccaccggcgagatcctgcccgacgagattccgggcacgctgtcaggcctgatctgggtgaagaacgacaccgggctcgtctattcgctcgccaacgagaactggcgcaccgacaatgcgcggctgcactggatcggccagccgctggaaagcgacgtggaactctatcatgaggacgatgaagggtttcgcgtcagtgcggcgctttcggccaacgagaagtggctcatcatcgccaccggcgaccacgagaccggcgaggttcgcctcgtgcccgccaacgacccgctggcgccgccgctgctggtcaagccccggcagagaggcgtcgagtacgacgtggatgagcgcgagggcgtgctctacatccataccaacgacacccacgagaatttccgcctcgccactgcgccgctctctgacccgggcaactggacgacgctgatcgagggcacgcaggacttctacctgaccgggttcgagctgttccgcgacttctacatcgtggaaggtcgcgttcgcggcctcgatcgcatcgaggtgcgctactacgatgatccgaccaggatcgagcccatcgaatttcccgaggcgagctacgaagcctcgctgggcgacaatcccgaatgggcgatgcaggtgctgcgggtcggctacgaatcgatggtcagcccttcgtccgtattcgactacgacgtcgcaacccggcacctgacgctgctcaaggtgcaggaaatcccgagtggctacgacgcctcgctctacgagacgacccgactggagatcgcggcgcgcgacggcacgatggtcccggtcagcgtggtctggcgcaaggatcgtcagccgggcgggccgctgcatctctatggctacggcgcctatggcatcgccatcggcccaggcttctcgaccacccgcctcagcctggtcgaccggggcttcgcctatgccatcgcccatatccgcggcggcgacgaccttggccgggcatggtacaaggccggcaagctcgaggcgcggaccaacacgttcaacgacttcgtcgacgtggcgaaaggcctgatcgagcgcggcttcaccgaggccggaaaaatcagcatctcgggcggatcggccggcggcgagctgatgggcgcggtgatcaattccgaccccgacctgtggggcgcggtcgtggcgcacgttcccttcgtcgatgtccttgcgaccatgctcgacgaggatctcccgctgaccccgggcgaatggccggaatggggcaacccgatcgaggacaaggcggctttcgaactgatccggtcctactcgccctacgatcaggtcaagccgcaggcctatccgccactcatggtcaccgccgggctgaatgacccgcgcgtgacctactgggagccggccaagtgggtggcgaggctgcgcgagctgaagaccgacgagaacgagctgatcctcaagaccaacatgggcgcgggccacggcggcaagtcgggccggttcgagagcctgaaggagacggcggaggaattcgccttcatcctgtggcaactgggcgtcgcggcgtga

SEQ ID NO: 38684 - protein, 691 aa, Novosphingobium aromaticivorans DSM 12444
MQRMTLATPPVAARKPHSFSHHGLTVSDDYFWLRDPGYPDVTDKDVLAHLEAENAWFETRMAAQKPVIDKLFKEMRGRIKEADKSVPQKDGNFLYWIEYEDGAEYKKWWRRPVGAPDDGSADELILDEVALAEGKEYFRLGAIAVSNDGTRLAWSVDDNGSERFTARIKVIATGEILPDEIPGTLSGLIWVKNDTGLVYSLANENWRTDNARLHWIGQPLESDVELYHEDDEGFRVSAALSANEKWLIIATGDHETGEVRLVPANDPLAPPLLVKPRQRGVEYDVDEREGVLYIHTNDTHENFRLATAPLSDPGNWTTLIEGTQDFYLTGFELFRDFYIVEGRVRGLDRIEVRYYDDPTRIEPIEFPEASYEASLGDNPEWAMQVLRVGYESMVSPSSVFDYDVATRHLTLLKVQEIPSGYDASLYETTRLEIAARDGTMVPVSVVWRKDRQPGGPLHLYGYGAYGIAIGPGFSTTRLSLVDRGFAYAIAHIRGGDDLGRAWYKAGKLEARTNTFNDFVDVAKGLIERGFTEAGKISISGGSAGGELMGAVINSDPDLWGAVVAHVPFVDVLATMLDEDLPLTPGEWPEWGNPIEDKAAFELIRSYSPYDQVKPQAYPPLMVTAGLNDPRVTYWEPAKWVARLRELKTDENELILKTNMGAGHGGKSGRFESLKETAEEFAFILWQLGVAA

SEQ ID NO: 38685 - DNA, 2094 bp, Acidobacteria bacterium Ellin345
  CDS (1)..(2094): transl_table=11
atgcgtctcgctcttccgctactattgttagtgatgacgaacttgtcccccgctcaaaccgctacgccgcccgtcgccaagaaagaacccaagaccaccgagatcaacggtcacaccctcaccgacaattattactggctgcgcgataagccgaatccggaagtgcgcgcgtatcttgaggccgagaacgtgtacaccgattcggtgatgaagccgaccgagccgctgcagaaaaagctctatgacgagatgctgggccgcatcaaggaaaccgatgtggatgttccctatccgcaggatggttacttctattattcgcggacggaagccggcaagcagtatgcgatccgatgccggaaaaagggctcgctggatgcgccggagcaagtcgtcattgacgtgaacgaactggctaaaggaaagaagttcatgtcgctggcggaattcgagccgagcgacgacggcaacctgctggcgtactcgaccgacagcaccggcttccggcaatacgatttgtatgtgcgcgacatgcgcaccggccaggatcttccggaccacattgcaaaaaccggatcgatcgcgtgggcgaacgacaataagacgattttctacacggtcgaggattctgcgaagcggcaatatcgcgtgtacaagcacacggtgggtaacaccggcgccgacgatctgatctacgaagaaaaagatgagcgctacgacgtctatgtatggaagtcgcggagcaagggatacattttcctgagttcggcgagccatacgacgagcgaagcaaagtacatccgcgcagaccaaccgaacgcggagtggaagctgattgagccccgcaagcaggacgtgaagtacactcctgaccacaatggaaagttcttctatctaactgtgaacgacaccggggtcaactatcggctggtcaagacgccggtggacaatcccggcaaagcgcattggcaagaagtgattccgcagcgcgcggagaccatgctcaaccgcgcggaattcttcaaggacttctacgtgttgcatacgcgcgagaagggcctgccgctgctgcgcgtggtggatatcacaagcggcaaatcgaaggacattacgttccccgagcccgcgtacaacaccatgagctacatgaacgcggactacgacaccaagaagttccgttacatgtacacatcgttcatcacgccggtttcgacatatgaatacgacgtgaccaccggtgagtcgaagctgctgaaacagcgagaggtgcctaactacgacggcaccaaatacaaagttgagcagttgtatgcgcccgcacgagatggcgaaaaagttccggtctcagtgttgtacgcaaagacaacgaagctcgacggcaaagagccactctacctctatgcttacggttcttatggggcctcgattgacatcaacttcaactcgaatttcttctcgttggcggaccgcggcgtagttgtggcgattgcgcacattcgcggcggcggcgaaatgggcaaggcctggcacaatgccggtcgcatgatgaacaagaagaacacgttcaatgactttattgacagcgctgagtatctcctgaagaacaactacggcaccaaggacaagttggtgatcgagggccgcagcgccggtggcttgctgatgggcgccgtgctgaatatgcgtccggatctcttccatgctgcgattgtcggagtgccgttcgttgatgtaatcaacaccatgctcgacgagtcgttgccgctcacggtcggcgagtttgaagagtggggcaatccgaaggaaaaagccgccttcgactacatgtattcctactcgccttacgacaacatcgatgcgaagccctatcccaatatgctggtgaagacaagcttcaacgacagccaggtgatgtattgggagcccgctaaatacgtagcgaaaatgcgtgcgctgcgaaaagacgatcacctcgtaattctgaagacgaacctttcgcccgcggggcacggcggatccagcggacgctacgatcgcatccacgaattcgccttcgactatgctttcatcctcacgcagatgggaatcaacgaatag

SEQ ID NO: 38686 - protein, 697 aa, Acidobacteria bacterium Ellin345
MRLALPLLLLVMTNLSPAQTATPPVAKKEPKTTEINGHTLTDNYYWLRDKPNPEVRAYLEAENVYTDSVMKPTEPLQKKLYDEMLGRIKETDVDVPYPQDGYFYYSRTEAGKQYAIRCRKKGSLDAPEQVVIDVNELAKGKKFMSLAEFEPSDDGNLLAYSTDSTGFRQYDLYVRDMRTGQDLPDHIAKTGSIAWANDNKTIFYTVEDSAKRQYRVYKHTVGNTGADDLIYEEKDERYDVYVWKSRSKGYIFLSSASHTTSEAKYIRADQPNAEWKLIEPRKQDVKYTPDHNGKFFYLTVNDTGVNYRLVKTPVDNPGKAHWQEVIPQRAETMLNRAEFFKDFYVLHTREKGLPLLRVVDITSGKSKDITFPEPAYNTMSYMNADYDTKKFRYMYTSFITPVSTYEYDVTTGESKLLKQREVPNYDGTKYKVEQLYAPARDGEKVPVSVLYAKTTKLDGKEPLYLYAYGSYGASIDINFNSNFFSLADRGVVVAIAHIRGGGEMGKAWHNAGRMMNKKNTFNDFIDSAEYLLKNNYGTKDKLVIEGRSAGGLLMGAVLNMRPDLFHAAIVGVPFVDVINTMLDESLPLTVGEFEEWGNPKEKAAFDYMYSYSPYDNIDAKPYPNMLVKTSFNDSQVMYWEPAKYVAKMRALRKDDHLVILKTNLSPAGHGGSSGRYDRIHEFAFDYAFILTQMGINE

SEQ ID NO: 38687 - DNA, 2070 bp, Myxococcus xanthus DK 1622
  CDS (1)..(2070): transl_table=11
atgtcctacccggcgacccgggcggagcaggttgtcgacacgttgcacggcgtccaggtagcggacccgtatcgctggctcgaggacgagaaggcccccgaggtccagacgtggatgacggcgcagaacgcgcacgcccgcgaagcgctggcgaagttccccggccgtgaggccctggccgcgcgcttcaaggagctgttctacaccgactccgtctccaccccgtcgcgccgcaacgggcgcttcttctacgtccgcacccacaaggacaaggagaaggccatcctctactggcgccagggggagagcgggcaggagaaggtgctgttggatccgaacggctggagcaaggacggcaccgtgtccctggggacgtgggccgtgtcctgggacggcaagaaggtggccttcgcccagaagcccaacgccgcggatgaggcggtgctgcacgtcatcgacgtggactctggcgagtggtccaaggtggacgtcatcgagggcggcaagtacgccacgcccaagtggacgcccgacagcaagggcttctattacgagtggctgcccacggacccgtccatcaaggtggacgagcgccccggctacaccaccatccgctaccacacgctgggcacggagccgtcgaaggacaccgtggtgcacgagcgcaccggcgacccgacgacgttcctccagagcgacctgagccgcgacggcaagtacctgttcgtctacatcctccgcggctggagcgagaacgacgtctactggaagcggccgggtgagaaggacttccgcctgctggtgaagggcgtgggcgccaagtacgaggtgcacgcctggaaggaccgcttctacgtcctcaccgacgagggcgccccgcgccagcgcgtcttcgaggtggatccggcgaagccggcccgcgcgtcgtggaaggagattgtccccgaggactcgtccgcgtccctgctgtccgtcagcatcgtcggcgggcacctgtcgctggagtacctcaaggacgcgacgtccgaggtgcgcgtggccacgctgaagggcaagccggtgcgcacggtgcagctgccgggcgtgggcgcggcgtccaacctgatggggctggaggacctggatgacgcctactacgtcttcacgtccttcaccacgccccgtcaaatctacaagacgtccgtcagcaccgggaagtctgagctctgggccaaggtggacgtgcccatgaacccggagcagtaccaggtcgagcaggtcttctacgcgtccaaggacgggacgaaggtgcccatgttcgtggtgcaccgcaaggacctgaagcgtgacggcaacgcgcccacgctgctctacggctacggcggcttcaacgtgaacatggaggccaacttccgctcgagcatcctgccctggctggacgcgggcggcgtgtacgcggtggccaacctgcgcggcggcggcgagtacggcaaggcctggcacgacgccggccgcctggacaagaagcagaacgtcttcgacgacttccacgcggcggccgagtacttggtccagcagaagtacacgcagcccaagcggctggccatctacggcggcagcaacggcggcctgctggtgggcgcggccatgacgcagcggccggagctgtacggcgcggtggtgtgcgcggtgcccctgctggacatggtgcgctaccacctcttcggcagcggccggacctggattccggagtacggcacggcggagaagcccgaggacttcaagacgctgcacgcctactcgccctaccaccacgtgcggccggacgtgcgctaccccgcgctgctgatgatggcggcggaccacgacgaccgggtggaccccatgcacgcccgcaagttcgtggcggcggtgcagaactcgcccggaaacccggcgacggccctgctgcgcatcgaggccaacgcgggccacggtggcgcggatcaggtggccaaggccattgagtccagcgtggacctgtattcgttcctgttccaagtcctggatgtccagggggcacagggtggggtggcggcgcagggccgctga

SEQ ID NO: 38688 - protein, 689 aa, Myxococcus xanthus DK 1622
MSYPATRAEQVVDTLHGVQVADPYRWLEDEKAPEVQTWMTAQNAHAREALAKFPGREALAARFKELFYTDSVSTPSRRNGRFFYVRTHKDKEKAILYWRQGESGQEKVLLDPNGWSKDGTVSLGTWAVSWDGKKVAFAQKPNAADEAVLHVIDVDSGEWSKVDVIEGGKYATPKWTPDSKGFYYEWLPTDPSIKVDERPGYTTIRYHTLGTEPSKDTVVHERTGDPTTFLQSDLSRDGKYLFVYILRGWSENDVYWKRPGEKDFRLLVKGVGAKYEVHAWKDRFYVLTDEGAPRQRVFEVDPAKPARASWKEIVPEDSSASLLSVSIVGGHLSLEYLKDATSEVRVATLKGKPVRTVQLPGVGAASNLMGLEDLDDAYYVFTSFTTPRQIYKTSVSTGKSELWAKVDVPMNPEQYQVEQVFYASKDGTKVPMFVVHRKDLKRDGNAPTLLYGYGGFNVNMEANFRSSILPWLDAGGVYAVANLRGGGEYGKAWHDAGRLDKKQNVFDDFHAAAEYLVQQKYTQPKRLAIYGGSNGGLLVGAAMTQRPELYGAVVCAVPLLDMVRYHLFGSGRTWIPEYGTAEKPEDFKTLHAYSPYHHVRPDVRYPALLMMAADHDDRVDPMHARKFVAAVQNSPGNPATALLRIEANAGHGGADQVAKAIESSVDLYSFLFQVLDVQGAQGGVAAQGR

SEQ ID NO: 38689 - DNA, 2103 bp, Mesorhizobium sp. BNC1
  CDS (1)..(2103): transl_table=11
atgtccccccgctccccgttccctgccctgcccgcgccgaaagccgacaagcggcctgtcaccgacacccggcacggcttcacccgtactgacgagtacggctggctgagggccgggaactggcaggaggtgctcaggaatccggcggcgctcgcggacgatatccgtgcgcatctggaggccgagaacgcctatcacgaagccatgatggaagacacgaaggagctgcagaagctcctttttgccgagatgaaggggcgcatcaaggaagacgaaagctccgtcccgatgaaggatgggcccttcgcttacggcagcgcctatcgcaaaggcggtgagcacccgcgcttcttccgcacgccgcgggaaggcggcgcggaggatgtgctgctcgacggcgaccgggaggcggaaggcaagagctatttccatatcggcggcgtcgggcattcccccgaccaccgctatatgttgtggagcatcgacgacaagggctcggagttcttcacgctgcgcgtgcgcgatcttgagaccaagcgcgacttggccgaccacgtggagggcactaatggctcgggcacgttcacggccgacgcccgcggcttctattacacgcggctcgacgacaaccaccggccatcaaaggttttctatcatgcgataggcgcggattccgcccaagaccggctggtctatgaggaggccgaccccggctttttcatgaatgtgttcggcagccggctcgatgacttcatcttcatctcaatccacgaccatgagacaagcgagtatcgcatccttcccgccaatgaacctcatgccgagccgcgcatcgtggcgccgcgcgagcctgggatccgctacgatatcgagcccgcgggcgaagagttcttcatcctgaccaaccgcgacggcgcgaaggacttcaagatcatgacagcgccggcggcggacccctcgcccgccaactggcgcgagctggtgccgcacgagcctggccggctcataatgtccttcctcgccttcaaggactacctcgtgcgtcttgagcgcaaggatgggctgccgcgcatcgtcgttcgcgagcgcgccagcggcgaagagcatgtgatcgccttcgcggaggaggcctacgcgctcgccctttacggtgcctacgagtacgacacggatgtcttccgcttctcctattcttcgatgaccacgcccgcgcaggagttcgattacgacatgcgcacgcgcgagcgcgtcctcctgaagacgcaggaggtgccttcaggccataacccggaagactatgtgacgcgccgattgatggcgacagcacccgacggcgagcaggtgccgatctcgctcgtccaccgccgcgatctgccgctcgacggttcggcgccctgccttctttacggctatggcgcctatggcatcaccatcagcgcctccttccgcacaaatccgctatcgctggtcgaccgtggcttcgtctatgccatcgcccatatccgcggcggcaaggacaaaggttttgcctggtatgaggacggcaagcgggagaagaaggtgcataccttcaccgacttcatcgcctgtgcccggcacctcgtggcgcagggctatacgagccacgaccggctcgtcgccgaaggcggctcggcgggtggcatgctgatcggcgcagtcgcaaatatggcgccgaaggatttccgcggcctggtggcggcggtcccgtttgtcgacgtgctcaacacgatgctggacgaaacgctgccgctcaccccgcccgaatggccggaatggggaaaccccgttgcgagcaagcaggattacgaaaccatcgcgtcctattccccttacgataatgtacgcgcgcagccctatccggccatcctggcgcttgccgggctgacggacccgcgcgtgacctattgggagccggcgaaatgggtggcgcgcctgcgcgattacaacacgagcgaaaatcccatcctgctcaaggtcaatatggaggccggacatgccggagcctccggccgcttctcacgcctggaagagacggcgcttagctatgcgttcatgatgaaggcggtggggatggaggaataa

SEQ ID NO: 38690 - protein, 700 aa, Mesorhizobium sp. BNC1
MSPRSPFPALPAPKADKRPVTDTRHGFTRTDEYGWLRAGNWQEVLRNPAALADDIRAHLEAENAYHEAMMEDTKELQKLLFAEMKGRIKEDESSVPMKDGPFAYGSAYRKGGEHPRFFRTPREGGAEDVLLDGDREAEGKSYFHIGGVGHSPDHRYMLWSIDDKGSEFFTLRVRDLETKRDLADHVEGTNGSGTFTADARGFYYTRLDDNHRPSKVFYHAIGADSAQDRLVYEEADPGFFMNVFGSRLDDFIFISIHDHETSEYRILPANEPHAEPRIVAPREPGIRYDIEPAGEEFFILTNRDGAKDFKIMTAPAADPSPANWRELVPHEPGRLIMSFLAFKDYLVRLERKDGLPRIVVRERASGEEHVIAFAEEAYALALYGAYEYDTDVFRFSYSSMTTPAQEFDYDMRTRERVLLKTQEVPSGHNPEDYVTRRLMATAPDGEQVPISLVHRRDLPLDGSAPCLLYGYGAYGITISASFRTNPLSLVDRGFVYAIAHIRGGKDKGFAWYEDGKREKKVHTFTDFIACARHLVAQGYTSHDRLVAEGGSAGGMLIGAVANMAPKDFRGLVAAVPFVDVLNTMLDETLPLTPPEWPEWGNPVASKQDYETIASYSPYDNVRAQPYPAILALAGLTDPRVTYWEPAKWVARLRDYNTSENPILLKVNMEAGHAGASGRFSRLEETALSYAFMMKAVGMEE

SEQ ID NO: 38691 - DNA, 2130 bp, Rhodococcus sp. RHA1
  CDS (1)..(2130): transl_table=11
atgacctccgaaggcgcgaaactgaccccgccggtcgcgaagaaggtgcctaccgaacgcgtccaccacggtcacacgttcgtcgacgagtacgagtggctgcgcgacaaggaagacgccgaagtcgtcgcgtatctcgaggccgagaacgcgtacaccgagcagcagaccgcgcatctcgcgccgctgcgggaccagatcttccaggagatcaagtcgcgcacgcaggagaccgacatgtcggttcccacccggatgggcgactggtggtactacgcccgcaccatcgagggcaagcagtacggcgtccagtgccgggcaccgatcgccggccccgacgactggaccccgccggaactggctccgggtgtcgaactgcccggtgagcaggtgctgctcgacggcaacgccgaggccgaggggcacgacttcttctcgatcggcgctttctccctcagccacgacggcacgctcctcgcgtactcggtcgacgtggtcggcgacgagcgctacacgctgcgtttcaagaacctcgtgaccggcgaactgctgcccgacgaaatccccgagaccgcgccgggtgctacctgggccatcgaccacagtcacgtcttctatctcaccgtcgacgagtcctggcgccccgacaccgtgtggcggcacaagctcggcaccgaccgtgcgcaggacgtcactgtgttccacgagccggacgagcggttctgggtgtcggtcgggtccacgcggagcgagaagtacctcatgatctgggtggggtcgaagatcaccagcgaaggctgggtgctcgaatcggagaatcccgagggcgagttccgggtggtgctgccgcgacgcgagggcgtcgaatacggcgtggagcacgcggtcgtcgcgggggaagaccgcttcctgatcatgcacaacgacgtcgtcgacggtgagaaggccgagaacttcgtgctcgccgaggcgccggtatccgatccgacgtcgcagaccattctcatttcgcaccgctccgacgtgcggttggaggaggtcgacgcgttcgccgaccacctcgtgctcggttaccgccgggaggcgttgacccggctggccatctggccgctcggtgaggacggctacggcgagttcacggagatcgaattcgacgaggaactcttcagcgtcgggctcggggccaacccggaatggcggcagccgacactgcggatggcgttcacgtcgttcatcacgcccggccaggtgtacgactacgtgctgtcgacgggtgaacttgccctgcgcaagtcgcaacccgtgctcggcgaattcgacgccggaaactacgagcagcaacgcgactgggccgtcgccgaggacgggacgcgcatcccgctgtcgatcgtccggcggaagacgaacggcgtcgacgaccccgcccccacgctcctctacgggtacggatcgtacgaggccagcatggatcccgcgttctccgtcgcgcggctgtccctgctcgaccgtggagtggtgttcgtggtcgcgcacgtgcgcggcggcggcgagatgggcaggcactggtacgagaccggcaagacgctcacgaagaagaataccttcacagacttcgtctcgagcgcacagcatttgatcgacaccgggcgtaccacgccgcggcagatggtcgccgacggcggcagcgcaggcggcctgctgatgggtgcggtggccaacctggcccccgaactgttcgccggaatcctcgccaacgttcccttcgtggacccgctgacatcgatcctcgacccctcactgccgctgaccgtcatcgaatgggacgagtggggcaacccgctcgagaaccccgaggtctacgaatacatgcgctcgtacagtccgtacgagaacgtcgaggccaaggactacccggcgatcctcgcgatcaccagcatcaacgacacccgggtgctctacgtcgaaccggcgaagtgggtcgccaaactgcgcgccaccaagaccggcgactcgccgctcctcctcaagacggagatgagcgccgggcacggcggtgtcagcggacgctacgagaagtggaaggaagtagcgttcgaattcgcctgggtgctcgacacgatcggcgagtag

SEQ ID NO: 38692 - protein, 709 aa, Rhodococcus sp. RHA1
MTSEGAKLTPPVAKKVPTERVHHGHTFVDEYEWLRDKEDAEVVAYLEAENAYTEQQTAHLAPLRDQIFQEIKSRTQETDMSVPTRMGDWWYYARTIEGKQYGVQCRAPIAGPDDWTPPELAPGVELPGEQVLLDGNAEAEGHDFFSIGAFSLSHDGTLLAYSVDVVGDERYTLRFKNLVTGELLPDEIPETAPGATWAIDHSHVFYLTVDESWRPDTVWRHKLGTDRAQDVTVFHEPDERFWVSVGSTRSEKYLMIWVGSKITSEGWVLESENPEGEFRVVLPRREGVEYGVEHAVVAGEDRFLIMHNDVVDGEKAENFVLAEAPVSDPTSQTILISHRSDVRLEEVDAFADHLVLGYRREALTRLAIWPLGEDGYGEFTEIEFDEELFSVGLGANPEWRQPTLRMAFTSFITPGQVYDYVLSTGELALRKSQPVLGEFDAGNYEQQRDWAVAEDGTRIPLSIVRRKTNGVDDPAPTLLYGYGSYEASMDPAFSVARLSLLDRGVVFVVAHVRGGGEMGRHWYETGKTLTKKNTFTDFVSSAQHLIDTGRTTPRQMVADGGSAGGLLMGAVANLAPELFAGILANVPFVDPLTSILDPSLPLTVIEWDEWGNPLENPEVYEYMRSYSPYENVEAKDYPAILAITSINDTRVLYVEPAKWVAKLRATKTGDSPLLLKTEMSAGHGGVSGRYEKWKEVAFEFAWVLDTIGE

SEQ ID NO: 38693 - DNA, 2136 bp, Shewanella sp. MR-7
  CDS (1)..(2136): transl_table=11
atgcgcactctgctgcttactttaggtctcgctatgctattacccggttgctccactccaaaagggcaagtctatgcgcccgttgcggaaaaaattccccatgtgatgaccttgcacggggtcacacgtaccgacgattactactggatgcgtgacgataaacgccaagatcctaaggttttggcgcatctgaatgccgaaaaccgttatacccaagcctactttaagccgattaagtcattgcaggatgggctgtttaacgaactgactcaacgcctagttgccgacgagtcgagcgtgccttaccaatggcaccagcacagctattaccgccgctaccaagagggcggcgaatatccgctgatcgcccgcaaaggcagtgacggggttgagcaaatgatgctggacgtgaatgagcgcgccaagggccatgagttttatggtttaggtggcgtcagcgtcagcccagatgaaaccatgttggccttcggtgaagatgtgttaagccgccgcgtgtataacatctactttaaagatattgagtccggcgccatgatcaccgatgtgcttgaaaacactgagggtcgcatcgtttggggcaatgacaatcgccatgtgttttatatcgccaaggatctgcaaaccctgctgggttaccgcgtatatcgccatgaactcggcacgccacaatcgagcgatgtgttggtgtatgaggagcaagacgatgcttactacatctccctcggcaagagtttagacgagtcgcaaattgtgctgttccacgagagcacgacaaccagcgaagtgtcagtgctggatgctaacgatcccctaagcctgttcaaacctgtgctggcgcgggaagaaggccatgaatacagcgtctctaagctgggcgacagctattacattctgaccaactggcaggcaaccaacttccgtttgatgaaagtggtgattaaggatgccgccgataagtccaaatggcaggaagtggttgcccataatcctaatgcgcgcatcgaagacgagctagtgctgaaggattatttggtgattcaaacccgtgaaaatggtctgacacgcattaaagtgatgccattcaatggtcaaaagccctttgagctgagttttgacgagcccgcctatgtgctcggtttagatgttaacgctcagcaagatagtgataagttacggattttctactcgagcctgaccacgcccgaggcgatttatgagtaccacttaagcaatcccgatagacgcgatctgcttaagcaggaacaagtgctaggcggcttcgatgccagccaataccgcgccgaacgtttatttgtcaccgcccgcgatggcgctaaggtgccagtgtccttggtgtatcgtaaggataagttcaagaaagacggcaccaatcctctgtatcaatatggttatggttcctatggttacacagtagagcctgacttttcgtcgtcggttatcagtttgctcgaccgcggctttgtatatgccatcgcccatgtgcgcggcagcgaaatgttaggtcgcccttggtacgatgcgggcaaattactgaataaaaagaatacctttaatgactttatcgatgtcaccacagccttaaccgagcaaggttatggcgataaaaataaagtggtggcctcgggcggcagtgctggcgggctgttaatgggcgcgattgccaatatggcgcctgaaaagtactttgccattggagcacacgtgccctttgtggatgtggttacgaccatgctcgatgagtcgattccgctcaccaccaacgagtacgatgaatggggtaatccaaacgagaagacctatttcgactatatgctcagctactcgccctacgacaatgttgccgaccatgagtacccacacctgttggtcaccacaggtttgcatgattcgcaggtgcagtatttcgagcctgctaaatgggtagcaaaactgcgcgaagtgcaaaataaatggtacaaactggacgataaggtattgttattccacgtcgatatggatgcaggacacggtggtaagagtggtcgttaccgccagtaccaagacacagcgcaggaatatgccttcttcttaagcctgctaggcatgactaagtag

SEQ ID NO: 38694 - protein, 711 aa, Shewanella sp. MR-7
MRTLLLTLGLAMLLPGCSTPKGQVYAPVAEKIPHVMTLHGVTRTDDYYWMRDDKRQDPKVLAHLNAENRYTQAYFKPIKSLQDGLFNELTQRLVADESSVPYQWHQHSYYRRYQEGGEYPLIARKGSDGVEQMMLDVNERAKGHEFYGLGGVSVSPDETMLAFGEDVLSRRVYNIYFKDIESGAMITDVLENTEGRIVWGNDNRHVFYIAKDLQTLLGYRVYRHELGTPQSSDVLVYEEQDDAYYISLGKSLDESQIVLFHESTTTSEVSVLDANDPLSLFKPVLAREEGHEYSVSKLGDSYYILTNWQATNFRLMKVVIKDAADKSKWQEVVAHNPNARIEDELVLKDYLVIQTRENGLTRIKVMPFNGQKPFELSFDEPAYVLGLDVNAQQDSDKLRIFYSSLTTPEAIYEYHLSNPDRRDLLKQEQVLGGFDASQYRAERLFVTARDGAKVPVSLVYRKDKFKKDGTNPLYQYGYGSYGYTVEPDFSSSVISLLDRGFVYAIAHVRGSEMLGRPWYDAGKLLNKKNTFNDFIDVTTALTEQGYGDKNKVVASGGSAGGLLMGAIANMAPEKYFAIGAHVPFVDVVTTMLDESIPLTTNEYDEWGNPNEKTYFDYMLSYSPYDNVADHEYPHLLVTTGLHDSQVQYFEPAKWVAKLREVQNKWYKLDDKVLLFHVDMDAGHGGKSGRYRQYQDTAQEYAFFLSLLGMTK

SEQ ID NO: 38695 - DNA, 2238 bp, Hyphomonas neptunium ATCC 15444
  CDS (1)..(2238): transl_table=11
atgcgccttgctgcaaatctcgccggcctattggccgcctcaacatttttgactggatgcatgacagtgagccaagacactgaaacggccgcaaccctggccgccgaaacgccggccgccgcccagccggcgcccccgctggccccgcgcatcgatcacgagatcacgcaggttggccgcacacggaacgacccttacaactggctgaaggatgaaaactggcaggaggtgatgcgcgagccatcgctgctgcgcgccgacatccgcgactacctgctggcggagaacgcgttcaccaaagccgttctggaagacccgacggcggccctgcgcgaacaactgtttgccgaaatgcgcgggcgcatcaaggaagacgacacgtccgttcccgacattgacgggccgtgggcctattatacgcgcttccgcgagggcggcgagtatgccgtgtttgcgcggcgcccggcttccgatgcgttcaatgacgcggcgcccgagacgctgttgctggacggcgacgcgctgggcgaagggcaggactatttctccttcggtgacattgaggtgtcgcccgatcacaaattcattgcctatggcacggacctcaaaggcagcgaattctatgcgatccgcgtaaagaatatcgagacgggcgaggacaccggcgttctgatcgagaacgcctatggccccatggaatggagcgacaccggcaaggccatcttctgggtggcgcgcgattccaatgggcggccgaacgccgtttatcagcgcagcctggagagcggcgaagacacgctgatctatgaggagcaggaccccgctttcttcgtcagcatttcgacgaccgaaagcgaagaggtgatcctgatcaatgcgtcgggccatacgacctcggagatccactggttcccggccgatgagctgaaccccacgctgcgcacgattgcgccgcgccagacagatcacgaatattccgtgacccaatgggacggagaattctacatcgtcaccaatattgacggggcggtagactacaagctgatgaaggcgccgatggaagcgacctcgccggccgagtgggaagaagtcatcccgcatcgtccgggtacgctcatcatgggcatcacggcgcagcaggattacctgacgatcatggagcgcgaggacggcctgccgcgtatcgtcgtgcaggcgcgcgccgatggcgcgtctcactcgatcagctttgatgaggcggcctatgagctgggccttgagggcgggtatgattaccagacgccgatcctgcgctatgagtatgcctcgcccgcgacgccggatcaggtgtatgattacaatctgatcacgcgtgagaagaccctgcggaaaacccgcgaagtgccctccggccataatgcagcagactatgtggttgagcggatcatggcgccgtcctgggatggggcggaagttccggtcacgctgctgcgccataaggatacgccggtggacggcaccgcgccgctgcttctgtatggctacggatcatacggcatgtcgatgccggcggatttccgtaccggccggctcagcctcgtggatcgcggtttcgtctatgccattgcgcatattcgcggcggcatggagaagggataccagtggtatctcgacggcaagcttgagaagaagaccaatacgttcaaggacttcgtggcagcgggcgagcatctcgtcgcgcagggctatggcgccagagggcgcgtggttgcgcatggcggctcggccggtggtctgcttgtcggcgcagcggcgaacatggatccggaactcttcggtggcatcattgcagccgttccgttcgtcgatgtgctgaatacgatgtcggatgaaagtcttcccctgaccccgccggaatggcccgaatggggcaatccgctgacggatgaagcggcctatgagacgatcctggcctacagcccgtatgaccaggtgggtaacaagccctacccggcgatgctgatcaccggcggcgtgaccgatccgcgcgtcacctattgggagccggcaaagtgggcggcgaagctgcgccatgaagcgcccgaaggcgggccgtatttcctgcgcatcaatatggatgccgggcatggcggcgcgtcgggccgctttgaaggcttgaaggaagtggccacagagtacgcgttcgcgctggcggcagttggcaaagtcgatggcctgaggatcgagcgggaggagtag

SEQ ID NO: 38696 - protein, 745 aa, Hyphomonas neptunium ATCC 15444
MRLAANLAGLLAASTFLTGCMTVSQDTETAATLAAETPAAAQPAPPLAPRIDHEITQVGRTRNDPYNWLKDENWQEVMREPSLLRADIRDYLLAENAFTKAVLEDPTAALREQLFAEMRGRIKEDDTSVPDIDGPWAYYTRFREGGEYAVFARRPASDAFNDAAPETLLLDGDALGEGQDYFSFGDIEVSPDHKFIAYGTDLKGSEFYAIRVKNIETGEDTGVLIENAYGPMEWSDTGKAIFWVARDSNGRPNAVYQRSLESGEDTLIYEEQDPAFFVSISTTESEEVILINASGHTTSEIHWFPADELNPTLRTIAPRQTDHEYSVTQWDGEFYIVTNIDGAVDYKLMKAPMEATSPAEWEEVIPHRPGTLIMGITAQQDYLTIMEREDGLPRIVVQARADGASHSISFDEAAYELGLEGGYDYQTPILRYEYASPATPDQVYDYNLITREKTLRKTREVPSGHNAADYVVERIMAPSWDGAEVPVTLLRHKDTPVDGTAPLLLYGYGSYGMSMPADFRTGRLSLVDRGFVYAIAHIRGGMEKGYQWYLDGKLEKKTNTFKDFVAAGEHLVAQGYGARGRVVAHGGSAGGLLVGAAANMDPELFGGIIAAVPFVDVLNTMSDESLPLTPPEWPEWGNPLTDEAAYETILAYSPYDQVGNKPYPAMLITGGVTDPRVTYWEPAKWAAKLRHEAPEGGPYFLRINMDAGHGGASGRFEGLKEVATEYAFALAAVGKVDGLRIEREE

SEQ ID NO: 38697 - DNA, 2178 bp, Hyphomonas neptunium ATCC 15444
  CDS (1)..(2178): transl_table=11
atggctcatgcgtcaggattttcgcgccgcacgctgctgcagacgattgcgctgggcgcgctggccgggtgtgccgctggcgcgggcggcggcgccgcttttgcgccgggggcgattgccccacctgtggcgccgcgcattccgttccggatcgagcagctgggccgcgtgcgcgatgacccctaccggtggatgaagttcattcccgagacgggcacgcgggagatgcgcacgctgccggagatgatccgtacacatcttgaggcagaggcggcctatgccgacgccgtgctggcgccggcgcgcaagcttcagccggagatcattgcgcagatggttgcgcagctgcccggcaatgacgccccgccgccgatctgggcgggagactgggcctattcgagccattatccggaaggcagcgaacacgccgtttatacccggatttctgcccgcgaaggcgccgcgccggaagtgttgctggacgaggcggcgcgcgcgcaggggacggcttactatcgcaccacgggtcatcaggcgagcccggatcatcgctattatgcgtgggcagaggatgtgatcggcaatgaccgccaccggatctgcatgaaagacatgacgacggccgcggtgtctgtgctcgtaccggaagatgcctatggctatggcgggctggtgttcagcccgtcctcacgtttcctgttctggatctggcgggacgacaagaaccgcccgacgcggatttacagaacgcccgtcggcgggggcgaggctgttctggtgcatgaggaaaccaatccggcgctctttatgcagatcaaacggacggcagcgggcggctatatcgcgattacgctgtcggggccggatatgtccgaggtgtggctggttccggcagaggatgagacgggggcgccgcgtgtcgttttcccgcgccgggataaagtacgctatgagatagaggagtggaaagaggcactccttgtgctgactgatgaaggcggcgcgattgataacaagctgctgtcaatgccggcaggcgccgctacgccgcaggagacgctggtggcgcaccggccgggcagccagatactggaagtgtttcccttcgagaaggcgcttgtgcgcttagagcggcaggacggcctgcatcagctgatccttctgtttgcggatggatcagaaaaggtgatcggttttgacgaggccgcctatacgctgaccgtgccacaggggcaggcctacggcgcaggcgcgtgccgcatcacgttccagtcgccgcggctgcccgtacaatggatggatgtcgacctggaaaccggcgcgctgagccttgtgcagaaatctgatcgcgcggggtatgatccggaccaatatgttgtggagcgggtgtttgcgccggcgccggatggggcgagtgttccggtgacgctgctaagcaggcgcggggcggcgcgggatgggtcgatgccttgtgtgctctatggatatggtgcttacggcgtctccagcgatccggaattttccgtgccggcgctggcgctggtggatcggggctggacctatgcgatcgcccatgtgcgcggcggatcggagcgcgggcggcaatggttcctcgatgggcgccgcttcagcaagcgcaacagctttacagactttgtggcctgcgcggagcatctgattgatctgggcgtgacgcgcaagggcgcggttgtggcgtatggattgtcagctggcggattgctggtagccggtgcgatgaatgaggcgccgcacctttgggcgggtgtcatcgcgcaggtgccgttcgtggacatgctgaacacgatgagcgacgcggaccatccgctggtgccgctgttccggccggactggggcgatccgctggcagatccggaggcctatgactatatgttctcgatttcgccctatgagaatgttcaggccacggcctatccgccgctgctgtgcacgtccggcctgaaagatgaccgggtcggctattgggaggcggcaaagctcgtcgccgaagtgcgccacacgtcaaccggcgccgcgcccgcgatcctggtgctggatgctgatgcgggccaccagtccagcggcgggcgcggcgcccagtttcaggaaatgtctctctactgggcgttcgcggaactggccgtttcaggcgcgctttaa

SEQ ID NO: 38698 - protein, 725 aa, Hyphomonas neptunium ATCC 15444
MAHASGFSRRTLLQTIALGALAGCAAGAGGGAAFAPGAIAPPVAPRIPFRIEQLGRVRDDPYRWMKFIPETGTREMRTLPEMIRTHLEAEAAYADAVLAPARKLQPEIIAQMVAQLPGNDAPPPIWAGDWAYSSHYPEGSEHAVYTRISAREGAAPEVLLDEAARAQGTAYYRTTGHQASPDHRYYAWAEDVIGNDRHRICMKDMTTAAVSVLVPEDAYGYGGLVFSPSSRFLFWIWRDDKNRPTRIYRTPVGGGEAVLVHEETNPALFMQIKRTAAGGYIAITLSGPDMSEVWLVPAEDETGAPRVVFPRRDKVRYEIEEWKEALLVLTDEGGAIDNKLLSMPAGAATPQETLVAHRPGSQILEVFPFEKALVRLERQDGLHQLILLFADGSEKVIGFDEAAYTLTVPQGQAYGAGACRITFQSPRLPVQWMDVDLETGALSLVQKSDRAGYDPDQYVVERVFAPAPDGASVPVTLLSRRGAARDGSMPCVLYGYGAYGVSSDPEFSVPALALVDRGWTYAIAHVRGGSERGRQWFLDGRRFSKRNSFTDFVACAEHLIDLGVTRKGAVVAYGLSAGGLLVAGAMNEAPHLWAGVIAQVPFVDMLNTMSDADHPLVPLFRPDWGDPLADPEAYDYMFSISPYENVQATAYPPLLCTSGLKDDRVGYWEAAKLVAEVRHTSTGAAPAILVLDADAGHQSSGGRGAQFQEMSLYWAFAELAVSGAL

SEQ ID NO: 38699 - DNA, 2109 bp, Rhizobium leguminosarum bv. viciae 3841
  CDS (1)..(2109): transl_table=11
ttgtccgttttcaagagcctgccgacaccgcctgccgcaccgaagaagcccacctccgatacgcgccacggcatcacccgcacggacgactatgcctggctgcgcgccgacaactggcaggcgatgttcaaggatccgtcgattctcgaccctgagatccgccgccatctcgaagccgaaaacacctatatgaacgcggcgatggaggacaccaagcctctgcagaaggtgctgtttgccgaaatgcgcggccgcatcaaggaagacgacagctcggtgccgatgaaggacggcgcctatgcttacggcaccttttatgtcacaggcggcgaacagccgcgttatttccgcatcgcccgcgacggtaatgtcgccgacgaatcgattcgcacggtgctgctcgacggcgacaaggaggcggccggcaaggcctatttccgtctcgccggtctcgaccattcgagcgatcacggccgcggcatctggggctatgacgacaagggctcggaattcttcacgctgcaggtgcgcgacctttcgactgggcaagaccttgccgaccggatcgagaataccggcggcggaggcgtctgggcgcccgacggcaaaagcttcttctattcggcgctcgacgaaaaccaccggccgtcgaaggtgttccaccatattctcggccagccgcagtcggaagaccggctggtgtatgaggagccggatgccggcttcttcatgggcgtcggcggctcgctgctcgacgatttcatctatatcgacattcacgaccacgagaccagcgaataccggctgctgtcgaccaaggacctgacagccgagccgaagctggtggctgcgcgcgaggaaggcatcgaatattcgctgaccgagggcggcgacgtcttctacatccttaccaatgatggcggtgccaaggatttcaagatcatggaagcgccggtcgataatccggtcaaagagaactggcgcgaagtggtcgcccacaagcccggcacgcttgttatcagccacatggcctatgcccgccatcttctgtggctggagcgcaaggacgggctgccgcagatcatgatccgcgatcgggcgaccggcgaggaacatgcgatcgcctttgccgaggaagcctattcgctgggactgcagggtgcggcggaatacgacacggatatcatccgcttctcctattcctcgatgacgacgccgtcgcagctctatgactacaacatggtgacgcgcgagcgcacgctgttgaagacgcaggaagtgccgtccggccacaatcccgacgactacatcacgcgccgcgtctttgccccggcacgggatggcgagaaggtgccggtcaccctgctctatcgcaaggataccccactcgacggcagcgcgccctgcctgctctacggctatggcgcctacggcatcaccattccggccggcttcaacaccaattgcctgtcgctcgccgaccgcggcttcgtctatgcgattgcccatatccgcggcggcaaggacaagggtttttcctggtacgaagacggcaagatggacaagaagacgaacaccttcaaggacttcgtcgcagcggccgactatctgaatcaacagaagttcacgtcttacgcgaagatcatcgccgagggcggatcggccggcggcatgctgatgggtgcgattgccaacatggcgccggagaagttcgccggcctcatcgccgccgttcccttcgtcgacgtgctcaacaccatgctcgacgacactttgccgctcaccccgccggaatggccggaatggggcaacccgatcgacagcaaggaagaatacgagcagatcgcctcctactcgccctatgacaatgtcgacgcaaaagcctacccgcccatcctggcgctcggcggcctgaccgacccgcgcgtcacctattgggagccggccaagtgggtagcgaagctgcgcgacaagacgacgggcaacgcgccgatcctgctcaagaccaacatggacgccggccacggcggcgcctccggccgtttccagcggctggaagagatcgcctttgaatatgcgtttgcgatcaaggttgctggcaagatgtaa

SEQ ID NO: 38700 - protein, 702 aa, Rhizobium leguminosarum bv. viciae 3841
MSVFKSLPTPPAAPKKPTSDTRHGITRTDDYAWLRADNWQAMFKDPSILDPEIRRHLEAENTYMNAAMEDTKPLQKVLFAEMRGRIKEDDSSVPMKDGAYAYGTFYVTGGEQPRYFRIARDGNVADESIRTVLLDGDKEAAGKAYFRLAGLDHSSDHGRGIWGYDDKGSEFFTLQVRDLSTGQDLADRIENTGGGGVWAPDGKSFFYSALDENHRPSKVFHHILGQPQSEDRLVYEEPDAGFFMGVGGSLLDDFIYIDIHDHETSEYRLLSTKDLTAEPKLVAAREEGIEYSLTEGGDVFYILTNDGGAKDFKIMEAPVDNPVKENWREVVAHKPGTLVISHMAYARHLLWLERKDGLPQIMIRDRATGEEHAIAFAEEAYSLGLQGAAEYDTDIIRFSYSSMTTPSQLYDYNMVTRERTLLKTQEVPSGHNPDDYITRRVFAPARDGEKVPVTLLYRKDTPLDGSAPCLLYGYGAYGITIPAGFNTNCLSLADRGFVYAIAHIRGGKDKGFSWYEDGKMDKKTNTFKDFVAAADYLNQQKFTSYAKIIAEGGSAGGMLMGAIANMAPEKFAGLIAAVPFVDVLNTMLDDTLPLTPPEWPEWGNPIDSKEEYEQIASYSPYDNVDAKAYPPILALGGLTDPRVTYWEPAKWVAKLRDKTTGNAPILLKTNMDAGHGGASGRFQRLEEIAFEYAFAIKVAGKM

SEQ ID NO: 38701 - DNA, 2112 bp, Solibacter usitatus Ellin6076
  CDS (1)..(2112): transl_table=11
atgaagccgttccggaaatctattgttctcggccttctgactaccgcactcatgacttctcaaacaccgaaatccccggcaccgccggttgccccgcagctcgatcatcgcgaagtccgccatggcgccacggtcgttgacccgtatttctggctacgcgagaaggccaaccccaaagtggtcgagtacctggaatccgaaaatgcgtacaccgaggcgatgacgaaggagatcaagcccttcagcgacgccctctacaaggagatgctcgggcgcatcaagcagaccgacctctccgtccccgcgcgccgcggtccctacctctactactcgcgcaccgaggagggcaagcagtaccccatacaatgccggcgcaagggcagcatggacgcgcccgaagaagtgctgctcgatctcaacgagctcggcaaggacaagaagttcgtctcgctcggcagcttcacgatcagcgacgatcacaacctgctcgcctatacgatcgattacgtcggcttccgccaatacgcgctccacgtgaaggacctgcgcacgggcgccactctccccgacactaccgagcgcgtcaccaccgtggcttgggccgccgacaacaggacgcttttcctcactaccgaggacgacgtcaccaagcggagcgacaagcttttccgccacgtgctcggcgcctccgccttcgacctgctctacgaagacaaggatgagctctacgacgtcacgctcggcaagacgcgcgaccaccagtacctcatcctgctcagcgaatccaaagacaccagcgagaacctctacctgcgcgcgtccgatcctcaaggcagcttcgccgtcttcctgccgcgcgaaaacaagcaccgttattacctggatcatcgcgacggcgtcttctacattcgcaccaacaaaacgggcaaggatttcgcggtcatgaccgcatccgcgaaggatatcgcgcccaagaactggaagcccttcatcgcccaccaggagggtgtccgcatcgaagagatcgatctcttcaaggaattcgcagtctcggtcgagaagacgcaggccctcaaccgggtgcgcgtctacaactttaagaccggcgcgtggaccaccgtcgctttccccgagcccgtatactccgtctttccgggcggaacgctggatttcgattccatcacctaccggtacagctaccagagcctgatcaccccgcccagtgtcttcgactacgatacgcataccggaaaatcggccctgctcaagcagcaggaagtcctcggcggctacgacccgaagcagtatgcgagcgagcgactgtgggccaccgcgcgcgatggcgtcaaggtcccgatctccatcgtctacaagaaaggactcgtgcgcgacggcaagtcgccgctcttcctctatgcatacggttcgtatggcttcggcacgccgcctaacttctcgagcaatcggctgagcctgctcgatcgcggcatgacctacgccatcgcccacatccgcggcggcgacgaaatgggcgagcagtggcgcgaagacggcatgctcatgaagaagaagaataccttcttcgatttcatcgattgcgccgagtatctcatcaaagagaagtggacatccgccgcgggtctcgtgatcgaaggcggcagcgccggtggcctcctcatgggcgccgttgtcaacctgcgtcccgatctcttccgcgccgtccacgcggccgtcccgttcgtggacgtgatgaacacgatgatggacgcgaccctgccgttaaccgtcggcgagtacctggagtggggcaaccccaacgagaaaccggcgtacgattacatgaagacgtacagcccttacgacaacctcgagaagcgcggttacccggccatactggtgactacgagcttccacgatagtcaggtcatgtactgggagcccgccaagtacgtcgcccgcctgcgcacggtgaagacggattccaatccgctactcctcaaaatcaagatggatccagccggccacggcggcgcctccggccgctacgacaaactcaaagacactgccttcgaatacgcctggatgctgagtcaggtaggtagagccaaatag

SEQ ID NO: 38702 - protein, 703 aa, Solibacter usitatus Ellin6076
MKPFRKSIVLGLLTTALMTSQTPKSPAPPVAPQLDHREVRHGATVVDPYFWLREKANPKVVEYLESENAYTEAMTKEIKPFSDALYKEMLGRIKQTDLSVPARRGPYLYYSRTEEGKQYPIQCRRKGSMDAPEEVLLDLNELGKDKKFVSLGSFTISDDHNLLAYTIDYVGFRQYALHVKDLRTGATLPDTTERVTTVAWAADNRTLFLTTEDDVTKRSDKLFRHVLGASAFDLLYEDKDELYDVTLGKTRDHQYLILLSESKDTSENLYLRASDPQGSFAVFLPRENKHRYYLDHRDGVFYIRTNKTGKDFAVMTASAKDIAPKNWKPFIAHQEGVRIEEIDLFKEFAVSVEKTQALNRVRVYNFKTGAWTTVAFPEPVYSVFPGGTLDFDSITYRYSYQSLITPPSVFDYDTHTGKSALLKQQEVLGGYDPKQYASERLWATARDGVKVPISIVYKKGLVRDGKSPLFLYAYGSYGFGTPPNFSSNRLSLLDRGMTYAIAHIRGGDEMGEQWREDGMLMKKKNTFFDFIDCAEYLIKEKWTSAAGLVIEGGSAGGLLMGAVVNLRPDLFRAVHAAVPFVDVMNTMMDATLPLTVGEYLEWGNPNEKPAYDYMKTYSPYDNLEKRGYPAILVTTSFHDSQVMYWEPAKYVARLRTVKTDSNPLLLKIKMDPAGHGGASGRYDKLKDTAFEYAWMLSQVGRAK

SEQ ID NO: 38703 - DNA, 2136 bp, Shewanella sp. ANA-3
  CDS (1)..(2136): transl_table=11
atgcgcactctgctgcttactttaggtctcgctatgctattacccggttgctccactccaaaagggctagtttctgcgcccgttgcggaaaaaattccccatgtgatgaccttgcacggggtcacgcgcaccgacgattactactggatgcgcgacgataaacgccaagatcctaaggtgttggcgcatctgaatgccgaaaaccgttatacccaagcctactttaaaccgcttaagtcattgcaggatgggctttttaacgaactgactgggcgcctcgttgccgatgagtcgagcgtgccttaccaatggcaccagcacagttattatcgccgctaccaagagggcggcgaatatccgctgatcgctcgcaaaggcagtgacgggattgagcaaatgatgctggacgtgaatgagcgcgccaagggccatgagttttatggtttaggtggcgtcagcgtcagcccagatgaaaccatgctggccttcggtgaagatgtgctaagccgccgcgtgtatcacatctattttaaagatattgagtccggcgccatgatcaccgatgtgcttgaaaacacagagggtcgtatcgtttggggcaatgataatcgccatgtgttttatatcgctaaagatctgcaaaccctgctcggctaccgtgtatatcgccacgaactcggcacgccacaatcgagcgatgtgttggtgtatgaggagcaagatgatgcttattacatctccctcggcaagagtttagacgagtcgcaaattgtgctgttccacgagagcaccaccactagcgaagtgtcggtactggatgctaacgatcccttaagcctgttcaaacctgtgctggcgcgggaagaaggccatgaatacagcgtctctaagctgggcgatagctattacattctcaccaactggcaggcgacaaacttccgtttgatgaaagtggcgattaaggatgccgccgataaatccaaatggcaggaagtggttgcccataatcccaatgcgcgtatcgaagacgagctggtgctgaaggattatttgattattcaaacccgcgagaatggcctgacgcggattaaagtgatgccattcaatggtcaaaagccctttgagctgagttttgacgagcccgcctatgtgctcggtttagatgtgaacgcccagcaagatagcgataagttacggattttctactcgagcctgaccacgcccgaggcgatttatgagtaccacttaagcaatcccgatagacgcgatctactcaagcaggaacaagtgctcggcggcttcgatgccagccaatatcgcgccgaacgtttatttgttaccgcccgcgatggcgctaaggtgccagtgtccttggtgtatcgtaaggataagttcaagaaagatggcactaaccctctgtatcaatatggttatggttcatacggttacactgtagaacctgatttttcgtcgtcggtggtcagtctgctcgaccgtggctttgtgtatgccatcgcccatgtgcgcggcagcgaaatgctcggccgcccttggtacgatgcgggtaagttgctgaataaaaagaatacctttaatgactttatcgatgtcaccactgccttaaccgagcaaggttatggcgataaaaataaagtggtggcctcgggtggcagtgccggcgggctgttaatgggcgcgattgccaatatggcgcctgaaaagtactttgctatcgcggcgcatgtgccctttgtggatgtggtgacgaccatgctcgatgagtcgattccgctcaccaccaacgagtacgatgaatggggtaatccaaacgagaagacctatttcgactatatgctcagctactcaccctatgacaatgttgccgaccatgaatacccacacctgttagtcaccacaggtttgcatgattcacaggtgcagtatttcgagcctgcgaaatgggtagcaaaactgcgtgaagtgcaaaataaatggtacaaactggacgataaggtgttgttattcgaagttaatatggatgctggccacggtggcaagagtggccgttaccgccagtatcaagacacagcgcaggaatatgccttcttcttaagcctgctcggcatgactaagtag

SEQ ID NO: 38704 - protein, 711 aa, Shewanella sp. ANA-3
MRTLLLTLGLAMLLPGCSTPKGLVSAPVAEKIPHVMTLHGVTRTDDYYWMRDDKRQDPKVLAHLNAENRYTQAYFKPLKSLQDGLFNELTGRLVADESSVPYQWHQHSYYRRYQEGGEYPLIARKGSDGIEQMMLDVNERAKGHEFYGLGGVSVSPDETMLAFGEDVLSRRVYHIYFKDIESGAMITDVLENTEGRIVWGNDNRHVFYIAKDLQTLLGYRVYRHELGTPQSSDVLVYEEQDDAYYISLGKSLDESQIVLFHESTTTSEVSVLDANDPLSLFKPVLAREEGHEYSVSKLGDSYYILTNWQATNFRLMKVAIKDAADKSKWQEVVAHNPNARIEDELVLKDYLIIQTRENGLTRIKVMPFNGQKPFELSFDEPAYVLGLDVNAQQDSDKLRIFYSSLTTPEAIYEYHLSNPDRRDLLKQEQVLGGFDASQYRAERLFVTARDGAKVPVSLVYRKDKFKKDGTNPLYQYGYGSYGYTVEPDFSSSVVSLLDRGFVYAIAHVRGSEMLGRPWYDAGKLLNKKNTFNDFIDVTTALTEQGYGDKNKVVASGGSAGGLLMGAIANMAPEKYFAIAAHVPFVDVVTTMLDESIPLTTNEYDEWGNPNEKTYFDYMLSYSPYDNVADHEYPHLLVTTGLHDSQVQYFEPAKWVAKLREVQNKWYKLDDKVLLFEVNMDAGHGGKSGRYRQYQDTAQEYAFFLSLLGMTK

SEQ ID NO: 38705 - DNA, 2157 bp, Mycobacterium smegmatis str. MC2 155
  CDS (1)..(2157): transl_table=11
atgagcgagcagcagcctgtggaacccccggtcgccaagcggctcaaccaccgtcgtgagtaccacggcgatgtgttcatcgatccttacgagtggttgcgggacaaggacgaccccgaggtgatcggctacctggaggccgagaacgcctacaccgcgtccgtcacggcgcatctggagccgttgcggcagaagatcttcgacgagatcaaggcccgcaccaaggaaaccgatctgtcggtgccgatgcgtcgcgggccgtggtggtactacgcgcgcagcttcgagggtaagcagtacgccgtgcactgccggtgcccggtcagcgatcccgacgactggacgccgccgaccttcgacgagcacaccgaggttccgggcgagcagatcctgctcgacgagaacgtcgaggccgacgggcacgagtacttcgcgctgggcgccgcgacggtgagcctggacggcaacaccctggcctactcggtcgacgtcctgggtgacgagcggtacacgttgcggttcaaagaccttcacaccggtgagctgtacgacgacacgatcaccgggatcggtgcgggcggcatctgggcggccgacaaccggacgttctactacacgaccgtggacgacgcgtggcgcccggacaccgtgtggcgccaccgcctgggcgccggtctgccgggcgagcgggtgtatcacgaacccgacgaacggttctgggtcggcatcgggcgcagccgcagcgacaagtacgtgttcatcgccgcgggcagcgccgtgacatccgaggtgcgctacggcgacgcgaccgatccgcaggccgagttcacctcggtgtggggacgccgcgacctggtggagtactccgtcgagcacgcggtggtgggcggcgaggaccggttccttatcctgcacaacgacggcgccgagaacttcacgctggtcgacgccccggtcagcgatccgaacgacttccgcacgctcatcgcgcaccgcgacgacgtgcgactcgacgcggtcgacgcgttcgacgggttcctggtggtgagctaccgcagcgaggcgctgccgaagatccagctgtggccgatcgacgccaacggcgaatacggccgagcgcaggagatcacgttcgcctccgagctcaccgcggcgggcctggccggcaatcccaactggtcgacacccaagctgcgtatcgcggcgacgtcgttcatcaccccggcgcgggtgtacgacctggatctggcgaccggcgagcggaccctgcttcgcgaacagcccgtcctgggcggctaccgccccgaggactacgtggagcgccgcgactgggtgatcgccgaagacggtgcgcgcgtgcctatctcgatcgtgcaccgcgccggtgtgcagttcccggcgccgacgctgctctacggctacggcgcctacgagtcgtgcgaggatccgcgattctcgatcgcgcggctgtcgctcttggaccgcggcatggtgttcgcgatcgcgcacgtccgtggcggcggtgagctgggccggtcgtggtacgagcacggcaagctgctggagaagaagaacaccttcaccgacttcatcgcggtggcacgccatctcatcgaccaggggctcacgcgcccgcagaacctggtggcactcggcggcagcgcgggtggcctgctgatgggtgcggtggccaacatggcgccggacctgttcgccgggattctggcgcaggtgccgttcgtcgacgcgctcaccacgatcctggacccgtcgctgccgctgacggtcaccgaatgggacgagtggggcaacccgctggaggaccccgaggtgtaccggtacatgaagtcgtactcgccgtacgagaacgtcacgacgcaggactatccgccgatcctggcgatgacgtcgctcaacgacacccgcgtgtactacgtcgaaccggcgaaatgggttgccgcgcttcgtcacaccaagaccgacaacaacccggtgctgctcaagaccgagatggtggcgggccacggtgggctgagcggacgctacgagcggtggcgcgaggccgcgttccagtacgcgtggctactggccgccgccgatcgcgaccagtacggcagcggccaggtagacgccctcttcggcggtccggacacctag

SEQ ID NO: 38706 - protein, 718 aa, Mycobacterium smegmatis str. MC2 155
MSEQQPVEPPVAKRLNHRREYHGDVFIDPYEWLRDKDDPEVIGYLEAENAYTASVTAHLEPLRQKIFDEIKARTKETDLSVPMRRGPWWYYARSFEGKQYAVHCRCPVSDPDDWTPPTFDEHTEVPGEQILLDENVEADGHEYFALGAATVSLDGNTLAYSVDVLGDERYTLRFKDLHTGELYDDTITGIGAGGIWAADNRTFYYTTVDDAWRPDTVWRHRLGAGLPGERVYHEPDERFWVGIGRSRSDKYVFIAAGSAVTSEVRYGDATDPQAEFTSVWGRRDLVEYSVEHAVVGGEDRFLILHNDGAENFTLVDAPVSDPNDFRTLIAHRDDVRLDAVDAFDGFLVVSYRSEALPKIQLWPIDANGEYGRAQEITFASELTAAGLAGNPNWSTPKLRIAATSFITPARVYDLDLATGERTLLREQPVLGGYRPEDYVERRDWVIAEDGARVPISIVHRAGVQFPAPTLLYGYGAYESCEDPRFSIARLSLLDRGMVFAIAHVRGGGELGRSWYEHGKLLEKKNTFTDFIAVARHLIDQGLTRPQNLVALGGSAGGLLMGAVANMAPDLFAGILAQVPFVDALTTILDPSLPLTVTEWDEWGNPLEDPEVYRYMKSYSPYENVTTQDYPPILAMTSLNDTRVYYVEPAKWVAALRHTKTDNNPVLLKTEMVAGHGGLSGRYERWREAAFQYAWLLAAADRDQYGSGQVDALFGGPDT

SEQ ID NO: 38707 - DNA, 2181 bp, Nocardioides sp. JS614
  CDS (1)..(2181): transl_table=11
atgcagccctccctcgtcccacccgtcgccgagcgtcgcccgaccaccgccgagcaccacggccaccagcgggtcgacgactacgagtggctgcgcgccaaggaggcgcccgaggtgatcgcctacctcgaggccgagaacgtctacacccgcgagcgcaccgcccacctcgccgacctgcgccaggcgatcttcgaggagatcaaggcccgcacccgcgagaccgacctgtcggtgccgacccgcaaccgcggctactggtactacgggcgctcgttcgccggcaaggagtacggcgcgagctgccgggtcccggtcaccgacgctgaggactgggcgccgccgaagcccgcggaggacacccgcccggaccagccggcgctccccggtgagcaggtgctgctcgacctggacgcgctcgccgagggccatgagttcttctcgctgggcggctcctcggtcagcccggacggcacgctcctggcctacgcgaccgacgtcgtcggcgacgagcgctacacgatccgggtcttggagatcgacagcggcgaactgcgcaccgacgagatcaccggcgccctcggcggcgcgacctgggaccgcgcgggcgagagcttctactacacgaccgtcgacgagacctggcgcgccgacaagatctggcggcaccgcctgggcaccggccaggacgaggacgagctcgtccaccacgagaccgacggccgcttctgggtcggggtgggccggacccgcagcgaccgcttcctggtgatcgcctcgggctcgaagagcacctcggagtaccggttcctcgacgccgacgacccggacgcgggctggcgggtcttcgccgagcggcgcgagggactcgagtactccctcgagcacgcggtgctcgccggcgaggacgtcttcctggtgctgcacaaccacaccgggcccgacttcgagctcggcatcgcgccggtccggccgacccccgcggagcagtggcggccgctggtggcccacgaccccgccgtacgcctcgaggacgtcgacgcgttcgccggccacctcgtggtccaccagcgcagtgcgggcctcacccagctgcgcatcctcgagctcgacgacgccggcgtcagcgacgactacctcgtggagttcgaccgcgagatcttcaccgtcgggaccgccggcaaccccaacttcgcccagcccgtggtccggctcggctacacctcgctcgcggtgccgtcgtcggtctacgactacgacgtgcgcagccgcgagctgaccctgctgcggcgcgcgccggtgctgggcggctacgaccctgccgactacgaggagcaccggctctgggcgaccgccgaggacggcgcccgggtgccgatctccatcgtcgcgaagcgcggggcgcgcgaggacgtgggcggcggcaccggacccgtgccggtgctgctctacgggtacggcgcctacgagacgtcgatggacccgtacttctcgatcgcccgcctctccctgctcgaccgcggggccgcgttcgccatcgcgcacgtccgcggcgggggcgagatggggcggcggtggtacgacgagggcaagctgatgcgcaagcagaacacgttctccgacttcgtcgcgtgcgcccggcatctcgtcgccacgggctggaccacccccgaccggctggtcgccgagggcgcgagcgccggcggcctgctgatgggcgcggtcgccaaccaggcacccgagctgttcggcggcatcgtcgccggcgtgccgttcgtcgactcgctcaccacgatgctcgacgcgagcctgccgctgaccgtcccggagtacgacgagtggggcaacccggaggccgacgcggaggtgtacgagtacctggcgtcgtacgcgccgtacgacaacgtggccgccgtggactacccaccgatcctggcggagacctcgctcaacgacacccgggtgctctacgtggagcccgcgaagtgggtggcgcggctgcgggcgaccgccgtcgggcgacgcgacttcctgctgcgcaccgagatggcggcgggccacggtggggtgtccggacggtacaaggcctggcacgaccgcgccttcgcgctcgcctggatgctcgaccggatgggcctcgcggaccgcccgggcggggtccgcagccccgagatcccctga

SEQ ID NO: 38708 - protein, 726 aa, Nocardioides sp. JS614
MQPSLVPPVAERRPTTAEHHGHQRVDDYEWLRAKEAPEVIAYLEAENVYTRERTAHLADLRQAIFEEIKARTRETDLSVPTRNRGYWYYGRSFAGKEYGASCRVPVTDAEDWAPPKPAEDTRPDQPALPGEQVLLDLDALAEGHEFFSLGGSSVSPDGTLLAYATDVVGDERYTIRVLEIDSGELRTDEITGALGGATWDRAGESFYYTTVDETWRADKIWRHRLGTGQDEDELVHHETDGRFWVGVGRTRSDRFLVIASGSKSTSEYRFLDADDPDAGWRVFAERREGLEYSLEHAVLAGEDVFLVLHNHTGPDFELGIAPVRPTPAEQWRPLVAHDPAVRLEDVDAFAGHLVVHQRSAGLTQLRILELDDAGVSDDYLVEFDREIFTVGTAGNPNFAQPVVRLGYTSLAVPSSVYDYDVRSRELTLLRRAPVLGGYDPADYEEHRLWATAEDGARVPISIVAKRGAREDVGGGTGPVPVLLYGYGAYETSMDPYFSIARLSLLDRGAAFAIAHVRGGGEMGRRWYDEGKLMRKQNTFSDFVACARHLVATGWTTPDRLVAEGASAGGLLMGAVANQAPELFGGIVAGVPFVDSLTTMLDASLPLTVPEYDEWGNPEADAEVYEYLASYAPYDNVAAVDYPPILAETSLNDTRVLYVEPAKWVARLRATAVGRRDFLLRTEMAAGHGGVSGRYKAWHDRAFALAWMLDRMGLADRPGGVRSPEIP

SEQ ID NO: 38709 - DNA, 2094 bp, Nostoc punctiforme PCC 73102
  CDS (1)..(2094): transl_table=11
atgccctcatctacaaaacctatcacctacccatccagccacaaaagtaatcaaatcgataactaccacggtactttagtcacagattcttatcgttggttagaagaccctgactctgaagaaacaagggcttggattgaggcacaaaatcaaattacctttggctacttgagcgaaattcctgccagggaaaaaattaaacagcgcctcactaaactttgggattatgaaaaatatggtatcccttttaaagaaggcaagtctctgcaagacggttccaccgaacgctacttttattttaaaaataacggactgcaaaaccaaagtgtcctctacactctaaaaaccctcgacaatcaacctaaagttttactcgatcccaatcaactctcagaagatggtactattgctctttcaggattgtctattagcgagaatggtaaacttttagcttatggtctatcaacctctggttctgattgggaagagtggaaagtacgcgatgttgaaactggtgaagacctacaagatcatctgaagtggattaaattctctggtgcatcgtggacacataataatcaaggtttcttctacagtcgctacgacgagccgaatgaaaaaactcaattagaagatgttaactattatcaaaagctttactatcatcaactaggcaaacctcaatcagaagatgtactaatttatcatcgtcctgaccaaaaagaatggggttttagtggtggtgttactgaagatggacactatctaataatttctatttggctgggtactgactccaaaaatttggttttcttcaaagatttaactaaccctaatgctgaagtcgtagaattaattaaccagtttgaggcagattacagctttattgaaaatgatgatagcttcttttatttccgcacagatttaaatgcaccacggggaagagttattgcaattgacactcaaaaccctgcgtcagaaaagtggcgagaaatcattcctcaatcagcagaaaccttagaaagtgtaggcatactcaataaccaatttgttgctgattacctcaaagatgctcatagcgaaattaaaatctttgacctcaaaggcgggtttattcgtgaggtagaattacctggactcggttcagccggaggttttggaggaaaacgtcatgataccgaaactttttatagttacaccagctttactacaccaggaaccatctatcgctacgatatgataactggtaaaagtactgtttttcgccagccggaagtagattttaatcctaatgattatgagacaaaacaaattttttatcagagcaaagacggtactagagtacccatgtttattacgcacaaaaagggcattaaattagatggaaataaccccacttatctctatgcttatggtggttttaatgtctcaatgacacctagcttttctgtgagtctgttggtgtggatggagatgggtggtgtctatgctatgcccaatatacgcggcggtggagaatacggcgaagaatggcatcaagcaggaatgaaggagaaaaagcagaatgtctttgatgactttattggtgcagctgagtggttgattgctaataaatatactaagactgagaagctagcgatcgcaggtggtagtaatggtggcttattggtgggtgcttgtataacacagcgccccgatttgtttggtgcagcaataccctctgtcggcgtgatggatatgttgcggttccacaaatttaccatcggttgggcttggacttccgaatttggttcagcagataattcagaagagtttccagcgctgtatgcttattcgccactccacaacatcaaaccagatacagcttacccagcaactttaattaccacagccgatcatgacgatcgcgttgtccctgctcatagtttcaaatttgccgctgctttgcaagaagctcacgcaggtgatgccccagttttaattagaattgagactaaggcagggcatggtgcaggtaaacccactgctaaaattatcgaggaagccgcagataaatgggcttttttggtgcgtactttagatgtagaagtttaa

SEQ ID NO: 38710 - protein, 697 aa, Nostoc punctiforme PCC 73102
MPSSTKPITYPSSHKSNQIDNYHGTLVTDSYRWLEDPDSEETRAWIEAQNQITFGYLSEIPAREKIKQRLTKLWDYEKYGIPFKEGKSLQDGSTERYFYFKNNGLQNQSVLYTLKTLDNQPKVLLDPNQLSEDGTIALSGLSISENGKLLAYGLSTSGSDWEEWKVRDVETGEDLQDHLKWIKFSGASWTHNNQGFFYSRYDEPNEKTQLEDVNYYQKLYYHQLGKPQSEDVLIYHRPDQKEWGFSGGVTEDGHYLIISIWLGTDSKNLVFFKDLTNPNAEVVELINQFEADYSFIENDDSFFYFRTDLNAPRGRVIAIDTQNPASEKWREIIPQSAETLESVGILNNQFVADYLKDAHSEIKIFDLKGGFIREVELPGLGSAGGFGGKRHDTETFYSYTSFTTPGTIYRYDMITGKSTVFRQPEVDFNPNDYETKQIFYQSKDGTRVPMFITHKKGIKLDGNNPTYLYAYGGFNVSMTPSFSVSLLVWMEMGGVYAMPNIRGGGEYGEEWHQAGMKEKKQNVFDDFIGAAEWLIANKYTKTEKLAIAGGSNGGLLVGACITQRPDLFGAAIPSVGVMDMLRFHKFTIGWAWTSEFGSADNSEEFPALYAYSPLHNIKPDTAYPATLITTADHDDRVVPAHSFKFAAALQEAHAGDAPVLIRIETKAGHGAGKPTAKIIEEAADKWAFLVRTLDVEV

SEQ ID NO: 38711 - DNA, 2190 bp, Rickettsia sibirica 246
  CDS (1)..(2190): transl_table=11
atgaaaccaccaataacagacaaacaaaattacagctttgaagttcacgaaacaacaataaacgatgattatcactggctgcgtgatcctaagtggccaaatgtagaagactctaaaattttagattatttaaaagctgagaatcaatataccgaaaatttctttgccgatctgcaaaatgataaggaaaagatttttaaagaattaaaaggacgggttaaattagacgatgaatcggtttatgttaagaacaaagattattactattaccatagagtagaggagaataaaaattatccgatatattgcagaaagcatcataatatggagtcagcagaagaagtaatattagatgtcaaccttcttgctccaaatagcagttttactgatgttgctacagttgcaatgtcacctgatcacaatttaatggcttatagtgttaattttacaggtaatgaacaatacaatatcaaaatatacaaccttaaagaacaaaaatacttacctgatgaattaggcaatgtacagctaaatctcgatcgcttcagacaagatgaatttcaggataagcctgcggaacgtacaaatgtacgtgagcataggcgaatgccgcaaaattcgcttgtatcaagcgatcgagatttagctgtagctcctactataatttggcatgaacacttaaacggctttttctatattactattaatgagaatcaacgctgggataaggtaatgtttcaccttctaggtgaagaggtcactcaggataaattaatattcgaggtaaaaaaccctcttcattttatcagctgcaagaaatcagcaagtcataaatatatttttataaattcaggcgatcataatgaaaatgaaatttacgtaatttctatgcaggatgatagttttacgcctaaattagtacgagctgcagaaaacaaaatattctatgaaatagaatataatggcgattatttttatattaaaactaattataaagctaaaaatttccatgttataaaactgccggtaaataattttgaaaatactagctgggatgattgggatgatatttatattaaggaagaacaagacaaatatttaaaaagctttaatgttacaaataattatttaatcttaaactatcgtgaccaaggtttaccgctaattaaaataaagcgatttaaagatttacaagaaaatacaatttattttcccgacgaaagtttccaagcaagtagtttttctacaaactttgaggaagacgatatcagaatagattactcttctctagcaagacccaataccacttatagttacgattttaatagcgataaattaacgatattaaagagccacgaaataccttcaggctttaacccggaggagtataaagtagagagaatatttgcagataatgaagatgtaaaagtacctataaccttgttttataaaaaatctttatttaaaaaagacggttcaaatcctttatatctaatgggttacggtgcttatggcatcgctatgcccgtcaattttagaaatacagcagtgacacttgccgatcgcggttttatttacgcagttgctcatattagaggtggcgatgatctaggtcatgattggtatgaagctgctaagtttttaaccaaaaaaagaacatttgaagacttcatagcctgtagtagagctttaattaacgagcaatatacaagtaacaacaatatagtaataatgggcggtagtgccggcggtatgttaatcggttacatactcaacgaaaaaccggaaatctatagagcagcaatcgcgcatgtaccgtttgttgatgttttgaataccatgcttgacgaaagcttaccgttaactctcttggaatataatgagtggggtaatccgaaagagaaagaatattttgaatatattaaatcatattccccttatgataacgtaaaagcacaaaactaccctgctctattcgttacttgcggtatatccgacccacgtgtaggttactgggaacctgctaaatgggtagcaaaattacgagcactaaaaatggacaataatcccttattattaaaaacaaatatggatacgggacataaaggttctgccggtcgttttgattatctgaaagagatagctgacgaattagtatttatttttaaggtgtttgatgttgaggtttag

SEQ ID NO: 38712 - protein, 729 aa, Rickettsia sibirica 246
MKPPITDKQNYSFEVHETTINDDYHWLRDPKWPNVEDSKILDYLKAENQYTENFFADLQNDKEKIFKELKGRVKLDDESVYVKNKDYYYYHRVEENKNYPIYCRKHHNMESAEEVILDVNLLAPNSSFTDVATVAMSPDHNLMAYSVNFTGNEQYNIKIYNLKEQKYLPDELGNVQLNLDRFRQDEFQDKPAERTNVREHRRMPQNSLVSSDRDLAVAPTIIWHEHLNGFFYITINENQRWDKVMFHLLGEEVTQDKLIFEVKNPLHFISCKKSASHKYIFINSGDHNENEIYVISMQDDSFTPKLVRAAENKIFYEIEYNGDYFYIKTNYKAKNFHVIKLPVNNFENTSWDDWDDIYIKEEQDKYLKSFNVTNNYLILNYRDQGLPLIKIKRFKDLQENTIYFPDESFQASSFSTNFEEDDIRIDYSSLARPNTTYSYDFNSDKLTILKSHEIPSGFNPEEYKVERIFADNEDVKVPITLFYKKSLFKKDGSNPLYLMGYGAYGIAMPVNFRNTAVTLADRGFIYAVAHIRGGDDLGHDWYEAAKFLTKKRTFEDFIACSRALINEQYTSNNNIVIMGGSAGGMLIGYILNEKPEIYRAAIAHVPFVDVLNTMLDESLPLTLLEYNEWGNPKEKEYFEYIKSYSPYDNVKAQNYPALFVTCGISDPRVGYWEPAKWVAKLRALKMDNNPLLLKTNMDTGHKGSAGRFDYLKEIADELVFIFKVFDVEV

SEQ ID NO: 38713 - DNA, 2118 bp, Xylella fastidiosa Ann-1
  CDS (1)..(2118): transl_table=11
atgaacgtgactactgctgttgtaagtgctcctctccctcctgatatcgctaagcatgcccatgcgatcaaagcgccgtttggcgcaatccgcaatgataattattactggttacgtgatgacacgcgtacgaacaaggtggtgttgagttatctgaatgctgagaatgcgtatgccgacaaggtgttggaaccactcaagccgctacaggagaccttgtataaggagattgttgctcgcatcaagaaggatgatgccagtgttccgtaccggaaacacggttggttttactattccaggttcgaatccggtaaggattatccgattcatgcgcgtcgcaaagatggttctgggcttgatgctgccgcgatcctggcggcgaatgcgtccggtgactttgttggtgaacaagtgttactggacgttaacgcattggctgcaggtaagagttacttcagtgtggctcatgctgaggtgagtcctaatacgcatctgttggcttgggccgaggacggtgtaggtcggcgtcagtacacggttcgcttcaaaaatctggagactggggtgctttatccggatgaaatccatggtgcgtcgtctagcgtggtttgggctgacgataataagacgttgttctacattgagaatgatcctaaaacgctgctgactaagcgtgttagaaagcatgtgcttggtacccctgtcagtaccgatgtggtggtttatgaggagcacgacgatagtttctatatggacatcgaacgtacgcgtgatgagaaatacattgtggtttctatggaaagcacggtttcttccgaaatgcgttatgcacctgcggatctgtcgaaggggtttgtcgtgttggctcggcgtgagcgcgatgtgaaatatgggggagatcattttgacagtcgttgggtgatccgcacgaatgccgacggtgccaaaaattacaagttggtcactgcacccagtgatgcgactttgcgtagtcagtggcgtgactgggtcgtgcacgatccagcagtctttattgaggattttgagctgttcgacggttttactgcgatccaagagcgttctcagggcttggagcgggtgcgtctgctcaaggctgatggccaacacactgatgttgctgcggatgagccggcgtactcaatgggtctttctgagaatcccgagccggacaatccgtggctgcgttatacctatacttcgttaacgactccggcgacgacttatgagttcaacgtgcgtactggtgagcgtcgtcaactcaagccgcagcctgtgattggttacgatccgtcgcagtacgtcacggagcgtctgtgggtgactgcgcgggatggtgtgaaggtgccagtatcgctggtgtatcgcaaaggttttaagaaagacggcactgctgcgctgtatcagtacgcgtatggcagttacggtttgtccacagatccagggtttaatttgccagtggtcagcttgcttgatcgtggtgttgtctacgcgattgcgcacatccgtggtggtcaggagatggggcggcagtggtatgacgatggtaagttgctgcataagcagaatacgtttaatgattttattgatgtgacgcgggaattggttgcgcaggggtatgccgccaagggacgtgtggccgcggccggtggtagtgccggtggtttgttgatgggcgtggtggctaatcaggcgccgagtgattaccgtgtgatcgtggcgcaggtgccatttgttgatgtagtgacgacgatgttggacccgagtattccgttgaccaccaatgagtacgatgagtggggtaatcctgagcagaagacttattacgattacatgttgacgtattcgccttacgacaacgtggtgcatcaggcttatccagcgttgtttgttggcacggggttatgggattcacaggtgcagtattgggagccggctaaatgggtggctaagctgcgtgatgagaatacggggacgtttccgattgtattcagagtcaatatggatgccggtcatggtgggaagtctgggcgtttcaggcgttaccaggaattggctgagtcctatgctttcgtacttcaccatcttgaagtgaagtga

SEQ ID NO: 38714 - protein, 705 aa, Xylella fastidiosa Ann-1
MNVTTAVVSAPLPPDIAKHAHAIKAPFGAIRNDNYYWLRDDTRTNKVVLSYLNAENAYADKVLEPLKPLQETLYKEIVARIKKDDASVPYRKHGWFYYSRFESGKDYPIHARRKDGSGLDAAAILAANASGDFVGEQVLLDVNALAAGKSYFSVAHAEVSPNTHLLAWAEDGVGRRQYTVRFKNLETGVLYPDEIHGASSSVVWADDNKTLFYIENDPKTLLTKRVRKHVLGTPVSTDVVVYEEHDDSFYMDIERTRDEKYIVVSMESTVSSEMRYAPADLSKGFVVLARRERDVKYGGDHFDSRWVIRTNADGAKNYKLVTAPSDATLRSQWRDWVVHDPAVFIEDFELFDGFTAIQERSQGLERVRLLKADGQHTDVAADEPAYSMGLSENPEPDNPWLRYTYTSLTTPATTYEFNVRTGERRQLKPQPVIGYDPSQYVTERLWVTARDGVKVPVSLVYRKGFKKDGTAALYQYAYGSYGLSTDPGFNLPVVSLLDRGVVYAIAHIRGGQEMGRQWYDDGKLLHKQNTFNDFIDVTRELVAQGYAAKGRVAAAGGSAGGLLMGVVANQAPSDYRVIVAQVPFVDVVTTMLDPSIPLTTNEYDEWGNPEQKTYYDYMLTYSPYDNVVHQAYPALFVGTGLWDSQVQYWEPAKWVAKLRDENTGTFPIVFRVNMDAGHGGKSGRFRRYQELAESYAFVLHHLEVK

SEQ ID NO: 38715 - DNA, 2136 bp, Croceibacter atlanticus HTCC2559
  CDS (1)..(2136): transl_table=11
atgaaacaaatcctacttttcagtctagttatctttacttttgcatccgcttgtaaacaacctaaagacaataccttgaaaaatacaattcaacctccaatagctcagaaaattccagaaaatttagaaaagcacggagatcttagaatagataattattactggcttaaagacagagaaaatgaagaggtgatagattaccttgagcgtgagaatgattactatgagaaaatgactgcgcataccaaagagctacagtctaacttgtttgatgagatgaagtcaaggattaaagaagatgatagctctgtaccttataaatataatggctattggtatataactcgttttgagaaaggtaaagattatccaatatattctcgtaagaaagaaacattagatgctcaagaagaaattatattcgattgtaataaaatggcaaaaggccacagttattttaaattaacagcacttagcgttagtcctaataatgagttggtatcttatggtgtagatacagttagtagaaggcaatatactattcacgtaaaaaacttaagtactggagaaattttaaaagataaagtagcaaatactacaggcagttctgtttgggccaatgatagccaaacattattttacacaaaaaaagatccagaaacactacgttcttaccaaatacttaaacatgttttaggtaaaccaacagaagacgataatctcgtatttcaggaagatgatgatacgtttaatgcttatgtgtataaaacaaaatctaaagactatattattgtaggatcatctgcaacgcttacagatgaatttagaattttagatgccaatacaccagacggtcaatttaaattatttgcaccaagagaaagaggtttagaatatagtatatctcattttaaagacaacttttatattgttactaataaagataaagcagagaattttaaactcatgaaaacacctataggtaaaactgcgcaagaaaattgggtagatgttttaccacatagggaagatgttctcttagaagacatagacatttttaaagattaccttgttgtaagtgaacgtaaactaggattgtctcaaattagagtgatgcgttgggatgaaacagaagattattacttgccttttgataacgagacctatgcggcaggcgcaagtacaaatccagattttgatacagagattttaagatacggctatacttcgctcacaacaccatcttctgtggtagactttaatatgagaaccaaagagaaagaagtaaaaaaggaacaagctgtacttggtggtaagtttgcaaaagaaaactacatgtcagaacggctatgggcagtagcaagagatggaaaagaaataccaatatctatagtatataagaaaggtattaaaagagatggtaaaaaccctattttacaatatgcatatggttcttatgggtatacaatagacccaacattctctacaacacgattaagtttgcttgatcgcggttttatttttgcaatcgtgcacattcgtggtggtcaatatttaggtcgtcaatggtatgaagacggaaaatactttaataaaataaacaccttcacagacttcattgatgcaagctcatatttaatagatcagaaatatacttctccagatcatttgtatgctatgggtggttctgcaggaggattgttaatgggagcagttgctaatatggctccagagaaatacaatggtattgtagctgctgttccttttgtagatgtggttaccactatgttagacgactcaataccgctaacgacgggcgagtatgacgaatggggaaatcctaatgaaaaagattactatgagtatatgaagtcatattcaccttatgatcaggtgaaatctcaggaatacccaaatatgttagttacaacaggattacacgatagtcaagtgcaatactgggaaccagctaaatgggtggcgaaacttagagatttaaagacagatgccaatgtattgtatttagataccaatatggaagcaggtcatggtggtgcttcaggtcgttttgaagctcttaaggaaatagctaaagattatgcatttatattagacttagagggaattacagagtaa

SEQ ID NO: 38716 - protein, 711 aa, Croceibacter atlanticus HTCC2559
MKQILLFSLVIFTFASACKQPKDNTLKNTIQPPIAQKIPENLEKHGDLRIDNYYWLKDRENEEVIDYLERENDYYEKMTAHTKELQSNLFDEMKSRIKEDDSSVPYKYNGYWYITRFEKGKDYPIYSRKKETLDAQEEIIFDCNKMAKGHSYFKLTALSVSPNNELVSYGVDTVSRRQYTIHVKNLSTGEILKDKVANTTGSSVWANDSQTLFYTKKDPETLRSYQILKHVLGKPTEDDNLVFQEDDDTFNAYVYKTKSKDYIIVGSSATLTDEFRILDANTPDGQFKLFAPRERGLEYSISHFKDNFYIVTNKDKAENFKLMKTPIGKTAQENWVDVLPHREDVLLEDIDIFKDYLVVSERKLGLSQIRVMRWDETEDYYLPFDNETYAAGASTNPDFDTEILRYGYTSLTTPSSVVDFNMRTKEKEVKKEQAVLGGKFAKENYMSERLWAVARDGKEIPISIVYKKGIKRDGKNPILQYAYGSYGYTIDPTFSTTRLSLLDRGFIFAIVHIRGGQYLGRQWYEDGKYFNKINTFTDFIDASSYLIDQKYTSPDHLYAMGGSAGGLLMGAVANMAPEKYNGIVAAVPFVDVVTTMLDDSIPLTTGEYDEWGNPNEKDYYEYMKSYSPYDQVKSQEYPNMLVTTGLHDSQVQYWEPAKWVAKLRDLKTDANVLYLDTNMEAGHGGASGRFEALKEIAKDYAFILDLEGITE

SEQ ID NO: 38717 - DNA, 2163 bp, Erythrobacter sp. NAP1
  CDS (1)..(2163): transl_table=11
atggcgagcgctgccctgctcatgacaggcgcgagcgtttccgccgacacccatgaggataacgccaacgtgcccacttctccgcccgtcgccgaaaagcgcgaacacacatacacctatcacgggatcacgatttccgacccgtatgactggctctacgacaagtcctatcccgagatcgatgacgaggacgtgctcgattatgtgaaggcggaaaacgcatggttcgaagcggcgatgaagccgcacgaggcgctgaccgagagcctgttcaccgagatgcgcgcgcggatcaaggaagacgattccaccgtaccgcaacgtcgcggcgactatctctactggtccgaattcgaagagggcgcgcagtatcgcaagcattaccgcaagcctgtcggcgcgcccgagagtgccgagccgcagctgattctcgaccagaatgcgcttgccgaaggtcacgagtatttccgtctcggcgcgctctcggtcagcaagagcgggcgctacatcgtctacgccaccgacacgaatggctcggagcgctacaccgcgcggatcaaggatcttgagaccggcgaattgctcgatgacgtgctcgaagggctgcgcggcgggcttacctgggtcgcgaacgacacggcgctagcctacacgcccgcgaccaaggagtggcgcacgctcgaggtgaagctgcacacgatcgggcagcccaacgataccgatgtgaccctcttcaccgaagaggaccagagcttcagcgtcggagccggactatcggcgcaggaagactatctcatcatctcgaccggcgacaacgagacgagcgaggtgcgcttcgtctccgcagccgatcccatgggcgaactcacgctcatcaaaccgcgcgagaagggcgtcgaatacggcgtcgacattcgcgagggcgagctgtgggtgtggaccaatgacgaccacatcaatttccgccttgcaaaggccgacctcgacacgcccggcgactgggataccgtgctcgcgggatcggacgatttctacctcaccgatttcgacctgttccagggcttctttgttaccgaggggcgcctcaacggcctcgatcaggtacagatccgctcttacgagaacccgacgaaggcggaccccatcgcctttcccgaagcgagctatgatgcagggctttcgaacaatccggaatacgaccagacggtgctgcggctttcttatgagagcatgatcacgcctgacacggtgctggattatgacgtggcgacgaagacgctgacgacgctcaagacgcaggagattccgagcggctacgatccgacgcaatatgtaaccgagcgggttgagattcaggcgcgcgatgggacaatggtcccggtcagcatcgtgatgcgcaaggatcgcgcgcagatcctcgctgaggccgggatcgaggggccgggaccgctgcatctctatgcctatggcgcctatggctatgccatcccgccgggcttttcaaccacgcgcttaagccttgttgatcgcggcttcgcctatgccatcgcgcatattcgcggcggcgatgaccttggccggcgctggtatctgcaaggcaagatgttcgagcgcaccaacaccttcaacgacttcgtcgatgcagggcgcgggctcatcaagatgggctacaccgccgaaggcatggtcaccgcctcaggcggatcggctggcggagaactgatgggcgcgatcgtgaaccaggacccggcgcaatacggcgcgatcgtcgcgcatgtgccctttgtcgacgtactcaacacgatgctcaatgaaagcctgccgctgacgccgggcgaatggcaggaatggggcaatccgatcgagagcaaggagagctttgcctacatcctttcctactcgccatacgatcaggtgaaggcgcaggactatccgccgatgctggtgaccgcaggcctcaacgaccctcgtgtaacctattgggagcccgccaagtgggtcgcgaaactgcgcgataccaagaccgacgacaatgtgttgctgatgaagaccaatatgggcgcaggccatggcgggcaatcgggccgttggaattccctgcgcgaaaccgcagaggagttcgcctttatcctttggcagatggggatgacacaagagccatga

SEQ ID NO: 38718 - protein, 720 aa, Erythrobacter sp. NAP1
MASAALLMTGASVSADTHEDNANVPTSPPVAEKREHTYTYHGITISDPYDWLYDKSYPEIDDEDVLDYVKAENAWFEAAMKPHEALTESLFTEMRARIKEDDSTVPQRRGDYLYWSEFEEGAQYRKHYRKPVGAPESAEPQLILDQNALAEGHEYFRLGALSVSKSGRYIVYATDTNGSERYTARIKDLETGELLDDVLEGLRGGLTWVANDTALAYTPATKEWRTLEVKLHTIGQPNDTDVTLFTEEDQSFSVGAGLSAQEDYLIISTGDNETSEVRFVSAADPMGELTLIKPREKGVEYGVDIREGELWVWTNDDHINFRLAKADLDTPGDWDTVLAGSDDFYLTDFDLFQGFFVTEGRLNGLDQVQIRSYENPTKADPIAFPEASYDAGLSNNPEYDQTVLRLSYESMITPDTVLDYDVATKTLTTLKTQEIPSGYDPTQYVTERVEIQARDGTMVPVSIVMRKDRAQILAEAGIEGPGPLHLYAYGAYGYAIPPGFSTTRLSLVDRGFAYAIAHIRGGDDLGRRWYLQGKMFERTNTFNDFVDAGRGLIKMGYTAEGMVTASGGSAGGELMGAIVNQDPAQYGAIVAHVPFVDVLNTMLNESLPLTPGEWQEWGNPIESKESFAYILSYSPYDQVKAQDYPPMLVTAGLNDPRVTYWEPAKWVAKLRDTKTDDNVLLMKTNMGAGHGGQSGRWNSLRETAEEFAFILWQMGMTQEP

SEQ ID NO: 38719 - DNA, 2016 bp, Pseudoalteromonas tunicata D2
  CDS (1)..(2016): transl_table=11
atgacccatcaccaacatagtcgctgtgataattattattggatgcgagatgatgaacgacaagaccctaagattattgcccacttagaggccgaaaatgcgtattgtgatgcgcaaatgagtccttatcaggagcttgagcaagatttatttaccgaattaaaaggccgtattgtcaaagacgacagtacagtgcccgtcaaagatggcgcctattggtacagctcagaaattagcggtgaagaggaatttgcccgttattaccgcgccgatgatggtcatgcaaccaataagcaattgttactcgatagtaatacgttggcgcaagagcatgaatattacgatttgggcgagttttctattagccctaatgatcaattactatcgtactcagaagatactgatagccgtcgcatttacaccattcgttttaaagatttaaccaccaacacattgcttgatgacgtactcgaaaataccgaaggccaagcggtgtgggccaatgacaataaaacggttttttatgtcaaaaaagatttaaaaactttacttggctcacaagtgtatcgccatgtattaggcacctctcaagccgatgatgttttagtttttgaagagcaagacgacagcttttttatgggtttgggtaaaagccgtgatgaaagcttgataatgcttgatttagaagcgacagaaaccagcgatacgtgggtgctcgatgccaataattgtcatggtgagtttgtgcaattgtgcccgcgagtcaaaggccacgaatacgatgccgacaaattaggcgataccttttacatagtcaccaactggcaagctaaaaactttcgtttaatgacggctaataatacgacaattcatcagcaggcgttatggcaagaacttatagcgcatcgtgatgatgtcatgttggaatgtgttgagttatttaatgagtttaaagttgtcactgagcgcgaaaaaggacaaattcggtttgtggtttatcaagctgatggcagctcgtatccacttgaatttaacgatgcatgttattacgctgggctaggtgaaaacccagagccagacagtaataaagcccgtttatattactccagtttaacaacaccgggttcattgttagagtttgatttagcgacagggcaaagtactgtgctaaagcagcaaaaagtactgggagattttgacagtgcgctgtaccaagctgagcgtatttttattaaagcacgcgatggcgttgaagtgccggtatccttggtttatcgcaaagatatgtttggcaaaaatggccaaaacccaatgctattaaatggttatggggcttatggcattacctttgatgccagcttttcggtcaatgcattaagtttactcgaccgtggttttgtttacgccattgcccatattcgtggctccgaaatgttgggccgagattggtacgagcaaggtaaaaaagcgcataaacaaaatacctttaatgattttgtcgatgttacacaagccttagtgcagcaaggttatgcccacgcagataaagtatttgcttctggtgccagtgccggtggtttattgatgggggcagtagcaaatcaagcgcctcatttgtacaaaggtatttgttgtcaggtgccttttttagatgtgctcaccaccatgcttgatgagagtattccactcacaaccaacgaatatgacgaatggggtaatccaaatgatgttgatgcctacaagacgattttggcctattcgccatacgataatattcgcgcgcaagattaccccaatattttagtgacaaccggttttcatgattcgcaggtgcaatactgggagccgatgaagtgggtggcgaaattacgtgaattaaaaaccaataataatttattactgtttaaaaccgatatggatgcaggccacggaggtgcatccggtcgttttaatcgcttaaaagaagaggccttagagctggccttttttattggtttgttacaagacaagaaataa

SEQ ID NO: 38720 - protein, 671 aa, Pseudoalteromonas tunicata D2
MTHHQHSRCDNYYWMRDDERQDPKIIAHLEAENAYCDAQMSPYQELEQDLFTELKGRIVKDDSTVPVKDGAYWYSSEISGEEEFARYYRADDGHATNKQLLLDSNTLAQEHEYYDLGEFSISPNDQLLSYSEDTDSRRIYTIRFKDLTTNTLLDDVLENTEGQAVWANDNKTVFYVKKDLKTLLGSQVYRHVLGTSQADDVLVFEEQDDSFFMGLGKSRDESLIMLDLEATETSDTWVLDANNCHGEFVQLCPRVKGHEYDADKLGDTFYIVTNWQAKNFRLMTANNTTIHQQALWQELIAHRDDVMLECVELFNEFKVVTEREKGQIRFVVYQADGSSYPLEFNDACYYAGLGENPEPDSNKARLYYSSLTTPGSLLEFDLATGQSTVLKQQKVLGDFDSALYQAERIFIKARDGVEVPVSLVYRKDMFGKNGQNPMLLNGYGAYGITFDASFSVNALSLLDRGFVYAIAHIRGSEMLGRDWYEQGKKAHKQNTFNDFVDVTQALVQQGYAHADKVFASGASAGGLLMGAVANQAPHLYKGICCQVPFLDVLTTMLDESIPLTTNEYDEWGNPNDVDAYKTILAYSPYDNIRAQDYPNILVTTGFHDSQVQYWEPMKWVAKLRELKTNNNLLLFKTDMDAGHGGASGRFNRLKEEALELAFFIGLLQDKK

SEQ ID NO: 38721 - DNA, 2196 bp, Pseudoalteromonas tunicata D2
  CDS (1)..(2196): transl_table=11
atgatcatcatggctcaaaaatactcttttttactcagtgtaatctcccttgctgtattgagtgcttgcacagagcaaccggctaacttacaagcttcatctcccactacagaggttgtttcagcaacaacatccgtcgctcttgcgccagtagctaaaaaagtaccgtatgaaatggaaattcatggtgataaacgtatcgataactactattggatgcgtgacgataaacgtgaagaccctgagatccttgctcacctagccgcagaaaatgattataccaacgcccaattagcacataccgaaaaactacaagctgaattatttgaagagctgaaagcgcgtattgaaaaaaatgatgactcagtacctgtgaaaaaaggccagtatttttactcaactgaaatgcgtggtgataacgaatacccaatttatgtgcgcagtactgatgtgagtggtaccaataaagaaatactgttagatgttaatacattggcaaaagatcatgcttattatcaagtatcaggtttagatgtcagtccaaatggacagttaatggcgtttggtgaagacaaagtgagtcgccgcgtttacagcgtaaaatttcaagacttagcctcaaaagctatgttgccagatgtacttgaaggcactgaaggcgatgttgtgtgggctaacgataacaaaaccgtgtattacattaaaaaagatttgcaaactttactgggctatcaagtgtatcgccatacgcttggcacaccacaaagtgatgaccagctagtgtatgaagaaacagataatacttattacactggcattggtaaaagcaaagatggtagtgtgatttttattaatcatggcagcaccgagtcatcaggtgtgtcggtcattgatgctaataaccccaaagcaatgccacagcgcttagttcagcgtgaaaaaggcttggaatatgatgcatcaaaactaggtcaatactattacattaccactaatcttgatgcggtaaattttcgtttaatgaaagtgcatcaagacgagttaggtgataaaaccaaatggcaagaggtgatcccacatcgtgcaaatgtaaaatttgaaggggtgcagttatttaatcatcacatggtttatcaagagcgtgaaaaaggtcaaaccagcattaaggtgcgtgatttaaccactcaaaaagaacacaccctttcatttaatgatccggcattttcggtctatatgtatggtaacggcgagtttgatagcagcgcgcttcgagtgtactacaccagcatgaccacaccaggcacccattatgatatcgatttagcctctggcaaaaaagtacagttgaaacaacaagccgtgctgggtgattttaatgctgataactatgcctctgagcgaatttttatcaaagcccgtgatggtgtcgaagtgcctgtttcactggtatatcgtaaagataaatttaaaaaagatggctctaactctttgtatcaatacggttatggttcatatggttcaaccatggatccgagcttttcgagttcacgtttaagcttgcttgaccgtggttttgtttatgccattgcgcatattcgtggttcacaaatgctgggccgtccttggtatgatgatggtaaaaaactaacaaagcaaaataccttcaatgattttattgatgttactaaagcgctgacgactcaaggttatggtaataaagataatgtttttgccgcaggtggcagtgcgggtggtttgttaatgggggcggtgatcaaccaagcgcctgaattgtataaaggggttgcagcgcatgtgccatttgtggatgtggttaccactatgctcgacgaaagtattccactaaccaccaatgaatacgacgaatggggtaacccgaatgataaaacgtattacgattacatgctgtcatactcgccttatgaccaagtaaaagcgcaagcgtatccaaacctattggtaacaacaggattacacgattcacaagtgcagtactttgagccagccaagtgggttgccaaactgcgtgattataaaaccaatgataacaagctgttgtttaaagtagatatggaagccggccatggcggtgcatcaggtcgttttaaaggcttaaaagaccgcgcgttagaatatgccttctttcttgatttagcagggaaaaataaactttaa

SEQ ID NO: 38722 - protein, 731 aa, Pseudoalteromonas tunicata D2
MIIMAQKYSFLLSVISLAVLSACTEQPANLQASSPTTEVVSATTSVALAPVAKKVPYEMEIHGDKRIDNYYWMRDDKREDPEILAHLAAENDYTNAQLAHTEKLQAELFEELKARIEKNDDSVPVKKGQYFYSTEMRGDNEYPIYVRSTDVSGTNKEILLDVNTLAKDHAYYQVSGLDVSPNGQLMAFGEDKVSRRVYSVKFQDLASKAMLPDVLEGTEGDVVWANDNKTVYYIKKDLQTLLGYQVYRHTLGTPQSDDQLVYEETDNTYYTGIGKSKDGSVIFINHGSTESSGVSVIDANNPKAMPQRLVQREKGLEYDASKLGQYYYITTNLDAVNFRLMKVHQDELGDKTKWQEVIPHRANVKFEGVQLFNHHMVYQEREKGQTSIKVRDLTTQKEHTLSFNDPAFSVYMYGNGEFDSSALRVYYTSMTTPGTHYDIDLASGKKVQLKQQAVLGDFNADNYASERIFIKARDGVEVPVSLVYRKDKFKKDGSNSLYQYGYGSYGSTMDPSFSSSRLSLLDRGFVYAIAHIRGSQMLGRPWYDDGKKLTKQNTFNDFIDVTKALTTQGYGNKDNVFAAGGSAGGLLMGAVINQAPELYKGVAAHVPFVDVVTTMLDESIPLTTNEYDEWGNPNDKTYYDYMLSYSPYDQVKAQAYPNLLVTTGLHDSQVQYFEPAKWVAKLRDYKTNDNKLLFKVDMEAGHGGASGRFKGLKDRALEYAFFLDLAGKNKL

SEQ ID NO: 38723 - DNA, 2103 bp, Photobacterium sp. SKA34
  CDS (1)..(2103): transl_table=11
gtgaatacaaaaacaacaaacgtggttcatgcgtcttcatttaaagcgccagtcgcaaagaaagtaccacatgaaatgaccatccataatgatacacggactgataattactattggatgcgtgatgataaacgcagtgatcctgagatcattgcacacttaaacgcagaaaacgcctataccgatgctgtaatggcacatacggaagcattacaacagcagttatttgaagaaattaaaggccgtattgtaaaagatgataattcagtccccgtaaaacaaggcaattacttctattccagcgaagtaacgggtgataatgaatatccaatttcagttcgagcagatgatttcgcaggaacgaataaaaccatattacttgatattaacgaactggctaaaaaccacgagtactataacgtttcaagcctaagcattagccaagatgaaaatttactggcttatggtgaagataccgttagccgtcgtatttacactattaaagtgaagaaccttacaacgggtgaataccttactgatgaaatcataggcaccagtggctctgttgcatggcagaacgataacaaagcgttttactacatcaaaaaagatccgcaaaccttactgggttttcaagtatttcgtcaccaattaggtacaaaccaaacagaagacgtattgatttttgaagaaaaagatcaaacgttttatacctccataggtaaaagtaaagataacgatttggtgtatatttggcattcaagcacagaaactagtgccgtttctattattgatgctaatgatccatatgccacagctaagccattcttagcgcgtgaagaaggcttagagtacagtatttcgaaacttggacagcaattttacgtattgaccaattataaggcagttaacttccgcttaatgaaggttgcgaccgatcaaattggcgataagtcaaaatggcaagatgtaatagcgccagctgaaggtgtgatgctggaagattacgagttatttgataactaccttgtataccagcaacgttcaaatggcttaacccatgtgacagttcgtcaattagatagcaatgaagaacgtgaattacactttaatgatgaagcattcaccgctttcttctatggtaataaagagttaaataccaacaagctacgtctttactattccagtatgacaacgccagcgtctcactttgatatcaaccttgataacagtgagtttgaccttttaaaacaggctgaagtattaggtgattttgacgctgatagttacaaatctgagcgcttgatgatcaacgctcgtgacggtaaacaggtacctgtttctttggtttaccgtaaagatctatttaaaaaagatggcaccaatccgctttatcaatatggctacggttcttatggttcaaccattgatccaagcttttcatcatcacgtttaagcttgcttgatcgtggttttgtttacgtgattgctcatattcgtggctctgaaatgttaggtcgtccttggtatgaagacggtaaaaaactcaccaagcaaaacaccttcaatgattttattgatgtaacgaaaacactagtcgatcaaggttacggtgcgaaagataaaatctttgctgttggtggctctgcaggcggtttgttaatgggtgctattgctaaccaagcgcctgaattgtattgcggtattgcagcacaagtgccatttgttgatgtggtaacaaccatgctggatgagtctattccattaacgacaaacgaatatgacgaatggggtaaccctaatcaaaaagagtattacgagtacatgttaagttactcaccatacgataatgttggtcatcacgactacccaaatatgcttgtgacaacagggctacatgattcacaggtgcaatattttgagccgatgaaatgggtagcaaaattacgtgagatgaaaacagacaacaatcgtttactgtttaaaaccgatatggaagcaggtcacggcggtgcatcaggtcgctttaaagcacttcatgaagatgcattggaatatgccttcttcatcgaccttttaaatgagaaaacgttgaagaattaa

SEQ ID NO: 38724 - protein, 700 aa, Photobacterium sp. SKA34
MNTKTTNVVHASSFKAPVAKKVPHEMTIHNDTRTDNYYWMRDDKRSDPEIIAHLNAENAYTDAVMAHTEALQQQLFEEIKGRIVKDDNSVPVKQGNYFYSSEVTGDNEYPISVRADDFAGTNKTILLDINELAKNHEYYNVSSLSISQDENLLAYGEDTVSRRIYTIKVKNLTTGEYLTDEIIGTSGSVAWQNDNKAFYYIKKDPQTLLGFQVFRHQLGTNQTEDVLIFEEKDQTFYTSIGKSKDNDLVYIWHSSTETSAVSIIDANDPYATAKPFLAREEGLEYSISKLGQQFYVLTNYKAVNFRLMKVATDQIGDKSKWQDVIAPAEGVMLEDYELFDNYLVYQQRSNGLTHVTVRQLDSNEERELHFNDEAFTAFFYGNKELNTNKLRLYYSSMTTPASHFDINLDNSEFDLLKQAEVLGDFDADSYKSERLMINARDGKQVPVSLVYRKDLFKKDGTNPLYQYGYGSYGSTIDPSFSSSRLSLLDRGFVYVIAHIRGSEMLGRPWYEDGKKLTKQNTFNDFIDVTKTLVDQGYGAKDKIFAVGGSAGGLLMGAIANQAPELYCGIAAQVPFVDVVTTMLDESIPLTTNEYDEWGNPNQKEYYEYMLSYSPYDNVGHHDYPNMLVTTGLHDSQVQYFEPMKWVAKLREMKTDNNRLLFKTDMEAGHGGASGRFKALHEDALEYAFFIDLLNEKTLKN

SEQ ID NO: 38725 - DNA, 2097 bp, Xanthobacter autotrophicus Py2
  CDS (1)..(2097): transl_table=11
gtggcgcctgagccgccgcgcgcgccacggcgaccgagtgagcgcactgtccacggcgtgaccctctccgacgactatgcttggctgcgcgccgaaaactggcgcgccgtcatgcgagatccgtccgtgctggacgccgacatccgcgcctatctggaggcggagaacaccttcgccgaggcctatttcgcccccatgggcgaggccaaggccgccctcgtcgccgagatgcgcgggcgcatcaaggaggatgattcctccgttcccgccccggacgggccgtttgcctatttctcccggcaccgggagggcggccagcatccgctctattgccgcaagccgctgcccgatggccccgaggccatcctgctcgatggcgacaaggaggccgaaggcaaggcctatttccatttcggccactggcgccacacccgtgaccacgccttgttcgccttcgcggcggacacctcgggctcggagctgtacgccatccgcatccgcgacctgtcgagcggcgccgacctgcccgacgtgatcgaggaaaccaccggcgacctgctctggagcgcggacggaaccgttctttattacatccgccgcgatgccgagcaccggccgtcgaaggtgttccgccacgtcctggggaccgatccggccgccgacaccctcatttatgaggaaccggacaagggcttcttcgtctcgctgggcgagacacagtcccaccgctacggcctcatcgcctgcggcgaccacgacacctcggaggtccaccttttggacctcaccgaagctgcgccccagccccgctgcatcgccccgcgcgaggccggcgtgcgttacgaggtggagcaccacccaagcctcgccggcaccgacagcctgatcctcctcaccaacgccgacggggcggaggatttcaagatcgtcaccgctcccacgggcactccggaccgcgcccactggcgcgacctggtgccccaccgggccgggcggatgatcctgagccacaccgtcttcgccggccacatggcccggctggagcgggaggcggggctgccgcgcatcatcatccgggagctggcctcgggcgacgagcacgccatcgccttcgacgaggaggcctatgcgctggggcttcaccccggcttcggcttcgacaccagcgcggtccgcttcacctacgcctccatgaccacgccgtccgaggtgtgggactatgacatggcgacccgccgccgggagatgctgaagcgccaggaagtcccctccggccacgacccggccgactacgtgacccggcgcctttatgccgtcgcgccggacggggagagcgttccagtctccctgctctatcgcaaaggaaccccgctggacggctccgcgcccctcctgctttatggatatggtgcctacggcatcaccattccggccggcttctccaccagccgcctgtcgctggtggatcgcggcttcatctatgccatcgcccatgtgcgcggcggcacggacaagggctggcgctggtacgccgacggcaagcttgcggggaagaccaacaccttcaccgatttcatcgcctgcgccgagcatctggtggccgagggtttcaccaagccggaccgcatcgtcgcacagggcggctcggcgggcggcatgctgatgggggcggtggcgaacctgcggccggacatgttcgccggcatcgtggccgaggtcccgttcgtggacgtgctcaccaccatgctggacgacaccctgcccctgaccccgcccgaatggcctgaatggggcaatcccatcaccgacgaggcggcgttccgacgcatcctggcctattcgcccgtggataacgtgcgcccgcaggcctacccgtccatcttcgccctcgccgggctgaccgatccccgcgtgacctattgggagccggcgaaatgggtggcgcggctgcgcgccgcggacaccgaggggcggacaatcctgctgcgcaccaacatggatgcgggacatggcggcgccgccggacgattcgacaagctggacgaggttgcgctcgtctatctgttcgccttgaagacggtgggccgcacaacctga

SEQ ID NO: 38726 - protein, 698 aa, Xanthobacter autotrophicus Py2
MAPEPPRAPRRPSERTVHGVTLSDDYAWLRAENWRAVMRDPSVLDADIRAYLEAENTFAEAYFAPMGEAKAALVAEMRGRIKEDDSSVPAPDGPFAYFSRHREGGQHPLYCRKPLPDGPEAILLDGDKEAEGKAYFHFGHWRHTRDHALFAFAADTSGSELYAIRIRDLSSGADLPDVIEETTGDLLWSADGTVLYYIRRDAEHRPSKVFRHVLGTDPAADTLIYEEPDKGFFVSLGETQSHRYGLIACGDHDTSEVHLLDLTEAAPQPRCIAPREAGVRYEVEHHPSLAGTDSLILLTNADGAEDFKIVTAPTGTPDRAHWRDLVPHRAGRMILSHTVFAGHMARLEREAGLPRIIIRELASGDEHAIAFDEEAYALGLHPGFGFDTSAVRFTYASMTTPSEVWDYDMATRRREMLKRQEVPSGHDPADYVTRRLYAVAPDGESVPVSLLYRKGTPLDGSAPLLLYGYGAYGITIPAGFSTSRLSLVDRGFIYAIAHVRGGTDKGWRWYADGKLAGKTNTFTDFIACAEHLVAEGFTKPDRIVAQGGSAGGMLMGAVANLRPDMFAGIVAEVPFVDVLTTMLDDTLPLTPPEWPEWGNPITDEAAFRRILAYSPVDNVRPQAYPSIFALAGLTDPRVTYWEPAKWVARLRAADTEGRTILLRTNMDAGHGGAAGRFDKLDEVALVYLFALKTVGRTT

SEQ ID NO: 38727 - DNA, 2058 bp, Flavobacteria bacterium BBFL7
  CDS (1)..(2058): transl_table=11
atgaaagagcatcaagcaccgattgcaaagaagatacctcacgtacacgaggcccatggacatcaacgtattgataattatcactggatgacacaacgagatgcaccagaagtcgtagattatctgacacaagaaaatgactactatgataagatgtcattgcatactgagcagcttaaagtagatttatttgaggaaattaagagtcgtattaatgaggatgatgaatctgtgccatatttctggaacggctactggtattatactaaaatgaaaaaaggagaaagttatcctttttattaccgtaaaaaggatttgctttctaatgtagaagaacttctttttaatgtgaatgagatggctgtaggtcatgatttttttcagttgacaggaatgagtgtctctccagataataggatggtatcttatggtgtcgatacagtaggaagacgtcagtacaccatttatgttaaaaatcttatctcaaatgaagttttaccacagtctctagagttaaccactggcggtgctgtatgggatgctggtaacacaaccttgttttttgttagaaaagatgagcaaactttgagagctaatcagatttttaaatataagttaggagatcatccagagaatgcttctatagtatatcaagaagatgatgaaatttataactgctatgtgtataagtctaaatcaagagaatatataatgattaaatcttcatccactttaacagatgaagtacgatttattaaagcagatcaaccggatagtgaatttaaaattgtccaacctcgcacagatgagttggaatatagtgtgttgcactacggtgatcatttttatattatgactaataaggatgacgctaccaattttaaaattatgaagactgaggtctctaaaccagaaatggagaattgggttgatttgattccacatcatccagatgttttactagaagactttgaaatatttaaaaagtatttggtgatttctgaccgctttaatggattaaatagaatccgtattaaatcttgggatcatacagttgattactttttaccttttgataatgaaacttacacagcatttactggtgggaattatgattttgataccgttaagttaaggtatcaatataactcattaactacaccaccatctgtgatagagtttgatatggatactagggaagaggttgtgctaaaaacacaaaaaattcaagatcccttgttctctgcagatgattatacctcagaacgagtatgggcaactgcaaaagatggagttaaggtacctatcagtctagtctataaaaaagaccttaaaagagaatccggaaatccattactattatatggttatggtagttatggatcaactatagatccttacttctccatttccagattaagcttattaaaccgaggttttatttatgctattgcacatatacgtggtagtgagtatctaggtagaccatggtatgaagatggtaaaatgtttgcaaaacgtaatacatttactgactttatagcttgtagtgaacatcttataaatgaaggatatacttcttcatcacacctatacgcgagtggcggatctgcaggtggtttattaatgggcgctgtcatgaatatggctccacaattatacaatggtatattaagtgctgtaccatttgtggatgtggtaacgactatgctagatgactccataccattgactactggagaatatgatgaatggggaaaccctaatcacaaagatagttacgattacatgttaagttactcaccatatgatcaaataacagcacaagagtatccaaatttactcgtgacaacaggttatcacgattctcaagttcaatattgggaaccagcaaaatgggtagccaggttaagagaacttaaaaaagacaacaatattttgttatttaaaacagacatgactagcggtcatagcggtgcctccgggcgttatgatgcgctaaaagaggttgctatagacttcgcatttttgttagatttagaacaaatcgatagctag

SEQ ID NO: 38728 - protein, 685 aa, Flavobacteria bacterium BBFL7
MKEHQAPIAKKIPHVHEAHGHQRIDNYHWMTQRDAPEVVDYLTQENDYYDKMSLHTEQLKVDLFEEIKSRINEDDESVPYFWNGYWYYTKMKKGESYPFYYRKKDLLSNVEELLFNVNEMAVGHDFFQLTGMSVSPDNRMVSYGVDTVGRRQYTIYVKNLISNEVLPQSLELTTGGAVWDAGNTTLFFVRKDEQTLRANQIFKYKLGDHPENASIVYQEDDEIYNCYVYKSKSREYIMIKSSSTLTDEVRFIKADQPDSEFKIVQPRTDELEYSVLHYGDHFYIMTNKDDATNFKIMKTEVSKPEMENWVDLIPHHPDVLLEDFEIFKKYLVISDRFNGLNRIRIKSWDHTVDYFLPFDNETYTAFTGGNYDFDTVKLRYQYNSLTTPPSVIEFDMDTREEVVLKTQKIQDPLFSADDYTSERVWATAKDGVKVPISLVYKKDLKRESGNPLLLYGYGSYGSTIDPYFSISRLSLLNRGFIYAIAHIRGSEYLGRPWYEDGKMFAKRNTFTDFIACSEHLINEGYTSSSHLYASGGSAGGLLMGAVMNMAPQLYNGILSAVPFVDVVTTMLDDSIPLTTGEYDEWGNPNHKDSYDYMLSYSPYDQITAQEYPNLLVTTGYHDSQVQYWEPAKWVARLRELKKDNNILLFKTDMTSGHSGASGRYDALKEVAIDFAFLLDLEQIDS

SEQ ID NO: 38729 - DNA, 2166 bp, Vibrio sp. Ex25
  CDS (1)..(2166): transl_table=11
atgcgtttcactttaactacgttggccgtctcggtcgcgcttgtcgccggatgcagcaatcaaggaactcccagcatgactcaatactcccaatcacagatcgttgctcaacaaactcaagctccggttgcgaaaaaagtccctcacgcgatgactattcatggtgatactcgcgttgataactactactggatgcgtgacgacgaacgtaaagatccggaaattttgcagcacctagagcaagaaaatcagtatgcggaaaccgttctcaagcacactgaagctcttcaaaatgagctatttgaagaaattaaaggtcgcatagcaaaagacgacaactccgttcctgtgcgtaaaggcaactacttctactcaagtgaagtgaccggagataacgaatacgaagttcaccttcgagctaaagactttgcaggcaaagacaagcaagtcattttagatgtcaatgaacttgcaaaagaacatgagttcttcagtattggcggcttgtacgttagtccgaatgaaaacttactagcgtatggcgaagatacattaagccgccgcgtttacactcttaagatcaaagacctgaaaacaggcaattacctacaagatgaaatcgaaggcgcctcaagcgcgattgcatggcagaacgataacaacgccttttactacatcaaaaaagatccacagaccttgctgggctaccaagtgtatcgtcatgttttaggcacgccacaaagcagtgatgagttgatttttgaagaaaccgacagcgcctattacacctcactaagcaaaagcaaagatggcgaagatatttatatctggcattccagtacagaaaccagcggcgtctccatcatcgatgcgaacaaccctaaagcaaaggcgaagcctttttatcctcgtgaaaatggcattgaatacagcatttctaagctaggcgattggtattacatttataccaactatcaagccgtgaacttccgtttgatgaaagttaagcaagaagagatgcacgatcgctctaagtggcaagacgtgattgccgcagacgacaacactcaacttgtcgacttcgagctattcgatgatcacctcgtctatgagcagcgctctaacggcctagcaagcgtcactgtacgtcagctctctacaggaaaagaattccccctcacatttaatgacgatgcgtttgcagcctatttgacaggtaacctagagctggataacgagaaagttcgtatttattacagcagtttaaccactccaggaacctactacgatttcgatctaaaaacgggcgagtcagaaatcatgaagcaaacacctgtacttggtgattttaatcctgacaattaccaatcagaacgcattatgattacagcccgtgacggtaaagaagtacccgtttctttggtgtatcgtaaagacttatttaagaaggatggtacgaatccactctaccaatatggttatggatcttatggtgcaaccattgagccaactttccgctcgacacgtttgagtctattagaccgcggctttgtttacgccatcgctcacattcgcggttctgaaatgcttggccgtccttggtatgaggatggtaaaaaactcaccaagcaaaacacattcaacgactttattgatgtaactaaaggtttggttgaacaaggctacggcgcgaaagataaagtcttcgctgttggtggctctgcaggtggtctcttaatgggggctgtcatcaaccaagcaccagaactgtaccgcggtatcggttcacacgttccgtttgtggacgtggtaaccaccatgctcgatgaatcgattccactaaccaccaatgagtatgatgaatggggtaacccaaataacaaaacatactatgactatatgttgagttactcgccttacgacaacatcaaggcgcaaaactacccaaacatgttggtaacgactggcttgcacgactctcaagtacagtactttgaaccaatgaagtgggtcgccaaacttcgtgaaatgaagacagacgataacgtcttgttgttcaaaaccgatatggaagccggacacggcggcgcatctggtcgatttaaacgcttaaaagaagatgcgctagagtatgcgttcttcctcgatttactcgataaaaaataa

SEQ ID NO: 38730 - protein, 721 aa, Vibrio sp. Ex25
MRFTLTTLAVSVALVAGCSNQGTPSMTQYSQSQIVAQQTQAPVAKKVPHAMTIHGDTRVDNYYWMRDDERKDPEILQHLEQENQYAETVLKHTEALQNELFEEIKGRIAKDDNSVPVRKGNYFYSSEVTGDNEYEVHLRAKDFAGKDKQVILDVNELAKEHEFFSIGGLYVSPNENLLAYGEDTLSRRVYTLKIKDLKTGNYLQDEIEGASSAIAWQNDNNAFYYIKKDPQTLLGYQVYRHVLGTPQSSDELIFEETDSAYYTSLSKSKDGEDIYIWHSSTETSGVSIIDANNPKAKAKPFYPRENGIEYSISKLGDWYYIYTNYQAVNFRLMKVKQEEMHDRSKWQDVIAADDNTQLVDFELFDDHLVYEQRSNGLASVTVRQLSTGKEFPLTFNDDAFAAYLTGNLELDNEKVRIYYSSLTTPGTYYDFDLKTGESEIMKQTPVLGDFNPDNYQSERIMITARDGKEVPVSLVYRKDLFKKDGTNPLYQYGYGSYGATIEPTFRSTRLSLLDRGFVYAIAHIRGSEMLGRPWYEDGKKLTKQNTFNDFIDVTKGLVEQGYGAKDKVFAVGGSAGGLLMGAVINQAPELYRGIGSHVPFVDVVTTMLDESIPLTTNEYDEWGNPNNKTYYDYMLSYSPYDNIKAQNYPNMLVTTGLHDSQVQYFEPMKWVAKLREMKTDDNVLLFKTDMEAGHGGASGRFKRLKEDALEYAFFLDLLDKK

SEQ ID NO: 38731 - DNA, 2175 bp, Alteromonadales bacterium TW-7
  CDS (1)..(2175): transl_table=11
atgacacgtactccctttgcacttgcagcactctcgcttgctattttaagcgggtgtaataaagcccctgaagaaactcaaaaaaatacggttcaagttgagtcagctcaagctataacagcagtagcaccaattgctaaaaaagtaccccatgaaatgaccattcatggcgatacacgtatcgataattactactggctcagagatgacgagcgaaaagcacctgagatcattaactatttagaagccgaaaatgcgtattctgacgctatgcttgcgcatactaaaaaattacaaagtagtttatttgaagagcttaaagggcgaatccaaaaagatgatgactctgttccggtaaaagacggccagtactattactcgtcgcaaactcgcggcgataatgagtacgctacttacttacgcagtagtgattttgcaggcaccgatcaggaagttattttagacgtaaatgaattggctaaaggtcatgactattttgcggttagtggcctaaatgtcagcccaaatgacaacttaatggcgtatggtgaagatacggtaagtcgccgtgtttacaacataaaaattaaggatttaagcacgggtaaattattagacgacacgcttgaaggcaccagtggttatgttgtgtgggcgaacgacaataaaacagtctattacatcaaaaaagacgcgcaaaccttactcgggtatcaggtttatcgtcatacgcttggtacaccacaaagcgatgacgagcttgtttacgaagaaacagacacaagctattacacaggtatgagcaagagcaaagacggctcagaaatttatatttggcatagcagtactgatgcatcgggtttgtcagtacttaatgcaaatgatgtaaacgctaagcctaagcgcttaattgaacgtgaagccaaccttgaatacagcatttccaaattaggcaatacttattacattgtgactaatttaaatgccgttaactttcagcttatgaaagtagatattgataaagccggtgataaagcaaattggcaaagcgtgatccctgcgcgcgagggtattaaactcgaagatgttgagttgtttgatgactacttagtataccaacaacgcgaaatgggccaatcaacactgattgcgcgtaatttaacatcgggcaaagagttaccacttagctttaacgacagtgcatatacaattaatgcgtacggtaataatgaattagacagcgatacgctgcgtgtttactacaccagtatgacgacgccgggttcatcttatgatgttaatttggccactggcgaaaaaacattattaaaacaacaaacagtattaggtgactttaacgcagacaactatgcctcagagcgtatttttgtaacagcacgcgatggcgtagaagtacctgtgagtttggtgtatcgaaaagagttatttaaaaaagatggcactaacccattattgcaatacggttatggttcgtatggcgcaacaatggatccgagcttttcgtctgcacgattaacgctgcttgaccgcggttttgtatttgcaattgctcacgtacgtggttcgcaaatgttaggtcgcccgtggtacgaagcgggtaagctacttaccaaaaagaacacgtttaacgactttgtagatgtaactaagtcattagttgagcaaaagtatggtgcaaaagacagtatatttgcacaaggcggcagtgcgggtggactattaatgggcgcagtggcaaaccaagcgcctgagctttataaaggcatggttgcacaggttgcgtttgttgatgtggttactactatgctagatgaaacgattccgcttacaactaacgagtatggcgagtggggtaaccctaacgagaaagaatattacgattatatgttgtcgtattcaccgtacgatcaagtcagtaagcaagactaccctaatatgttagttactacaggcttacacgattcacaggttcaatattttgagccagcaaaatgggttgctaagctgcgtgactacaaaacagatgataataaactattatttaaaatagatatggaagccgggcacggcggtgcttctggccgttttaaacgcttagaagatgccgcgttaaattatgcatttatgcttgatttagcgggtataaaaaaataa

SEQ ID NO: 38732 - protein, 724 aa, Alteromonadales bacterium TW-7
MTRTPFALAALSLAILSGCNKAPEETQKNTVQVESAQAITAVAPIAKKVPHEMTIHGDTRIDNYYWLRDDERKAPEIINYLEAENAYSDAMLAHTKKLQSSLFEELKGRIQKDDDSVPVKDGQYYYSSQTRGDNEYATYLRSSDFAGTDQEVILDVNELAKGHDYFAVSGLNVSPNDNLMAYGEDTVSRRVYNIKIKDLSTGKLLDDTLEGTSGYVVWANDNKTVYYIKKDAQTLLGYQVYRHTLGTPQSDDELVYEETDTSYYTGMSKSKDGSEIYIWHSSTDASGLSVLNANDVNAKPKRLIEREANLEYSISKLGNTYYIVTNLNAVNFQLMKVDIDKAGDKANWQSVIPAREGIKLEDVELFDDYLVYQQREMGQSTLIARNLTSGKELPLSFNDSAYTINAYGNNELDSDTLRVYYTSMTTPGSSYDVNLATGEKTLLKQQTVLGDFNADNYASERIFVTARDGVEVPVSLVYRKELFKKDGTNPLLQYGYGSYGATMDPSFSSARLTLLDRGFVFAIAHVRGSQMLGRPWYEAGKLLTKKNTFNDFVDVTKSLVEQKYGAKDSIFAQGGSAGGLLMGAVANQAPELYKGMVAQVAFVDVVTTMLDETIPLTTNEYGEWGNPNEKEYYDYMLSYSPYDQVSKQDYPNMLVTTGLHDSQVQYFEPAKWVAKLRDYKTDDNKLLFKIDMEAGHGGASGRFKRLEDAALNYAFMLDLAGIKK

SEQ ID NO: 38733 - DNA, 2076 bp, Alteromonadales bacterium TW-7
  CDS (1)..(2076): transl_table=11
gtgcctagttcagactactctttaagcttgctgcctcatttccctgttgctgaaaagcagccccatacattaaccacacataataaaaaaagaaccgaccattactattggatgcgtgatgatgagcgcaaaaatgaaaaagtactcgcacatttacaagccgaaaataactattgcgatgagcaattagcatgtattaaacccttgcaaaataccttattcgaagagttaaaagcgcgtattgtaaaagacgacaattccgtgcccgtcaaagatggaaaatactggtatcactctgaagtgcgcggtgacgatgaatatgcgcgtcattatcgtagcacaagtattaaagctgaaaataaagcccttttgctagatgtaaacgaacttgcacaagattttgaattttttgaccttggggaggttgcattaagccctaatgagcagcttatggcatattcacaagatactgagggtcgccgtatttataacgtttgttttaaaaatttatcaacaggtgaaatgctcactgatgagcttgaaaatacagaagggcaagttgtttgggcaaacgacaataaaaccgttttttatgttaaaaaagatctgcaaactttattagggtatcaagtatttaggcatgagctgggaagtgcgcaaagccaagatgtgttggtgtatgaagagcaagacagcagcttttttatgggactgggtaaaagccgagatgaagcgctaattataattgatttggcatctactgagtccaacgacacatgggtgcttgatgccaataatccgcaaggtcaatttagcgcactcatgcaaagagaagagggccatgagtttgatgtcgataagttaggtgacacattttatattgtcaccaactggcaagctaaaaactttagattgatgactgcaaccgagcagaccattgcagataaaactcagtggcaagagcatacagcccacagggaacatgtattacttgaaggcgttgagctttttaatgattttttagtcctcagcgaacgagagcaaggacaagcacgttttgttgtagtaaataaagaaggcaagcgtatggcgcttgagttcgacgatccttgctattacgctgctgttgcaatgaacccagagcccaatgttaaaacggcgcgcatttattactcaagcttaaccactccaggttctttgtacgatgttgaccttataacgggtgaaaaaacattgcttaaacagcaaaaggtattaggtgactttaaagccacagattataagtctgagcggctgatgattacttcgcgtgatggcgtcaaaatacctgcttccgttgtataccgaaaagatagttttaaaaaagatggcaccaacccattatttcaatatgggtatggggcttatggttacaccattgatccgagcttctctagcacgtcgctcagcttacttgaccgtggttttgtttatgtcattgcacatgtgcgtggttccgaaatgctaggccgcaattggtatgagcaaggtaaaaaaacacataaacaaaatagttttagtgattttatcgacgtaacaaaagcgctggttgaacaaaaatactgtgatagcagcaaagtatttgcatcaggcggcagtgcgggtggcttgcttatgggcgccgtgctgaatcaagccccacagttatattgtggcgtagggtgtcatgtgccatttttagatgtactcaccacgatgttggacgagagtattccactgaccaccaacgagtatgatgaatggggaaacccgaacgatccacagttttataatgtaatagaatcgtattcgccttatgacaatataagcgcacaaaattaccctaatatattagtcactaccggcctacatgactcgcaagtgcagtactgggagcccatgaagtgggttgctaaaatgcgagaatacaaaacagataataatatattggtatttaaaaccgatatggacgcaggtcacggcggcgcatctggacgctttaaaagcttggaagaaaaagcacttgaaatggcattttttattgcgttggttgaatga

SEQ ID NO: 38734 - protein, 691 aa, Alteromonadales bacterium TW-7
MPSSDYSLSLLPHFPVAEKQPHTLTTHNKKRTDHYYWMRDDERKNEKVLAHLQAENNYCDEQLACIKPLQNTLFEELKARIVKDDNSVPVKDGKYWYHSEVRGDDEYARHYRSTSIKAENKALLLDVNELAQDFEFFDLGEVALSPNEQLMAYSQDTEGRRIYNVCFKNLSTGEMLTDELENTEGQVVWANDNKTVFYVKKDLQTLLGYQVFRHELGSAQSQDVLVYEEQDSSFFMGLGKSRDEALIIIDLASTESNDTWVLDANNPQGQFSALMQREEGHEFDVDKLGDTFYIVTNWQAKNFRLMTATEQTIADKTQWQEHTAHREHVLLEGVELFNDFLVLSEREQGQARFVVVNKEGKRMALEFDDPCYYAAVAMNPEPNVKTARIYYSSLTTPGSLYDVDLITGEKTLLKQQKVLGDFKATDYKSERLMITSRDGVKIPASVVYRKDSFKKDGTNPLFQYGYGAYGYTIDPSFSSTSLSLLDRGFVYVIAHVRGSEMLGRNWYEQGKKTHKQNSFSDFIDVTKALVEQKYCDSSKVFASGGSAGGLLMGAVLNQAPQLYCGVGCHVPFLDVLTTMLDESIPLTTNEYDEWGNPNDPQFYNVIESYSPYDNISAQNYPNILVTTGLHDSQVQYWEPMKWVAKMREYKTDNNILVFKTDMDAGHGGASGRFKSLEEKALEMAFFIALVE

SEQ ID NO: 38735 - DNA, 2061 bp, Escherichia coli B
  CDS (1)..(2061): transl_table=11
atgctaccaaaagccgcccgcattccccacgccatgacgcttcatggcgatacgcgcatcgataattactactggctgcgggacgatacgcgttctcagccggaagtcctggactacctgcaacaagaaaatagttacggtcatcgggtgatggcctcacaacaagccttgcaggatcgcatcttaaaggaaatcatcgaccgcattccgcaaagagaagtttctgcgccctacatcaaaaatggctaccgctatcggcatatttatgaaccaggctgtgaatatgctatctaccagcgtcaatcggcgttcagtgaagagtgggacgagtgggaaatattgctcgatgccaacaagcgcgcggctcatagtgagttttattcgatgggcggaatggcgattacgcccgataacaccattatggcgctggcagaagattttctttcccgacgccagtacggcattcgttttcgtaatctggaaacaggtaactggtacccggaactgctggataacgttgaacccagctttgtctgggcaaatgactcctggactttctactatgttcgcaagcatccagtgacgctgctgccttatcaggtctggcgtcacgctatcggtactccagcatcgcaagataaactgatctacgaagaaaaagacgatacctattacgtcagcctgcataaaacgacgtcgaagcactatgtagtcattcatttggccagcgccaccaccagtgaagttcgcctgctggacgcggaaatggccgatgccgagccgtttgtttttctgccgcgccgcaaagatcacgaatacagccttgatcactaccagcatcggttttatctgcgttccaaccgcaacggcaaaaactttggcttataccgtacccgtatgcgtgatgagcaacagtgggaagagttaattccgccacgcgaaaacatcatgctggaagggtttacgctgtttaccgactggctggtggttgaagagcgtcagcgcgggttaaccagtttgcgccaaattaaccgcaagacccgggaagtcattggtattgcctttgatgatccggcctatgtgacctggattgcctacaatccagaatctgaaaccgcgcgattgcgttatggttattcttccatgaccacaccagacactttgtttgaactggatatggataccggtgagcgtcgtgtattaaaacaaacggaagttcctggttttgatgcggcgaattaccgcagtgaacacctgtggatagtcgcccgtgatggcgtcgaagttccggtttcgctggtctatcatcgcaaacattttcgcaaaggacacaacccgctgctggtgtatggctatggttcttacggcgcaagtattgatgccgatttcagttttagccgcttgagtttgttagatcgtggctttgtctacgccattgtccatgttcgcggcggtggtgagctggggcaacaatggtacgaagacggaaaatttctgaagaagaaaaatacgtttaatgattatcttgatgcctgcgatgcattgttaaaactgggctatggctctccttcgctttgttatgcgatgggcgggagtgcggggggcatgttgatgggcgttgcgattaatgcacgccctgaattattccacggcgttatcgcccaggtaccgtttgttgatgttgtaacaacaatgcttgatgaatcaattcctcttaccactggtgagtttgaagagtgggggaatccgcaggatccgcaatattacgagtatatgaaaagctacagcccatatgacaacgtcaccgcacaggcttatccgcatttactggtaacgaccggtttgcacgattctcaggtgcaatattgggaaccggcaaaatgggtcgctaaattgcgcgagctgaaaaccgatgaccatcttttattgctctgtaccgacatggactcaggccatggcggtaaatctggtcgctttaaatcgtacgaaggcgtagcgatggaatatgcttttctggtcgcgctggcgcagggaacattacccgctacgcctgcggattaa

SEQ ID NO: 38736 - protein, 686 aa, Escherichia coli B
MLPKAARIPHAMTLHGDTRIDNYYWLRDDTRSQPEVLDYLQQENSYGHRVMASQQALQDRILKEIIDRIPQREVSAPYIKNGYRYRHIYEPGCEYAIYQRQSAFSEEWDEWEILLDANKRAAHSEFYSMGGMAITPDNTIMALAEDFLSRRQYGIRFRNLETGNWYPELLDNVEPSFVWANDSWTFYYVRKHPVTLLPYQVWRHAIGTPASQDKLIYEEKDDTYYVSLHKTTSKHYVVIHLASATTSEVRLLDAEMADAEPFVFLPRRKDHEYSLDHYQHRFYLRSNRNGKNFGLYRTRMRDEQQWEELIPPRENIMLEGFTLFTDWLVVEERQRGLTSLRQINRKTREVIGIAFDDPAYVTWIAYNPESETARLRYGYSSMTTPDTLFELDMDTGERRVLKQTEVPGFDAANYRSEHLWIVARDGVEVPVSLVYHRKHFRKGHNPLLVYGYGSYGASIDADFSFSRLSLLDRGFVYAIVHVRGGGELGQQWYEDGKFLKKKNTFNDYLDACDALLKLGYGSPSLCYAMGGSAGGMLMGVAINARPELFHGVIAQVPFVDVVTTMLDESIPLTTGEFEEWGNPQDPQYYEYMKSYSPYDNVTAQAYPHLLVTTGLHDSQVQYWEPAKWVAKLRELKTDDHLLLLCTDMDSGHGGKSGRFKSYEGVAMEYAFLVALAQGTLPATPAD

SEQ ID NO: 38737 - DNA, 2109 bp, Pseudomonas putida GB-1
  CDS (1)..(2109): transl_table=11
atgcctatgataaacacttttccgggcgcagacagtgtttgcctgtccccagccaagagatcacccatgcccaacaagcctcagccgcccatcgcccacgccgataacgccgccgacccgtacgcctggctgcaacagcgcgacactcccgaggtactcgcctacctgcaagccgaaaacgcctaccaggaagcctgcctggccgaccaggcagcgttgcgtgagcagttgttcgaagagatcaagggtcgcatcctggaaaccgacctgtcgctgccgtcgccctggggcccctacctgtactacacccgcaccaccgccggcgacgagtacccacgtcactaccgctgcccacgccctgccgacgattcgaacaccgtcgatgaaagccaggagcaactgctgctcgaccccaacgccctggccaatggcggcttcctgtcgctgggggcgttcaacgtcagccccgaccaccgcctgctggcctacagcctcgacaccagtggcgacgaaatctacaccctgtacgtcaaggacttggccagtggcagcgtcacgcccctgcccttcgacgactgcgacggcagcctgacctgggccaacgacagccaaacgctgttcttcgccgaactggacgacacccatcggccatggcgcctgcatcgccacaccctgggcactgacgccgtgcagaccgtgttcgaagagcccgacgggcgcttcttcctgcactgctatcgcaccagctccgagcgccaactggtgctgctgctgaacagcaagaccaccagcgaagcctgggtactggacgccgaaaccccgcaggcgccgttcacctgcctggcgccgcgtgtcgaaggccatgaatatttccccgaccatggccagctcgacggcgagtggcgctggttcatccgtaccaaccaggacggcatcaacttcgctctttaccatgcccctgtcgcgccagtgccaggccgtgagcaatggcaggtgctggtggcgcaccgcgacgcaatcatgctcgaaggcctcagcctcaatgccagcgccctcaccctgagcctgcgtgaaggcggcctgccaatcatcgaagtacgcccgcaggggctgtcggcctatcgcgtcgagctacccgacgccgcctacagcctgtacgtacaggacagcctggagttcgtcagcacacgcgtgcgcctgcgctacgaagccctcaatcgcccggcccaggtgcgccagctggagctggccacgggcgcgcaggttgtgctcaagcaaaccccggtgctgggtgcgttcgatgccgatgactatgtcagcgagcgcctgtgggcgactgcggcggacggcacccaggtgccgatcagcctggtacgccgtcgccgcgaccagggcaagaccgtgccgctgtacctgtacggttacggcgcctatggggaaagcctcgacccgtggttctcccatgcgcgcctgagcctgctggagcgtggcgtggcctttgccatcgcccacgtgcgcggcggcggtgaactgggtgaagcctggtaccgcgcgggcaagcaggagtacaagcacaacaccttcagcgacttcatcgcctgcgccgagcacctgatcgccaaaggcgtgacggctgccgatcgcttggccatcagcggcggcagcgccggcggcctgctgatcggcacggtgctcaacctgcgccccgagctgttccgctgcgcgattgccgaagtgccgttcgtcgacgtgctcaacaccatgctcgaccccgagctaccgctgaccgtgaccgaatacgacgaatggggcaacccagaggaaccgcaggtttacgagcgcatcaaggcgtatgcaccttatgagaacgtaaaggcccaggactatccagcgatgctggtggtggcgggttacaacgacagccgcgtgcagtactgggaagcggccaaatgggtggcgcggttgcgtacgcgcaagaccgacgaccacctgctgctgctcaagaccgaaatgggcgcagggcatggcgggatgagcgggcgataccaagggctgaaggatgtggcgctggaatatgcgttcgtattcggcgagctgggtatcgtttga

SEQ ID NO: 38738 - protein, 702 aa, Pseudomonas putida GB-1
MPMINTFPGADSVCLSPAKRSPMPNKPQPPIAHADNAADPYAWLQQRDTPEVLAYLQAENAYQEACLADQAALREQLFEEIKGRILETDLSLPSPWGPYLYYTRTTAGDEYPRHYRCPRPADDSNTVDESQEQLLLDPNALANGGFLSLGAFNVSPDHRLLAYSLDTSGDEIYTLYVKDLASGSVTPLPFDDCDGSLTWANDSQTLFFAELDDTHRPWRLHRHTLGTDAVQTVFEEPDGRFFLHCYRTSSERQLVLLLNSKTTSEAWVLDAETPQAPFTCLAPRVEGHEYFPDHGQLDGEWRWFIRTNQDGINFALYHAPVAPVPGREQWQVLVAHRDAIMLEGLSLNASALTLSLREGGLPIIEVRPQGLSAYRVELPDAAYSLYVQDSLEFVSTRVRLRYEALNRPAQVRQLELATGAQVVLKQTPVLGAFDADDYVSERLWATAADGTQVPISLVRRRRDQGKTVPLYLYGYGAYGESLDPWFSHARLSLLERGVAFAIAHVRGGGELGEAWYRAGKQEYKHNTFSDFIACAEHLIAKGVTAADRLAISGGSAGGLLIGTVLNLRPELFRCAIAEVPFVDVLNTMLDPELPLTVTEYDEWGNPEEPQVYERIKAYAPYENVKAQDYPAMLVVAGYNDSRVQYWEAAKWVARLRTRKTDDHLLLLKTEMGAGHGGMSGRYQGLKDVALEYAFVFGELGIV

SEQ ID NO: 38739 - DNA, 2241 bp, Oryza sativa subsp
  CDS (1)..(2241)
atggccgccacgccgccggtggccaggaaggtgccgcgggaactcgcccagcacggcgacgtccgcgtggacaactactactggctccgcgacgactcccgctcccaccccgacgtcctcgcccacctccgtgccgagaatctctacaccgccaccatcatgtctgatgtcaagaacctcgaggatgaaatatatgctgaaattagagcaagaatcaaggaagatgatataggagcgcctcttcgcaaaggccagtattactactataacagaacactgactggcaaggagtatgtcagtcctaatggtaagctagttgcttatgcacaagacactaaaggtgatgaaatttacactgtttatgttattgatgcggagagtggaaaatttgttggccaaccacttgaaggaattacttctgacattgagtgggctggtgatgaccaccttgtttacataacaatggacgccattctccgcccagataaagtatggttgcacatgttagagtctaatcagtcagatgatatttgtttgtatcatgaaaaagatgacatgttttcacttggcctccaaacttctgaaagcaagcagtatttgtttgttgaatctggaagcaaaaacacaagctttatattctacttggatatatccaaacaaagcaaggagcttgtggttttaactccttgtgtttatggtattgatacaacagctagtcatcgtggaaaccatttctatattaagaggagaagtgaggaattctacaactctgagttgattgcttgcccattggataatgtagctgagaccactgtcttgctaccacacagagaaagtgtgaaaatacagagtttccagctctttgagaatcatattgctgtatatgaacgtcaaaatggtctaccgaaagttactgcgtatcgcctaccagccactggagagccaattgggcaacttcagggaggtcgggagattgattttgttgatccagcatatgacgtggaacctgagcaatcacagtttggttcatctgttgttcggttccattatagctcaatgaggaccccaccctcggttttcgactatgacatggattcaggagtgtctgtgctgaagaagattgatactatggatgccattaacagtgtgaagtcctgctgcagtgaggctcagagtcttcatggtgtggctgccttgattgagggcaagggcagagtgttcgtcatgctcgaggacgggcacctcgcagctgccgtgcttcaggatgagggcatcatggctggtggcagacgatgcagcgagtcggctaggaggacggttttaggtggatttgatgcatcaaactatgtaacagaaagaaaatgggctgccgcttctgatggcactcaaatacccatgaccattctatacagaaaagatcgggtgaatcttgatggctcagacccaatgctgctatatggctatggctcctacgagatatgtatagatccgagttttgggagatcgagattctctctagttgataggggctttatatatgtgatagctcatattcgtggaggtggtgaaatgggacgtaagtggtatgaggatgggaagctgttgaataagagaaacacattcactgatttcattgcttgtgctgagcacttgatagaaaacaagtactgttccaaggaaaagctttgcatcaacggaagaagtgcaggtggcctattgatgggtgctgtcctaaatatgaggcctgatttattcaaggcagctgttgctggagtcccttttgttgatgttcttaccactatgcttgatccaactatcccgttgactacatcggagtgggagtcagaaggatggggtcaaccaagattgcttggaatgcaggagtggggtgatccaaggaaagaagaatactactactatatgaaatcatattctcccgttgataacatttactggattaagcttatatatgctatttacggtggatgttttggtgctgagtatatcaagaaattaggacatttgtacgaaccagatcctcgtgtgatgtactcggaaccggcgaaatatgtcgcaaagctaagggaactgaaaacggatgacaatcttctgttattcaagtgcgaacttggtgctgggcacttctcaaaatcgggaaggtttgagaaactacgagaagatgcgtttacttatgcgtttatcctcaaggcactgggaatggctccaaaggcagcgttgtaa

SEQ ID NO: 38740 - protein, 746 aa, Oryza sativa subsp
MAATPPVARKVPRELAQHGDVRVDNYYWLRDDSRSHPDVLAHLRAENLYTATIMSDVKNLEDEIYAEIRARIKEDDIGAPLRKGQYYYYNRTLTGKEYVSPNGKLVAYAQDTKGDEIYTVYVIDAESGKFVGQPLEGITSDIEWAGDDHLVYITMDAILRPDKVWLHMLESNQSDDICLYHEKDDMFSLGLQTSESKQYLFVESGSKNTSFIFYLDISKQSKELVVLTPCVYGIDTTASHRGNHFYIKRRSEEFYNSELIACPLDNVAETTVLLPHRESVKIQSFQLFENHIAVYERQNGLPKVTAYRLPATGEPIGQLQGGREIDFVDPAYDVEPEQSQFGSSVVRFHYSSMRTPPSVFDYDMDSGVSVLKKIDTMDAINSVKSCCSEAQSLHGVAALIEGKGRVFVMLEDGHLAAAVLQDEGIMAGGRRCSESARRTVLGGFDASNYVTERKWAAASDGTQIPMTILYRKDRVNLDGSDPMLLYGYGSYEICIDPSFGRSRFSLVDRGFIYVIAHIRGGGEMGRKWYEDGKLLNKRNTFTDFIACAEHLIENKYCSKEKLCINGRSAGGLLMGAVLNMRPDLFKAAVAGVPFVDVLTTMLDPTIPLTTSEWESEGWGQPRLLGMQEWGDPRKEEYYYYMKSYSPVDNIYWIKLIYAIYGGCFGAEYIKKLGHLYEPDPRVMYSEPAKYVAKLRELKTDDNLLLFKCELGAGHFSKSGRFEKLREDAFTYAFILKALGMAPKAAL

SEQ ID NO: 38741 - DNA, 2115 bp, Oryza sativa subsp
  CDS (1)..(2115)
atgcgccaccaggtaggccttctctcccgcctcctcctccggcgccacgtacaccgccgctccaagccggccaccgcgccacccccgcccccgcccccgaccccgccgcggccgccgcagaagcccgagccggtctccatccacggggagacgtggcacgacagctacgcgtggatgggcgccctctccgacgccgccgccatgcgccacatggacgtgcacatggaggccgaggagaagtacgccgaggcctgcctcgccgcggcgggcgccgaccgcctcgcgcggaagctccagctcgagatggcctcccgcctcgcctccgacgcctgcacgccgcccgtccgctggggaccctggctgtactaccgccgcgcggacgagggcaagcagtaccctgtgctctgccgccgctccgcggcgctacacagcgagttcatctcgtatagcgacccctctgccggattcgacttcaccgccgggaagcgcatcgagcagaaattggtggattacaacaaggaggccgagcggttcggaggatactcatacgaggaactgtctgaagtgtccccagatcaccggttcattgcatacactatgtatgataaagataaggattccttcactttaatggtcagggacctagtgacaggaactctttgtgataaacctcgtgctgaccgggtctcaaacatatcctgggctatggatgggaaagcactggtatatttgataaatgcttctgatcccctgtccagaatgagattggtttgggaaggtgaatcccaagttcattgtattgttgaacaccatcatggatgcctatatttatttactgatgcttcaagagaaggcacccctgttgattctcattatctaatgctgtctgatgtggaatctcctgggccgaagagctggaaggatgtttttcttgaagaaccaggcgttattcttgaagatgttgacttctgtgatactcacatggtgcttgttctgagacaaggcagaaagctgaagctctgttcagtaaagttacctttccctgaacacatcagaattttacctggcccaaattacgattatcgttcctcaacaatgcgtttcacaatatcatcacctgtgatgcctgatgcagttgttgactacaacttaccgaatggtaagtggcgaatagtgcaacagcaaaacatgcttcatgaaagaacgaaagcactatatgggaatgcttttgctgctagtatggttaagccatcttcaaaaggaggtgatttgtcaagtgaggactttggagattgtgattggaatgaactctctgaatactatgcttgtgagtactatgatgttccatcaaaggatggagttttggttccacttacattagtatattcgcaaaagcacaagcaagagggaaatccagggttacttcatggacatggtgcttatggtgagattctggataagcgctggcgcagtgagttaaagagcctacttgatcgtggctgggtgattgcatttgctgatgtcaggggtggtggaggttatgggaagaagtggcaccaagatggtgcacgtacaaaaaagatgaattctatatatgattttatctcttgtggtgagtttcttcttgagaagggtatcataaaagaaaataaacttgctggatggggatatagtgctggaggacttctggtggcttcagcaattaatactcggcccgatttgtttcgtgctgtcgttttgaaggtccctttcttggatgtttgcaatactcttctccaccctattctacctcttacagctattgattacgaagagtttggatttcctgtggaccatgaagagttcctttcaatcaggaagtattctccttatgataacatccagaaggatgttccttacccagcagtgtttgtaacatcatcatttaatacaaggtttggtgtatgggaagcagctaaatgggtcgcaaaagtccgagtagttactcgctatgatccagagcggcctgtaattctcaacttgacaacagatgttgtagaagagagcaagtatttgcaaaccaaggaattagcattggagactgctttcctaattaaaatgattcatgatacatga

SEQ ID NO: 38742 - protein, 704 aa, Oryza sativa subsp
MRHQVGLLSRLLLRRHVHRRSKPATAPPPPPPPTPPRPPQKPEPVSIHGETWHDSYAWMGALSDAAAMRHMDVHMEAEEKYAEACLAAAGADRLARKLQLEMASRLASDACTPPVRWGPWLYYRRADEGKQYPVLCRRSAALHSEFISYSDPSAGFDFTAGKRIEQKLVDYNKEAERFGGYSYEELSEVSPDHRFIAYTMYDKDKDSFTLMVRDLVTGTLCDKPRADRVSNISWAMDGKALVYLINASDPLSRMRLVWEGESQVHCIVEHHHGCLYLFTDASREGTPVDSHYLMLSDVESPGPKSWKDVFLEEPGVILEDVDFCDTHMVLVLRQGRKLKLCSVKLPFPEHIRILPGPNYDYRSSTMRFTISSPVMPDAVVDYNLPNGKWRIVQQQNMLHERTKALYGNAFAASMVKPSSKGGDLSSEDFGDCDWNELSEYYACEYYDVPSKDGVLVPLTLVYSQKHKQEGNPGLLHGHGAYGEILDKRWRSELKSLLDRGWVIAFADVRGGGGYGKKWHQDGARTKKMNSIYDFISCGEFLLEKGIIKENKLAGWGYSAGGLLVASAINTRPDLFRAVVLKVPFLDVCNTLLHPILPLTAIDYEEFGFPVDHEEFLSIRKYSPYDNIQKDVPYPAVFVTSSFNTRFGVWEAAKWVAKVRVVTRYDPERPVILNLTTDVVEESKYLQTKELALETAFLIKMIHDT

SEQ ID NO: 38743 - DNA, 2394 bp, Oryza sativa subsp
  CDS (1)..(2394)
atggccgccacgccgccggtggccaggaaggtgccgcgggaactcgcccagcacggcgacgtccgcgtggacaactactactggctccgcgacgactcccgctcccaccccgacgtcctcgcccacctccgtgccgagaatctctacaccgccaccatcatgtctgatgtcaagaacctcgaggatgaaatatatgctgaaattagagcaagaatcaaggaagatgatataggagcgcctcttcgcaaaggccagtattactactataacagaacactgactggcaaggagtatgtgcaacactgcaggcgtctcgtgccaactgatgctcctgttacagtctatgatgtcatgcccacaggacccaatgctcctcatgagcatattattttggatgagaatgtaaaggccgagggccatgactactatagcattggggctttcaaggtcagtcctaatggtaagctagttgcttatgcacaagacactaaaggtgatgaaatttacactgtttatgttattgatgcggagagtggaaaatttgttggccaaccacttgaaggaattacttctgacattgagtgggctggtgatgaccaccttgtttacataacaatggacaccattctccgcccagataaagtatggttgcacatgttagagtctaatcagtcagatgatatttgtttgtatcatgaaaaagatgacatgttttcacttggcctccaaacttctgaaagcaagcagtatttgtttgttgaatctggaagcaaaaacacaagctttatattctacttggatatatccaaacaaagcaaggagcttgtggttttaactccttgtgtttatggtattgatacaacagccagtcatcgtggaaaccatttctatattaagaggagaagtgaggaattctacaactctgagttgattgcttgcccattggataatgtagctgagaccactgtcttgctaccacacagagaaagtgtgaaaatacagagtttccagctctttgagaatcatattgctgtatatgaacgtcaaaatggtctaccgaaagttactgcgtatcgcctaccagccactggagagccaattgggcaacttcagggaggtcgggagattgattttgttgatccagcatatgacgtggaacctgagcaatcacagtttggttcatctgttgttcggttccattatagctcaatgaggaccccaccctcggttttcgactatgacatggattcaggagtgtctgtgctgaagaagattgatactatggatgccattaacagtgtgaagtcctgctgcagtgaggctcagagtcttcatggtgtggctgccttgattgagggcaagggcagagtgttcgtcatgctcgaggacgggcacctcgcagctgccgtgcttcaggatgagggcatcatggctggtggcagacgatgcagcgagtcggctaggaggacggttttaggtggatttgatgcatcaaactatgtaacagaaagaaaatgggctgccgcttctgatggcactcaaatacccatgaccattctatacagaaaagatcgggtgaatcttgatggctcagacccaatgctgctatatggctatggctcctacgagatatgtatagatccgagttttgggagatcgagattctctctagttgataggggctttatatatgtgatagctcatattcgtggaggtggtgaaatgggacgtaagtggtatgaggatgggaagctgttgaataagagaaacacattcactgatttcattgcttgtgctgagcacttgatagaaaacaagtactgttccaaggaaaagctttgcatcaacggaagaagtgcaggtggcctattgatgggtgctgtcctaaatatgaggcctgatttattcaaggcagctgttgctggagtcccttttgttgatgttcttaccactatgcttgatccaactatcccgttgactacatcggagtgggagtcagaaggatggggtcaaccaagattgcttggaatgcaggagtggggtgatccaaggaaagaagaatactactactatatgaaatcatattctcccgttgataacatttactggattaagcttatatatgctatttacggtggatgttttggtgctgagtatatcaagaaattaggacatttgtacgaaccagatcctcgtgtgatgtactcggaaccggcgaaatatgtcgcaaagctaagggaactgaaaacggatgacaatcttctgttattcaagtgcgaacttggtgctgggcacttctcaaaatcgggaaggtttgagaaactacgagaagatgcgtttacttatgcgtttatcctcaaggcactgggaatggctccaaaggcagcgttgtaa

SEQ ID NO: 38744 - protein, 797 aa, Oryza sativa subsp
MAATPPVARKVPRELAQHGDVRVDNYYWLRDDSRSHPDVLAHLRAENLYTATIMSDVKNLEDEIYAEIRARIKEDDIGAPLRKGQYYYYNRTLTGKEYVQHCRRLVPTDAPVTVYDVMPTGPNAPHEHIILDENVKAEGHDYYSIGAFKVSPNGKLVAYAQDTKGDEIYTVYVIDAESGKFVGQPLEGITSDIEWAGDDHLVYITMDTILRPDKVWLHMLESNQSDDICLYHEKDDMFSLGLQTSESKQYLFVESGSKNTSFIFYLDISKQSKELVVLTPCVYGIDTTASHRGNHFYIKRRSEEFYNSELIACPLDNVAETTVLLPHRESVKIQSFQLFENHIAVYERQNGLPKVTAYRLPATGEPIGQLQGGREIDFVDPAYDVEPEQSQFGSSVVRFHYSSMRTPPSVFDYDMDSGVSVLKKIDTMDAINSVKSCCSEAQSLHGVAALIEGKGRVFVMLEDGHLAAAVLQDEGIMAGGRRCSESARRTVLGGFDASNYVTERKWAAASDGTQIPMTILYRKDRVNLDGSDPMLLYGYGSYEICIDPSFGRSRFSLVDRGFIYVIAHIRGGGEMGRKWYEDGKLLNKRNTFTDFIACAEHLIENKYCSKEKLCINGRSAGGLLMGAVLNMRPDLFKAAVAGVPFVDVLTTMLDPTIPLTTSEWESEGWGQPRLLGMQEWGDPRKEEYYYYMKSYSPVDNIYWIKLIYAIYGGCFGAEYIKKLGHLYEPDPRVMYSEPAKYVAKLRELKTDDNLLLFKCELGAGHFSKSGRFEKLREDAFTYAFILKALGMAPKAAL

SEQ ID NO: 38745 - DNA, 2121 bp, Corynebacterium glutamicum
  CDS (1)..(2121): transl_table=11
atgtctgaacgcctaaacgctccgcaagcaccaatccatcccatcacccgaacccaccacggtattgatttcgtagacaactatgaatggctgagggataaagaatcccaagaaaccttggactacctggaggcggagaatgcgttcaccaagcaggagactgaacagctagccacattgcgggacaacatctacgaagagattaagtcacgcgttaaagaaaccgacatgtccatcccagtgcgtgccggaaagtactggtattactctcgcactgaagaaggcaagagctacggctattcctgccgcattccagtgactgaagggtcagatgcatggacccctcctgttatccctgagggtgagccagcgcagggtgaaaccatcatcatggatgccaacgagttggcagaaggccacgaattcttctccatgggtgcatcatctgtcaccacctctggccgctaccttgcttattccaccgatgtcacgggtgaagagcgcttcacgttgcgcatcaaggatctagaaactggcgagctgcttcctgataccctgactggcattttctacggcgctacttgggtgggggaggagtacctcttctaccagcgcgtcgatgatgcctggcgtccagatactgtgtggcgtcacaaggtgggcaccccggtcgaagaagacgtgttggtgtaccacgagcctgatgaacgttattccacctgggtgggcaccactcgttcagaaaagttcatcctttttggttgcgcctccaagatcacctctgaagtccgcgtgcttcctttcgaccagccagagggcacccctgaggtgctgattccgcgcgcggagggtgtggaatacgacgtcgatcatgcagtcgtagacggctccgatatttggttggtcacacacaacgccgagggcccgaacttttcggtggggtgggctggcgtcgacaagctcaattctttggacgcgctgacgccactcgtcgcgcacaaggatgacgtgcgcattgagggtgtcgacacctaccgcgatttcatcatcctgggctacaggtccggcgcgatcggccaggtcgcgatcatgaagcttatcgacggaaccttcggcgaattccaacagctggaatttgacgaggaaatctacaccgtcgcatcgggcggaaacccagaatgggacgcgcccgtcattcgcctttcttacggatcattcaccaccccggcgcagctgtttaactactggattgaatccggcgaacgcacgctgctgaagcagcaggaagtgctcggcggatacaacccgtcagactatgtggcctcccgattgtgggtcactgcaaaagatggcgcgcagattccagtgtccttggtacaccgcaccgacctggatgtatccaagcccaaccccacgttgctctacggctatggttcctacgaatcatccattgatccaggcttctctatcgcgcgtttgtcactgatggatcgtggcatgattttcgcgattgctcacgtccgtggcggtggcgaaatgggccgcggctggtacgacaacggcaaaaccaccacgaagaaaaacaccttcaccgacttcattgatgttgccgacgccctcatcgagcagaagatttctgcccctgaaatgctggttgcagaaggcggctcagctggtggcatgctcatgggcgccattgccaacatggccggtgaccgcttcaaggcgatcgaagccaacgtgccattcgtcgatccgctgacctccatgctcatgccggaactgccactgacggttatcgaatgggatgagtggggcgatccactccacgataaggatgtctatgaatacatggcgtcgtatgccccatatgaaaacatcgaggcaaagaactaccccaatatcttggccgtaacatcgctcaacgacacccgagtgttgtacgtcgaaccagccaaatgggtagcgcagcttcgggcgactgcaaccggtggagaattccttctgaaaactgaaatggttgccggacacggcggtgtgtcaggacgctacgaaaagtggcgtgagactgcatttgagtacggctggttgatcaaccaagcgaccggtgtgaccgaataa

SEQ ID NO: 38746 - protein, 706 aa, Corynebacterium glutamicum
MSERLNAPQAPIHPITRTHHGIDFVDNYEWLRDKESQETLDYLEAENAFTKQETEQLATLRDNIYEEIKSRVKETDMSIPVRAGKYWYYSRTEEGKSYGYSCRIPVTEGSDAWTPPVIPEGEPAQGETIIMDANELAEGHEFFSMGASSVTTSGRYLAYSTDVTGEERFTLRIKDLETGELLPDTLTGIFYGATWVGEEYLFYQRVDDAWRPDTVWRHKVGTPVEEDVLVYHEPDERYSTWVGTTRSEKFILFGCASKITSEVRVLPFDQPEGTPEVLIPRAEGVEYDVDHAVVDGSDIWLVTHNAEGPNFSVGWAGVDKLNSLDALTPLVAHKDDVRIEGVDTYRDFIILGYRSGAIGQVAIMKLIDGTFGEFQQLEFDEEIYTVASGGNPEWDAPVIRLSYGSFTTPAQLFNYWIESGERTLLKQQEVLGGYNPSDYVASRLWVTAKDGAQIPVSLVHRTDLDVSKPNPTLLYGYGSYESSIDPGFSIARLSLMDRGMIFAIAHVRGGGEMGRGWYDNGKTTTKKNTFTDFIDVADALIEQKISAPEMLVAEGGSAGGMLMGAIANMAGDRFKAIEANVPFVDPLTSMLMPELPLTVIEWDEWGDPLHDKDVYEYMASYAPYENIEAKNYPNILAVTSLNDTRVLYVEPAKWVAQLRATATGGEFLLKTEMVAGHGGVSGRYEKWRETAFEYGWLINQATGVTE

SEQ ID NO: 38747 - DNA, 2391 bp, Oryza sativa subsp
  CDS (1)..(2391)
atgcgccaccaggtaggccttctctcccgcctcctcctccggcgccacgtacaccgccgctccaagccggccaccgcgccacccccgcccccgcccccgaccccgccgcggccgccgcagaagcccgagccggtctccatccacggggagacgtggcacgacagctacgcgtggatgggcgccctctccgacgccgccgccatgcgccacatggacgtgcacatggaggccgaggagaagtacgccgaggcctgcctcgccgcggcgggcgccgaccgcctcgcgcggaagctccagctcgagatggcctcccgcctcgcctccgacgcctgcacgccgcccgtccgctggggaccctggctgtactaccgccgcgcggacgagggcaagcagtaccctgtgctctgccgccgctccgcggcgctacacagcgagttcatctcgtatagcgacccctctgccggattcgacttcaccgccgggaagcgcatcgagcagaaattggtggattacaacaaggaggccgagcggttcggaggatactcatacgaggaactgtctgaagtgtccccagatcaccggttcattgcatacactatgtatgataaagataaggattccttcactttaatggtcagggacctagtgacaggaactctttgtgataaacctcgtgctgaccgggtctcaaacatatcctgggctatggatgggaaagcactggtttacattgttacaaatgaggataggaggccatatcggctgttttgcagcattattggatccagcaaggatgatgttctcatgttggaagaacctgatgagaatatttatttaaatatcagacataccaaggattttcggttcataacgttaaatgttttttcagacactcactcaaaggcactttttcttgtgcactatacctgtaatattgtatatttgataaatgcttctgatcccctgtccagaatgagattggtttgggaaggtgaatcccaagttcattgtattgttgaacaccatcatggacgcctatatttatttactgatgcttcaagagaaggcacccctgttgattctcattatctaatgctgtctgatgtggaatctcctgggccgaagagctggaaggatgtttttcttgaagaaccaggcgttattcttgaagatgttgacttctgtgatactcacatggtgcttgttctgagacaaggcagaaagctgaagctctgttcagtaaagttacctttccctgaacacatcagagtacctgctcgtctgtcagatttccatccatttgacttgtctcttccaaatcatgtgtgtcagattttacctggcccaaattacgattatcgttcctcaacaatgcgtttcacaatatcatcacctgtgatgcctgatgcagttgttgactacaacttaccgaatggtaagtggcgaatagtgcaacagcaaaacatgcttcatgaaagaacgaaagcactatatgggaatgcttttgctgctagtatggttaagccatcttcaaaaggaggtgatttgtcaagtgaggactttggagattgtgattggaatgaactctctgaatactatgcttgtgagtactatgatgttccatcaaaggatggagttttggttccacttacattagtatattcgcaaaagcacaagcaagagggaaatccagggttacttcatggacatggtgcttatggtgagattctggataagcgctggcgcagtgagttaaagagcctacttgatcgtggctgggtgattgcatttgctgatgtcaggggtggtggaggttatgggaagaagtggcaccaagatggtgcacgtacaaaaaagatgaattctatatatgattttatctcttgtggtgagtttcttcttgagaagggtatcataaaagaaaataaacttgctggatggggatatagtgctggaggacttctggtggcttcagcaattaatactcggcccgatttgtttcgtgctgtcgttttgaaggtccctttcttggatgtttgcaatactcttctccaccctattctacctcttacagctattgattacgaagagtttggatttcctgtggaccatgaagagttcctttcaatcaggaagtattctccttatgataacatccagaaggatgttccttacccagcagtgtttgtgacatcatcatttaatacaaggtttggtgtatgggaagcagctaaatgggtcgcaaaagtccgagaagttactcgctatgatccagagcggcctgtaattctcaacttgacaacagatgttgtagaagagagcaagtatttgcaaaccaaggaattagcattggagactgctttcctaattaaaatgattcatgatacatga

SEQ ID NO: 38748 - protein, 796 aa, Oryza sativa subsp
MRHQVGLLSRLLLRRHVHRRSKPATAPPPPPPPTPPRPPQKPEPVSIHGETWHDSYAWMGALSDAAAMRHMDVHMEAEEKYAEACLAAAGADRLARKLQLEMASRLASDACTPPVRWGPWLYYRRADEGKQYPVLCRRSAALHSEFISYSDPSAGFDFTAGKRIEQKLVDYNKEAERFGGYSYEELSEVSPDHRFIAYTMYDKDKDSFTLMVRDLVTGTLCDKPRADRVSNISWAMDGKALVYIVTNEDRRPYRLFCSIIGSSKDDVLMLEEPDENIYLNIRHTKDFRFITLNVFSDTHSKALFLVHYTCNIVYLINASDPLSRMRLVWEGESQVHCIVEHHHGRLYLFTDASREGTPVDSHYLMLSDVESPGPKSWKDVFLEEPGVILEDVDFCDTHMVLVLRQGRKLKLCSVKLPFPEHIRVPARLSDFHPFDLSLPNHVCQILPGPNYDYRSSTMRFTISSPVMPDAVVDYNLPNGKWRIVQQQNMLHERTKALYGNAFAASMVKPSSKGGDLSSEDFGDCDWNELSEYYACEYYDVPSKDGVLVPLTLVYSQKHKQEGNPGLLHGHGAYGEILDKRWRSELKSLLDRGWVIAFADVRGGGGYGKKWHQDGARTKKMNSIYDFISCGEFLLEKGIIKENKLAGWGYSAGGLLVASAINTRPDLFRAVVLKVPFLDVCNTLLHPILPLTAIDYEEFGFPVDHEEFLSIRKYSPYDNIQKDVPYPAVFVTSSFNTRFGVWEAAKWVAKVREVTRYDPERPVILNLTTDVVEESKYLQTKELALETAFLIKMIHDT

SEQ ID NO: 38749 - DNA, 2058 bp, Treponema denticola
  CDS (1)..(2058): transl_table=11
ttgaaacaatctgattctgaaaagccgcctattgcgggaataaaagaaacacgttttgaaaagtttgggaaaacaagaatcgataattattattggttaaaagacaagaccgataaaaaagttattgactacttaaatgcagaaaatgcttatacggataagataatggcttcttcaaaggatctgcaaaaatctatttatgatgaaattgtaggccgcataaaagaagatgatgaaacctatcctgtttttgaaaacggatattattattacaaccgtgtcgaaaagggaaagcaatacagaacctattgcagaaaaaaagcatctcttgatgcagccgaagaaatcattttcgatgtaaacaaaatggcggaaggaaaacaagcctttatcttcgacgactatgttgtaagccctgacaataaaaaggcttgctatttttataacgaaacaggctcctttgcggaatttattttaaagatacgcgatttggaaaccggaaaagatataggcttcagctatgacggagccgttaccgcagcttgggcatccgacagtaaaactcttttttacagtgcaatcgacagtaccctgcgttcaagcaaggtcttccgtcaaaaacttgatgaagaaaagggtactcttgtctatgaagaaaaagatgtaaaatattcttgctatgtgcatgaaacaaagacaaaggaatttatttttatttcaagttcaagttctaccacctccgaagagcgttttatttatgccgataagcctgaagaagaatttaaaatcttccttccccgcgttaaggataccgaatactccgtttatccgcacaaggaaaagttttttataggttacaaggacaagcaaaacttaaacggcaaaatctattccgctcctcgttcttcctattccgataaatctacatggaaggaagaacgagctcacgacgaaaatgtacgcattgaggatgtgtccgtatttgaatcctaccttgtattggagcttcgtaaaaacggcctcatcgagattgaaattaaatcgcttaaaaacggtgaggtaaaaaatatttccttccccgaaccggtttatacggcttatttgggcgcaaacccggaatacgtttccgataaggtacgctatatttacacatccttaaaccgcccgagcagcgtatacgattacgatatacttacaggaaaatcggtcttgttaaaacagcaggaagttccctcaggctttaatccagatgattacactgtagaaaggctttgggcgacagcacaggacggagtgaaggtgcctatggctgccgtttacaaaaaaggtttggtaaaggacgggtcctcacccgctcttctttattcttatggaagctacggctccagctccgatgcgtttttcagtccgagtgtttacagccttgtagagaggggctttgtttatgttgttgctcaaatcaggggcggaagcgatatgggagaaaagtggtatgaggacgggaagctcttaaaaaagaaaaatacatttaccgattttattgcttgtgccgagcacctgatttctcaaaaatacacttcttccgataagctcgcaatcatgggcggaagtgcgggcggtcttcttatgggtgctgttacaaatatgaggccggatcttttccattcggtcgttgcagttgttccctttatagatgtcgttaccaccatgctcgacgattcattaccccttacaacgggcgaatatgaagagtggggaaacccgaacgaagaagaatattataactacatgctttcatattctccctacgataatatcgaagcaaaaaattatccgcacatttttgtaacgggcggcttaaacgattcgcaagttcttttccatgagcctgcaaaatatacggcaaagctgcgtgcaaagaaaaccggagataatattctaatcctccgtatgaatatggactccggacacggcggagccacaggccgctatgacaagattaaggatatagcctttgaacaagcctttattcttaatatggtaggaatcaacaagtag

SEQ ID NO: 38750 - protein, 685 aa, Treponema denticola
MKQSDSEKPPIAGIKETRFEKFGKTRIDNYYWLKDKTDKKVIDYLNAENAYTDKIMASSKDLQKSIYDEIVGRIKEDDETYPVFENGYYYYNRVEKGKQYRTYCRKKASLDAAEEIIFDVNKMAEGKQAFIFDDYVVSPDNKKACYFYNETGSFAEFILKIRDLETGKDIGFSYDGAVTAAWASDSKTLFYSAIDSTLRSSKVFRQKLDEEKGTLVYEEKDVKYSCYVHETKTKEFIFISSSSSTTSEERFIYADKPEEEFKIFLPRVKDTEYSVYPHKEKFFIGYKDKQNLNGKIYSAPRSSYSDKSTWKEERAHDENVRIEDVSVFESYLVLELRKNGLIEIEIKSLKNGEVKNISFPEPVYTAYLGANPEYVSDKVRYIYTSLNRPSSVYDYDILTGKSVLLKQQEVPSGFNPDDYTVERLWATAQDGVKVPMAAVYKKGLVKDGSSPALLYSYGSYGSSSDAFFSPSVYSLVERGFVYVVAQIRGGSDMGEKWYEDGKLLKKKNTFTDFIACAEHLISQKYTSSDKLAIMGGSAGGLLMGAVTNMRPDLFHSVVAVVPFIDVVTTMLDDSLPLTTGEYEEWGNPNEEEYYNYMLSYSPYDNIEAKNYPHIFVTGGLNDSQVLFHEPAKYTAKLRAKKTGDNILILRMNMDSGHGGATGRYDKIKDIAFEQAFILNMVGINK

SEQ ID NO: 38751 - DNA, 2397 bp, Arabidopsis thaliana
  CDS (1)..(2397)
atggcagtaacatatcttctccggcgttacaagccggcgacaatatcatcagttttgtctttctcgacgaaatgttttgttggacgaacatcatcactctctgttccaacggaagctcctccggttccaaagaagatcccattcgcaatctcatctcatgggatcacaagacaagatcctttccattggatgaagaatacggacgacaccgatttcgtcgacttcctcaagcgtgagaactcatactctcaagctttcatggctgacacagaaaccctgaggcgtgatttattctccgagatgaaaactcgtattccagaagagattttcactcctcctgagcgttggggacaatggttatatagacaatacatacccaaaggaaaagagtatcctcttctatgtaggagattggagaagggtaaaacaaattggctctctggtctttttcgtggagaagaagaagaagttgtgcttgactggaatcaaattgcagagcagtttggttatgttcatgttggagtttgtcgggtttcacctgatcataactatctggcgtacacggttgatcccgaaggaggtgagcgtttcattctccagattaaggatttaagaactgatcggttagttccgaggttggaagttgatggagttgttagcttggcatgggctttagatggaatcaccttgttttacactgttacagatgaaaaccaaagacctcacagggttgttgtcacaaatgttgaatcagatgggagagatgatgccgtagtgtttaccgaaagagattccagtttctgtgtagacataacgaccacaaaagatggcaagtttgttactatcaattcaaactcaaggacttcatccgaggaatttacctctttcaactgcatttttgtttatattgtaaatgctgataagccaatggctggtttgcaaagaactcgcgaacgagttcctggcgtgcagtgttttcttgaacatcacaatgggttcttttacattcttacaaattctccctcaaatgcaattagtgagtggtctggtgaaggctactatttgactagatgcttagtagaggaaattgaagcatctgactggcagactgttttccgtccagatgatgatgtggttatacaagatatggacatgttcaatgactacttagtgctttatcttaataagaaaggcttacctatgctctgttccattgatatgcccataaaagcaaatacgaagcatatggatgatcttgttccctggtattttccacttccagttgattcatgcagtgttgcccctggttcaaaccacgacttccagagctctatataccgagtggtgctttcgtctcctgtgattcctgacactatcgttgactatgacgtgtcaagaagattgttctcaattgtgcagcaggagggaggggttgtagataattctgatagtagtaagccatggtacacagcagatcgctctacagagaataacggtcaacttaatgatagaaccagcgagggagaagatggtcagttagattctcgaatgcctaaatgggaggacttatctgatacatatgtttgtgaaagacaagaagtttcttcacatgacggagttgaagtccctcttacaattctgtattcacgagaagcatggaagaagagtgagtcaccgggaatgttgataggttatggcgcttatggagaagttttggacaaaagctggtgcacaaatcgattgagtatgcttgatcgtggttgggtgattgcttttgctgatgtgaggggaggaggcagtggggagttttcatggcacaaatccggaactagatcgttgaaacaaaattcaatccaagatttcatatacagtgctaaatatctagtcgaaaaaggctatgtgcatagacatcatcttgctgctgttgggtacagtgcaggagctattcttccagctgcagctatgaatatgcacccgagtctatttcaagctgtgattttgaaggttccttttgtagatgtattaaacacattatcggatccaaatttacctctcacactcctggaccatgaagaattcgggaacccagacaaccaaactgacttcggatcgatccttagctattctccatatgataagatacgaaaagatgtttgctatccgtccatgcttgtcactacttcgtttcatgactcaagggttggagtatgggaaggtgcaaaatgggtggctaagataagggatagtacgtgccacgactgctcccgagctgtgattctgaaaacaaatatgaacggagggcattttggtgaaggtggtcgctatgctcaatgcgaagagactgcctttgattatgcttttcttctcaaagttatgggtcatcacaacaatagataa

SEQ ID NO: 38752 - protein, 798 aa, Arabidopsis thaliana
MAVTYLLRRYKPATISSVLSFSTKCFVGRTSSLSVPTEAPPVPKKIPFAISSHGITRQDPFHWMKNTDDTDFVDFLKRENSYSQAFMADTETLRRDLFSEMKTRIPEEIFTPPERWGQWLYRQYIPKGKEYPLLCRRLEKGKTNWLSGLFRGEEEEVVLDWNQIAEQFGYVHVGVCRVSPDHNYLAYTVDPEGGERFILQIKDLRTDRLVPRLEVDGVVSLAWALDGITLFYTVTDENQRPHRVVVTNVESDGRDDAVVFTERDSSFCVDITTTKDGKFVTINSNSRTSSEEFTSFNCIFVYIVNADKPMAGLQRTRERVPGVQCFLEHHNGFFYILTNSPSNAISEWSGEGYYLTRCLVEEIEASDWQTVFRPDDDVVIQDMDMFNDYLVLYLNKKGLPMLCSIDMPIKANTKHMDDLVPWYFPLPVDSCSVAPGSNHDFQSSIYRVVLSSPVIPDTIVDYDVSRRLFSIVQQEGGVVDNSDSSKPWYTADRSTENNGQLNDRTSEGEDGQLDSRMPKWEDLSDTYVCERQEVSSHDGVEVPLTILYSREAWKKSESPGMLIGYGAYGEVLDKSWCTNRLSMLDRGWVIAFADVRGGGSGEFSWHKSGTRSLKQNSIQDFIYSAKYLVEKGYVHRHHLAAVGYSAGAILPAAAMNMHPSLFQAVILKVPFVDVLNTLSDPNLPLTLLDHEEFGNPDNQTDFGSILSYSPYDKIRKDVCYPSMLVTTSFHDSRVGVWEGAKWVAKIRDSTCHDCSRAVILKTNMNGGHFGEGGRYAQCEETAFDYAFLLKVMGHHNNR

SEQ ID NO: 38753 - DNA, 2073 bp, Aeromonas punctata subsp
  CDS (1)..(2073): transl_table=11
atgtcagggaaagcgcgccttcactaccccgtcacccgccagggtgagcaggtggatcactacttcggccaggccgtggccgacccctatcgctggctggaggatgatcgcagccccgagaccgaggcctgggtcaaggcccagaatgccgtgacccaggactacctggcacagatcccgtatcgcgctgccatcaaggagaagctggccgcctcctggaactacgccaaggagggggcgccgtttcgcgaggggcgctaccactacttcttcaagaacgacggcctgcagaaccagaacgtgctgtggcgccagaaggagggcaaaccggcggaggtgttcctagatcccaataccctcagccccgacggcaccacggcgctggatcagctgagcttctcccgcgatggccgcatcctggcctactcgctgtcgctggcgggtagcgactggcgcgagatccacctgatggacgtggagagcaagcagccgctggagacccctctcaaggacgtgaaattcagcggcatcagctggctcggcaacgagggcttcttctactcgagctacgacaagcccgatggcagcgagctgtcggccaggactgatcagcacaaggtctatttccaccggctcggcacggcgcaggaggatgaccggctggtgttcggcgccatcccggcccagcaccaccgctacgtgggggcgaccgtcaccgaagatgaccgcttcctgctcatctcggcggcgaactccacctccggcaaccgcctctatgtgaaggatctgagccaggagaacgcgccgctgctgacggtgcagggggatctggacgcggacgtgagcctggtggacaacaagggcagcaccctatacctgctgaccaaccgggacgcccccaaccgccggctggtgacggtggatgccgccaacccggggccggcccactggcgcgaccttatccccgagcgtcacagggtgctgacggtgcacagcggcacggcctatctgttcgccgagtacatggtggatgccaccgccccggtcgagcagttcgactacgagggcaagcgggtgcgcgaggtggcgctgcccggccttggcagcgtcagcggcttcaacggcaagcacgacgaccccgccctctacttcggcttcgagaactatgcccagccgcccactctctatcggttcgagccaaagagcggcgccatcagcctctatcgcgcctcggcggcgccgttcaagccggaggattacgtctccgagcagcgcttctaccagagcaaggacggcacccgggtgccgctcatcatcagctaccgcaaggggctgaaactcgatggcagcaacccgaccatcctctacggctatggcggttttgacgtgagccttaccccgagcttcagcgtatcggtggccaactggctggatctggggggcgtctatgcggtggccaacctgcgtgggggcggcgagtacggccaggcctggcacctggcgggcacccagcagaacaaacagaacgtgttcgacgacttcatcgcggcggccgagtacctcaaggccgagggctacacccgcaccgatcggctggcgatccgcggtggctccaacggcggtctgctggtgggggccgtgatgacccagcggccggatctgatgcgggtcgccctgccagcggtgggggtgctcgacatgctgcgctaccacaccttcaccgccggggcgggctgggcctatgactacggcaccagtgccgacagcgaggcgatgttcgactacctgaagggctactcgccgctgcacaacgtccgacccggggtcagctacccctcgactatggtgaccacggcggatcacgacgatcgggtggtaccggctcactccttcaagtttgccgccaccctgcaggccgacaatgcgggcccccatccccagctcatccgcatcgagaccaatgccgggcacggggcgggtacgccggtggcgaagctgattgagcagagtgcggacatctatgccttcaccctgtacgagatgggctaccgggagctgccgcgtcagccttga

SEQ ID NO: 38754 - protein, 690 aa, Aeromonas punctata subsp
MSGKARLHYPVTRQGEQVDHYFGQAVADPYRWLEDDRSPETEAWVKAQNAVTQDYLAQIPYRAAIKEKLAASWNYAKEGAPFREGRYHYFFKNDGLQNQNVLWRQKEGKPAEVFLDPNTLSPDGTTALDQLSFSRDGRILAYSLSLAGSDWREIHLMDVESKQPLETPLKDVKFSGISWLGNEGFFYSSYDKPDGSELSARTDQHKVYFHRLGTAQEDDRLVFGAIPAQHHRYVGATVTEDDRFLLISAANSTSGNRLYVKDLSQENAPLLTVQGDLDADVSLVDNKGSTLYLLTNRDAPNRRLVTVDAANPGPAHWRDLIPERHRVLTVHSGTAYLFAEYMVDATAPVEQFDYEGKRVREVALPGLGSVSGFNGKHDDPALYFGFENYAQPPTLYRFEPKSGAISLYRASAAPFKPEDYVSEQRFYQSKDGTRVPLIISYRKGLKLDGSNPTILYGYGGFDVSLTPSFSVSVANWLDLGGVYAVANLRGGGEYGQAWHLAGTQQNKQNVFDDFIAAAEYLKAEGYTRTDRLAIRGGSNGGLLVGAVMTQRPDLMRVALPAVGVLDMLRYHTFTAGAGWAYDYGTSADSEAMFDYLKGYSPLHNVRPGVSYPSTMVTTADHDDRVVPAHSFKFAATLQADNAGPHPQLIRIETNAGHGAGTPVAKLIEQSADIYAFTLYEMGYRELPRQP

SEQ ID NO: 38755 - DNA, 2392 bp, Moraxella lacunata
  CDS (121)..(2193): transl_table=11
accaattatatactgcgtactacaatcatcataatatatacatccaattaggaaaaccataaaagaggatttcgcggatcaagtcacgaaactaatacatatacaaaaggaggaattttaatgaaactacccatagcaaaacgcattcctcatccccacgagttacatggcgatgtgagggaagacgattattattggctgaaggatcgggataacaccgaagtcatccagtatttagaggaagaaaatcggtattaccatgaaatcatgcgaccattgcaagagcaaactgagcagatttatgaaagtatggttgaccgtgttcccgattcagagatgaaagtgcccgtgcagcatgggcagttcttctattattcccgcttggacaaaaacaaacaatatccgatttatgcacgtaagcaagcagctagccgggcacttctgcaagatgcaacagaggaagttgtccttgacctgaatgaattggctgaggaagacgattatttaagtgtaaccgtacaacgtatgaccactgatcatagtcgtctcgcctatttggaaaaccgcgatggtacagataggtatacaatttatatcaaggatttgaatacgggcgaacttctgtccgatcgggttccgaatgtctatatctatggcagtatggagtggtgccggtgcggcgattatattttttacacgactgttgatgagcatcaacgcccatgtcaattatggaggcatcgtttaggcagtgacgtggaaagtgacgaattgatctttgaagaaaaagacgatacgtttacattatttattagtaaatcgcaaagcgggaaattcatctttgtctattcaagttcgaaaacaaccagcgaaatccatatgattgacacagatagtccgttatcgcctttacaactagtcgatgaacggcgtgacggaatcttatatgacgtcgagcattgggaagatgatctgcttatcttaacgaacgaaggggcacttaacttccaacttctccgctgccctctcaatgacctttcttccaaagtgaatgtcgtcgagtataacgaagagcgttatcttcaagaaatgtatccattccgcgacaaactgctcatcgctggccgggagaacggtttgacgcaaatttgggtagtacatgatggagaacttcaacaaatcagttgggatgagcctctttacacagtcgcggttttatccgagcaaagctatgataccaatgaagtattaatacaatacgagtctttgctcactccgaaaacaacgttcggactgaatctgcaaactggagagaagcaatgcttgcaagttgcacctgtcagcggtgaatatgatcgttcccaattccgccaggagcagttatgggcgacaggccgaagtggcgtcaaagtgccaatgaccgctgtctatcttgaaggtgcgctcgataacgggcctgcgccgctaattctatacgggtatggatcgtacggttcaaacagcgacccgcgttttgacccgtaccgtctaccactgcttgaaaaagggattgtttttgttaccgcacaagtgcgcggaggatccgaaatggggcgaggttggtatgaagacggaaagatgcaaaataagcggaatacgtttacggatttcatcgccgctgcaaagcatctcattgaccaaaattatacatcgccgaccaaaatggctgcacgaggtggcagtgcgggaggcttgctcgttggcgcagtagccaatatggccggagaattgttcaaagtcattgttccggcagtgccgttcgtcgatgttgtaacgacaatgctcgatacatctattcctcttacgaccttggagtgggatgagtggggcgatccaagaaagcaagaagactacttctatatgaaatcatacagcccttacgacaatgtagaggcgaaagactatccgcatatgtatattacaacaggcattaacgatccccgcgtcgggtactttgagcccgccaaatgggttgcacgcttgagggcggttaaaacagataacaacacgcttgtcatgaaaacaaacatgggcgccggccatttcggtaagtcaggccgtttcaatcacctgaaagaagctgcggaaagctatgctttcatacttgataagcttggtgttgaggcagaagaaaaagtgctgaaccatcgttaattaaatatcgaaaaggacaattctccgtttgccagacggaggactgtcctttttgttatgtgaaatttccttcaaaataattttagtctctttccatgcatagaggcccggccaaatgtacttcgttgcgagtatacatatttgtaagtgacaaaggaggtgatttgagtggaggagaagatgagccgagaacaattaa

SEQ ID NO: 38756 - protein, 690 aa, Moraxella lacunata
MKLPIAKRIPHPHELHGDVREDDYYWLKDRDNTEVIQYLEEENRYYHEIMRPLQEQTEQIYESMVDRVPDSEMKVPVQHGQFFYYSRLDKNKQYPIYARKQAASRALLQDATEEVVLDLNELAEEDDYLSVTVQRMTTDHSRLAYLENRDGTDRYTIYIKDLNTGELLSDRVPNVYIYGSMEWCRCGDYIFYTTVDEHQRPCQLWRHRLGSDVESDELIFEEKDDTFTLFISKSQSGKFIFVYSSSKTTSEIHMIDTDSPLSPLQLVDERRDGILYDVEHWEDDLLILTNEGALNFQLLRCPLNDLSSKVNVVEYNEERYLQEMYPFRDKLLIAGRENGLTQIWVVHDGELQQISWDEPLYTVAVLSEQSYDTNEVLIQYESLLTPKTTFGLNLQTGEKQCLQVAPVSGEYDRSQFRQEQLWATGRSGVKVPMTAVYLEGALDNGPAPLILYGYGSYGSNSDPRFDPYRLPLLEKGIVFVTAQVRGGSEMGRGWYEDGKMQNKRNTFTDFIAAAKHLIDQNYTSPTKMAARGGSAGGLLVGAVANMAGELFKVIVPAVPFVDVVTTMLDTSIPLTTLEWDEWGDPRKQEDYFYMKSYSPYDNVEAKDYPHMYITTGINDPRVGYFEPAKWVARLRAVKTDNNTLVMKTNMGAGHFGKSGRFNHLKEAAESYAFILDKLGVEAEEKVLNHR

SEQ ID NO: 38757 - DNA, 2301 bp, Glycine max
  CDS (1)..(2301)
atggtacttccaaatcttcgcttaaactttggtcgcattttctgcattcccctagctgttaccgttgttctctcttccgctgttccgtttccttcctccgccgccgccaccgcagcattctctcgccaccgccgtctcgtcgcctccgcatcgccgatgaatccgtcgtcgcagtctcagtccccgcctcctccggtggcaaagaaggtggagcatgcgatggaaatgttcggcgacgtgagaatcgacaactactattggctccgtgacgattcccgcaccgatcccgaagtgctctcgtacctccgccaggaaaatgcctacaccgattccatcatgtccggaactaaggaatttgaagataagctttttgctgagataagaggaaggattaaggaggaggatgtctctgcacctttacgcaaagggccttattactattataagagaactttggaagggaaggagtatgttcaatattgcaggcgccttatatctgataaccaaaaggtgccatctgtgcatgacatcatgcccacaggacctgaagctcctccagagcatgttattttggatgtgaatgttaaggcacaacatcacctatactacagtatcggtgcttttaaggttagcccaaataacaagttggtagcatatgcagaagacaccaagggagatgaaatatatactatttatgtcattgatgttgagactcaagctactattggagagcctcttgttggtgtaacatcataccttgaatgggctggtgacaatgctttcgtttacatcacaatggatgagattctcaggcctgacaaggcatggtttcatgtgctgggaacagaacaatcaaaggatacttgtctttatgtggaaaaggatgatatgttttctcttgatcttcaagcttctgagagcaagaaatatttgtttgttgcatcagagagtaaaaatacaaggttcaatttttatctggatgtttctaagcctgaagagggtcttaaagttctgacaccacgtgttgatggtattgacacaactgtcagccatcgtggagatcatttctttattaagaggagaagtgatcagtttttcaattcagaggttgtagcttgtgctgtcaataacacctcttcaactacagttcttattcctcacagggaaagtgttaaaattcaggagatacaactttttagtgatcatctagtagcatatgagagagaaaatggtctaccaaaaataatagtttatcaccttccaccaattggtgaaccactaaggagccttgaaagtggtcaggcggtcagttttgttgatcctgtatactcagcagaatcctcagattcagagttttcatcaagtattttacggttttcgtatagctcattgaggactccttcctcagtctatgattatgatatgaaggcaggcatttctgttttgaagaagattgactcggttctgggaggttttgatgcaacacgttatgtcaccgaaaggcagtgggcaccttcttcggatggaactttgattcccatatcaattgtttaccgaaaagatcttgtgaaactagatggatcagatccattactactctatggatatggatcgtatgagatatgcatagatcctagtttcaaatcagcaaggctttcattgttagatcggggttttatatatgcaatagctcatatacgtggaggtggtgaaatgggaaggcagtggtatgaaaatgggaagctgttgaagaaaaagaacactttcactgatttcattgcatgtgctgagtatttgattgaaaaaaaattctgttctaaggaaaaactgtgcatcgaaggaagaagtgctggtggtttgctaattggtgcagttcttaatatgagaccagatttatgcaaggctgctgttgctggagtaccttttgtggatgttgtaacaacaatgcttgatccaactattcctctcactacctcagaatgggaggaatggggtgatcctagaaaggaggaattctacttctacatgaaatcatattcccccgttgataacgtgaaggcacagaattatccacacattcttgttacagcaggattaaatgacccacgggttttgtattcagaacctgcgaagtttgtggcaaaactgagggatatgaagactgatgataacatactgctgtttaaatgcgagcttggtgctggacatttttccaagtcgggaagatttgagaagctccaggaagatgccttcacttatgcatacatcatgaagactctaaacatgactagtcggctttag

SEQ ID NO: 38758 - protein, 766 aa, Glycine max
MVLPNLRLNFGRIFCIPLAVTVVLSSAVPFPSSAAATAAFSRHRRLVASASPMNPSSQSQSPPPPVAKKVEHAMEMFGDVRIDNYYWLRDDSRTDPEVLSYLRQENAYTDSIMSGTKEFEDKLFAEIRGRIKEEDVSAPLRKGPYYYYKRTLEGKEYVQYCRRLISDNQKVPSVHDIMPTGPEAPPEHVILDVNVKAQHHLYYSIGAFKVSPNNKLVAYAEDTKGDEIYTIYVIDVETQATIGEPLVGVTSYLEWAGDNAFVYITMDEILRPDKAWFHVLGTEQSKDTCLYVEKDDMFSLDLQASESKKYLFVASESKNTRFNFYLDVSKPEEGLKVLTPRVDGIDTTVSHRGDHFFIKRRSDQFFNSEVVACAVNNTSSTTVLIPHRESVKIQEIQLFSDHLVAYERENGLPKIIVYHLPPIGEPLRSLESGQAVSFVDPVYSAESSDSEFSSSILRFSYSSLRTPSSVYDYDMKAGISVLKKIDSVLGGFDATRYVTERQWAPSSDGTLIPISIVYRKDLVKLDGSDPLLLYGYGSYEICIDPSFKSARLSLLDRGFIYAIAHIRGGGEMGRQWYENGKLLKKKNTFTDFIACAEYLIEKKFCSKEKLCIEGRSAGGLLIGAVLNMRPDLCKAAVAGVPFVDVVTTMLDPTIPLTTSEWEEWGDPRKEEFYFYMKSYSPVDNVKAQNYPHILVTAGLNDPRVLYSEPAKFVAKLRDMKTDDNILLFKCELGAGHFSKSGRFEKLQEDAFTYAYIMKTLNMTSRL

SEQ ID NO: 38759 - DNA, 20 bp, Artificial sequence
  primer
atgctaccaaaagccgcccg

SEQ ID NO: 38760 - DNA, 21 bp, Artificial sequence
  primer
ttagtccgcaggcgtagcggg

SEQ ID NO: 38761 - protein, 926 aa, Artificial sequence
  consensus sequence
  Variant (2)..(13): Xaa in position 2 to 13 is any amino acid
  Variant (14)..(14): Xaa in position 14 is any or no amino acid
  Variant (16)..(18): Xaa in position 16 to 18 is any amino acid
  Variant (19)..(19): Xaa in position 19 is any or no amino acid
  Variant (21)..(21): Xaa in position 21 is any amino acid
  Variant (23)..(23): Xaa in position 23 is any amino acid
  Variant (25)..(36): Xaa in position 25 to 36 is any amino acid
  Variant (37)..(47): Xaa in position 37 to 47 is any or no amino acid
  Variant (49)..(50): Xaa in position 49 to 50 is any amino acid
  Variant (53)..(63): Xaa in position 53 to 63 is any amino acid
  Variant (64)..(68): Xaa in position 64 to 68 is any or no amino acid
  Variant (70)..(75): Xaa in position 70 to 75 is any amino acid
  Variant (77)..(79): Xaa in position 77 to 79 is any amino acid
  Variant (81)..(86): Xaa in position 81 to 86 is any amino acid
  Variant (87)..(89): Xaa in position 87 to 89 is any or no amino acid
  Variant (91)..(95): Xaa in position 91 to 95 is any amino acid
  Variant (96)..(106): Xaa in position 96 to 106 is any or no amino acid
  Variant (108)..(119): Xaa in position 108 to 119 is any amino acid
  Variant (120)..(121): Xaa in position 120 to 121 is any or no amino acid
  Variant (123)..(131): Xaa in position 123 to 131 is any amino acid
  Variant (132)..(153): Xaa in position 132 to 153 is any or no amino acid
  Variant (156)..(156): Xaa in position 156 is any amino acid
  Variant (158)..(159): Xaa in position 158 to 159 is any amino acid
  Variant (161)..(172): Xaa in position 161 to 172 is any amino acid
  Variant (173)..(175): Xaa in position 173 to 175 is any or no amino acid
  Variant (177)..(186): Xaa in position 177 to 186 is any amino acid
  Variant (188)..(190): Xaa in position 188 to 190 is any amino acid
  Variant (191)..(261): Xaa in position 191 to 261 is any or no amino acid
  Variant (263)..(268): Xaa in position 263 to 268 is any amino acid
  Variant (269)..(270): Xaa in position 269 to 270 is any or no amino acid
  Variant (272)..(283): Xaa in position 272 to 283 is any amino acid
  Variant (284)..(296): Xaa in position 284 to 296 is any or no amino acid
  Variant (298)..(299): Xaa in position 298 to 299 is any amino acid
  Variant (301)..(303): Xaa in position 301 to 303 is any amino acid
  Variant (304)..(307): Xaa in position 304 to 307 is any or no amino acid
  Variant (309)..(312): Xaa in position 309 to 312 is any amino acid
  Variant (313)..(313): Xaa in position 313 is any or no amino acid
  Variant (315)..(315): Xaa in position 315 is any amino acid
  Variant (317)..(333): Xaa in position 317 to 333 is any amino acid
  Variant (334)..(372): Xaa in position 334 to 372 is any or no amino acid
  Variant (374)..(392): Xaa in position 374 to 392 is any amino acid
  Variant (393)..(397): Xaa in position 393 to 397 is any or no amino acid
  Variant (399)..(440): Xaa in position 399 to 440 is any amino acid
  Variant (441)..(453): Xaa in position 441 to 453 is any or no amino acid
  Variant (455)..(487): Xaa in position 455 to 487 is any amino acid
  Variant (488)..(509): Xaa in position 488 to 509 is any or no amino acid
  Variant (511)..(514): Xaa in position 511 to 514 is any amino acid
  Variant (516)..(518): Xaa in position 516 to 518 is any amino acid
  Variant (520)..(546): Xaa in position 520 to 546 is any amino acid
  Variant (547)..(611): Xaa in position 547 to 611 is any or no amino acid
  Variant (613)..(621): Xaa in position 613 to 621 is any amino acid
  Variant (622)..(622): Xaa in position 622 is any or no amino acid
  Variant (625)..(627): Xaa in position 625 to 627 is any amino acid
  Variant (629)..(641): Xaa in position 629 to 641 is any amino acid
  Variant (642)..(650): Xaa in position 642 to 650 is any or no amino acid
  Variant (652)..(654): Xaa in position 652 to 654 is any amino acid
  Variant (656)..(656): Xaa in position 656 is any amino acid
  Variant (659)..(659): Xaa in position 659 is any amino acid
  Variant (661)..(667): Xaa in position 661 to 667 is any amino acid
  Variant (668)..(673): Xaa in position 668 to 673 is any or no amino acid
  Variant (675)..(679): Xaa in position 675 to 679 is any amino acid
  Variant (682)..(682): Xaa in position 682 is any amino acid
  Variant (686)..(688): Xaa in position 686 to 688 is any amino acid
  Variant (689)..(689): Xaa in position 689 is any or no amino acid
  Variant (691)..(691): Xaa in position 691 is any amino acid
  Variant (694)..(694): Xaa in position 694 is any amino acid
  Variant (698)..(700): Xaa in position 698 to 700 is any amino acid
  Variant (702)..(702): Xaa in position 702 is any amino acid
  Variant (703)..(703): Xaa in position 703 is any or no amino acid
  Variant (705)..(707): Xaa in position 705 to 707 is any amino acid
  Variant (709)..(712): Xaa in position 709 to 712 is any amino acid
  Variant (714)..(714): Xaa in position 714 is any amino acid
  Variant (716)..(716): Xaa in position 716 is any amino acid
  Variant (718)..(718): Xaa in position 718 is any amino acid
  Variant (721)..(726): Xaa in position 721 to 726 is any amino acid
  Variant (728)..(741): Xaa in position 728 to 741 is any amino acid
  Variant (742)..(747): Xaa in position 742 to 747 is any or no amino acid
  Variant (749)..(749): Xaa in position 749 is any amino acid
  Variant (754)..(754): Xaa in position 754 is any amino acid
  Variant (756)..(756): Xaa in position 756 is any amino acid
  Variant (758)..(760): Xaa in position 758 to 760 is any amino acid
  Variant (762)..(763): Xaa in position 762 to 763 is any amino acid
  Variant (765)..(773): Xaa in position 765 to 773 is any amino acid
  Variant (779)..(781): Xaa in position 779 to 781 is any amino acid
  Variant (783)..(783): Xaa in position 783 is any amino acid
  Variant (786)..(786): Xaa in position 786 is any amino acid
  Variant (787)..(788): Xaa in position 787 to 788 is any or no amino acid
  Variant (792)..(793): Xaa in position 792 to 793 is any amino acid
  Variant (795)..(796): Xaa in position 795 to 796 is any amino acid
  Variant (797)..(809): Xaa in position 797 to 809 is any or no amino acid
  Variant (813)..(813): Xaa in position 813 is any amino acid
  Variant (815)..(825): Xaa in position 815 to 825 is any amino acid
  Variant (826)..(826): Xaa in position 826 is any or no amino acid
  Variant (831)..(831): Xaa in position 831 is any amino acid
  Variant (833)..(837): Xaa in position 833 to 837 is any amino acid
  Variant (838)..(850): Xaa in position 838 to 850 is any or no amino acid
  Variant (853)..(854): Xaa in position 853 to 854 is any amino acid
  Variant (856)..(861): Xaa in position 856 to 861 is any amino acid
  Variant (863)..(864): Xaa in position 863 to 864 is any amino acid
  Variant (866)..(866): Xaa in position 866 is any amino acid
  Variant (868)..(868): Xaa in position 868 is any amino acid
  Variant (870)..(871): Xaa in position 870 to 871 is any amino acid
  Variant (873)..(874): Xaa in position 873 to 874 is any amino acid
  Variant (876)..(876): Xaa in position 876 is any amino acid
  Variant (879)..(892): Xaa in position 879 to 892 is any amino acid
  Variant (893)..(901): Xaa in position 893 to 901 is any or no amino acid
  Variant (904)..(904): Xaa in position 904 is any amino acid
  Variant (906)..(907): Xaa in position 906 to 907 is any amino acid
  Variant (910)..(914): Xaa in position 910 to 914 is any amino acid
  Variant (915)..(920): Xaa in position 915 to 920 is any or no amino acid
  Variant (922)..(924): Xaa in position 922 to 924 is any amino acid
PXXXXXXXXXXXXXGXXXXDXYXWXXXXXXXXXXXXXXXXXXXXXXXLXXENXXXXXXXXXXXXXXXXLXXXXXXEXXXRXXXXXXXXXPXXXXXXXXXXXXXXXXYXXXXXXXXXXXXXXRXXXXXXXXXXXXXXXXXXXXXXXXXXXXXXXLDXNXXAXXXXXXXXXXXXXXXSXXXXXXXXXXDXXXXXXXXXXXXXXXXXXXXXXXXXXXXXXXXXXXXXXXXXXXXXXXXXXXXXXXXXXXXXXXXXXXXXXXXXXWXXXXXXXXYXXXXXXXXXXXXXXXXXXXXXXXXXHXXGXXXXXXXDXXXXXEXDXXXXXXXXXXXXXXXXXXXXXXXXXXXXXXXXXXXXXXXXXXXXXXXXXXXXXXXXRXXXXXXXXXXXXXXXXXXXXXXXXNXXXXXXXXXXXXXXXXXXXXXXXXXXXXXXXXXXXXXXXXXXXXXXXXXXXXXXXRXXXXXXXXXXXXXXXXXXXXXXXXXXXXXXXXXXXXXXXXXXXXXXXXXXXXXXXRXXXXSXXXPXXXXXXXXXXXXXXXXXXXXXXXXXXXXXXXXXXXXXXXXXXXXXXXXXXXXXXXXXXXXXXXXXXXXXXXXXXXXXXXXXXXXXXXXXXXXYXXXXXXXXXXDGXXXPXXXXXXXXXXXXXXXXXXXXXXPXXXYXYGXYXXXXXXXXXXXXXFXXXXXSLXDRGXXXXAXAHXRGGXXXGXXWXXXGXXXXKXNXFXDFXXXXXXLXXXXXXXXXXXXXXXXXXXXGXSAGGXLXGXXXNXXPXXXXXXXXXVPFVDXXXTXLDXXXPLTXXEXXXXXXXXXXXXXXXEWGXPXXXXXXXXXXXXYSPYXNXXXXXXXXXXXXXXXXXXYPXXLXXXXXXDXXVXYXEXXKXXAXLRXXXXXXXXXXXXXXXXXXXXXXXGHXGXXGRXXXXXXXXXXXAXXXAF

SEQ ID NO: 38762 - protein, 31 aa, Artificial sequence
  protein pattern
  Variant (2)..(2): Xaa in position 2 is any amino acid
  Variant (7)..(7): Xaa in position 7 is any amino acid
  Variant (9)..(9): Xaa in position 9 is Ile, Met or Val
  Variant (11)..(11): Xaa in position 11 is any amino acid
  Variant (12)..(12): Xaa in position 12 is Ala, Ile or Val
  Variant (13)..(13): Xaa in position 13 is any amino acid
  Variant (15)..(16): Xaa in position 15 to 16 is any amino acid
  Variant (17)..(17): Xaa in position 17 is Ala, Gly or Pro
  Variant (18)..(21): Xaa in position 18 to 21 is any amino acid
  Variant (22)..(22): Xaa in position 22 is Ala, Cys, Gly, Ser or Val
  Variant (23)..(26): Xaa in position 23 to 26 is any amino acid
  Variant (28)..(28): Xaa in position 28 is Ala or Pro
  Variant (30)..(30): Xaa in position 30 is Ile, Leu or Val
GXSAGGXLXGXXXNXXXXXXXXXXXXVXFXD

SEQ ID NO: 38763 - protein, 21 aa, Artificial sequence
  protein pattern
  Variant (3)..(3): Xaa in position 3 is any amino acid
  Variant (4)..(4): Xaa in position 4 is Ala, Ile or Val
  Variant (5)..(5): Xaa in position 5 is any amino acid
  Variant (6)..(6): Xaa in position 6 is Ala or Val
  Variant (7)..(7): Xaa in position 7 is Phe, Ile, Leu or Val
  Variant (8)..(8): Xaa in position 8 is Ala, Thr or Val
  Variant (9)..(9): Xaa in position 9 is any amino acid
  Variant (10)..(10): Xaa in position 10 is Ile or Val
  Variant (13)..(16): Xaa in position 13 to 16 is any or no amino acid
  Variant (18)..(20): Xaa in position 18 to 20 is any amino acid
  Variant (21)..(21): Xaa in position 21 is His, Trp or Tyr
RGXXXXXXXXRGXXXXGXXXX

SEQ ID NO: 38764 - protein, 14 aa, Artificial sequence
  protein pattern
  Variant (2)..(4): Xaa in position 2 to 4 is any amino acid
  Variant (5)..(5): Xaa in position 5 is Glu or His
  Variant (6)..(6): Xaa in position 6 is Ala, Pro or Ser
  Variant (7)..(7): Xaa in position 7 is any amino acid
  Variant (9)..(9): Xaa in position 9 is Phe, Trp or Tyr
  Variant (10)..(10): Xaa in position 10 is any amino acid
  Variant (12)..(12): Xaa in position 12 is any amino acid
  Variant (14)..(14): Xaa in position 14 is Gln or Arg
VXXXXXXKXXAXLX

SEQ ID NO: 38765 - protein, 26 aa, Artificial sequence
  protein pattern
  Variant (2)..(4): Xaa in position 2 to 4 is any amino acid
  Variant (5)..(5): Xaa in position 5 is any or no amino acid
  Variant (8)..(8): Xaa in position 8 is Ala or Ser
  Variant (10)..(10): Xaa in position 10 is Glu or Gly
  Variant (11)..(11): Xaa in position 11 is any amino acid
  Variant (12)..(12): Xaa in position 12 is Ala, Cys, Gly, Asn, Ser or Thr
  Variant (13)..(14): Xaa in position 13 to 14 is any amino acid
  Variant (15)..(15): Xaa in position 15 is Ala, Ile, Pro or Val
  Variant (16)..(16): Xaa in position 16 is any amino acid
  Variant (18)..(21): Xaa in position 18 to 21 is any amino acid
  Variant (22)..(23): Xaa in position 22 to 23 is any or no amino acid
  Variant (25)..(25): Xaa in position 25 is any amino acid
  Variant (26)..(26): Xaa in position 26 is Asp, Glu or Asn
LXXXXYGXYXXXXXXXFXXXXXXLXX

SEQ ID NO: 38766 - protein, 20 aa, Artificial sequence
  protein pattern
  Variant (2)..(5): Xaa in position 2 to 5 is any amino acid
  Variant (7)..(7): Xaa in position 7 is any amino acid
  Variant (9)..(9): Xaa in position 9 is Ser, Thr or Val
  Variant (11)..(11): Xaa in position 11 is any amino acid
  Variant (13)..(13): Xaa in position 13 is Phe or Tyr
  Variant (14)..(14): Xaa in position 14 is any amino acid
  Variant (15)..(15): Xaa in position 15 is Ala, Cys, Asp, Gly, Ser or Thr
  Variant (16)..(16): Xaa in position 16 is any amino acid
  Variant (17)..(17): Xaa in position 17 is Ala, Cys, Gly, Ser or Thr
  Variant (18)..(19): Xaa in position 18 to 19 is any amino acid
GXXXXKXNXFXDXXXXXXXL

SEQ ID NO: 38767 - DNA, 261 bp, Escherichia coli
  CDS (1)..(261): transl_table=11
atgaccagtgggcagccaatgacgtcgattggttatgagctgattgttatctccgcctgcgttttaggtggcgtttctctgaaaggtggcatcggaaaaatctcatatgtggtggcgggtatcttaattttaggcaccgtggaaaacgccatgaacctgcttaatatttctcctttcgcgcagtacgtggttcgcggcttaatcctgctggcagcggtgatcttcgaccgttacaagcaaaaagcgaaacgcactgtctaa

SEQ ID NO: 38768 - protein, 86 aa, Escherichia coli
MTSGQPMTSIGYELIVISACVLGGVSLKGGIGKISYVVAGILILGTVENAMNLLNISPFAQYVVRGLILLAAVIFDRYKQKAKRTV

SEQ ID NO: 38769 - DNA, 984 bp, Klebsiella pneumoniae
  CDS (1)..(984): transl_table=11
atgatgtcatcagtgactacgtccggggctacccgctcaacctttagctttgcccgcatctgggatcagtttggcatgctggtggtgtttgcggtgctgtttatcggctgtgtgatttttgtgcccaactttgcttcattcgtcaatatgaaagggctggggctggcgatctcgatgtccgggatggtggcctgcggcatgctgttttgcctggcctccggcgattttgacctgtcggtggcgtcggttatcgcctgcgccggggtcaccaccgcggtggtgattaatctcagcgaaagcctgtggctggggatcgccgcaggcctgttgctgggggcgcttagtggtctggttaacggctttgtcattgcgcgccttaagatcaacgcgctgatcaccacgctggccaccatgcagattgtccgcggcctggcctatattatctccgacggcaaagcggtggggatcgaagatgaacgtttcttcaccctcggctatgccaactggtttggtttgccggcgccgatctggctgaccgtcgcctgcctggtggttttcggattattactaaacaaaaccacctttggccgtaatacgctggctattggcggcaatgaagaggcggcgcgccttgccggcgtcccggtggtgcgcaccaagattattatctttgtgctctccggtctggtatcggccgcagcgggtatcattctggcgtcgcggatgaccagcggccagccgatgacctcgattggctatgagctgattgttatttcggcctgcgtgctgggcggagtgtcgctgaagggcgggatcggcaagatctcctacgtggtggccgggatcctgatcctcggaaccgtggaaaatgcgatgaacctgctgaatatctcgccattctcacaatacgtcgtgcgcggggtgatcctgctggcggcggtgatcttcgaccgctacaaacaaaaagccaaacgtgcggcctga

SEQ ID NO: 38770 - protein, 327 aa, Klebsiella pneumoniae
MMSSVTTSGATRSTFSFARIWDQFGMLVVFAVLFIGCVIFVPNFASFVNMKGLGLAISMSGMVACGMLFCLASGDFDLSVASVIACAGVTTAVVINLSESLWLGIAAGLLLGALSGLVNGFVIARLKINALITTLATMQIVRGLAYIISDGKAVGIEDERFFTLGYANWFGLPAPIWLTVACLVVFGLLLNKTTFGRNTLAIGGNEEAARLAGVPVVRTKIIIFVLSGLVSAAAGIILASRMTSGQPMTSIGYELIVISACVLGGVSLKGGIGKISYVVAGILILGTVENAMNLLNISPFSQYVVRGVILLAAVIFDRYKQKAKRAA

SEQ ID NO: 38771 - DNA, 963 bp, Agrobacterium rhizogenes
  CDS (1)..(963): transl_table=11
atgaccaagaccctcacaagactattcaagggaaatcagagccgccaaggtctctggatcgttcccctgctgattaccatcgtcctcagtatcgccctgatcatccagacggaccagttcctgaaccgggaaaacctgttcaacctggtcgcgcaggcaatgccgctgatcatcacggcggtcggtcagctgttcgtcatcctggtcggcggtctcgacctttccgtcggatcgctgatcagcttcacgacggccatcctcgcgctggacgcgccgggttacattacgatcccggcggtctttctgctggcggcactgctcggtctgacgaacggctatgtcattacccgcctcaacgtgcacccgatcatcgcgacactggcgatgcagtacatcgtccttggcgctgcacgtatcttgcgtccggtctccggcgggaccatcccggatgccgtcatcagctcggtctcggggtcgttcctcggcatccccatgccgatattctggggcatttgtgtcgccgtggtcgcctggaaattgctctacggctcgcggttcggcctgcatctcttcgcgatcggcggcggtattgcgagcggcgtcgaagatgccacgcgcaacttcggtgtcgccgacaagcgcaacgtcattctcgcctatgtcgcctgctcgtgctttgctgcccttgccggcgtgttcctggccggccgcatcgtgtccggcgacccgaatgtcgggcttctctttgaactcgacgcgatcactgcagtcgccattggcggcacacaactctccggcggcgtcggcagcctgcagggaacgattatcggcgccctggtgctggcgctcctctcgaacggcatgaatctggtcaacatttcgccgttcatccagacggcgatcaagggcggcatcctgctccttgtcgtcggtttccagacacgcaagaagatggggctctaa

SEQ ID NO: 38772 - protein, 320 aa, Agrobacterium rhizogenes
MTKTLTRLFKGNQSRQGLWIVPLLITIVLSIALIIQTDQFLNRENLFNLVAQAMPLIITAVGQLFVILVGGLDLSVGSLISFTTAILALDAPGYITIPAVFLLAALLGLTNGYVITRLNVHPIIATLAMQYIVLGAARILRPVSGGTIPDAVISSVSGSFLGIPMPIFWGICVAVVAWKLLYGSRFGLHLFAIGGGIASGVEDATRNFGVADKRNVILAYVACSCFAALAGVFLAGRIVSGDPNVGLLFELDAITAVAIGGTQLSGGVGSLQGTIIGALVLALLSNGMNLVNISPFIQTAIKGGILLLVVGFQTRKKMGL

SEQ ID NO: 38773 - DNA, 996 bp, Mesorhizobium loti MAFF303099
  CDS (1)..(996): transl_table=11
atggctgagatgacaacgggacaaggattggcgtcgatccggccggggtcggtgggtcggttgcgaggctgggcgcaaagccttggcctgctctgggtcctgatagtgttgtgcgccttcgcagtgtatctgtcgccgagcttcatccagaccggcaacatgttgaatgtcggccgccaggtcgcgctgtttggcatcgtcagcgtcggcatgaccttcgtgattctgacacgcggcatcgatctttccgtcggttccatcgtcggtgtcgtcgcggttgccacagcgctgatgctctcatctggcgttccaatcccgttggcgatgattgcggcgctggggatgggagccgtgttcggcgccatcaacggagcaggcgtcgttttctttggcatgccgcccttcatcatgaccctcggcacgctggtgatggggcgcggcattgccatgaccatcgccaacggcgagccgaagacgcttggcgatgcctcggatgccttctcctatctgggaagcggttttctcttcggcattcccgtaccgatctggatcttcgttgccatagccgccgtggctttcgttgtcctacgacacacgcctttcggtcgccaaatctacgcggtcggttcaaacaccgaggcggcgcggcttgccggcatcaacgtgccgcgcgtgctgatgtcggtctatgccatctcgggcgtgctgtcggcgctgaccgccctggtttttgtctcacggctcaccgttggtgagcccaccgctggcaccaatctcgaactcgaggccatctcgatcgtcgtcatcggcggcaccagcctgtttggcggcgaaggcggcgtcatcggcaccgtgatcggcgccgcaatcattgccgtcatggctaatatattgaatttgctaggtatatcgccattcacacagcagatcgtgaagggcgccatcatcatcgccgcggtgatgttcgaggtctaccgtcacaaaagacggtcctga

SEQ ID NO: 38774 - protein, 331 aa, Mesorhizobium loti MAFF303099
MAEMTTGQGLASIRPGSVGRLRGWAQSLGLLWVLIVLCAFAVYLSPSFIQTGNMLNVGRQVALFGIVSVGMTFVILTRGIDLSVGSIVGVVAVATALMLSSGVPIPLAMIAALGMGAVFGAINGAGVVFFGMPPFIMTLGTLVMGRGIAMTIANGEPKTLGDASDAFSYLGSGFLFGIPVPIWIFVAIAAVAFVVLRHTPFGRQIYAVGSNTEAARLAGINVPRVLMSVYAISGVLSALTALVFVSRLTVGEPTAGTNLELEAISIVVIGGTSLFGGEGGVIGTVIGAAIIAVMANILNLLGISPFTQQIVKGAIIIAAVMFEVYRHKRRS

SEQ ID NO: 38775 - DNA, 1287 bp, Mesorhizobium loti MAFF303099
  CDS (1)..(1287): transl_table=11
atgagcaccgacagcgcccccgccccgcagggcaacatcgcagaggaccagcgtccacgcatcgccgtctcggcgctgacgacgaacctgcgcgaatacggtctcatcatcgcgctgatcgtcatcatgctgttcttccagttcaccacgtcgggaacgctgttcaagccggtcaacctcagcaatttggtgcagcagaactcgttcatcatcgtgatggcgctgggcatgctgctggtcatcgtttccggctatatcgacctcagcgtcggatcggtcgccggtttcatcggcgcgctggcggcaaacatgatggtcatctggcagctcggaccgctcagcaatccgctggtggtttcgatcgtctgcctgatcgtgggcggcctgatcggtgcggcgcaaggctattggatcgcctaccaccggataccgagcttcatcgtgacattggccggcatgctgatcttccgcggcatctgccaggcgctgctgggcggcggctcttcggtgggcccccttccggacggcttcaaggcgctgagctccggcttcatcccggacgttatcggcccgctgacgctgatcccgccgacggtgaacgccgccggcaagaccatcgtgggcagcggcctgacactgcacatgacgacgatcgtgctcggtctgatcgccgtggtggcctatgcctatttcggggtgaggacacgacgcaagcgcgaacgccacggctatgaagccgagcccttccccctgttcgtcatcaaaacgctggtcgccagcgcgctggcgctgttcctggtctatgagttcgccagctacaggggcctgccggtggtgctgctcgtcatgggcgtactgatctcgctgttcgtcttcgtcaccaagcgcatgaccatcggccgccgcatctacgcgatgggcggcaatcccaaggcggcgcagctgtcgggcatcaacaccgagcggctgacgctgctggtgttcatcaatatgggcgtgctgtcggcgctgggcggcctcatcatcgcggcgcgtctcggccaggccgtgccggcggccggtctgggctcagagctcgacgtcatcgccgccgtcttcatcggcggcgcctcggcgatgggcggcgtcggccaagtcatcggcgccgtggtcggcggcttcatcatgggcgtgatgaacaacggcatgtcgatcatgggtgtcaatgtcgactggcagcaggtggtcaaaggcctggtgctgctcggcgccgtgatcttcgacgtctacaacaagaacaaggcctga

SEQ ID NO: 38776 - protein, 428 aa, Mesorhizobium loti MAFF303099
MSTDSAPAPQGNIAEDQRPRIAVSALTTNLREYGLIIALIVIMLFFQFTTSGTLFKPVNLSNLVQQNSFIIVMALGMLLVIVSGYIDLSVGSVAGFIGALAANMMVIWQLGPLSNPLVVSIVCLIVGGLIGAAQGYWIAYHRIPSFIVTLAGMLIFRGICQALLGGGSSVGPLPDGFKALSSGFIPDVIGPLTLIPPTVNAAGKTIVGSGLTLHMTTIVLGLIAVVAYAYFGVRTRRKRERHGYEAEPFPLFVIKTLVASALALFLVYEFASYRGLPVVLLVMGVLISLFVFVTKRMTIGRRIYAMGGNPKAAQLSGINTERLTLLVFINMGVLSALGGLIIAARLGQAVPAAGLGSELDVIAAVFIGGASAMGGVGQVIGAVVGGFIMGVMNNGMSIMGVNVDWQQVVKGLVLLGAVIFDVYNKNKA

SEQ ID NO: 38777 - DNA, 975 bp, Bacillus halodurans C-125
  CDS (1)..(975): transl_table=11
atgagtctagagatagagagaaataaatctagtcaaacaaaagaaatcgcgaagcatatccttaaaaagtacggaatttttctaattttgatattactcatcgcgttaatgtctattttaacaccacactttttaacatcgacaaacttagtaaatatcgttagacagatgtcgataatcggtattctcgctatcggcgttacaccgattatcatcacgaaaggaatcgatttatcttcaggttctcttatcgctctcgtttccgttgtcgtagctagctttgctcaaggcgattcaatcatgctaccgattttaatgggagttggcgtcgggctacttatcggtcttattaacgggacattagtagcgaaagcgatgcttgcaccgtttatcgtcacgctagggatgatgacagcggcaaggggagcggccatgctctacagtgatggacgaccaatcggaggattaaatgagaagttcgcttttatcggtcaaggtgtgatcttcggaatccctgtacctgttctcatttttgccttcgttggtatcgtgacatgggttttgcttaataaaacaaaatacggaaaatacatttatgccattggtgggaatgagcaagcagccattacagcagggattaatgtaagtcgagtgaagatgttcgtttattcgtatgctggtcttttagcagggattgccggaatcatcttaacgtcaagaatttcgtccggtcagccgcaagcgggtgtcatgtttgagctcgatgcgattgcttcagccgttatcggtggaacgagtctgtttggtggaattggaacggtcggtggaacgatcatcggtgctctcattattggcgtaatgaacaatggactggatctcctaggagtaagctcttactggcagcaaattgtcaaaggggccatcatcgtttcagctgtttacattgatacgagaaaaaacagacagaagaagtag

SEQ ID NO: 38778 - protein, 324 aa, Bacillus halodurans C-125
MSLEIERNKSSQTKEIAKHILKKYGIFLILILLIALMSILTPHFLTSTNLVNIVRQMSIIGILAIGVTPIIITKGIDLSSGSLIALVSVVVASFAQGDSIMLPILMGVGVGLLIGLINGTLVAKAMLAPFIVTLGMMTAARGAAMLYSDGRPIGGLNEKFAFIGQGVIFGIPVPVLIFAFVGIVTWVLLNKTKYGKYIYAIGGNEQAAITAGINVSRVKMFVYSYAGLLAGIAGIILTSRISSGQPQAGVMFELDAIASAVIGGTSLFGGIGTVGGTIIGALIIGVMNNGLDLLGVSSYWQQIVKGAIIVSAVYIDTRKNRQKK

SEQ ID NO: 38779 - DNA, 1167 bp, Bacillus halodurans C-125
  CDS (1)..(1167): transl_table=11
atgaagttagctgaacttttaaaaaataatatgcgttcctatgggatgatcgtcgcgcttatgtttatcattttgttattcagcgtgttgtccgacggaattttgttacgtccactaaatgtaacaaatttaattttgcaaaacagttatattttagttcttgcgatcggtatggtgatggtgattattgcggggcatatcgatttgtccgttggttccgtctgtgcttttgttggggcaattgcggccattttaatgattgatatgcagcttcctacagctcttgctgtactaatctgcttattgctaggtgctcttatcggtgcatggcacggattttttattgcttacttaaaaatgccgtcttttatcgtcacattggccggcatgcttctatttagagggctgacgatggtcgtgttaggcggtcaatcaaagtccccctatccacctgaatttatcttgattagttcaggcttcctacctgatatcccttttttaggattggcctcttatcatacattaacgatgttgatcggtgtggtgctttctctgtttgttatctttagcgagcttaaagaacgacgagtccagataaacaatcaatttatggtacttcccaaagggttttttatcgcaaaattgatcgggatggtagcgattattaacatttttacgtttgtcttagcttcttatagagggattccaaatattcttgtgattctttttgtgcttattgttctcttttcgtttgtcatgaataaaacggtgatcggacgccacatttatgcaacaggaggaaatcaaaaagccgcagagttatccggtgtcaagacgaagcgagtgacgttttgggtttttgttaacatgggttttttatcggccatggcaggattaatttacgccgcccgcctaaactcagcaaccccgagagccggtacgatgtttgagcttgatgcgattgccgctgcttttatcggtggagcttcaatggccggaggagtcgggacgattgtcggtgctgttgttggggggctcgtaatgggggttatgaacaacggaatgtcattacttgggattagtatagactggcaacaagccattaaaggactcgttctgctagccgcggtcggttttgacatttataatcgaaacaaagcaaaatga

SEQ ID NO: 38780 - protein, 388 aa, Bacillus halodurans C-125
MKLAELLKNNMRSYGMIVALMFIILLFSVLSDGILLRPLNVTNLILQNSYILVLAIGMVMVIIAGHIDLSVGSVCAFVGAIAAILMIDMQLPTALAVLICLLLGALIGAWHGFFIAYLKMPSFIVTLAGMLLFRGLTMVVLGGQSKSPYPPEFILISSGFLPDIPFLGLASYHTLTMLIGVVLSLFVIFSELKERRVQINNQFMVLPKGFFIAKLIGMVAIINIFTFVLASYRGIPNILVILFVLIVLFSFVMNKTVIGRHIYATGGNQKAAELSGVKTKRVTFWVFVNMGFLSAMAGLIYAARLNSATPRAGTMFELDAIAAAFIGGASMAGGVGTIVGAVVGGLVMGVMNNGMSLLGISIDWQQAIKGLVLLAAVGFDIYNRNKAK

SEQ ID NO: 38781 - DNA, 966 bp, Escherichia coli O157:H7 EDL933
  CDS (1)..(966): transl_table=11
  misc_feature (601)..(601): s is g or c
atgacaacccagactgtctctggtcgccgttatttcacgaaagcgtggctgatggagcagaaatcgcttatcgctctgctggtgctgatcgcgattgtctcgacgttaagcccgaactttttcaccatcaataacttattcaatattctccagcaaacctcagtgaacgccattatggcggtcgggatgacgctggtgatcctgacgtcgggcatcgacttgtcggtaggttctctgttggcgctaaccggcgcagttgctgcatctatcgtcggcattgaagtcaatgcgctggtggctgtcgctgccgctctcgcgttaggtgccgcaattggtgcggtaaccggagtgattgtagcgaaaggtcgcgtccaggcgtttatcgctacgctggttatgatgcttttactgcgcggcgtgaccatggtttataccaacggtagcccagtgaataccggctttactgagaacgccgatctgtttggctggtttggtattggtcgtccgctgggcgtaccgacgccagtctggatcatggggattgtcttcctcgcggcctggtacatgctgcatcacacgcgtctggggcgttacatctacscgctgggcggcaacgaagcggcaacgcgtctttctggtatcaacgtcaataaaatcaaaatcatcgtctattctctttgtggtctgctggcatcactggccgggatcattgaagtggcgcgtctctcctccgcacaacccacggcggggactggctatgagctggatgctattgctgcggtggttctgggcggtacgagtctggcgggcggaaaaggtcgcattgttgggacgttgatcggcgcattaattcttggcttccttaataatggattgaatttgttaggtgtttcctcctattaccagatgatcgtcaaagcggtggtgattttgctggcggtgctggtagacaacaaaaagcagtaa

SEQ ID NO: 38782 - protein, 321 aa, Escherichia coli O157:H7 EDL933
  misc_feature (201)..(201): The Xaa at location 201 stands for Ala, or Pro.
MTTQTVSGRRYFTKAWLMEQKSLIALLVLIAIVSTLSPNFFTINNLFNILQQTSVNAIMAVGMTLVILTSGIDLSVGSLLALTGAVAASIVGIEVNALVAVAAALALGAAIGAVTGVIVAKGRVQAFIATLVMMLLLRGVTMVYTNGSPVNTGFTENADLFGWFGIGRPLGVPTPVWIMGIVFLAAWYMLHHTRLGRYIYXLGGNEAATRLSGINVNKIKIIVYSLCGLLASLAGIIEVARLSSAQPTAGTGYELDAIAAVVLGGTSLAGGKGRIVGTLIGALILGFLNNGLNLLGVSSYYQMIVKAVVILLAVLVDNKKQ

SEQ ID NO: 38783 - DNA, 1017 bp, Agrobacterium tumefaciens str. C58
  CDS (1)..(1017): transl_table=11
atgcgtaggctcatcctcggacatacgaccgaattcaccctgcttgtcgtcatggtgctgctctgcacggggctttctttcgccaccgaccgcttcctcacgatatcaaacgccttcgatgtgctgaatgtctcggcggtcaacatcatcttcgcggtcggtctgctcgtcgtgctgatctccggcggcatcgacatctccttcgctgtcgcggcctccgtcgtgcaatatgtgacggtgctggcgctcaatgcgctcggcggcggcaactgggcggaaggtttcatcatcgccggtgccgttggcctcagcctcggtttcgtcaacgccttcctcgtctggcggctcaacatcatttccatcgtcgcgaccatctccaccttcaacatcttcttcgggttgttgatgttcttcaccaagggtgtgtcgatctacgatctgccggaatggctctcgacgcgtgtggtgttttacgagcgcgaaatgcccgatggttcctgggtcgagctgacgctgccggtcgtcgtcatgatcctctgctgtgtcgctacctggttcatgatttcgcgcaccaccgtcgggcgcaagctttatgccttcggtgacaaccccgagggcgcacgccgcttcggcatcaatatcggcgcgatgcattacatttctttcggctggcttggcctgatggcgggtatagccgggctcatgcaggcgcattacgcgcaggaggtggtgccgaacgcgctttatggccgcgagctggatgtgcttgctgccaccgtgcttggcggtgcgcgacttggcggcggcaagggctccgtcatcggctgcgtgcttggcgtgctgatggtttcgattacccagaacggcctcaacctgatgggggtttctccctttgccttcaagatgatcgtcggcgccatcattctcgtcgccatcacgctgtcttccacccggttcgacaagcttctgccgagtgcgcttcgcacatccgcgaaaaaggggagcgcccagcgatga

SEQ ID NO: 38784 - protein, 338 aa, Agrobacterium tumefaciens str. C58
MRRLILGHTTEFTLLVVMVLLCTGLSFATDRFLTISNAFDVLNVSAVNIIFAVGLLVVLISGGIDISFAVAASVVQYVTVLALNALGGGNWAEGFIIAGAVGLSLGFVNAFLVWRLNIISIVATISTFNIFFGLLMFFTKGVSIYDLPEWLSTRVVFYEREMPDGSWVELTLPVVVMILCCVATWFMISRTTVGRKLYAFGDNPEGARRFGINIGAMHYISFGWLGLMAGIAGLMQAHYAQEVVPNALYGRELDVLAATVLGGARLGGGKGSVIGCVLGVLMVSITQNGLNLMGVSPFAFKMIVGAIILVAITLSSTRFDKLLPSALRTSAKKGSAQR

SEQ ID NO: 38785 - DNA, 1002 bp, Agrobacterium tumefaciens str. C58
  CDS (1)..(1002): transl_table=11
atggcaacatcggaaacaccttcaagccttgccgagacggcagttcgccgcacggcctggtgggagccggcgatcaaggcgcgcgaaaccgggctgatcgtcatcattctcgccctttttacagtgatgtctttcatatcgccctacttcctaacggtggacaatctgcgggccatggccatggtcttcgccatcgaaagtatcgtcgtggtgggcatgacgatcctgttgatctcgggtggtatcgatctttccgtggggtccgttacagcacttgcgatggtggcggccggctggctgttcctcaacggtgtcgatccctgggtcgcggcaggtcttgcaatctgcctcacgacattggtcggcatggcaatgggatttttgaccaccgtcgtcggcctgcatcatttcatcgtttcacttggcgtcatggtgattgcgcgcggtgtttgccttctggcaaccggcgggcggccgctggggctctattccctgccaccggaattcaagttcatcggccagggtgcgttgggcggcattccgctggtgctcatcatcttcttggttgtggtcgttgtcttcgacctgctgctgcggcgcacgaccgccttccgcaaggtgttctataccggcagcaatcccaaggcagcggcctattccggcattcgcgttggccgggtggtgtttgccacgaccacgctttgctcgatgttgtgcggcgttgccggcgtcatctacatggcccgcttcgggtccgcccagccaagcttcggcgtcggtatggagctgaatgtcattgcagcggcggtcatcggcggcgcgagcctttccggcggctcgggcaccattctgggtgccatcctcggcgcgatccttttgtccgtcgtttccagctcgcttgccttgctcaacgtgtctgtctactggcaggacatcatcaggggaagcatattgctggctgcggttctgttcgaccactatctggtcaggcgccgccgttga

SEQ ID NO: 38786 - protein, 333 aa, Agrobacterium tumefaciens str. C58
MATSETPSSLAETAVRRTAWWEPAIKARETGLIVIILALFTVMSFISPYFLTVDNLRAMAMVFAIESIVVVGMTILLISGGIDLSVGSVTALAMVAAGWLFLNGVDPWVAAGLAICLTTLVGMAMGFLTTVVGLHHFIVSLGVMVIARGVCLLATGGRPLGLYSLPPEFKFIGQGALGGIPLVLIIFLVVVVVFDLLLRRTTAFRKVFYTGSNPKAAAYSGIRVGRVVFATTTLCSMLCGVAGVIYMARFGSAQPSFGVGMELNVIAAAVIGGASLSGGSGTILGAILGAILLSVVSSSLALLNVSVYWQDIIRGSILLAAVLFDHYLVRRRR

SEQ ID NO: 38787 - DNA, 1065 bp, Agrobacterium tumefaciens str. C58
  CDS (1)..(1065): transl_table=11
gtgaggcgcgccgggatttctcgaggaggaacgattatgactacgaacgccgccaacgcacagttggacgcaaaatccggacgcaagccgcaccggcgcatcccgcccgaggccaatatctttttcgtgctgatcggcattgcgctagtttatgaaattctcggctggattttcatcggccagagctttttgcttaaccagcagcgcctgacgatcatgatcctgcaggtatcggtgatcggcataatcgccgttggcgtgacccaggtcatcatcaccggcggtatcgatctttcctccggctccgtcgtcggcctgacggcgatgttggccgccagcgtggggcaatcatccacatggccgcgggcgctttatccggggctgactgatctgcccttcttcattccgctggctgtcggcattctggctggcgcattggccggctttatcaacgggcaacttatagcgcgcacgaaaatcccgcccttcatcgcaaccctcggtatgatggtgacggcgcgtggcctttccaaatggtacaccaagggccagccgatttccggtctgactgacggtttcaccttcatcggtacaggtgtctggccggtcgtggtgttcctcgtcgtcgccatcattttccacgtcgcgctgcgttatacgcgttatggcaagttcacctacgccatcggcgccaaccagcaggcggcccgcgtttccggtatcaatatcgaagcgcatctgatcaaggtctatgccattgccggtctgctggccggtctcgccggcgtcgtcaccgccgcccgtgcacagacagcgcaggccggcatgggtgtgatgtatgaacttgacgccatcgctgcggccgtcatcggaggcacatcgctcgccggcggcgctggccggattaccggaactgtcatcggcaccatcattcttggcgtcatgacttcaggcttcacgttcctcagggtcgacgcctattaccaggagatcgtcaagggcctgatcatcgtggccgccgttgttgccgacgtttaccgccagaagaaacgcgcaaagcgctga

SEQ ID NO: 38788 - protein, 354 aa, Agrobacterium tumefaciens str. C58
MRRAGISRGGTIMTTNAANAQLDAKSGRKPHRRIPPEANIFFVLIGIALVYEILGWIFIGQSFLLNQQRLTIMILQVSVIGIIAVGVTQVIITGGIDLSSGSVVGLTAMLAASVGQSSTWPRALYPGLTDLPFFIPLAVGILAGALAGFINGQLIARTKIPPFIATLGMMVTARGLSKWYTKGQPISGLTDGFTFIGTGVWPVVVFLVVAIIFHVALRYTRYGKFTYAIGANQQAARVSGINIEAHLIKVYAIAGLLAGLAGVVTAARAQTAQAGMGVMYELDAIAAAVIGGTSLAGGAGRITGTVIGTIILGVMTSGFTFLRVDAYYQEIVKGLIIVAAVVADVYRQKKRAKR

SEQ ID NO: 38789 - DNA, 999 bp, Caulobacter crescentus CB15
  CDS (1)..(999): transl_table=11
atgaccgccccgtcgtctcccgccccgctcgcgaccgacaagccccgcttcgacctgttggccttcgcccgcaagcaccggacgatcctgttcctgctgcttctggtggcggtgttcggcgcggccaacgagcgcttcctgacggcgcgcaacgccctgaacatcctgtcggaggtgtcgatctacgggatcatcgccgtgggcatgaccttcgtgatcctgatcggcggcatcgacgtggccgtgggatcgctgctggccttcgcctcgatcgccgcagcctatgtggtcaccgccgtcgtcggcgacggccccgccacctggctgatcgctctgttggtctcgaccctgatcggcctggccgggggctatgtgcagggcaaggccgtgacctggctgcatgtgcccgccttcatcgtcaccctgggcggcatgaccgtctggcgcggcgccaccctgctgctgaacgacggcgggccgatctcgggcttcaacgacgcctaccgctggtggggctcgggcgagatcctgttcctgcccgtgccggtggtgatcttcgccctggtcgcagcggccggccacgtggcgctgcgctacacccgctatggccggcaggtctatgcggtgggcggcaacgccgaggctgcgcgcctgtcgggcgtcaatgtcgatttcatcaccaccagcgtctacgcgatcatcggcgccctggcggggctgtcgggctttctgctgtcggcccgcctgggctcggccgaggcggtcgccgggacgggctatgagctgcgggtcatcgcctcggtggtgatcggcggcgccagcctgaccggcggctcgggcggcgtcggcggcaccgtgctgggggccctgctgatcggcgtgctctcgaacggcctggtgatgctgcacgtcacctcctacgtccagcaggtggtgatcggcctgatcatcgtcgccgccgtggccttcgaccactatgcgcgcacccacaaggcgtag

SEQ ID NO: 38790 - protein, 332 aa, Caulobacter crescentus CB15
MTAPSSPAPLATDKPRFDLLAFARKHRTILFLLLLVAVFGAANERFLTARNALNILSEVSIYGIIAVGMTFVILIGGIDVAVGSLLAFASIAAAYVVTAVVGDGPATWLIALLVSTLIGLAGGYVQGKAVTWLHVPAFIVTLGGMTVWRGATLLLNDGGPISGFNDAYRWWGSGEILFLPVPVVIFALVAAAGHVALRYTRYGRQVYAVGGNAEAARLSGVNVDFITTSVYAIIGALAGLSGFLLSARLGSAEAVAGTGYELRVIASVVIGGASLTGGSGGVGGTVLGALLIGVLSNGLVMLHVTSYVQQVVIGLIIVAAVAFDHYARTHKA

SEQ ID NO: 38791 - DNA, 954 bp, Sinorhizobium meliloti 1021
  CDS (1)..(954): transl_table=11
atgacgacttccttgaaaaaacttcttctcggcgaacagggcctgctggtgatctttgccgccgccttcgtggtggtggcgctgacggttccgaatttcctcaccgaacgcaacatgctcggcctgctgcagtcagtggtgaccatcggcgtcgtcgcctgcaccatgatgttctgcctggcgtcgcgcgacttcgatctttcagtcggctccaccgtagccttctcgggaatggttgccgtcatggcgtcgaacgcgacgggctcgatagtgctcggtcttctggcggctcttgcctgcggtgggatcgtcggcctcgcgaacggcatcgtgatcgcccgtttccgcatcaatgcgctcataacgacgctggcgacgatgcagatcgtacgcggcttcgccttgatcgcgtcggacggccgcgcggtcggaatcaacgatccggtattttatcagctctccctgtcgaagttcctgaccgtgcccacgccgatctgggtgatggctctcttcttcatcgtgtttggcttcctgctcaaccgtaccgtcttcggcaagaacacgcttgcgatcggcggcaacccggaagcctcccggcttgccggcgtggacgtcgcgcggatgcgcatctggattttcgccctccaggggctggtatgcgcggtggcaggggtgctgctcgcctcgcgcatcacctcgggtcagccgaatgcggccaccggtctcgaactctcggtgatttccgcctgcgttctcggcggtgtttctcttgccggcggcagggcgaccatgaccggcgtcgtcgtaggcgttctgatcatgggaattgccgagaatgtcatgaacctgctcaacatccaggccttctatcagtacgtggtgcgtggcctcatcctgctgattgcggtcctcctcgacaatatgcgctctgtcgccggcaggccgcgagcctga

SEQ ID NO: 38792 - protein, 317 aa, Sinorhizobium meliloti 1021
MTTSLKKLLLGEQGLLVIFAAAFVVVALTVPNFLTERNMLGLLQSVVTIGVVACTMMFCLASRDFDLSVGSTVAFSGMVAVMASNATGSIVLGLLAALACGGIVGLANGIVIARFRINALITTLATMQIVRGFALIASDGRAVGINDPVFYQLSLSKFLTVPTPIWVMALFFIVFGFLLNRTVFGKNTLAIGGNPEASRLAGVDVARMRIWIFALQGLVCAVAGVLLASRITSGQPNAATGLELSVISACVLGGVSLAGGRATMTGVVVGVLIMGIAENVMNLLNIQAFYQYVVRGLILLIAVLLDNMRSVAGRPRA

SEQ ID NO: 38793 - DNA, 963 bp, Sinorhizobium meliloti 1021
  CDS (1)..(963): transl_table=11
atgacacagaacacagcagccaaagccgccctggttcgggctctcaagcaatatggcggcatcttcctttcgctggtgatgctctgcatcgtcttttccttcttcaacccgcgcttcatgacggttgtaaacttcatgaacatcctgcagcaggtcgccgttgttgcgatcgcggccttcgggatgacatgggtgatcctgctcggcgagatcgatctttccgtcggctcgatcatcgcggtggcaggaatggtcggggcgcaatgctttgccttcggaatgggtttcgcgccggcaatcgcgctgacgctcgccgccggcgccctgatgggaatgttgaacggggtgctgacggccaaactgctcttgccgtccttcatcgtcacggtcgcgaccatgggtatctatcgcggcatggtcagcctgccgaccaacggagcaccggccatgatcgagaacgaaacctggaccgcaatcggtaccgagagcttcctgggactgccgatcatcatctgggtcgtcgccgttctcttcgtcatcaatcagatcgtgctcagcaagacgagcttcggccggcgcgcctatctgaccggcggcaaccgtgaggcggccgtctactccggtatcaaggtcgaccggctgaagatcctgatcttcatgatctccggcgtgatggcggccatcagcggcgtgctgctttcctcccgcctgttctccgcacagaccaatgcgggcatgagctacgagcttgacgccatcgccgcggccgttctcggcggcaccagccttgcgggcggcgtcggaaccatggtcggcacgctgatcggcgcgctcatcatcggcgtcatgaacaacggcatgaacatgctctccgtcccctacttctaccagctgatcgtcaagggactggtgatcctcgtcgccgtctggctcgacgtccgtgccaagcaggcaaagcgctga

SEQ ID NO: 38794 - protein, 320 aa, Sinorhizobium meliloti 1021
MTQNTAAKAALVRALKQYGGIFLSLVMLCIVFSFFNPRFMTVVNFMNILQQVAVVAIAAFGMTWVILLGEIDLSVGSIIAVAGMVGAQCFAFGMGFAPAIALTLAAGALMGMLNGVLTAKLLLPSFIVTVATMGIYRGMVSLPTNGAPAMIENETWTAIGTESFLGLPIIIWVVAVLFVINQIVLSKTSFGRRAYLTGGNREAAVYSGIKVDRLKILIFMISGVMAAISGVLLSSRLFSAQTNAGMSYELDAIAAAVLGGTSLAGGVGTMVGTLIGALIIGVMNNGMNMLSVPYFYQLIVKGLVILVAVWLDVRAKQAKR

SEQ ID NO: 38795 - DNA, 1215 bp, Sinorhizobium meliloti 1021
  CDS (1)..(1215): transl_table=11
atggtcgccgatacgagcaccgaaaccaccaaaccgtcgatcggtgactacctcaggaacaacattcgcgaatacggcctgctggtcgcgctcgtcatcatcatgctgttcttccagttcgtcaccaacggcgtcctcttcaggcccgtcaacatcacgaacctggtgctgcagaactcgttcatcgtcatcatggcgctgggcatgctgctgatcatcgttgccgggcacatcgatctgtcggtcggctccatcgtggccttcatcggcgcgatttcggcgatcatgctcgtcaaatggggcttgcctgcctttgtggtcattcccgcctgcctgatcgtgggcggtatcatgggcgcggcgcagggctactgggtcgcctatcagaagatcccttccttcatcgtcacgctcgccggcatgctggtgttccggggaatgacctatgtggtcctcggcggccgtccgatcggaccgtttccgaaggacttccagatactgtcgaccggattcgttcccgactttctttacttcctcagcccgagcccggagacgatcaagaacatggtcgccctggtcgccgtgctgttgctcgtcggctatgcgatctttgccggggttcgcaatcgccggatcaacgagcagcacggcacggagaacgagccgttcgtcttcttcgcgatccagatggcggtcatcagcctggtggcactgttcctcggcttccagctttcgacctatcggggcctgcccaacgtcctagtcgtcatgggcgtgctgatcgccgtctacaccttcgtcaccacgcgttcgacgatcggccgccggatatacgcgatgggcggcaacgagaaggcgaccaagctctccggcatcaataccgaacggctgaccttctacgccttcgtgaacatgggcgcgctcgcggcgcttgccggcatgatcatcacggcccgtctgaactcggcgaccccgaaagccggcgtcggcttcgagctcgacgtgatcgcggcctgcttcatcggcggtgcgtccgcctcgggtggcgtcggcaagattaccggcgcggtgatcggcgctttcatcatgggcgtcatgaacaacggcatgtccatcatgggcatcggcatcgactaccagcaattgatcaagggcctcgtgctgctcgcagccgtgttcttcgacgtctacaacaagaacaagggcaagggctga

SEQ ID NO: 38796 - protein, 404 aa, Sinorhizobium meliloti 1021
MVADTSTETTKPSIGDYLRNNIREYGLLVALVIIMLFFQFVTNGVLFRPVNITNLVLQNSFIVIMALGMLLIIVAGHIDLSVGSIVAFIGAISAIMLVKWGLPAFVVIPACLIVGGIMGAAQGYWVAYQKIPSFIVTLAGMLVFRGMTYVVLGGRPIGPFPKDFQILSTGFVPDFLYFLSPSPETIKNMVALVAVLLLVGYAIFAGVRNRRINEQHGTENEPFVFFAIQMAVISLVALFLGFQLSTYRGLPNVLVVMGVLIAVYTFVTTRSTIGRRIYAMGGNEKATKLSGINTERLTFYAFVNMGALAALAGMIITARLNSATPKAGVGFELDVIAACFIGGASASGGVGKITGAVIGAFIMGVMNNGMSIMGIGIDYQQLIKGLVLLAAVFFDVYNKNKGKG

SEQ ID NO: 38797 - DNA, 996 bp, Sinorhizobium meliloti 1021
  CDS (1)..(996): transl_table=11
atgcctgacaatcttcaatccgagaccctccccatggccgatctggagcgcaaccggaacagggcggcaatccgcagggcgccggaatcggccgccctgctcgcattccttgttgcggagatcatcttcttctcgctgagctcaccctacttcctgacctggggaaactgggtcaatgtcttcaccgcgctttcgatcaccggcgttcttgccgcgggaggcacaatgcttctgattgcgggccaattcgatctgtcggtcggtagcggcgtcgccttcgtcgccctcgtgctggccttgaccatcgacagcctgggggttctgccggccagcgtgcttgcgatgctcgtcggcgtcggaatcggcctgatcaacggctttctggtgacgaggatcggtgtcaacgcgctcatcacaacgctcgggacgctggccatctttcgcggcctcacgcagtccatcggcggcggcaggaatatcccgatcgccaatttcgactgggctatctggcgtcccttcctgaacattccgctctcggcgctcgtcttcctgctcgttgctatcatggtcggcatcgtgctcaaacgctccgtcttcggccgctcgatctatgcgatcggcgcgaatgaaaacgctgcccgcctcgtcggcatcaggaccaagggcgtggtattcgcgggctttctcctctccggcgccttcatcgggctcggcggtctcatcagcgcctcgcagctcggctcgacatccggaaccacgggtctcggattggagcttgccgtcgtcacagcagtcattctcggaggtacctcgctgaagggcgggaccggcaccatgctcggtaccgtgatcggattgttgattgtcggcgttctcaacaacggcttgacgctgatgaacgtcaactcgtcctggcagcaggccgccacgggcttacttttgatcctggccgtgtctttcgatcagctccgccagcggctcgtcggccgacggtga

SEQ ID NO: 38798 - protein, 331 aa, Sinorhizobium meliloti 1021
MPDNLQSETLPMADLERNRNRAAIRRAPESAALLAFLVAEIIFFSLSSPYFLTWGNWVNVFTALSITGVLAAGGTMLLIAGQFDLSVGSGVAFVALVLALTIDSLGVLPASVLAMLVGVGIGLINGFLVTRIGVNALITTLGTLAIFRGLTQSIGGGRNIPIANFDWAIWRPFLNIPLSALVFLLVAIMVGIVLKRSVFGRSIYAIGANENAARLVGIRTKGVVFAGFLLSGAFIGLGGLISASQLGSTSGTTGLGLELAVVTAVILGGTSLKGGTGTMLGTVIGLLIVGVLNNGLTLMNVNSSWQQAATGLLLILAVSFDQLRQRLVGRR

SEQ ID NO: 38799 - DNA, 966 bp, Salmonella typhimurium LT2
  CDS (1)..(966): transl_table=11
atgacaacccaggctgtttctggtcgccgttatttcactaaagcgtggcttcttgagcagaagtcgctcattgccctgctggtgttgatcgcgattgtttcgacgttgagccccaacttttttaccgttaataatctgttcaatattcttcaacagacctccgttaacgccattatggcggtggggatgacgttggtgattctgacatcggggatcgatctgtccgtcggttccctgctggcgctcaccggtgcggttgccgcttcaatcgtcggcgttgaagtgaatgcgctggtcgcggttgccgccgcgctggcgctgggcgctgcgattggcgccgtcactggcgttatcgtcgcgaagggccgcgtacaggcgtttatcgctacgctggtgatgatgctgctactgcgtggcgtgacgatggtttacaccgacggtagcccggtcaacaccggctttaccgataacgccgatctgtttggctggttcggtatcggtcgtccgctgggcgttcctacgccggtctggatcatggctatcgtctttatcgccgcctggtatatgctgcatcacactcgtctgggacgctatatctacgcgctgggcggtaacgaagcggcgacgcgtctgtctggcattagcgtgagcaaagtgaaaattatcgtctattcactttgcggcctgacagcatcgctggcgggcatcattgaagtggcgcgcctctcttccgcgcagccgacggcgggtaccggctatgagctggatgctattgccgccgtggtgctgggcggcaccagccttgcaggtggtaaagggcgcattgttgggacattgatcggcgcattgattctcggcttccttaataatggtttgaatttgttaggtgtttcctcctattaccagatgatcgtcaaagcggtggtgattttgctggcggtactggtagacaacaaaaagcagtaa

SEQ ID NO: 38800 - protein, 321 aa, Salmonella typhimurium LT2
MTTQAVSGRRYFTKAWLLEQKSLIALLVLIAIVSTLSPNFFTVNNLFNILQQTSVNAIMAVGMTLVILTSGIDLSVGSLLALTGAVAASIVGVEVNALVAVAAALALGAAIGAVTGVIVAKGRVQAFIATLVMMLLLRGVTMVYTDGSPVNTGFTDNADLFGWFGIGRPLGVPTPVWIMAIVFIAAWYMLHHTRLGRYIYALGGNEAATRLSGISVSKVKIIVYSLCGLTASLAGIIEVARLSSAQPTAGTGYELDAIAAVVLGGTSLAGGKGRIVGTLIGALILGFLNNGLNLLGVSSYYQMIVKAVVILLAVLVDNKKQ

SEQ ID NO: 38801 - DNA, 1008 bp, Ralstonia solanacearum GMI1000
  CDS (1)..(1008): transl_table=11
atgtcccagtcccaacccctgcaacgcgccgacgggtttgccgcgtcggcccgctcggccatgaacaacacgcgcctgctgaggcggctggacgatttcagcctgccgctgatcttcgccatcctgtttgccgcgctgtcgctgtcggtcgagtacttcttctcgtggcagaacatggtcggcctggcgctgtccgtctcgcagatcggcatggtggcctgcaccatgatgttctgcctggcctcgcgcgacttcgacctgtcgatcggctccacggtggcgttcgccggcgtgctgtgcgcgacggtcatcaacgccaccggcagcatcgcgctgggcatcggcgcgagcctgctggccggcgcggtgatcggcggcatcaatggcttcgtgatcgcccggctgaagatcaacgcgctgatcaccacgctcgccaccatggagatcgtgcgcggcctggccttcatcgcctcgcacgggcaggcggtgggcgtctcggagatggcgttcttcgacctgggcaacaccatcgtgctgggcgtgccgacgccggtgtgggtggcggcgctgtgcttcgtggcgttcggcgtgctgctcaacaagacggtgtacgggcgcaacacgctcgccatcggcggcaacccagaggcggcgcggctggcgggcgtgaacgtcaacctgacgcgcatcgtgatcttcctggtccagggcgtgattgccgcgctggccggcgtgatcctggccgcgcgcatcaccagcggccagccgaacgcggcgcagggcttcgagctgaacgtgatttcggcgtgcgtgctgggcggcgtgtcgctgatgggcggccgcgccagcatcagcggggtgctggtcggcgtgctgatcatgggcacggtgcagaacgcgatgaacctgctcaatatcgatgcgttctatcagtacctggtgcgcggcggcatcctgctggcggcggtgctggtggaccagatcaagcatcgcggcggccgcgattga

SEQ ID NO: 38802 - protein, 335 aa, Ralstonia solanacearum GMI1000
MSQSQPLQRADGFAASARSAMNNTRLLRRLDDFSLPLIFAILFAALSLSVEYFFSWQNMVGLALSVSQIGMVACTMMFCLASRDFDLSIGSTVAFAGVLCATVINATGSIALGIGASLLAGAVIGGINGFVIARLKINALITTLATMEIVRGLAFIASHGQAVGVSEMAFFDLGNTIVLGVPTPVWVAALCFVAFGVLLNKTVYGRNTLAIGGNPEAARLAGVNVNLTRIVIFLVQGVIAALAGVILAARITSGQPNAAQGFELNVISACVLGGVSLMGGRASISGVLVGVLIMGTVQNAMNLLNIDAFYQYLVRGGILLAAVLVDQIKHRGGRD

SEQ ID NO: 38803 - DNA, 981 bp, Agrobacterium tumefaciens str. C58
  CDS (1)..(981): transl_table=11
atgtccgcgcttgaacgcaatgagggggtcacgcacaccaggagcccgcttgcctggctgagcggtgccaccggaccacttttgggcctgctgatgctctgtgtgttcctgactttcgccagcgagaatttcctgtcgctgcgaaacggcctgaacatcctcgaccagatcaccgttctcggcatcatggccgttggcatgaccttcgtcatcctgcttggcggcatcgatctgtctgtcggctcggtgttggcactgtcgatgatgatcatgggctggacagccaatgtcgcgggcatgccgatgggcatggcgatcgtgctcgcgcttgtcgcgtccgcagcctgcggccttgtggtcggtattctggtaacggccttccgtgtgcccgccttcattgccacacttgcaatgatgtcggttgcgcgcggccttgcaaacatgatcaccgatggccagcagatcgtcggctttcctgactggttcatgatgctggcgattgagcgccatttcggcgtgctgaccgcgaccgtgctgctaatgctggtcgtggtgctggtgtcctgggctttcctgcgcttccgctcggaaggccgcaccgtctatgcggtgggcggcaatcctgaggtggcgcgtcttgccggcatcaacgtgccgctggtgacgatctgcgtttatgtcgtctgcgcggttctggccggtctggcgggcatcgttcttgccgcacgtctcgactcagtacagccctccagcggtttcggctacgagctggatacgattgcggccgttgtgatcggcggaacctcgctttcgggcggtgctggcggcatcggcggaacgctgatcggcgtgctgatcatcggcgtgctgcgcaacggcctcaacctgctcaacgtctctccctttcttcagcaggtcatcatcggtgtcgtcatcgtgctggctgtgggtgctgaaacgctgcgccgtcgcagaagctga

SEQ ID NO: 38804 - protein, 326 aa, Agrobacterium tumefaciens str. C58
MSALERNEGVTHTRSPLAWLSGATGPLLGLLMLCVFLTFASENFLSLRNGLNILDQITVLGIMAVGMTFVILLGGIDLSVGSVLALSMMIMGWTANVAGMPMGMAIVLALVASAACGLVVGILVTAFRVPAFIATLAMMSVARGLANMITDGQQIVGFPDWFMMLAIERHFGVLTATVLLMLVVVLVSWAFLRFRSEGRTVYAVGGNPEVARLAGINVPLVTICVYVVCAVLAGLAGIVLAARLDSVQPSSGFGYELDTIAAVVIGGTSLSGGAGGIGGTLIGVLIIGVLRNGLNLLNVSPFLQQVIIGVVIVLAVGAETLRRRRS

SEQ ID NO: 38805 - DNA, 1197 bp, Agrobacterium tumefaciens str. C58
  CDS (1)..(1197): transl_table=11
atgagttcggcaaacaccacaaacgaagaaagcaacgtcatctcggtcgggtcgtatattcgatccaatatccgcgaatacggcatgctgatcgcgctcgtcgccatcatggttttcttccagttctacaccggcggcatcctgttccgccctgtgaacctgaccaacctcatcctgcagaactcgttcatcgtcatcatggcgcttggcatgctgctcgtcatcgtggccgggcatatcgacctttcggtcggttccatcgtcgccttcgtcggcgcgatcgcggccatattgaccgtgcaatggggcatgaacccgtttctggcggcgctgatttgtctcgtcatcggcggcatcatcggtgctgcccagggttactggatcgcctatcaccgcattccgtcgttcatcgtgacgctggcgggcatgctggtgttccgcggcctgacgcttttcgtgctcggcggcaagaatatcggtcctttcccgaccgatttccaggtcatcagcaccggcttcctgcctgatatcggcggcatcgaaggtctgaacaccacgtcgatgatcctgaccgtgctgattacggtcgcgctgttctatctggcgtggcgccgtcgcgtggtgaacgtgaagcatggcatcgacgtggagccgttcggtttcttcatcgtgcagaatctgctgatctccggcgctatcctgttcctgggttaccagctgtcgacctatcgtggcctgccgaacgttctgatcgtgatgctggttctgatcgcgctttacagcttcgtgacgcgccgcacgaccatcggccgtcgcgtttacgccatgggcggcaatgagaaggcgaccaagctttccggtatcaacaccgaacgcctgagcttcctcaccttcgtcaacatgggcgtgctggccggtcttgccggcatgatcatcgcgacccgcctcaactcggcgacgccgaaggcaggcgtgggcttcgagcttgacgtgatcgcggcctgcttcatcggcggtgcttcggcctccggcggcgttggcaagatcaccggggccgttatcggcgccttcatcatgggtgtgatgaataacggcatgtcgatcgtcggtctcggcatcgatttccagcagatggtcaagggcctcgtgctgctcgccgctgtgttcttcgacgtctacaacaagaacaagggctga

SEQ ID NO: 38806 - protein, 398 aa, Agrobacterium tumefaciens str. C58
MSSANTTNEESNVISVGSYIRSNIREYGMLIALVAIMVFFQFYTGGILFRPVNLTNLILQNSFIVIMALGMLLVIVAGHIDLSVGSIVAFVGAIAAILTVQWGMNPFLAALICLVIGGIIGAAQGYWIAYHRIPSFIVTLAGMLVFRGLTLFVLGGKNIGPFPTDFQVISTGFLPDIGGIEGLNTTSMILTVLITVALFYLAWRRRVVNVKHGIDVEPFGFFIVQNLLISGAILFLGYQLSTYRGLPNVLIVMLVLIALYSFVTRRTTIGRRVYAMGGNEKATKLSGINTERLSFLTFVNMGVLAGLAGMIIATRLNSATPKAGVGFELDVIAACFIGGASASGGVGKITGAVIGAFIMGVMNNGMSIVGLGIDFQQMVKGLVLLAAVFFDVYNKNKG

SEQ ID NO: 38807 - DNA, 915 bp, Corynebacterium glutamicum ATCC 13032
  CDS (1)..(915): transl_table=11
atgctcaataacggtgcgttggtggggctgattgcactgtgtgttggactttttattgcaacaccccactttctcaccattcctaacctgatcaacatcggtatccaatcggcgacggtggcgatcctggcgttcggcatgaccttcgtcatcgttaccgcaggcattgatttgtctgtgggatcagtggctgcgttgggtgcgatgacctcggcgtatttcttcgcggaagttggtttgccgggctggatcacgctgctgattggcctgttcatcggattgttggcgggtgcgatctctggcatttctattgcttatggcaagttgcctgcgtttattgccaccttggccatgatgtcgatcgccaggggaatcaccttggtcatttcccaaggctcaccaattcccagtgcaccagctgtgaacgctttggggcgcacctactttggcatcccgatgccgattctgatgatggcactggctggcattgtgtgttggtttattttgagccgcaccgtgctgggacggtccatgtacgccattggcggaaacatggaagcagcccgactatctggtctgccagtgaagaaaatcctggtcatggtctatgcactggctggtgtgtatgcagcacttgcgggtctggtcatgacgggacgcttgtcgtccgcgcagccgcaggcaggcgtgggatacgaactcgatgcgattgccgccgtggtcattggtggtgcgtcacttgctggcggaaccggaaaagcaacgggcactttgattggtgccatcttgttggccgtgatccgcaatggcttgaacattttgaacgtgtcctcgttctggcagcagattgtcatcggttgtgtcatcgcgcttgcggtgggcttcgatgtcatccgaaacaaaacctctaagtaa

SEQ ID NO: 38808 - protein, 304 aa, Corynebacterium glutamicum ATCC 13032
MLNNGALVGLIALCVGLFIATPHFLTIPNLINIGIQSATVAILAFGMTFVIVTAGIDLSVGSVAALGAMTSAYFFAEVGLPGWITLLIGLFIGLLAGAISGISIAYGKLPAFIATLAMMSIARGITLVISQGSPIPSAPAVNALGRTYFGIPMPILMMALAGIVCWFILSRTVLGRSMYAIGGNMEAARLSGLPVKKILVMVYALAGVYAALAGLVMTGRLSSAQPQAGVGYELDAIAAVVIGGASLAGGTGKATGTLIGAILLAVIRNGLNILNVSSFWQQIVIGCVIALAVGFDVIRNKTSK

SEQ ID NO: 38809 - DNA, 957 bp, Thermoanaerobacter tengcongensis MB4
  CDS (1)..(957): transl_table=11
ttgaagctaccgaacgaaaaagcaatgaaaataaatattggtgagttgcttttaaaagcgaaatctttaataggtttattgggattaattatcgcgttttcaatattatctccacgttttttggattactataaccttacaaatgtattaagacaaacctctctaaatgcaataatggctgtagggatgacatttgtgatattgacaggtgggatagacctatctgtgggttctatattggcgttttcaagtgcagttacagccggtatgttgaaagatggtatgcccctaatcatagctttattggcgggattgataataggtactggtttaggattgtttaatggttttgttataatcaggtggaatattcctccatttattgctacatttgctatgatgacaatagcaagagggcttacgcttgtgtatactaatggccaaccaataactggcttaggaaaagctttcggatatatcggcaatgggtatgttggttccattcctgttccaataattatcacaattctcgtttttgtaataggatactatattttaaaaaacaacagattaggaagatatgtatatgcaaccggaggaaatttacaagctgctaaactggcaggaattaatactaataaaataattctatttgtatatgctttaagtggttttttagcagcagtaagtggcttaataattacttcaagattaaactcagctgccccaacagctggacaaggtgcagagcttgatgcaatagctgctgttgtactaggaggtacaagtttatctgggggcgaaggtggaataattgggactttgataggtgctttaataataggtgtgttgaacaatggtctgaatttgcttaacgtttcacctttttatcaatatattgtaaaaggtgtagtaatattacttgctatagctttagacaaaaaagaaagtgagtaa

SEQ ID NO: 38810 - protein, 318 aa, Thermoanaerobacter tengcongensis MB4
MKLPNEKAMKINIGELLLKAKSLIGLLGLIIAFSILSPRFLDYYNLTNVLRQTSLNAIMAVGMTFVILTGGIDLSVGSILAFSSAVTAGMLKDGMPLIIALLAGLIIGTGLGLFNGFVIIRWNIPPFIATFAMMTIARGLTLVYTNGQPITGLGKAFGYIGNGYVGSIPVPIIITILVFVIGYYILKNNRLGRYVYATGGNLQAAKLAGINTNKIILFVYALSGFLAAVSGLIITSRLNSAAPTAGQGAELDAIAAVVLGGTSLSGGEGGIIGTLIGALIIGVLNNGLNLLNVSPFYQYIVKGVVILLAIALDKKESE

SEQ ID NO: 38811 - DNA, 1956 bp, Streptomyces coelicolor A3(2)
  CDS (1)..(1956): transl_table=11
gtggccactgacacgctcaagagcaagccgggcgcgcagggcgccacgggcggtctgcgccgcctgctgctcgacaacggcgcgctgaccgcgctgatcgtcctcgtcgtcgtcatgtcggcgctgtccggggacttcctgaccgccgacaacctcctcaacgtcggcgtccaggccgccgtcaccgcgatcctcgcgttcggcgtcaccttcgtcatcgtctcggcgggcatcgacctgtcggtcggctcggtcgccgcgctgtcggccaccgtgctggcctggagcgccaccgaggccgggatgccggtcgcgctcgcggtgctgctgtccgtcctgacgggcatcgcctgcggtctggtgaacggtttcctcatctcgtacgggaagctgccgccgttcatcgcgacgctcgccatgctgtcggtgggccgcggtctgtcgctggtcatctcgcagggctcgccgatcgccttcccggactcggtctcgcacctcggtgacacgctcggcgggtggctgccggtgccggtgctcgtgatgatcgtgatggggctgatcaccgcgttcgtcctcggccggacctacatcggccggtccatgtacgccatcggcggcaacgaggaggcggcgcggctgtccgggctgcgggtgaagcggcagaagctcgccatctacgccttctccggcctgttcgccgccgccgcgggcatcgtgctcgcctcccggctctcctccgcgcagccgcaggccgcgcagggctacgagctggacgccatcgccgccgtcgtcatcggcggcgcctcgctggcgggcggcaccggcaaggcctcgggcacactgatcggcgcgctgatcctcgcggtgctgcgcaacggcctcaacctgctgtccgtctccgcgttctggcagcaggtcgtcatcggtgtcgtcatcgcgctcgcggtgctcttcgacacgctgcgccgcaaggcgggcgcggtcactccggcggccggggcgtcgggcggcggcaaccggggcaggcaggcactcacgtacgtgatcgcggccgtcgtcgcggtggccgtggtcggcgccacctcgctgctgcacaacggctcctccggcggcaagagccagaagatagggctgtcgctgtccacgctgaacaacccgttcttcgtgcagatcaggaacggcgcggaggaggaggcgaagaagctgggcgtggacctgacggtcacggacgcccagaacgacgcctcccagcaggccaaccagctccagaacttcgtcagcggcagcctgtccgcggtcatcgtcaacccggtggactccgacgcggccggtccctcggtgcgctccgccaacaaggacgacatcccggtcatcgccgtggaccgcggcgtcaacaaggcggagacgtccgcgctggtcgcctccgacaacgtcgagggcggtgagctgggcgccaaggcgctcgccgagaagctcggcggcaagggcaccatcgtcatcctccagggccaggccggcacctccgccagccgggagcgcggggcgggcttcgcggccgggctcaaggcgtacccgggcatcaaggtcgtcgccaagcagcccgcggacttcgaccgcaccaagggcctggacgtgatgacgaacctgctccaggcgcacccggacgtcgacggcgtcttcgcggagaacgacgagatggcgctgggcgcgatcaaggcactgggttccaaggccggcaagtcggtccaggtcgtcggcttcgacggcaccccggacgggctgaaggcggtccaggacggcacgttgtacgcgtcggtggcgcagcagccgaaggaactgggcaggatcgccgtacggaacgcgctgcgggcggccgaggacaagaaggtggagcagacggtgaaggtgcccgtgaaggtcgtcacccagcagaacgtggcgggtttcgagggctga

SEQ ID NO: 38812 - protein, 651 aa, Streptomyces coelicolor A3(2)
MATDTLKSKPGAQGATGGLRRLLLDNGALTALIVLVVVMSALSGDFLTADNLLNVGVQAAVTAILAFGVTFVIVSAGIDLSVGSVAALSATVLAWSATEAGMPVALAVLLSVLTGIACGLVNGFLISYGKLPPFIATLAMLSVGRGLSLVISQGSPIAFPDSVSHLGDTLGGWLPVPVLVMIVMGLITAFVLGRTYIGRSMYAIGGNEEAARLSGLRVKRQKLAIYAFSGLFAAAAGIVLASRLSSAQPQAAQGYELDAIAAVVIGGASLAGGTGKASGTLIGALILAVLRNGLNLLSVSAFWQQVVIGVVIALAVLFDTLRRKAGAVTPAAGASGGGNRGRQALTYVIAAVVAVAVVGATSLLHNGSSGGKSQKIGLSLSTLNNPFFVQIRNGAEEEAKKLGVDLTVTDAQNDASQQANQLQNFVSGSLSAVIVNPVDSDAAGPSVRSANKDDIPVIAVDRGVNKAETSALVASDNVEGGELGAKALAEKLGGKGTIVILQGQAGTSASRERGAGFAAGLKAYPGIKVVAKQPADFDRTKGLDVMTNLLQAHPDVDGVFAENDEMALGAIKALGSKAGKSVQVVGFDGTPDGLKAVQDGTLYASVAQQPKELGRIAVRNALRAAEDKKVEQTVKVPVKVVTQQNVAGFEG

SEQ ID NO: 38813 - DNA, 942 bp, Rhizobium etli CFN 42
  CDS (1)..(942): transl_table=11
atgaattcatttgccagtcgcctgaagctcccttatcgcgcgggagcgatcgggctttccattggaacgctcctggtgatggttgtcgcctcggtaatattattgccggacttcatggatccggagaatttgtctaatctcctggcgcaatcgacggtgctcgtcatctcggctctcggtcagacgttcgtcattctcactggcggcctcgacgtgtcggttgggtccgtcatcagtctaacgacgacgatcatgacgcttgatcttcctgagataacccgcgtgcttatctgcatcgcggtggcgatggggttcggagtagcgaacggttacggtgtcgcgcgcctcaatgtacatccaatcatcatgacgctgacaacaatgggcatcggccaaggtatcgcgttgatcattttgccaatcccaggcgggcgcgtgccggagtggctttccggctcggtagccggatccatcggccccgtacctaactcattgttttggttgatcacggcatcgctcttcgcatcctggattctctatcgtcgtcccttcggcctctacctcttcgcttccggcggcaatgacttcaacgcacggatgaacggtgttcccgtcgagcgcaccatcatcaaagcgtatgttctttccgctctattcgcatgcgctgcggggatgtttcttgcaggtcgccttgcatcgggtgatcctaagggcggcgcttcattcgggattgagtctgtaacggctgcagcattgggtggggtccacctcgccgggggcatcggaagcattgtgggaaccgtcgttggcgcggcgatcctcgggacagtgaataatgtgatgaatctggccaacgtctctgcatttcttcagtcggtcgtcaagggtgtgttgcttctcgtactcgtcgtttcgcagcgacgcaaaacaatcggactttga

SEQ ID NO: 38814 - protein, 313 aa, Rhizobium etli CFN 42
MNSFASRLKLPYRAGAIGLSIGTLLVMVVASVILLPDFMDPENLSNLLAQSTVLVISALGQTFVILTGGLDVSVGSVISLTTTIMTLDLPEITRVLICIAVAMGFGVANGYGVARLNVHPIIMTLTTMGIGQGIALIILPIPGGRVPEWLSGSVAGSIGPVPNSLFWLITASLFASWILYRRPFGLYLFASGGNDFNARMNGVPVERTIIKAYVLSALFACAAGMFLAGRLASGDPKGGASFGIESVTAAALGGVHLAGGIGSIVGTVVGAAILGTVNNVMNLANVSAFLQSVVKGVLLLVLVVSQRRKTIGL

SEQ ID NO: 38815 - DNA, 1065 bp, Yersinia pestis KIM
  CDS (1)..(1065): transl_table=11
gtgaaggagttaatcatgtctagcgttactttgagttcggataaaaagaacccggtatcaactgaatcaaacggtgggatcccacaacctcagcaaccacagaatgcgccgactaaaagtggcttaggattatcccgtatctgggacagctacggcatgctggtggtcttcgccgtggtctttattggttgcgtgatttttgtgcctaattttggctcctttatcaatatgaaagggttggggctggctatctcaatgtctgggatggtggcgtgcggtatgcttttttgtttggcatccggcgattttgacctctctgtggcctcggtcattgcctgcgcgggtgttaccaccgcggtggtgatcaatatgacagagagcctatggataggggtgggcgcaggtttgttattaggggcggcatgtgggctaattaatggttttgtgattgcccggctaaaaatcaatgcgctgatcaccacattggcgacgatgcaaattgttcgtggcctggcgtatatcatttctgatggtaaagccgtgggtatcgaagatgagcgcttcttcgccttgggttataccaactggtttggtctgccagcacccatctggatcaccgttgcctgtttggtgctgtttggtttcttactgaataaaaccacctttggccgtaacacgttggcgattggggggaatgaagatgctgcgcgtctggccggtgtgccggtcgtgcggaccaaaatcattatttttgtgctgtcaggtttggtgtctgccgccgcagggattattttggcttcacgcatgacgagcggccagccaatgacctcgattggttatgagctcattgttatctctgcttgcatattaggcggggtatcactaaaaggcggcattggtaaaatttcttacgtcattgcggggatcttgattctgggaacagtagaaaatgccatgaacctattaaatatctccccgttctcacaatatgtggttcgtggtttgatcctgctggcggcggttatcttcgaccgttacaaacagttagctaaacggacgatataa

SEQ ID NO: 38816 - protein, 354 aa, Yersinia pestis KIM
MKELIMSSVTLSSDKKNPVSTESNGGIPQPQQPQNAPTKSGLGLSRIWDSYGMLVVFAVVFIGCVIFVPNFGSFINMKGLGLAISMSGMVACGMLFCLASGDFDLSVASVIACAGVTTAVVINMTESLWIGVGAGLLLGAACGLINGFVIARLKINALITTLATMQIVRGLAYIISDGKAVGIEDERFFALGYTNWFGLPAPIWITVACLVLFGFLLNKTTFGRNTLAIGGNEDAARLAGVPVVRTKIIIFVLSGLVSAAAGIILASRMTSGQPMTSIGYELIVISACILGGVSLKGGIGKISYVIAGILILGTVENAMNLLNISPFSQYVVRGLILLAAVIFDRYKQLAKRTI

SEQ ID NO: 38817 - DNA, 1191 bp, Brucella suis 1330
  CDS (1)..(1191): transl_table=11
atgagcgagaatgtaatccagagcggccagcagagcagcgtggggcgctatctcaagaacaatctgcgtgaatccgggatgctgctttcgctcgttgcaatcatgatcttcttccagatcgtgaccggcggcgttctcatgaagccgctgaacctcaccaatctcgttttgcagaacagctatatcgtcatcatggcgcttggaatgctgctcatcatcgtcacgggccatatcgatctttcggtcggttcggtctgcggctttatcggggcgctcgctgccgtcatgatggtaaagctcggcattccctttcccattgcggccattctctgcctcattgtcggcgggttgatcggcgcgatccagggtttttgggtcgcctatttcaatatcccctccttcattgtgacattggccggtatgctcgtgttcaaggggctgatgcttgccgttctgggcggacagtcggtcggaccttttccggtcgtgttccagaagctctcgtcgggcttcattccagaggtgatcggcacgtttgacggcgtttatctcacctcgctcatcatcggcgttctgcttgcggttttcctcatctggcagagcatgcggtcgcgcgcgcgccatattgcccatgaggtggagaccgagcccttcggccttttcgtggtcaagtgcatcctctatttcgtcgcaattgcctatctttcgctgctcatttcctcacatcgcggtatgccgaacgtactcatcatcatggcggtgctgattgccgcctatgcgtttctcaccaatcgcaccgtgatcggccgccagatctatgcggtgggcggcaatcgtcacgccgccaagctttccggcgtgaaaaccgagcggctgacgtttctcaccttcgtcaatatgggtgtgctggcagcacttgcgggtctcgtcttcgccgcccgtctcaatacggcgacgccgaaagctggcatcggctttgaactggacgtcatcgcggcctgcttcatcggtggcgcttcggcctatggcggtgtggggcgggttacgggtgccgtgatcggcgcgctcatcatgggcgtgatgaacaacggcatgtcgatcctcggcatcggtatcgactatcagcaggtcatcaagggtatcgtgctgctgggggcggtttgtatcgacgtttataaccagaaacgctga

SEQ ID NO: 38818 - protein, 396 aa, Brucella suis 1330
MSENVIQSGQQSSVGRYLKNNLRESGMLLSLVAIMIFFQIVTGGVLMKPLNLTNLVLQNSYIVIMALGMLLIIVTGHIDLSVGSVCGFIGALAAVMMVKLGIPFPIAAILCLIVGGLIGAIQGFWVAYFNIPSFIVTLAGMLVFKGLMLAVLGGQSVGPFPVVFQKLSSGFIPEVIGTFDGVYLTSLIIGVLLAVFLIWQSMRSRARHIAHEVETEPFGLFVVKCILYFVAIAYLSLLISSHRGMPNVLIIMAVLIAAYAFLTNRTVIGRQIYAVGGNRHAAKLSGVKTERLTFLTFVNMGVLAALAGLVFAARLNTATPKAGIGFELDVIAACFIGGASAYGGVGRVTGAVIGALIMGVMNNGMSILGIGIDYQQVIKGIVLLGAVCIDVYNQKR

SEQ ID NO: 38819 - DNA, 990 bp, Pseudomonas syringae pv. tomato str. DC3000
  CDS (1)..(990): transl_table=11
atgaacaataaaaaagaggtgcgtatgtctaccgaatccagccttcaggctccccgtcagggcatgaacctgcgtcgttttgtcgatgactgggtgatgctcctggctgccgtgggaattttcctgctgtgtgccgtgttcatcgacaacttcatgtcaccgctgaacatgcgcggtcttggcctggcgatttctaccgtgggcattgccgcctgcaccatgttgttctgcctggcgtccgggcacttcgacctgtcggtgggctcggtgctggcctgctccggggtcatcgccggtatcgtcattcgcgacaccgacagcgtgtttctcggtgtgtcggcagcgctggcgctggggctggtggttggccttatcaacggcatcgtcatcgccaagctgcgtatcaatgcgctgattgcgacattggcgaccatgcagatcgtgcgcgggctggcctatatcttctccaacggcaaggccgtcggtgtttccaacgaagacttcttcatcttcggcaatggccagatctacggcgtgccggtgcctattctgatcaccatcgcctgcttcatgttcttcggctggttgctcaactacaccacctacgggcgcaacacgatggccatcggcggtaaccaggaagccgcgctgctggcgggcgtgcatgtcgatcgcaccaagatcatcatcttcgcagtacacggcctgatcggtgcgttggcgggtgtggtactggcttcccgcatgacctcgggccaaccgatgatcggccagggctttgagctgaccatcatctcggcttgtgtgctgggcggggtctcgctaagtggcggtatcggcatgattcgtcatgtgatcgctggcgtgctgattctggcaatcatcgagaacgcgatgaacctgaagaacatcgacaccttctaccagtacgtgattcgcggcacgattctgctgttggcggtgatcattgaccggatgaagcgtcgctga

SEQ ID NO: 38820 - protein, 329 aa, Pseudomonas syringae pv. tomato str. DC3000
MNNKKEVRMSTESSLQAPRQGMNLRRFVDDWVMLLAAVGIFLLCAVFIDNFMSPLNMRGLGLAISTVGIAACTMLFCLASGHFDLSVGSVLACSGVIAGIVIRDTDSVFLGVSAALALGLVVGLINGIVIAKLRINALIATLATMQIVRGLAYIFSNGKAVGVSNEDFFIFGNGQIYGVPVPILITIACFMFFGWLLNYTTYGRNTMAIGGNQEAALLAGVHVDRTKIIIFAVHGLIGALAGVVLASRMTSGQPMIGQGFELTIISACVLGGVSLSGGIGMIRHVIAGVLILAIIENAMNLKNIDTFYQYVIRGTILLLAVIIDRMKRR

SEQ ID NO: 38821 - DNA, 990 bp, Vibrio parahaemolyticus RIMD 2210633
  CDS (1)..(990): transl_table=11
atgtctgtaacaagctctacgaaaatactagaacaacaggacgcgaagcgttcatggaattttgctgggatttgggaccgattcggcatgctgatggtgttcgctggtctgtttttattgtgtgctttctttgtgccttacttcgcgacgttcatcaatatgaaaggtctgggtttggcgatctctatgagtggcatggtggcgtgtgccatgctgttttgcttggcgtgtggtgatctggatttgtcggtcgcgtccatcattgcttgctcaggtgtggttaccgccgtcgcgatcaacgcaactagcagcgtggtacttggtgtgggcgcaggtctgctttctggcgttgcctttggcctgttaaacggttttgtcattgctaagttgcaaatcaacgcactgatcaccactttggcgaccatgcagatagcacgaggcttgggctacatcatctcagatggtaaagcggtgggcatcacagaagagagcttctttgcactgggtaactcatcatttattggtatcccaacgcctatttggttgacgatcattacctttggagtttttgctttcttgctgaatcgcactgtttatggtcgtaacacgctcgcgattgggggcaacgaagaagcggctcgcttagcgggtgtgaatgtagtgaaaactaagatgattatcttcaccgtgtctggttttatctcggcattggcgggggttattttggcggcgcgtatgaccagtggtcagcctatgacgtcagtgggctttgaattggtggttatctctgcctgtgtccttggtggtgtgtcgctaaaaggtggcatcggtaaagtctcttacgtgattgctggcgtgctgattttgggtacagtcgaaaatgcaatgaaccttcttaacatgtcaccattcgcgcaatacgtcgtgcgcggtgcaatattacttgctgctgttatttttgaccgctacaaacaaaccagccgcgcataa

SEQ ID NO: 38822 - protein, 329 aa, Vibrio parahaemolyticus RIMD 2210633
MSVTSSTKILEQQDAKRSWNFAGIWDRFGMLMVFAGLFLLCAFFVPYFATFINMKGLGLAISMSGMVACAMLFCLACGDLDLSVASIIACSGVVTAVAINATSSVVLGVGAGLLSGVAFGLLNGFVIAKLQINALITTLATMQIARGLGYIISDGKAVGITEESFFALGNSSFIGIPTPIWLTIITFGVFAFLLNRTVYGRNTLAIGGNEEAARLAGVNVVKTKMIIFTVSGFISALAGVILAARMTSGQPMTSVGFELVVISACVLGGVSLKGGIGKVSYVIAGVLILGTVENAMNLLNMSPFAQYVVRGAILLAAVIFDRYKQTSRA

SEQ ID NO: 38823 - DNA, 972 bp, Rhodopirellula baltica SH 1
  CDS (1)..(972): transl_table=11
atgttagaaaacaaacgcgaacacctcgcgaaatttcaatcgctgatcgcgttggcagtgatgctgatcgcgatgagctttctgtcagacagtttcttcacgcccgagaatgggttgaacattctgagacaaatttcagtcaatctcagcctttcgattgggatgacattgatcatcttgaccggcggaatcgacttgtcggtcggtgccattctcgctttgtccggcgccgtggcggcagggttgctgaagaacggcatcatgctcgaaccgcttggtgtgaagctggagttcaccgttttcggagcgattgtttctggattgttggtcggttccgccgcagggttgttcaatggagtcgcggtgactcgtttcaagcttccgccgtttgtcgccacgctgggaatgttcagcatcgctcgtggtttgacgatgttgtggacgggcgggttcccggtcacgggtctcggttcatcgttcggttccatcggcacgggcgtgttcctgcaaattccggttccggtttggatcaccggtgcattggttggcgtgtttgtgctgttgacccggacaactcgttttggccggcatgtgtacgcggttggcggcaacgaacgcgcttcgttgttgacaggattgccagtcgatcggatcaaaatcgcggtttacacgctcggtggtttgctcgctggagtggcgggactcatcgtgaccgctcgactggattcggctcaacccaacgcagggttgggctacgaactcgattcgattgccgccgtcgtgattggtggcacatccctgtcgggcggacgaggcagcgtcatggggacggtgctgggttgcctgatcattggtgtgttgaacaacagtttgtttctgttaaacgtttcccctttttggcaacaagtggtcaagggattcgtgatcctggccgccgtcgccgtggaccgcatgagtcaaagggaccgataa

SEQ ID NO: 38824 - protein, 323 aa, Rhodopirellula baltica SH 1
MLENKREHLAKFQSLIALAVMLIAMSFLSDSFFTPENGLNILRQISVNLSLSIGMTLIILTGGIDLSVGAILALSGAVAAGLLKNGIMLEPLGVKLEFTVFGAIVSGLLVGSAAGLFNGVAVTRFKLPPFVATLGMFSIARGLTMLWTGGFPVTGLGSSFGSIGTGVFLQIPVPVWITGALVGVFVLLTRTTRFGRHVYAVGGNERASLLTGLPVDRIKIAVYTLGGLLAGVAGLIVTARLDSAQPNAGLGYELDSIAAVVIGGTSLSGGRGSVMGTVLGCLIIGVLNNSLFLLNVSPFWQQVVKGFVILAAVAVDRMSQRDR

SEQ ID NO: 38825 - DNA, 966 bp, Bordetella bronchiseptica RB50
  CDS (1)..(966): transl_table=11
atgctcactaagaccctggccgtatcccgcgccgcgcgccccgcgccggccgcgcgcctggccgacgccatcctgccgctgatcatcgcgttgatcgcgctggtcgccagcctgatcgaaccgcgtttcgcctcgctggacaacctgaccaacctggcctgtcagctggtgccgctgctgatcctgtcggtcgggcaggcgttcgccatcctgcgcggcggcctggacctgtccatgtcgtccgtgctgtcgctggcgggcgtggccggcgtgctggccatgcccgcctggggcgtcgcggcggggctggcggtgatgctggccgtggggctggccgccggcgtcgtctcgggcttcatcatcgcgcgctttcgcaccaccccgctggtggtcaccctgggcatgctgtcggtgacccaggccatcgcgctgatcctgtccggcggcgttcccatctacgacgtgccggcgccctatgtgaacgcggtgggcttcggcaggaccctgggcctgcccaacatggtctggatcgccgccgccgtgacgctggccgccgccttcgcgctcaagcgcaccgtgttcggccgctacgtctacgcgctgggttcgagcgagtcggcggcgtccaaggccggcgtgaacgtgcagcgctacacggtgatggtgtatgccgccagcggcctgtgcgccgcggtgggcgccgtggtgctgaccgcctggaccagttcggcccagccggtggccgtgcccggcctgacgctgcaatcgatcgccgccgtcgtgctgggcggcgtcgcgctgaccggcggcagcggcagcatcgtgcaggtctttctgggcgtgctggtgctgtccgtgctctccaatgccatgaacatcaccggcgtatcggcgtacttccagacgctggtcgtcggcgtggtcatcatcatcgcggtcatcctggaccgctttcgtcgaagctga

SEQ ID NO: 38826 - protein, 321 aa, Bordetella bronchiseptica RB50
MLTKTLAVSRAARPAPAARLADAILPLIIALIALVASLIEPRFASLDNLTNLACQLVPLLILSVGQAFAILRGGLDLSMSSVLSLAGVAGVLAMPAWGVAAGLAVMLAVGLAAGVVSGFIIARFRTTPLVVTLGMLSVTQAIALILSGGVPIYDVPAPYVNAVGFGRTLGLPNMVWIAAAVTLAAAFALKRTVFGRYVYALGSSESAASKAGVNVQRYTVMVYAASGLCAAVGAVVLTAWTSSAQPVAVPGLTLQSIAAVVLGGVALTGGSGSIVQVFLGVLVLSVLSNAMNITGVSAYFQTLVVGVVIIIAVILDRFRRS

SEQ ID NO: 38827 - DNA, 981 bp, Gloeobacter violaceus PCC 7421
  CDS (1)..(981): transl_table=11
atgggcgagagcacgtcaaaaaacccaaaactcctcaccctaccggattggttgcgtgaatggctcgcccgccagactgcctacggcccggccatcgccgtactgatcgagatcgtcgtcttcagcgccatcgccccgggcttttttaccctcgagaacttcatcaacatctcgctgcagacggcgattttcggcatcctggcggtcggaatgacactggtgatcctgacgggcggcatcgatctgtcggtgggatcggtggtggcccttgccggggtgagcggggccatggtcgcccaagcgggcgggctcggcatgcccgtggccatcgtggtaggcggtggggtcgggcttttgagcggtctgttggtggcgtactttcgggtggctccgtttgtggtcaccctggccgggctcaccattgcccgcggcctcgcctttttgctcaccggcggccggtcgatcggcggtttgccgcccgacttcaccttctggggccaaaaacagctcggcttactgccgctgccagtgctcgtcttgatggtagtggtgaccggaggatactttttgctcacccgcacagtcttcggccgccagatctacgccatcggcggcaacgccgaggcgagttggctcgcgggagtgccggtgcaaggggtgctggtggcggtctatctcatcaacggcttgctcgcggggctcgcgggcgggatgctcgccgcccggctcggagccggaattcccaatagcggccaactctacgaattggaggtgatcgcagcggtagtggtggggggcaccagtttgagcggcggccgaggaggagtactcggcagtctgctcggggcgctgtttatcggcaccctcggcaacggtctcaatctgctgggcgtcgatccgtacctgcaaaaaatcgtactgggagtggtgatcctggcggctgtgctcgtcgatagcgccggacggcggggacaaagatga

SEQ ID NO: 38828 - protein, 326 aa, Gloeobacter violaceus PCC 7421
MGESTSKNPKLLTLPDWLREWLARQTAYGPAIAVLIEIVVFSAIAPGFFTLENFINISLQTAIFGILAVGMTLVILTGGIDLSVGSVVALAGVSGAMVAQAGGLGMPVAIVVGGGVGLLSGLLVAYFRVAPFVVTLAGLTIARGLAFLLTGGRSIGGLPPDFTFWGQKQLGLLPLPVLVLMVVVTGGYFLLTRTVFGRQIYAIGGNAEASWLAGVPVQGVLVAVYLINGLLAGLAGGMLAARLGAGIPNSGQLYELEVIAAVVVGGTSLSGGRGGVLGSLLGALFIGTLGNGLNLLGVDPYLQKIVLGVVILAAVLVDSAGRRGQR

SEQ ID NO: 38829 - DNA, 972 bp, Photorhabdus luminescens subsp. laumondii TTO1
  CDS (1)..(972): transl_table=11
atgaattctaatatatcaccgacatttaaacgttggtttactaaagagtggttactgaaacaaaagtcactgattgcgttgctagtgctgatagcagtagtttcttctcttagccaaaactttttcactttaaataacttgtttaatattctgcaacaaacatcagtcaatgccattatggccgttgggatgacattggttatcctgacatcaggtattgacctgtctgttggttcattgcttgcgttaacaggtgcaatagtagcttcattggttggtacggaagttaatgctctggtggctatcgtgagtgctttggctttaggtgctgcaattggtgcttgtacaggaataataattgctaaaggtaaagtacaggcttttattgccactctagtcatgatgttattacttcgtggaataacccgtgtctatactgatggtagtccaataaatacaggattcagtgataatgccgatctgtttggctggtttggtattggtcgcccactgggaattcctactccagtatggctgatgttgatagtttttgttatcacatggtatatcctgcatcacacccgtttaggtcgttatatttatgccttgggggggaatgaatcggctacccgtttatctggtatcaatatcgataaaattaaaattatcgtttactccttatgcggtttcctgacggcattggcaagtattattgaagttgctcgtctttcttctgctcaacctatggcggggggaggttatgaattagatgctattgctgccgtagttctgggaggaactcgcctggctggtggtaaggggttaattattggtactttgattggtgcactaatcctcggttttttaaataatggcttaaacttattaggtatttcttctaactatcagatgattgttaaagcaattgtaatattgttggcagttctggttgataacaaaagtggtaaataa

SEQ ID NO: 38830 - protein, 323 aa, Photorhabdus luminescens subsp. laumondii TTO1
MNSNISPTFKRWFTKEWLLKQKSLIALLVLIAVVSSLSQNFFTLNNLFNILQQTSVNAIMAVGMTLVILTSGIDLSVGSLLALTGAIVASLVGTEVNALVAIVSALALGAAIGACTGIIIAKGKVQAFIATLVMMLLLRGITRVYTDGSPINTGFSDNADLFGWFGIGRPLGIPTPVWLMLIVFVITWYILHHTRLGRYIYALGGNESATRLSGINIDKIKIIVYSLCGFLTALASIIEVARLSSAQPMAGGGYELDAIAAVVLGGTRLAGGKGLIIGTLIGALILGFLNNGLNLLGISSNYQMIVKAIVILLAVLVDNKSGK

SEQ ID NO: 38831 - DNA, 987 bp, Erwinia carotovora subsp. atroseptica SCRI1043
  CDS (1)..(987): transl_table=11
atgtcaacggttacgtctgcaacctcagaaaagaagaaaaacggtatgggattgtcccgcatttgggataactacggcatgctggtggtttttgccgtgctgtttcttggctgtgcgattttcgtcccaaatttcgcctcatttatcaatatgaaagggttgggactggcgatctccatgtccggtatggtggcctgcgggatgctgttctgtctggcttctggtgattttgatctatctgtggcttcgattatcgcctgttccggggtggcgacggcggtggtgattaatatcagtgaaagtctgtggatcggcgtcggtgctgggctgctgctgggcgtggcattcggtttacttaacggcttcgtgattgcccgtttgaagatcaacgcactgatcacgacgctggcgaccatgcagattgcacgcggtctggcgtacattatttctgatggtaaagcggtagggattgaagatgagcgtttcttcgcattgggttatgccaactggctgggcttgcctgcgccaatttggatcaccatcggctgtatgatcctgtttggcctgttgctgaacaagaccacgtttggccgcaatacgctggcgattgggggaaatgaggaagcggcgcgtttggccggggtgccggttgtacgtaccaagatcatcatttttgccttgtccggtctggtatccgccgcggcgggaatcattttggcttcgcgtatgaccagcggccagccgatgacgtccatcgggtatgagctgatcgtcatttctgcctgtgtgctgggtggcgtatcgctgaaaggcgggatcggcaaaatttcctacgtggtggctggcgtactgattttaggtacggtggaaaacgcgatgaacctgctaaatatttctcctttctctcagtatgtggtgcgcggtcttattttgctggcggcggttatcttcgaccgttacaaacagctggcgaagaaaacggtataa

SEQ ID NO: 38832 - protein, 328 aa, Erwinia carotovora subsp. atroseptica SCRI1043
MSTVTSATSEKKKNGMGLSRIWDNYGMLVVFAVLFLGCAIFVPNFASFINMKGLGLAISMSGMVACGMLFCLASGDFDLSVASIIACSGVATAVVINISESLWIGVGAGLLLGVAFGLLNGFVIARLKINALITTLATMQIARGLAYIISDGKAVGIEDERFFALGYANWLGLPAPIWITIGCMILFGLLLNKTTFGRNTLAIGGNEEAARLAGVPVVRTKIIIFALSGLVSAAAGIILASRMTSGQPMTSIGYELIVISACVLGGVSLKGGIGKISYVVAGVLILGTVENAMNLLNISPFSQYVVRGLILLAAVIFDRYKQLAKKTV

SEQ ID NO: 38833 - DNA, 1050 bp, Yersinia pseudotuberculosis IP 32953
  CDS (1)..(1050): transl_table=11
atgtctagcgttactttgagttcggataaaaagaacccggtatcaactgaatcaaaaggtgggatcccacaacctcagcaaccacagaatgcgccgactaaaagtggcttaggattatcccgtatctgggacagctacggcatgctggtggtcttcgccgtggtctttattggttgcgtgatttttgtgcctaattttggctcctttatcaatatgaaagggttggggctggctatctcaatgtctgggatggtggcgtgcggtatgcttttttgtttggcatccggcgattttgacctctctgtggcctcggtcattgcctgcgcgggtgttaccaccgcggtggtgatcaatatgacagagagcctatggataggggtgggcgcaggtttgttattaggggcggcatgtgggctaattaatggttttgtgattgcccggctaaaaatcaatgcgctgatcaccacattggcgacgatgcaaattgttcgtggcctggcgtatatcatttctgatggtaaagccgtgggtatcgaagatgagcgcttcttcgccttgggttataccaactggtttggtctgccagcacccatctggatcaccgttgcctgtttggtgctgtttggtttcttactgaataaaaccacctttggccgtaacacgttggcgattggggggaatgaagatgctgcgcgtctggccggtgtgccggtcgtgcggaccaaaatcattatttttgtgctgtcaggtttggtgtctgccgccgcagggattattttggcttcacgcatgacgagcggccagccaatgacctcgattggttatgagctcattgttatctctgcttgcgtattaggcggggtatcactaaaaggcggcattggtaaaatttcttacgtcattgcggggatcttgattctgggaacagtagaaaatgccatgaacctattaaatatctccccgttctcacaatatgtggttcgtggtttgatcctgctggcggcggttatcttcgaccgttacaaacagttagctaaacggacgatataa

SEQ ID NO: 38834 - protein, 349 aa, Yersinia pseudotuberculosis IP 32953
MSSVTLSSDKKNPVSTESKGGIPQPQQPQNAPTKSGLGLSRIWDSYGMLVVFAVVFIGCVIFVPNFGSFINMKGLGLAISMSGMVACGMLFCLASGDFDLSVASVIACAGVTTAVVINMTESLWIGVGAGLLLGAACGLINGFVIARLKINALITTLATMQIVRGLAYIISDGKAVGIEDERFFALGYTNWFGLPAPIWITVACLVLFGFLLNKTTFGRNTLAIGGNEDAARLAGVPVVRTKIIIFVLSGLVSAAAGIILASRMTSGQPMTSIGYELIVISACVLGGVSLKGGIGKISYVIAGILILGTVENAMNLLNISPFSQYVVRGLILLAAVIFDRYKQLAKRTI

SEQ ID NO: 38835 - DNA, 1020 bp, Yersinia pseudotuberculosis IP 32953
  CDS (1)..(1020): transl_table=11
atgacatcaagacaatattacataaaggataaggtaatgggatccatagtcaaagaggttgatgacgtcaggcaggtgtcattgatgaagagaacggcgctgttcctgctagacaactcaacgaccgttgtttttattgttatgttgattgcagcaggtttcttctctgatcgattttacagtggggataatattaccaatgtgttgcgccaaagtgttccgctcggtctggcggcattggggatgttgttcgtcattctgactggtggtattgatctgtccattggctccattatggcatttgtctcggtcttggtagggctgttgatcccagaatttgggttatggccagcgttgattgcgggtgtcggtattgccactttgatgggggcattctccggttttttggtcacttggtttaatatcgcgccttttattgccacattggcgatgatgaccattgcgcgaggcgtggcgctgattatttctaagggccaaccggtatttattgataacgatgctttcgtaaactttggtacgggctatttccttgggatccctctgcctgtctatgttttcctcggttttgccattatttgccaattggtatacaaaaattcggtctttggtcggttggtggtgtcgataggctctaacgaaactgcgactcgcttcgcaggtattcgggtcaataactataagttagccgtttatgctattagcgcatttgcctgtggtgcggcgggtatcatttctgccacccgaacgggggtgggatcaccggtgctgtctattggatttgaactggatgtcattgcggcggtagtcgttggcggggccagtctggcgggaggccatggcaatgtggtcaatactattattggcgtatttatcctgagtataatatccaatctaatgaatttaatgaatatttccggctataaccaacaggtggtcaaaggggttatcatcatcatcgcggtgatggtccaaagcctaaaatcgcggagtaaagcctga

SEQ ID NO: 38836 - protein, 339 aa, Yersinia pseudotuberculosis IP 32953
MTSRQYYIKDKVMGSIVKEVDDVRQVSLMKRTALFLLDNSTTVVFIVMLIAAGFFSDRFYSGDNITNVLRQSVPLGLAALGMLFVILTGGIDLSIGSIMAFVSVLVGLLIPEFGLWPALIAGVGIATLMGAFSGFLVTWFNIAPFIATLAMMTIARGVALIISKGQPVFIDNDAFVNFGTGYFLGIPLPVYVFLGFAIICQLVYKNSVFGRLVVSIGSNETATRFAGIRVNNYKLAVYAISAFACGAAGIISATRTGVGSPVLSIGFELDVIAAVVVGGASLAGGHGNVVNTIIGVFILSIISNLMNLMNISGYNQQVVKGVIIIIAVMVQSLKSRSKA

SEQ ID NO: 38837 - DNA, 975 bp, Mannheimia succiniciproducens MBEL55E
  CDS (1)..(975): transl_table=11
ttgattatgacttcaacaactcaagaaaaaagtgcgggttcattcagcaaaatctggaacgcttatggcatgctgttaatttttgcagtcatttttgtctgctcttgtgtatttatcccgaattttgccactgtggtgaatatgaaagggctgggtttggccatttctatgagcgggattgttgcctgcggtatgttgttctgcttagccgccggcgaaattgatctttccgtcgcttccgttattgcttgcgcgggggttgttacggcggtggtcattaatatgacgcaaagcgtgacaatcggtattcttgccggtctcggcctgggtattgccgtagggttaattaacggtttcgtaattgcgaaattaaaaatcaactcattaatcaccaccctcgccaccatgcagattgcccgcggtttcggttatattatttctgacggtaaagcggtgggtattaccaaagaagaattcttcgaattaggttatcaggatattttcggcgtgccgttaccgattatttttaccgttatctgtatggtcgtcttcggtttcttactcagtaaaaccacttacggacgcaataccctggctatcggcggtaatcaggaagcttcccgtttagccggtatcaatgtggacagaacaaaattaattatttttgtggtatcgggttttgtttccgcacttgccggcgtgattctggccgcccgtatgaccagcggtcaaccgatgacttccgtgggttttgaactggtggccatttcggcctgtgtattgggcggcgtttcattgaacggcggggtggcaaaaatttcatttattatcgccggggtgttaattctcggtaccatcgaaaatgccatgaacctactgaatatttcaccttttgcccaatatgtagtgcgcggtttaatcttgctgattgcggtaatttttgataaatataaacagaaatttatcaaatcttaa

SEQ ID NO: 38838 - protein, 324 aa, Mannheimia succiniciproducens MBEL55E
MIMTSTTQEKSAGSFSKIWNAYGMLLIFAVIFVCSCVFIPNFATVVNMKGLGLAISMSGIVACGMLFCLAAGEIDLSVASVIACAGVVTAVVINMTQSVTIGILAGLGLGIAVGLINGFVIAKLKINSLITTLATMQIARGFGYIISDGKAVGITKEEFFELGYQDIFGVPLPIIFTVICMVVFGFLLSKTTYGRNTLAIGGNQEASRLAGINVDRTKLIIFVVSGFVSALAGVILAARMTSGQPMTSVGFELVAISACVLGGVSLNGGVAKISFIIAGVLILGTIENAMNLLNISPFAQYVVRGLILLIAVIFDKYKQKFIKS

SEQ ID NO: 38839 - DNA, 1005 bp, Burkholderia pseudomallei K96243
  CDS (1)..(1005): transl_table=11
atgcaagcaagagagaatcttccaccggccgcggcgcacgcggcggccgtgccgaccgaggatcggcagcgctggcggcagcacgccgccgactacagtctcgtcgcgatcttcgcggcgatgttcgtcgcgatgtcgctgacggtcgatcatttcttctcgatcgacaacatgctcgggctcgcgctgtcgatctcgcagatcgggatggtcgcgtgcacgatgatgttctgcctcgcgtcgcgcgatttcgatctgtcgatcggctcgacggtcgcgttcgcgggcgtgctgtgcgcgatggtgctcaacgcgaccgacaacacgttcgtcgcgatcgcggcggcagtcgcggcgggcgccgtcatcggcttcgtcaacggcgcggtgatcgcctatctgcggatcaacgcgctgatcacgacgctcgcgacgatggagatcgtgcgcgggctcggcttcatcgtgtcgaaggggcaggcggtcggcgtgtcgtcggagacgttcatcgcgttgggcgggctcacgttcttcggcgtgtcgctgccgatctgggtgacgctcgcgtgcttcgtcgtgttcggcgtgctgctcaaccagaccgtgtacggccgcaacacgctcgcgatcggcggcaacccggaggcgtcgcggctcgccggcatcaacgtcgagcgcacgcgcgtctacatcttcctgatccagggcgcggtgaccgcgctcgcgggcgtgattctcgcgtcgcggatcacgtcgggccagccgaacgcggcgcagggcttcgagctgaacgtgatttccgcgtgcgtgctgggcggcgtgtcgctcgcgggcggacgcgcgtcgatctcgggcgtcgtgatcggcgtgctgatcatgggcaccgtcgagaacgtgatgaacctgctgaacatcgatgcgttctatcaatatctggtgcgcggcgcgatcctgctcgccgccgtgctgctcgaccagttgaagaaccgcggcgcgcgcgattga

SEQ ID NO: 38840 - protein, 334 aa, Burkholderia pseudomallei K96243
MQARENLPPAAAHAAAVPTEDRQRWRQHAADYSLVAIFAAMFVAMSLTVDHFFSIDNMLGLALSISQIGMVACTMMFCLASRDFDLSIGSTVAFAGVLCAMVLNATDNTFVAIAAAVAAGAVIGFVNGAVIAYLRINALITTLATMEIVRGLGFIVSKGQAVGVSSETFIALGGLTFFGVSLPIWVTLACFVVFGVLLNQTVYGRNTLAIGGNPEASRLAGINVERTRVYIFLIQGAVTALAGVILASRITSGQPNAAQGFELNVISACVLGGVSLAGGRASISGVVIGVLIMGTVENVMNLLNIDAFYQYLVRGAILLAAVLLDQLKNRGARD

SEQ ID NO: 38841 - DNA, 975 bp, Corynebacterium glutamicum ATCC 13032
  CDS (1)..(975): transl_table=11
ttgagcaccgccgtagtttcacagaagaagtccacaacggcatccaaaattggacattggatgctcaataacggtgcgttggtggggctgattgcactgtgtgttggactttttattgcaacaccccactttctcaccattcctaacctgatcaacatcggtatccaatcggcgacggtggcgatcctggcgttcggcatgaccttcgtcatcgttaccgcaggcattgatttgtctgtgggatcagtggctgcgttgggtgcgatgacctcggcgtatttcttcgcggaagttggtttgccgggctggatcacgctgctgattggcctgttcatcggattgttggcgggtgcgatctctggcatttctattgcttatggcaagttgcctgcgtttattgccaccttggccatgatgtcgatcgccaggggaatcaccttggtcatttcccaaggctcaccaattcccagtgcaccagctgtgaacgctttggggcgcacctactttggcatcccgatgccgattctgatgatggcactggctggcattgtgtgttggtttattttgagccgcaccgtgctgggacggtccatgtacgccattggcggaaacatggaagcagcccgactatctggtctgccagtgaagaaaatcctggtcatggtctatgcactggctggtgtgtatgcagcacttgcgggtctggtcatgacgggacgcttgtcgtccgcgcagccgcaggcaggcgtgggatacgaactcgatgcgattgccgccgtggtcattggtggtgcgtcacttgctggcggaaccggaaaagcaacgggcactttgattggtgccatcttgttggccgtgatccgcaatggcttgaacattttgaacgtgtcctcgttctggcagcagattgtcatcggttgtgtcatcgcgcttgcggtgggcttcgatgtcatccgaaacaaaacctctaagtaa

SEQ ID NO: 38842 - protein, 324 aa, Corynebacterium glutamicum ATCC 13032
MSTAVVSQKKSTTASKIGHWMLNNGALVGLIALCVGLFIATPHFLTIPNLINIGIQSATVAILAFGMTFVIVTAGIDLSVGSVAALGAMTSAYFFAEVGLPGWITLLIGLFIGLLAGAISGISIAYGKLPAFIATLAMMSIARGITLVISQGSPIPSAPAVNALGRTYFGIPMPILMMALAGIVCWFILSRTVLGRSMYAIGGNMEAARLSGLPVKKILVMVYALAGVYAALAGLVMTGRLSSAQPQAGVGYELDAIAAVVIGGASLAGGTGKATGTLIGAILLAVIRNGLNILNVSSFWQQIVIGCVIALAVGFDVIRNKTSK

SEQ ID NO: 38843 - DNA, 978 bp, Pseudomonas syringae pv. syringae B728a
  CDS (1)..(978): transl_table=11
atgaatgcaaaaaccattatcgccccagcttccacgtctccacgcagccgcctgcgcctgtctctcgaccgtttcggcctgccgttggtgtttattctgttgtgcctggtactggcttttgccagcgaatatttcatgacctggcgcaactggatggacatcctgcgccagacctcgatcaacggcattctcgcggtcggcatgacctacgtgatcctgaccaagggcatcgacctttccgtcggctcgattctggcgttcgccggattgtgcagcgcactggtcgcgacccagggctatggcctgctggcggcggtcagcgcaggcatgtttgccggtgccatgctcggcgtagtcaatggcttcatggtcgccaatctttcgattccaccgtttgtggccaccttgggcatgctcagcatcgcccgcggcatgaccttcatcctcaacgacggcagcccggtgaccgacctgcccgaagaatacctggcgttgggcatcggccggatcggcccgattggtgtgccgatcattatcttcgcggtggtcgcgctgattttctggatggtactgcgctacaccacctacggccgttacgtgtacgccgtcggcggcaacgaaaagagcgcgcgcacctccggtatcggtgtgcgcaaggtgatgttttcggtgtacgtggtttccgggctgctcgccggactggcaggcgtagtgctgtccgccagaaccacctccgccctgccccaggccggcatgtcctacgaactggacgccatcgcagcagtggtcatcggcggcaccagcctgtcgggcggtactggcagcatcgttggcacactgtttggcgcactgctgatcggcgtgatcaacaacggcctgaacctgctcggcgtgtcctcctattaccagcaggtcgccaagggcctgatcatcgtgttcgcagtgttgattgatgtgtggcgcaagaaaaaacgctag

SEQ ID NO: 38844 - protein, 325 aa, Pseudomonas syringae pv. syringae B728a
MNAKTIIAPASTSPRSRLRLSLDRFGLPLVFILLCLVLAFASEYFMTWRNWMDILRQTSINGILAVGMTYVILTKGIDLSVGSILAFAGLCSALVATQGYGLLAAVSAGMFAGAMLGVVNGFMVANLSIPPFVATLGMLSIARGMTFILNDGSPVTDLPEEYLALGIGRIGPIGVPIIIFAVVALIFWMVLRYTTYGRYVYAVGGNEKSARTSGIGVRKVMFSVYVVSGLLAGLAGVVLSARTTSALPQAGMSYELDAIAAVVIGGTSLSGGTGSIVGTLFGALLIGVINNGLNLLGVSSYYQQVAKGLIIVFAVLIDVWRKKKR

SEQ ID NO: 38845 - DNA, 963 bp, Pseudomonas syringae pv. phaseolicola 1448A
  CDS (1)..(963): transl_table=11
atgtctaccgaatccagcctgcaggctccccgtcagggcatgaacctgcgtcgttttgccgatgactgggtgatgctcctggctgccgtgggaatcttcctgctgtgcgccgtgttcatcgacaacttcatgtcaccgctgaacatgcgggggctaggccttgcgatttccaccgtgggcattgctgcctgcaccatgctcttttgtctggcgtccgggcacttcgacctttcggtcggttcggtgctggcctgttccggggtcatcgccgggattgttatccgcgacaccgacagcgtgtttctcggtgtttccgccgcgctggcgctggggctggtggttggtctgatcaatggcatcgtgattgccaagctgcgcatcaatgccctgatcacgaccctggcgaccatgcagatcgtgcgcggccttgcgtatatcttctccaacggcaaggccgtcggcgtctccaacgaggatttcttcatcttcggcaatggccagatatatggcgtgccggtgccgatcctgatcaccatcgcctgtttcatattcttcggctggttgctcaactacaccacctacgggcgcaacaccatggccatcggtggcaaccaggaagctgcattgctggcgggtgtgcatgtcgatcgcaccaagatcatcatcttcgcggttcacgggcttgtcggggcactggctggcgtggttctggcttcgcgtatgacctcggggcagccaatgatcggtcagggcttcgagctgaccatcatctcggcttgcgtactgggcggtgtttcgctgagcggcggcatcggcatgatccgccatgtaatcgctggtgtgctgattctggcgatcatcgagaatgcgatgaacctgaagaatatcgatacgttctaccaatacgtgattcgcggcacgattctgttgctggcggtgatcatcgaccgactgaaacgctga

SEQ ID NO: 38846 - protein, 320 aa, Pseudomonas syringae pv. phaseolicola 1448A
MSTESSLQAPRQGMNLRRFADDWVMLLAAVGIFLLCAVFIDNFMSPLNMRGLGLAISTVGIAACTMLFCLASGHFDLSVGSVLACSGVIAGIVIRDTDSVFLGVSAALALGLVVGLINGIVIAKLRINALITTLATMQIVRGLAYIFSNGKAVGVSNEDFFIFGNGQIYGVPVPILITIACFIFFGWLLNYTTYGRNTMAIGGNQEAALLAGVHVDRTKIIIFAVHGLVGALAGVVLASRMTSGQPMIGQGFELTIISACVLGGVSLSGGIGMIRHVIAGVLILAIIENAMNLKNIDTFYQYVIRGTILLLAVIIDRLKR

SEQ ID NO: 38847 - DNA, 999 bp, Anabaena variabilis ATCC 29413
  CDS (1)..(999): transl_table=11
atgagtcaaaccttaagacctgccaacaaaagaccaaacgagcatcccaaatcacgccagcgtcaatcaatcaacaatcttctgcaagttgcaggtatcctaccaatcctggttatcatctgcattttattttctctccttagccccaactttcccacagcaggtaacgccgtcaacatcttgcgtcaggcctcaatcaatattgtgctggcaaccgggatgacatttgtcattctcaccggcggaattgacctttccgttgggtcaatcttggctgtatctgcggtagtcacagtcttagtatccctgcttcctgcattaggttgggcggctgtcccggtgggtttgttgacaggattacttttgggtttactcaatggcgctctcatcacctttttagatgtccccccctttatcgtcaccttgggttcattaaccgccttaagaggtgctgcctttttaatagccaacggcacaacagttattaatcgcaatatcaattttgcttggataggtaatagctatgtaggctttcttccctggctagtcatcatcgccctattgactgtagccgtgagttggttcgtcctcagacaaactgttttaggtgtacagatatatgcagtgggtggtaacgaacgcgccgcacgcttaacaggtattaaagtcaatcgcgtgttgttatttgtctatggtgtgagtggattactagcaggtttagccggaatcatgagcgccagccgtttgtatagcgccaccgggatgttaggacaaggctacgaattagatgcgatcgccgccgtaattcttggtggaaccagcttcacaggcggcatcggcaccataggcggcacactccttggtgcattaatcatcgccgttctcaacaacggtttgaccctcttaaatatgtctttcttctggcaactagtcgtcaaaggactagtcattatcgccgcagtcatgattgacagactccgcagacgttcccgacggtaa

SEQ ID NO: 38848 - protein, 332 aa, Anabaena variabilis ATCC 29413
MSQTLRPANKRPNEHPKSRQRQSINNLLQVAGILPILVIICILFSLLSPNFPTAGNAVNILRQASINIVLATGMTFVILTGGIDLSVGSILAVSAVVTVLVSLLPALGWAAVPVGLLTGLLLGLLNGALITFLDVPPFIVTLGSLTALRGAAFLIANGTTVINRNINFAWIGNSYVGFLPWLVIIALLTVAVSWFVLRQTVLGVQIYAVGGNERAARLTGIKVNRVLLFVYGVSGLLAGLAGIMSASRLYSATGMLGQGYELDAIAAVILGGTSFTGGIGTIGGTLLGALIIAVLNNGLTLLNMSFFWQLVVKGLVIIAAVMIDRLRRRSRR

SEQ ID NO: 38849 - DNA, 969 bp, Pseudomonas fluorescens PfO-1
  CDS (1)..(969): transl_table=11
atgacaacccaaaacgaaaccctgccgaccgagcgcaaacctctggatatgcggcgcttccttgatgactgggtgatgctgctggcggcggtgggcatttttgtcgcctgcaccttgctgatcgacaacttcctttcgccactgaacatgcgtggcctgggcctggcaatttccaccaccgggatcgctgcgtgcaccatgttgtactgcctggcgtcggggcatttcgacttgtcggtgggttcggtgattgcctgcgccggcgtggttgcggcggtggtgatgcgcgacaccaacagcgtgtttctcggcgtcagcgcggcgctggtgatgggcctgatcgtcggcctgatcaacggcatcgtgatcgccaagttgcgggtcaatgcgctgatcacgacactggcgaccatgcagatcgtccgtggcctggcctacatttttgccaacggcaaagcggtgggcgtatcgcaggaatcgttcttcgtgttcggcaacggccagttgttcggcgtgccggtgccgattctgatcaccatcgtctgcttcctgtttttcggctggttgctgaactacacgacctacgggcgcaacaccatggccatcggcggcaaccaggaagcggcgctgctggcgggggtgaatgtcgatcgcacgaagatcatcattttcgcggtgcatggggtgattggtgcactggcgggggtgattctggcgtcgcggatgacttcgggtcagccgatgattggccagggttttgagctgacggtgatttcggcctgcgtgctgggcggggtgtcgctgagtggcgggatcgggatgattcggcatgtgattgccggggtcttgattctggcgattatcgagaatgcgatgaacctgaagaatatcgacacgttttatcagtatgtgattcgtgggtcgattctgctgttggctgttgtcattgaccgtctgaaacagcgctga

SEQ ID NO: 38850 - protein, 322 aa, Pseudomonas fluorescens PfO-1
MTTQNETLPTERKPLDMRRFLDDWVMLLAAVGIFVACTLLIDNFLSPLNMRGLGLAISTTGIAACTMLYCLASGHFDLSVGSVIACAGVVAAVVMRDTNSVFLGVSAALVMGLIVGLINGIVIAKLRVNALITTLATMQIVRGLAYIFANGKAVGVSQESFFVFGNGQLFGVPVPILITIVCFLFFGWLLNYTTYGRNTMAIGGNQEAALLAGVNVDRTKIIIFAVHGVIGALAGVILASRMTSGQPMIGQGFELTVISACVLGGVSLSGGIGMIRHVIAGVLILAIIENAMNLKNIDTFYQYVIRGSILLLAVVIDRLKQR

SEQ ID NO: 38851 - DNA, 1026 bp, Burkholderia sp. 383
  CDS (1)..(1026): transl_table=11
atgggcaacatgaacccggtcgcggatgcgcagaccatgaccatcaagacgcggcacacgaagtggccgcccgagctgagcatcttcctggtgctcgtcggcatcagcctgttcttcgagatcgtcggctggatcgtcgtcggccagagcttcctgttcaacaccgagcggctcgagatcatcgtgctgcagatggccgtgatcggcatcatcgcggtcggcgtgaacctcgtgatcatcaccagcgggatcgacctgtcgtcgggctcggtcgtggccgccgcggcagtcgtgtcggcgagtctcgcgcaggtgtccgacttcccgcgcgcggtgtttccgcatctcaccgacctgccgatcatctggcccgtgctggccggcgtgtgcgtcgggctgctggtcggcctgctgaacggctcgctgatcgcgatgacgggcatcccgccgttcatcgcgacgctcggcacgatggtcgccgcgcgcggctttgcgaagtggttcaccaacgggatgccggtgtcgatgttgaccgaccagttcgcggccatcggcgcgggcgccaacccggtgatcatcttcctcgtgatcgccgcgatcttccacgtcgtgctgcgctacacgcgcttcggcaagtacacgtatgcgatcggtgcgaatcgtcacgcagctgtcgtgtcgggcatcaacgtcacgcgccacctgatcttcgtctacgcgatcgcgggcctcctgagcgggatcgccggcaccgtgacggccgcgcgtgcgatctcgggccagtcgggcatgggcgtgatgtacgagctcgatgcgatcgcggccgtcgtgatcggcggcacgtcgctgtcgggcggcctcggccgcgtgacgggcaccgtgatcggcgtgctgatcctcggcgtgatgacgtcgggcttcacgttcatccgcatcgacgcgtattaccaggagatggtcaagggcgcgatcatcgtcgcggccgtgatcgccgaccagtaccgcaacaagaagaagcgccgctga

SEQ ID NO: 38852 - protein, 341 aa, Burkholderia sp. 383
MGNMNPVADAQTMTIKTRHTKWPPELSIFLVLVGISLFFEIVGWIVVGQSFLFNTERLEIIVLQMAVIGIIAVGVNLVIITSGIDLSSGSVVAAAAVVSASLAQVSDFPRAVFPHLTDLPIIWPVLAGVCVGLLVGLLNGSLIAMTGIPPFIATLGTMVAARGFAKWFTNGMPVSMLTDQFAAIGAGANPVIIFLVIAAIFHVVLRYTRFGKYTYAIGANRHAAVVSGINVTRHLIFVYAIAGLLSGIAGTVTAARAISGQSGMGVMYELDAIAAVVIGGTSLSGGLGRVTGTVIGVLILGVMTSGFTFIRIDAYYQEMVKGAIIVAAVIADQYRNKKKRR

SEQ ID NO: 38853 - DNA, 996 bp, Moorella thermoacetica ATCC 39073
  CDS (1)..(996): transl_table=11
atgaatggagcgaccaatatttcgaatagcgctaagttgaagtatagccatctgaatagcattgttaaggaatatagtttcatctttgtattccttgctttatgtatactactctctatactggttccgactttcctcttgccccaaaatttgttaaatgtattgattcagatctctatcaacgccctgttagctataggtatgacctttgtcattatttccggtggcattgacctttcagtgggttcagtagcagcactggcaggtattgtcgttacggctttgcttaaacagtacccgtccagtacgccgatgatgtatgtaataattatttttagtgtcctggctgtgggtatagtctgtggcggtatctccggcctggcaattgcgaaacttaatgtcgaaccctttatagccaccctcgctatgttgagcatcgccagggggtttgccttcgtttacacccagagcaaaccaattttcggcttgcccccggcctttagttggattggtcaggggtatattggccctatcccggttatcgtgttgattatgattttttgcctggttatcgcccacattgtcttatcaaaaacctgttttggacgttatatttacgccatcgggagcaacgaagaagtggctaaattatgcggtattaacgttgcccgggtgaagcttattatttatgtaatcagcggcgtcctttctgctctggggggagtcgctctggcgtcccgtttagcaacagggcaaccggctgccgccagcggttacgagctcaatgcgatcgcagcggttgtgctggggggtaccagcctttccggaggtaagggcagtattggtaaaaccattatcggcattatgaccattggcgttattaacaacggtttaagcctgttgcaaatctcctcttactggcagtccattaccatgggtttaatcattatgattgccgtaatactggataaaatcaacacccgtaagaaagcctga

SEQ ID NO: 38854 - protein, 331 aa, Moorella thermoacetica ATCC 39073
MNGATNISNSAKLKYSHLNSIVKEYSFIFVFLALCILLSILVPTFLLPQNLLNVLIQISINALLAIGMTFVIISGGIDLSVGSVAALAGIVVTALLKQYPSSTPMMYVIIIFSVLAVGIVCGGISGLAIAKLNVEPFIATLAMLSIARGFAFVYTQSKPIFGLPPAFSWIGQGYIGPIPVIVLIMIFCLVIAHIVLSKTCFGRYIYAIGSNEEVAKLCGINVARVKLIIYVISGVLSALGGVALASRLATGQPAAASGYELNAIAAVVLGGTSLSGGKGSIGKTIIGIMTIGVINNGLSLLQISSYWQSITMGLIIMIAVILDKINTRKKA

SEQ ID NO: 38855 - DNA, 1020 bp, Burkholderia thailandensis E264
  CDS (1)..(1020): transl_table=11
atgagtcaagccatgcaaccccaaggcacttcttcttctcccgatacccgggctagcgtcgcgccgccgcgcgcggccgcgcgggatctcctcaaccgctccggcatcgtcgtcgcgttcgtcgtgctgttcgcggcgctcgcgatcgccgtgccggacttcctgacggcccgcaacatccagggcctgttgctgtcggtcacgctgatcggctcgatcgcggtgacgatgatgttcgtgctcgcgctgggcgaggtcgacctgtcggtcgcgtcgatcgtcgcgttctcgggcgtcgtcgcatcgacgctcatcacggcgacgcacagcatcgcgctcggcgtcgcggcgggcgtgctcgcgggcggcgcggtcggcctcgtcaacggcgtgctgatcgcgcgctggcggatcaactcgctgatcgtcacgctcgcgatgatggaggtcgtgcgcgggctcgcgttcatcacgtcgaacggcgacgcggtgatgatctccgaggagcgcttcttcgcgctcggctcgggatcgttcctcggcatctcgtatccgatctggagcaacatcgtcggcttcgtcgcgttcggcttcctgctgcgcaagacggtgttcggcaagaacgtgctcgccgtcggcggcaacggcgaggcggcgctgctcgccggcctgcccgtcacgcggatcaagatcaccgtgttcgtgctgcaggggctcgtgacgggcttcgccggcgtgatgctcgcgtcgcggatgagcctcggcgacccgaagacgtcggtcggcctcgagctcggcgtgatttccgcgtgcgtgctgggcggcgtgtcgctcacgggcggcgtcgcgacgatttcgggcgtgctcgtcggcgtgctgatcatgggctcggtgcaggacgcgatgagccttctcaacgtgccgacgttttaccaatatctgatacgcggcggcattctgttgctcgcggtgctgttcgaccagtatcgtcgcaatcggcggcgcgcgatgcggggctga

SEQ ID NO: 38856 - protein, 339 aa, Burkholderia thailandensis E264
MSQAMQPQGTSSSPDTRASVAPPRAAARDLLNRSGIVVAFVVLFAALAIAVPDFLTARNIQGLLLSVTLIGSIAVTMMFVLALGEVDLSVASIVAFSGVVASTLITATHSIALGVAAGVLAGGAVGLVNGVLIARWRINSLIVTLAMMEVVRGLAFITSNGDAVMISEERFFALGSGSFLGISYPIWSNIVGFVAFGFLLRKTVFGKNVLAVGGNGEAALLAGLPVTRIKITVFVLQGLVTGFAGVMLASRMSLGDPKTSVGLELGVISACVLGGVSLTGGVATISGVLVGVLIMGSVQDAMSLLNVPTFYQYLIRGGILLLAVLFDQYRRNRRRAMRG

SEQ ID NO: 38857 - DNA, 1017 bp, Burkholderia xenovorans LB400
  CDS (1)..(1017): transl_table=11
atgcaagccagagaaaacctcgcgcaacaggccgccaagggcgcagccgaagcgctgattccgcagaccaacgacaaggcgaaatggtggcagcagatcaccgagtacagcctgatcgtgatctttgtggtgatgttcgccaccatgtcgctgaccgtcgatcacttcttctcgatcgagaacatgctcggcctcgcgctgtcgatctcgcagatcggcatggtggcgtgcacgatgatgttctgcctcgcctcgcgcgatttcgacctttcggtgggttcgacggtcgcgttcgccggcgtgctgtgcgcgatggtgctcaacgccaccggcaacacgtttatcgcgatcgtcgcggcggtggcggcgggcgccgtgatcggtttcgtcaacggcgcggtgatcgcgtatctgcgcatcaacgcgctgatcacgacgctcgccacgatggaaatcgtccgtggtctcggctttatcgtctcgcacggtcaggcggtcggcgtgtcgtcggatacgtttatcgcgctgggcggcttgagcttcttcggcgtgtcgctgccgatctgggtcacgctgctgtgcttcatcgtgttcggcgtgatgctcaaccagaccgtgtatggccgcaatacgctcgcgatcggcggcaatccggaagcgtcgcgtctggccggtatcaatgtggagcgcacgcgcgtctacatcttcctgattcagggcgcggtgactgcactggccggtgtgattctggcctcgcgcatcacatcgggtcagccgaatgccgcggaaggcttcgagctgaacgtgatctcggcgtgcgtgctgggcggcgtctcgctgctcggcggacgtgcgacgatttccggcgtggtgatcggcgtgctgatcatgggcacggtcgaaaacgtgatgaacctgatgaacatcgacgcgttctatcagtatctggtgcgtggcgcgatcctgctcgccgccgtgctgctcgaccagttgaagaatcgcggatcacgagattaa

SEQ ID NO: 38858 - protein, 338 aa, Burkholderia xenovorans LB400
MQARENLAQQAAKGAAEALIPQTNDKAKWWQQITEYSLIVIFVVMFATMSLTVDHFFSIENMLGLALSISQIGMVACTMMFCLASRDFDLSVGSTVAFAGVLCAMVLNATGNTFIAIVAAVAAGAVIGFVNGAVIAYLRINALITTLATMEIVRGLGFIVSHGQAVGVSSDTFIALGGLSFFGVSLPIWVTLLCFIVFGVMLNQTVYGRNTLAIGGNPEASRLAGINVERTRVYIFLIQGAVTALAGVILASRITSGQPNAAEGFELNVISACVLGGVSLLGGRATISGVVIGVLIMGTVENVMNLMNIDAFYQYLVRGAILLAAVLLDQLKNRGSRD

SEQ ID NO: 38859 - DNA, 996 bp, Silicibacter sp. TM1040
  CDS (1)..(996): transl_table=11
atggagcaatctgtgaacatcgcactggccgaaacatcgaggggaaaatcgcttttggggcggctcttgcggatgcgcgaaacgggcctcattctgattatcctggcgcttttcatcggcatgtcctttgcctcgccctattttctgacatgggtcaatattcgcgccatgaccatggcctttgccgtcgaaggcatcgtggttgtgggcatgacggttttgctgatttctggcggcatcgacctttcggtggggtcggtcacggctctgtcgggggtgatcgcgggctggctgttcctgcaggggattgacccctgggtggccgcagcgattgcgatttttgcctgtaccgccatcgggtcgttcatggggttctttaccacgcggatcgggctgcaccattttatcgtgtcgcttgccgtcatggtgattgcacgcgggatctgtcttttggcgacgggcgggcggcccatcgggctctatacgctgccgccagagttcaaattcatcgggcagggcaccattggtcccattccggttgtgatcatcctctttgttgtggtggtgatcgccgcggatttcatgctgcgccgcaccaccatgttccgcaaggtgttctacaccggctccaacgagaaggccgccgcctattccggcatccgcaccaagaaggtggtgtttttgaccacgacgctttgctctgcgctttgtgggttcgccgggatcatctacatggcgcgcttcgggtctgcgcagccgacctttggactcgggatggaactgaacgtcatcgccgctgcggtgatcggcggtgcgagcctcaacggcggctcgggatccatctttggcgcgatccttgggacggtgctgttgtcggtggtgtcgtcttcgctcgcgctcttggatgtgtcggtctactggcaggacatcatccgggggtcgatccttctggcggcggtgacaatcgaccacttcctcaacaagaagcggggctga

SEQ ID NO: 38860 - protein, 331 aa, Silicibacter sp. TM1040
MEQSVNIALAETSRGKSLLGRLLRMRETGLILIILALFIGMSFASPYFLTWVNIRAMTMAFAVEGIVVVGMTVLLISGGIDLSVGSVTALSGVIAGWLFLQGIDPWVAAAIAIFACTAIGSFMGFFTTRIGLHHFIVSLAVMVIARGICLLATGGRPIGLYTLPPEFKFIGQGTIGPIPVVIILFVVVVIAADFMLRRTTMFRKVFYTGSNEKAAAYSGIRTKKVVFLTTTLCSALCGFAGIIYMARFGSAQPTFGLGMELNVIAAAVIGGASLNGGSGSIFGAILGTVLLSVVSSSLALLDVSVYWQDIIRGSILLAAVTIDHFLNKKRG

SEQ ID NO: 38861 - DNA, 960 bp, Rubrobacter xylanophilus DSM 9941
  CDS (1)..(960): transl_table=11
ttggctagcctggcgcggcgggtgcggcctcgggagctgctctcccgcggcgggccgctcggcgggctcgtgctgctgtgcgccgtcatggcggtcctctcgcccagcttcctcaccgtaaccaacttcttcaacgtcggcacccagatagccgttatcctgatcctcgccctcgggcagaccttcgtgatcgtctccgggggcatagacctctcggtggggagcgtgctggcgctcgccggggtggtcttcgggtgggcgaccgcggtggccgggctgcccctcgcgccggcgcttctgctggggctcggggccggggccgccgccgggctcgtcaacgggctgctcataacgctcggcaacctgccgccgttcatcgcgacgctcgccatgctcagcgccgcccgggggttggcgctcgtgatctccggcggggtcccgctcagccccatcccggagcccgtccggcatctgggcagcggggacctcttcggggcggtgccgctgccggtggtgctcatgatcgccatgtggctcctgacggcggccatactccgctacacttacccggggcggtgcatgtacgccatcgggggcaacgaggaggccgcccggctctccgggataggggtggggaggcagaagctcctcatctacaccctctccggcctcttcgcgggggtggcgggcatcctgcagaccgcccgtctcgcctcggcccagccgcaggccgggttcaccttcgagctggacgccatagccgcggtggtcatcggcggggcgagcctcaccggcggggtcggcacggcctcggggacgctcatcggggcgctcatcctgggcgtgctgcgcaacgggctgaatctgctgaacgtctcggcgttctggcagcaggtggtcataggcgcggtcatcgcgctggccgtgatgacggataccttgagaaggcggaggaagtag

SEQ ID NO: 38862 - protein, 319 aa, Rubrobacter xylanophilus DSM 9941
MASLARRVRPRELLSRGGPLGGLVLLCAVMAVLSPSFLTVTNFFNVGTQIAVILILALGQTFVIVSGGIDLSVGSVLALAGVVFGWATAVAGLPLAPALLLGLGAGAAAGLVNGLLITLGNLPPFIATLAMLSAARGLALVISGGVPLSPIPEPVRHLGSGDLFGAVPLPVVLMIAMWLLTAAILRYTYPGRCMYAIGGNEEAARLSGIGVGRQKLLIYTLSGLFAGVAGILQTARLASAQPQAGFTFELDAIAAVVIGGASLTGGVGTASGTLIGALILGVLRNGLNLLNVSAFWQQVVIGAVIALAVMTDTLRRRRK

SEQ ID NO: 38863 - DNA, 1233 bp, Mesorhizobium sp. BNC1
  CDS (1)..(1233): transl_table=11
atgtctgagctgtccgcccatcaaagaaaaacggcagagggtctcggcgaggccaaggccgaagcggcgatgtcctcgatcggcagccacctgcagacccatgtgcgcgaatacggcatgctgatcgcgctcgtggtcatcatgggcttcttccaggtgatgacggacggcacgctgatgcggccggtcaacctcaccaatctggtccttcagaacagctacatcgtcatcatggcgctcggcatgctgctcgtcatcgtggctggccatatcgatctttcggtggggtcggtggcgggcttcgtgggagccgtcgcggcagtgatgctggtgcagtacgatatctcgccgctcggggtcattccggcctgcctgctgctcggctttgttatcggagcggcccagggctactggatcgcctattggcgcataccctccttcatcgtgacgctggcgggaatgctggttttccgcggcctcactttgtgggtgcttgctggccaatcggtcgggccgttcccgcgctccttccagttgctctcgaccggattcatcccggatctcttcggcgtcggccggcccaatgtgacggcgatcctgctcggcgcgataacggcggcggcgcttgtcttcatggccatgcgcaaccgccagcgccataccaaatacggcatggaagatgagcctttcgccttcttcctcgccaagaacgggctgatcgcggccgccatcgtattcctttcctatctgctctccacctatcgcggctttccgaacgttctcatcacaatggcggtgctgacggtgatctacaccttcctcaccaactcgaccacggttggccgccgcatctatgcgctgggaggaaacgagaaggcggcgaagctttccggcatccggacggagcggctgaccttcctcaccttcgccaatatgggcatgctggcggcccttgcgggcctcatcttcgccgcgcgcctcaatacggcgacgccgaaggcgggcgtgggcttcgagctcgatgtgatcgccgccgtcttcatcggcggggcgtcgatgtcgggcggcgtcggcaagatcaccggagccgtggtcggcgccttcatcatgggggtgatgaacaacggcatgtcgatcctcggcatcggcatcgattaccagcaggtcatcaagggcctcgtgctgctcgctgcggtgattttcgacgtctacaacaagaacaaggcggcttga

SEQ ID NO: 38864 - protein, 410 aa, Mesorhizobium sp. BNC1
MSELSAHQRKTAEGLGEAKAEAAMSSIGSHLQTHVREYGMLIALVVIMGFFQVMTDGTLMRPVNLTNLVLQNSYIVIMALGMLLVIVAGHIDLSVGSVAGFVGAVAAVMLVQYDISPLGVIPACLLLGFVIGAAQGYWIAYWRIPSFIVTLAGMLVFRGLTLWVLAGQSVGPFPRSFQLLSTGFIPDLFGVGRPNVTAILLGAITAAALVFMAMRNRQRHTKYGMEDEPFAFFLAKNGLIAAAIVFLSYLLSTYRGFPNVLITMAVLTVIYTFLTNSTTVGRRIYALGGNEKAAKLSGIRTERLTFLTFANMGMLAALAGLIFAARLNTATPKAGVGFELDVIAAVFIGGASMSGGVGKITGAVVGAFIMGVMNNGMSILGIGIDYQQVIKGLVLLAAVIFDVYNKNKAA

SEQ ID NO: 38865 - DNA, 1206 bp, Rhizobium leguminosarum bv. viciae 3841
  CDS (1)..(1206): transl_table=11
atgactccggtcaacccgacaaccgagcatagcaacgtcgtttccgttgccgattatatccgcggcaatattcgtgaatacggcatgctcatcgcactcgtcgcgatcatggtattcttccagttctataccggcggcattctcttcaagccggtcaacctgacgaaccttgttctgcagaattccttcatcgtcatcatggcgctcggcatgctgctcgtcatcgtcgccggccatatcgacctgtccgtgggctcgatcgtcgccttcgtcggcgcgctcgcggcgatcttcaccgtgtcatggggcatgaacttctggcttgccggcctgatctgcctgatcgtgggcggcatcatcggcgcggcgcagggctatttcatcgcctatcaccgtatcccgtcattcatcgtgacgcttgccggcatgcttgttttccgcggtctgacgctgacggttctgaacggcaagaatatcggtccgttcccgaaggagttccaggttatcagcaccggcttcctgccgggcgacatgatcgacattgccggcacacccgtgcagtcgacctcgctgatcctgaccgtgatcctgcctgtcatcctcttctacctcgcctggcgccgccgcaaggtgaacgaagaccacggcatcgatgtcgagccgatgggcttcttcatcgtccagaacctggtcgtttcgctcgccatcctgtggatcggctatctgctctccacctataagggcctgccgaacgttctcgtcgtcatgctggtgctgattgcgatctacgccttcatcacccgccggaccacgatcggccgtcgcatctatgccatgggcggcaattcgaaggcgaccaagctttcaggcatcaataccgagcggctgagcttctacaccttcgtcaatatgggcgtgcttgcgggcctcgccggcatgatcatcgcgctgcgtctgaactcggcaacgccgaaggccggcgtcggttttgaactcgacgtcattgcggcctgcttcatcggcggcgcctcggcgtccggcggtgtcggcaagatcaccggtgcggtcatcggcgcgttcatcatgggcgtcatgaataacggtatgtcgatcgtcgggctcggcatcgacttccagcagatggtgaagggcctcgtgcttctcgccgcagtgttcttcgacgtttacaacaagaacaagggctga

SEQ ID NO: 38866 - protein, 401 aa, Rhizobium leguminosarum bv. viciae 3841
MTPVNPTTEHSNVVSVADYIRGNIREYGMLIALVAIMVFFQFYTGGILFKPVNLTNLVLQNSFIVIMALGMLLVIVAGHIDLSVGSIVAFVGALAAIFTVSWGMNFWLAGLICLIVGGIIGAAQGYFIAYHRIPSFIVTLAGMLVFRGLTLTVLNGKNIGPFPKEFQVISTGFLPGDMIDIAGTPVQSTSLILTVILPVILFYLAWRRRKVNEDHGIDVEPMGFFIVQNLVVSLAILWIGYLLSTYKGLPNVLVVMLVLIAIYAFITRRTTIGRRIYAMGGNSKATKLSGINTERLSFYTFVNMGVLAGLAGMIIALRLNSATPKAGVGFELDVIAACFIGGASASGGVGKITGAVIGAFIMGVMNNGMSIVGLGIDFQQMVKGLVLLAAVFFDVYNKNKG

SEQ ID NO: 38867 - DNA, 951 bp, Rhizobium leguminosarum bv. viciae 3841
  CDS (1)..(951): transl_table=11
atgaattcgttgaaaaaaatccttctcggcgaacaagggctggtggtgatctttgctgccgccttcgtgatcgtctcgctcttcgttccgaacttcctgaccgagcgaaacatgctggggctgctgcaatcggtcgtcacgatcggcatcgttgcctgcacgatgatgttctgcctggcgtcgcgcgatttcgacctttcggttggatcgatcgtcgccttctccggcatgatcgcggtgatggtctcgaatgcgacgggctccattcccgtcgggctgctcgccgccctgctttgcggcgccgtcgtcggtttcgtcaatggtatcgtcattgcgcggtttcgcatcaatgcgctgatcaccacgcttgcgaccatgcagatcgtgcgcgggctggcgctgatcgcttccgatggccgcgccgtcggcatcaacgatcccgccttctaccagcttgccctgtcgcgatttctcaccgtgccgacgccgatctggatcatgctgatccttttcatcctcttcggtttcgtgctcaaccgcaccgtcttcggcaagaacaccctggcgatcggcggcaatcccgaggcctcgcggcttgccggtgtcaatgtcgtcaacatgcgagtctggatctttgcgctgcaggggcttgtctgcggcatagccggaattctgcttgcctcccgcatcacctccggccagccgaatgcggcgacagggcttgagctttcggtgatttcggcctgcgttcttggcggcgtttcgctggccggcggccgggcggcgatgagcggcgtcattgtcggtgtgctgattatgggcatcgccgaaaacgtcatgaacctcttgaatatccaggcgttctatcagtatgtggtacgcgggctgatcctgctgatcgcagtgttgctcgacaatttgaggtcttcggctgcgggacggcgcggatga

SEQ ID NO: 38868 - protein, 316 aa, Rhizobium leguminosarum bv. viciae 3841
MNSLKKILLGEQGLVVIFAAAFVIVSLFVPNFLTERNMLGLLQSVVTIGIVACTMMFCLASRDFDLSVGSIVAFSGMIAVMVSNATGSIPVGLLAALLCGAVVGFVNGIVIARFRINALITTLATMQIVRGLALIASDGRAVGINDPAFYQLALSRFLTVPTPIWIMLILFILFGFVLNRTVFGKNTLAIGGNPEASRLAGVNVVNMRVWIFALQGLVCGIAGILLASRITSGQPNAATGLELSVISACVLGGVSLAGGRAAMSGVIVGVLIMGIAENVMNLLNIQAFYQYVVRGLILLIAVLLDNLRSSAAGRRG

SEQ ID NO: 38869 - DNA, 1026 bp, Rhizobium leguminosarum bv. viciae 3841
  CDS (1)..(1026): transl_table=11
atgactaccaaggcagcagagggcgcggctccgctcgcaacccggcaaaggcggcggcgcataccgacggagctcagcattttcctcgtgctcgtcggcatcgcgctcatctacgaagtgcttggctggatgttcatcggccaaagcttcctcatgaattcgcagcgtctgacgatcatgatcctgcaggtctccgttatcggcatcatcgccgtcggcgttacgcaggtcatcatcaccggcggcatcgatctttcgtcggggtcggtcgtcggcatgacggcgatgatcgcaacgagctttgcccagtcctcgacctggggacgggccgtctttccctcgctgaccgacctgccggctttcgtgccgatcgtcgttggtctgctgatcggggcggctgccggtctcgcgaacggcgcgctcatcgcctacacgaagatcccgccgttcattgccacgcttggtatgttcgtttcggccagaggcgtggcgaagtggtatacgaagggacagccggtttccgggatcaccgagcagtttcatttcataggaacgaaagcctggccggttgtcgtcttcctggtcgtcgcactgatctttcacattgcgctgcgctatacgcgttatggaaagttcacctatgccatcggcgcgaatccgcaggccgcgcgtgtttccggcatcaacatcgaggcgcatctcgtcaaggtctatgtgattgccggactgctcgccggtcttgccggtatcgtcacggcggcccgtgctgaaaccgcacaggccagcatgggtgtcggatatgaactcgacgcgatcgccgcgaccgtcatcggcggcacctcgctcaccggcggtgtcgggcgcatcaccggcaccgtcatcggcaccatcatcctcggcgtcatgacctccggcttcacgttcctcaggatcgacgcctattaccaggagatcgtcaagggcctcatcatcgtcgcggctgtcgtcatcgacgtctacagacagaagaaacgccgcaagcactga

SEQ ID NO: 38870 - protein, 341 aa, Rhizobium leguminosarum bv. viciae 3841
MTTKAAEGAAPLATRQRRRRIPTELSIFLVLVGIALIYEVLGWMFIGQSFLMNSQRLTIMILQVSVIGIIAVGVTQVIITGGIDLSSGSVVGMTAMIATSFAQSSTWGRAVFPSLTDLPAFVPIVVGLLIGAAAGLANGALIAYTKIPPFIATLGMFVSARGVAKWYTKGQPVSGITEQFHFIGTKAWPVVVFLVVALIFHIALRYTRYGKFTYAIGANPQAARVSGINIEAHLVKVYVIAGLLAGLAGIVTAARAETAQASMGVGYELDAIAATVIGGTSLTGGVGRITGTVIGTIILGVMTSGFTFLRIDAYYQEIVKGLIIVAAVVIDVYRQKKRRKH

SEQ ID NO: 38871 - DNA, 957 bp, Haemophilus somnus 2336
  CDS (1)..(957): transl_table=11
atgtcaaatgctacgcttaaaaaaatattgaacgcctatggaatggtgtttattttaattgccttatttttagcattatctgcatcaattgatggtttcttttccgctcgtactgtttggagtattattgagcaagtttctatgtttgggatcattgcaattggagtaacctttgctattatcacaacggggattgatttgtcctctggttcaatggtagcgatgacttctgttgtggctgcttctatcgtaactggtggcgatacagtaagttcggcattacttgcttttgcgatttcaattgtattaggtgctgcaatgggggctatcaatggtagtttaaccgcttttggctctatccctccgtttattgctactttaggtatgatgattattgcccgtggtggtgctcaactttattcttcaggtcgtccaattgatgcctcttctgaagcatttacttggatttctgatgttgatttctttggattacccggtttagtacttgtttatatcgtaattgtcattgcttcacacattttactgagccgttcaacatttggccgtcacgtttatgcagttggtggtaatttaaacgcagcaaaaatttgtggtattaatacaactaaaacattgatttgggtttatgttttcgccggtgctttgtctggattagtgggggcattactagcagctcgtacttatgcaggtaacccctcttatggtttatcttgggagcttgatgcaattgccgcagcagtgatcggtggggtatcgctaagtggtggtattggtacaatccctatgtgcgttatcggtgctttaattattgggacaacaaacaaaggattaaatatgctgggagttgatccatattggcaacaaattattaaaggtttgattattgttgttgcggtattaatcgatacattaaaacgccgtagaaaagcaaattaa

SEQ ID NO: 38872 - protein, 318 aa, Haemophilus somnus 2336
MSNATLKKILNAYGMVFILIALFLALSASIDGFFSARTVWSIIEQVSMFGIIAIGVTFAIITTGIDLSSGSMVAMTSVVAASIVTGGDTVSSALLAFAISIVLGAAMGAINGSLTAFGSIPPFIATLGMMIIARGGAQLYSSGRPIDASSEAFTWISDVDFFGLPGLVLVYIVIVIASHILLSRSTFGRHVYAVGGNLNAAKICGINTTKTLIWVYVFAGALSGLVGALLAARTYAGNPSYGLSWELDAIAAAVIGGVSLSGGIGTIPMCVIGALIIGTTNKGLNMLGVDPYWQQIIKGLIIVVAVLIDTLKRRRKAN

SEQ ID NO: 38873 - DNA, 960 bp, Actinobacillus pleuropneumoniae serovar 1 str. 4074
  CDS (1)..(960): transl_table=11
atgaacaaagcatttaatctaaaaaaattcctgatagaacaacgttctattattgcattactcgcattaattgcagtggtgtcatttttaaatccgaatttttttagtgtcgataacttactgaatatcctacgccaaacgtcagtgaatgcgattattgcgatcggtatgacgtttgtgattttaattgccgggattgacctttcggtcggttcggtcttagcactaaccggagcggtagcggcaactttaatcggtttagatctctcgatttatttagtggtgccggcggtattgttattcggtgcggcaatcggcttgttaaacggtgcgttagtcgccttcggtaaagtacaggcgtttatggcaacgttaatcacgatgttgttattgcgtggcgtgacgatgatttatatggaaggtcgcccgatttctaccggtttttccgacaatgccgattactttgccgagattggtaccggcgaattattcggtgtgccggtgccggtttggttaatgtttatcttatttgctatcggttggtttattctgactcaaactcgtatcggtcgttatatttatgcgcttggcggtaacgaatcggcaaccgcactttctggtatcaacgtgaataaaattaaactgtttgtgtttgcggtcagtggtgtgttagcagcacttgcaggtttaattgtcacctctcgtttaggttcggcacaaccgaccgccggtagcggttatgaactcgatgcgattgctgcggttgtggtcggtggaaccagtttaatgggcggtaaaggtcgtattatcggcacactaattggtgcgttaattatcggcttcctcagcaatgcgttaaatttattagatattgactcttactatcagcttgtcgcaaaagcgttagtaattttagcagcggttattttggataacttccttggccgtaaaaaagcgtaa

SEQ ID NO: 38874 - protein, 319 aa, Actinobacillus pleuropneumoniae serovar 1 str. 4074
MNKAFNLKKFLIEQRSIIALLALIAVVSFLNPNFFSVDNLLNILRQTSVNAIIAIGMTFVILIAGIDLSVGSVLALTGAVAATLIGLDLSIYLVVPAVLLFGAAIGLLNGALVAFGKVQAFMATLITMLLLRGVTMIYMEGRPISTGFSDNADYFAEIGTGELFGVPVPVWLMFILFAIGWFILTQTRIGRYIYALGGNESATALSGINVNKIKLFVFAVSGVLAALAGLIVTSRLGSAQPTAGSGYELDAIAAVVVGGTSLMGGKGRIIGTLIGALIIGFLSNALNLLDIDSYYQLVAKALVILAAVILDNFLGRKKA

SEQ ID NO: 38875 - DNA, 936 bp, Bacillus anthracis str. A2012
  CDS (1)..(936): transl_table=11
  misc_feature (646)..(646): y is t or c
atggctaagaaggggaatgtattacaacaacttgggtctttaattggactagcgctaattattgtagtaattacggctttaaatccagcgtttattgaaattccaaatttatttaatatactgcgtcaagtatcgattaatgcgcttattgcattcggaatgacctttgtaattttaacagggggtattgacttatcggtaggttctattttagcattatcaagtgcacttgttgctggaatgatggcaagtggcatggacccgttccttgcgatggcagttggattattagctggtcttgtaatgggaattgtaaacggtatcatcatagcgaagggaaaagtagctccgtttattgcgactttagcaacaatgactatttttcgcgggttgacgcttgtttatatggacggacgtccgatcactggtcttggtgatcatttaatgttccaaatgtttggccgcggttattttctcggtattccagtaccagctgttacaatgatgatcgctttcgcagtactgtacttcattttgaagaaaacgacatttggtcgccgtacatttgcaattggtggaaatgaagaagcagcagcattatcaggtattaatgttacgaaaattaaagtaatgatttacggtcttyccggaattttggcagcgtttgcaggtattgtcttaacatcacgactagattctgcacagccgactgcaggtacttcttacgaattagatgcaattgcagcagttgtattaggtggaacaagtctttctgggggaagaggatggattgttggtacattcatcggtgtacttattatcggtgtactaaataacggtttaaatttattaggtgtatcttctttcttccaacaagttgtaaaaggacttgtaatcttactagctgtattaattgatcgtcgaaaagaagcgtaa

SEQ ID NO: 38876 - protein, 311 aa, Bacillus anthracis str. A2012
  misc_feature (216)..(216): The Xaa at location 216 stands for Pro, or Ser.
MAKKGNVLQQLGSLIGLALIIVVITALNPAFIEIPNLFNILRQVSINALIAFGMTFVILTGGIDLSVGSILALSSALVAGMMASGMDPFLAMAVGLLAGLVMGIVNGIIIAKGKVAPFIATLATMTIFRGLTLVYMDGRPITGLGDHLMFQMFGRGYFLGIPVPAVTMMIAFAVLYFILKKTTFGRRTFAIGGNEEAAALSGINVTKIKVMIYGLXGILAAFAGIVLTSRLDSAQPTAGTSYELDAIAAVVLGGTSLSGGRGWIVGTFIGVLIIGVLNNGLNLLGVSSFFQQVVKGLVILLAVLIDRRKEA

SEQ ID NO: 38877 - DNA, 969 bp, Exiguobacterium sibiricum 255-15
  CDS (1)..(969): transl_table=11
atggaattgatgcaagggaaactgacagaaaagaaaccgagacgacttgggattggtcaaaagctgggtccgctcgccggactgttcgccatcattctcgtcgtttcaatcatggaaccggactttttaacgcttaataacttatttaacatcttacgccaagtttcgatcaacgccttgattgccttcggaatgacgttcgtcatcctgacgggtggcattgatttgtcggtcggctcgattctcgccttgtcatccgcgttcgtcgccggtctgatgaccgacggaacgtcagcgattcttgctgtcctcgccggcttgatcgtcggggcaatcatgggcgcgttaaacggaatggtcatctcactcgggaaagtcgcaccgttcatcgcgaccctcgcgacgatgacaatcttccgtggtctgacactcgtctacacggacgggaagccaatcacgggactcagccagggcggctggttcgaactgttcggacgcggctacttctggatcttcccggtcccggtcgtcacgatgttgatcgcctttgcagttctttacttcatcctgaagaaaacgacgttcgggcgttacacatatgcgatcggcggtaacgaagaagcagcaaaactgatggggattcaagtcaacaaagtgaagattatgatttacgcgctgtccggtttaatggcagcactcgccggaatcatcctgacgtcgcgtctgaactcggcgcaaccgacggccggaacatcgtatgagcttgatgccatcgcagccgtcgtcctcggcggaacgagcttatccggtggacgcggttggattgtcgggacattaatcggcgccttgatcatcggaacactgaacaacggactcaacctgcttggtgtgtcgtcgttcttccagcttgtcgtcaaagggctcgtcatcctgttcgccgtactcgcggaccggaaacaaactacgtga

SEQ ID NO: 38878 - protein, 322 aa, Exiguobacterium sibiricum 255-15
MELMQGKLTEKKPRRLGIGQKLGPLAGLFAIILVVSIMEPDFLTLNNLFNILRQVSINALIAFGMTFVILTGGIDLSVGSILALSSAFVAGLMTDGTSAILAVLAGLIVGAIMGALNGMVISLGKVAPFIATLATMTIFRGLTLVYTDGKPITGLSQGGWFELFGRGYFWIFPVPVVTMLIAFAVLYFILKKTTFGRYTYAIGGNEEAAKLMGIQVNKVKIMIYALSGLMAALAGIILTSRLNSAQPTAGTSYELDAIAAVVLGGTSLSGGRGWIVGTLIGALIIGTLNNGLNLLGVSSFFQLVVKGLVILFAVLADRKQTT

SEQ ID NO: 38879 - DNA, 999 bp, Escherichia coli B
  CDS (1)..(999): transl_table=11
atgtctgcttcgtcattatcattgccgcagggcaagagcgtctcgctcaaacaatttgtcagtcgccatattaatgagatcggtttgctggtggtaatcgccattctttatctggtcttctccctgaacgcgcctggctttatctcattgaataaccagatgaacgtgctgcgcgatgccgccaccattgggattgccgcctgggcgatgacgctgattattatctccggtgaaattgatgtcagcgttgggccgatggtggcttttgtctcggtgtgcctggcatttttgctgcaatttgaagttccgttggcgattgcttgtctgctggtgttgctgttaggcgcgctgatgggaacgctcgccggggtgctgcgcggcgtgtttaacgtaccaagtttcgttgccacactggggctgtggagcgccctgcgcggaatggggctgtttatgaccaacgcactgccagtgccgattgacgaaaacgaggtgctggactggctgggcggacaatttctcggtgtgccagtatccgcgctgatcatgatggtgttgtttgcgctgtttgtgttcattagccgaaaaaccgccttcgggcgctcggtttttgccgttggcggtaatgccacggcggcgcagttgtgcggcatcaacgttcgtcgggtacgcattcttatctttaccctttcgggattattagcggcggtgaccggcattttgttggcggcgcgcctcggttccggtaacgcaggtgccgcaaacggtctggagtttgacgtcatcgccgcggtcgtggtcggcggtacggcactttccggcggtcgcggttccctgttcggtacattgcttggtgtgctggtgattacgctaatcggtaacggtctggtgctgctcggtattaactcctttttccagcaggtggtacgcggcgtcatcatcgtggtggcggtgctggcgaatatcttgctgacccagcgaagcagtaaagcgaaacgctaa

SEQ ID NO: 38880 - protein, 332 aa, Escherichia coli B
MSASSLSLPQGKSVSLKQFVSRHINEIGLLVVIAILYLVFSLNAPGFISLNNQMNVLRDAATIGIAAWAMTLIIISGEIDVSVGPMVAFVSVCLAFLLQFEVPLAIACLLVLLLGALMGTLAGVLRGVFNVPSFVATLGLWSALRGMGLFMTNALPVPIDENEVLDWLGGQFLGVPVSALIMMVLFALFVFISRKTAFGRSVFAVGGNATAAQLCGINVRRVRILIFTLSGLLAAVTGILLAARLGSGNAGAANGLEFDVIAAVVVGGTALSGGRGSLFGTLLGVLVITLIGNGLVLLGINSFFQQVVRGVIIVVAVLANILLTQRSSKAKR

SEQ ID NO: 38881 - DNA, 987 bp, Escherichia coli B
  CDS (1)..(987): transl_table=11
atgtcttctgtttctacatcggggtctggcgcacctaagtcgtcattcagcttcgggcgtatctgggatcagtacggcatgctggtggtgtttgcggtgctctttatcgcctgtgccatttttgtcccaaattttgccaccttcattaatatgaaagggttgggcctggcaatttccatgtcggggatggtggcttgtggcatgttgttctgcctcgcttccggtgactttgacctttctgtcgcctccgtaattgcctgtgcgggtgtcaccacggcggtggttattaacctgactgaaagcctgtggattggcgtggcagcggggttgttgctgggcgttctctgtggcctggtcaatggctttgttatcgccaaactgaaaataaatgctctgatcacgacattggcaacgatgcagattgttcgaggtctggcgtacatcatttcagacggtaaagcggtcggtatcgaagatgaaagcttctttgcccttggttacgccaactggttcggtctgcctgcgccaatctggctcaccgtcgcgtgtctgattatctttggtttgctgctgaataaaaccacctttggtcgtaacaccctggcgattggcgggaacgaagaggccgcgcgtctggcgggtgtaccggttgttcgcaccaaaattattatctttgttctctcaggcctggtatcagcgatagccggaattattctggcttcacgtatgaccagtgggcagccaatgacgtcgattggttatgagctgattgttatctccgcctgcgttttaggtggcgtttctctgaaaggtggcatcggaaaaatctcatatgtggtggcgggtatcttaattttaggcaccgtggaaaacgccatgaacctgcttaatatttctcctttcgcgcagtacgtggttcgcggcttaatcctgctggcagcggtgatcttcgaccgttacaagcaaaaagcgaaacgcactgtctga

SEQ ID NO: 38882 - protein, 328 aa, Escherichia coli B
MSSVSTSGSGAPKSSFSFGRIWDQYGMLVVFAVLFIACAIFVPNFATFINMKGLGLAISMSGMVACGMLFCLASGDFDLSVASVIACAGVTTAVVINLTESLWIGVAAGLLLGVLCGLVNGFVIAKLKINALITTLATMQIVRGLAYIISDGKAVGIEDESFFALGYANWFGLPAPIWLTVACLIIFGLLLNKTTFGRNTLAIGGNEEAARLAGVPVVRTKIIIFVLSGLVSAIAGIILASRMTSGQPMTSIGYELIVISACVLGGVSLKGGIGKISYVVAGILILGTVENAMNLLNISPFAQYVVRGLILLAAVIFDRYKQKAKRTV

SEQ ID NO: 38883 - DNA, 942 bp, Rhizobium tropici
  CDS (1)..(942): transl_table=11
atgaataccatcgcaaacttcctgaagactccttaccgggcgggtgcgatccggctgtcgatcgggacgctattcgtgctggtggtcgcctcggtcatcctgcttccagaatttctggcgccggagaatctgtcgaacctgctggcccaatctactgttcttgtcatttctgcgctcggccagacctttgtgatcctgacgggcggcctggacgtttccgttggttcgatcatcagcgtgacgaccacgatcatgacactcgacatgccagaggttgtccgtgtcgtgctttgcattgcggttgcgatcgcattcggactggccaacggatacggcgtagccaggcttaacgtccacccgatcatcatgaccctggcaaccatggggatcggccagggactggcgcttatcattctcccgatccccggcgggaaggtgcctgattggctgtcggcgtcagtcgcgggttcggtcgggcccgtgccgaactcgctgctctggctgatcgccgccaccgtcgttgctgcctggatgctttatcgcaggccgtttggcctttacctgttcgcttcggggggtaacgatttcaatgcccgcatgaatggcgtcccggtcgagcgcacagtcatcaaagcctacatcctgtcggcgctatttgcttgtgctgccgggatgttcctcgcgggccgccttgcctcaggcgatcccaaggggggtgccaccttcggaattgaatccgttaccgcagcagcgctcgggggtgttcacctagctggcggtatcggtagcatcctcggcactgtcgccggcgcggctatcctcggcatcgtcaacaacgtgatgaacctcgccaacgtctcggcattcctccagtcggtcgtgaagggccttctgctgctggcactcgtcgtttcgcagcgtcgcaaaacgatcggactttga

SEQ ID NO: 38884 - protein, 313 aa, Rhizobium tropici
MNTIANFLKTPYRAGAIRLSIGTLFVLVVASVILLPEFLAPENLSNLLAQSTVLVISALGQTFVILTGGLDVSVGSIISVTTTIMTLDMPEVVRVVLCIAVAIAFGLANGYGVARLNVHPIIMTLATMGIGQGLALIILPIPGGKVPDWLSASVAGSVGPVPNSLLWLIAATVVAAWMLYRRPFGLYLFASGGNDFNARMNGVPVERTVIKAYILSALFACAAGMFLAGRLASGDPKGGATFGIESVTAAALGGVHLAGGIGSILGTVAGAAILGIVNNVMNLANVSAFLQSVVKGLLLLALVVSQRRKTIGL

SEQ ID NO: 38885 - DNA, 1020 bp, Azospirillum brasilense
  CDS (1)..(1020): transl_table=11
atgagccaggcaatgcaaccccaacgcacttccccgtcccccgatgccgccatcgcacccgcgcgagcgcgcggcggcgtgtggcagctgatcaaccgctccggcatcgtgatggtgtttctcgtgctgttcgcgacgctttcgctaacggtgccggacttcctcacgccgcgcaacatccagggcctgctgctgtcggtcacgctgatcggttcgatcgcggtgacgatgatgttcgtgctcgcgctcggcgaggtcgacctgtcggtcgcgtcgatcgtcgcgttctcgggcgtcgtcgcgtcgacgctgatcaccgcgacgcacagcgtcgtgctcggcatcgcgggcggcgtgctcgcgggcggtgcggtcgggctcgtcaacggtgtgctgatcgcgcgctggcggatcaactcgctgatcgtcacgctcgcgatgatggaagtcgtgcgcgggctcgcgttcatcacgtcgaacggcgacgcggtgatgatctccgaggaacgcttcttcgatctcggcggcggctcgttcctcggcatctcgtatccgatctggagcaacatcgtcggcttcgtcgtgttcggcttcctgctgcgcaagacggtgttcggcaagaacgtgctcgcagtgggcggcaatggcgaggccgcgctgctcgccgggctgccggtgatgcgcatcaagatcaccgtgttcgtgctgcaggggctcgtgacgggttttgccggcgtgatgctcgcgtcgcggatgagccttggcgacccgaagacgtcggtcggcctcgaactcggcgtgatttccgcatgcgtgttgggcggcgtgtcgctgacgggcggcgtcgcgacgatctccggcgtgctggtcggcgtgctgatcatgggctccgtgcaggacgcgatgagcctgctgaacgtgccgacgttttaccaatatctgatacgcggcggaattctgttgctcgcggtgctgttcgaccagtatcgtcgcaaccagcggcgcgcgatgaagatctga

SEQ ID NO: 38886 - protein, 339 aa, Azospirillum brasilense
MSQAMQPQRTSPSPDAAIAPARARGGVWQLINRSGIVMVFLVLFATLSLTVPDFLTPRNIQGLLLSVTLIGSIAVTMMFVLALGEVDLSVASIVAFSGVVASTLITATHSVVLGIAGGVLAGGAVGLVNGVLIARWRINSLIVTLAMMEVVRGLAFITSNGDAVMISEERFFDLGGGSFLGISYPIWSNIVGFVVFGFLLRKTVFGKNVLAVGGNGEAALLAGLPVMRIKITVFVLQGLVTGFAGVMLASRMSLGDPKTSVGLELGVISACVLGGVSLTGGVATISGVLVGVLIMGSVQDAMSLLNVPTFYQYLIRGGILLLAVLFDQYRRNQRRAMKI

SEQ ID NO: 38887 - DNA, 1242 bp, Streptomyces kanamyceticus
  CDS (1)..(1242): transl_table=11
atgacgaccacgaccactcccccgggctcctcccgggacgcgtccgacgccccgccacccgcgcggtggccggcgggcgcgctgctgctgcgaagcgtgcgctccaacacgcgccagtacggcatgctcatcgccctggcgttcctcgtcgtgctgttccagatctggaccgacgggacgctgctgctcccgaacaacgtctccaacctgatccagcagaacggctacatcctcatcctggccatcggcatgatgatcgtcatcatcgcgggccacatcgacctctccgtgggctcgttggtcgccttcgtcggcgccatgtcggcggtcatgatggtcaagcacgacatgccctgggtgctcgccctggtcctctcgctcctgatcggcgcggtcgcgggggcctggcagggcttcttcatcgcgtacgtcggcatcccctcgttcatcgtgacgctggccgggatgctgctcttccgcggactcacccagatcgtccttgagggccagtcgctcgcgccgttccccgacgggttccagaacatcgccaagggcttcatcccggagatgggcccctacacccagtaccacaacccgacgctcgtcctcggcctgctcgccgtcgcgttgctgctcctgcgtgaacggcgcgctcgcaagcgccagttggcgtacgagctcgatgtcctgccgaccggtctgtgggcggccaagtgcgtggcgatgaccgcggccgtggtggcgttcaccctcaccctcgccagcttccacggcgtgcccgtcgtcatgctcatcatgtgcggcctgctcatcgcgctgggctatgtcatgcgcaacgccgtcatcggccgccatgtgtacgccctcggcggcaacaaggccgcggcgaagctgtcgggcgtcaaggacaagcgggtcaccctcctggtcttcgtgaacatgggcgtcctcgcggcgctcgcgggctgcgtgtacgcggcgcgcctgaacgcgggcaccccgcaggccgggctcaacttcgaactggaggcgatcgccgcctcgttcatcggcggcgcgtcgatgagcggcggcgtcggcacggtccttggcgcggtcatcggcggcctcgtcctcggcgtcctgaacaacggcatgtccctggtcggcatcggcacggactaccagcaggtcatcaaggggctcgtactgctcgccgcggtcggcttcgacgtctggaacaagcgcaaggcgggccgctag

SEQ ID NO: 38888 - protein, 413 aa, Streptomyces kanamyceticus
MTTTTTPPGSSRDASDAPPPARWPAGALLLRSVRSNTRQYGMLIALAFLVVLFQIWTDGTLLLPNNVSNLIQQNGYILILAIGMMIVIIAGHIDLSVGSLVAFVGAMSAVMMVKHDMPWVLALVLSLLIGAVAGAWQGFFIAYVGIPSFIVTLAGMLLFRGLTQIVLEGQSLAPFPDGFQNIAKGFIPEMGPYTQYHNPTLVLGLLAVALLLLRERRARKRQLAYELDVLPTGLWAAKCVAMTAAVVAFTLTLASFHGVPVVMLIMCGLLIALGYVMRNAVIGRHVYALGGNKAAAKLSGVKDKRVTLLVFVNMGVLAALAGCVYAARLNAGTPQAGLNFELEAIAASFIGGASMSGGVGTVLGAVIGGLVLGVLNNGMSLVGIGTDYQQVIKGLVLLAAVGFDVWNKRKAGR

SEQ ID NO: 38889 - DNA, 1224 bp, Bacillus stearothermophilus
  CDS (1)..(1224): transl_table=11
atgggagcactaatgcaaaaaacagcacaacattctccaaagcggtctacagaaagtcagcagttatcgttgaagcagatgatcaaaaacaatatgagaagttacagtatggtcatcgctctcattttgattatgttattgttccaagtgttaactggaggcattttgttgcggccattaaatattacaaacttgattttgcaaaacagttatattttggtgctggctgttggcatgatgcttgtcattatcaccggacatattgatttgtccgtcggatcggtggcagcttttgtcggggcattggccggcattctgatggttcagcaccatgcatcagtatggttgacggtgctcatttgtttattgctcggagccttgattggcgcatggcaaggattttgggtggcgtacgtaaaaattccatcattcattgttacattagcagggatgttgctgttccgaggattgacgatggttattttggaaggacagtcgatcgccccgtttccgaaaacattccaaaatatgagttctgggtttctccctgacgtatttcatggaggagagatccatctgttcaccattgtgatcggtttcgccgcttctctcttatttgttgtactggaatggagaaaacgaaacagtcagaaaaaatatgggtttgcggtcacccctgcggcgatgtttgccttgaagctggctgtgattgccgctgtgatcatgatttttacttatattttagcgacgtatgaacgaattccgacgattctagtgattttggttgcgttgatcattgcttattcctttgtggcgaaccggacggtcgtcggccgccatatttatgcgattggtggtaatgagaaggctgcgcaattgtccgggattaaaacgaaacgtgtcacgttttgggtgtttgtcaacatgggcgtgttggccgctttgtccggattgatttttgccgctcgcctcaacgctgcgacgccgaaagcggggaacttgtttgagctcgatgccattgcggcgtgctttattggaggcgcatccgcttatggaggaatcggcacgattagcggagcgatcatcggcggtctagtcatgggcgtaatgaataacgggatgtccttgctggggctcggtattgactggcaacaggccatcaaagggcttgtattgcttattgctgtggcttttgatatttacaacaaaaataaagctgcttaa

SEQ ID NO: 38890 - protein, 407 aa, Bacillus stearothermophilus
MGALMQKTAQHSPKRSTESQQLSLKQMIKNNMRSYSMVIALILIMLLFQVLTGGILLRPLNITNLILQNSYILVLAVGMMLVIITGHIDLSVGSVAAFVGALAGILMVQHHASVWLTVLICLLLGALIGAWQGFWVAYVKIPSFIVTLAGMLLFRGLTMVILEGQSIAPFPKTFQNMSSGFLPDVFHGGEIHLFTIVIGFAASLLFVVLEWRKRNSQKKYGFAVTPAAMFALKLAVIAAVIMIFTYILATYERIPTILVILVALIIAYSFVANRTVVGRHIYAIGGNEKAAQLSGIKTKRVTFWVFVNMGVLAALSGLIFAARLNAATPKAGNLFELDAIAACFIGGASAYGGIGTISGAIIGGLVMGVMNNGMSLLGLGIDWQQAIKGLVLLIAVAFDIYNKNKAA

SEQ ID NO: 38891 - DNA, 990 bp, Escherichia coli
  CDS (1)..(990): transl_table=11
atgatgtcttctgtttctacatcggggtctggcgcacctaagtcgtcattcagcttcgggcgtatctgggatcagtacggcatgctggtggtgtttgcggtgctctttatcgcctgtgccatttttgtcccaaattttgccaccttcattaatatgaaagggttgggcctggcaatttccatgtcggggatggtggcttgtggcatgttgttctgcctcgcttccggtgactttgacctttctgtcgcctccgtaattgcctgtgcgggtgtcaccacggcggtggttattaacctgactgaaagcctgtggattggcgtggcagcggggttgttgctgggcgttctctgtggcctggtcaatggctttgttatcgccaaactgaaaataaatgctctgatcacgacattggcaacgatgcagattgttcgaggtctggcgtacatcatttcagacggtaaagcggtcggtatcgaagatgaaagcttctttgcccttggttacgccaactggttcggtctgcctgcgccaatctggctcaccgtcgcgtgtctgattatctttggtttgctgctgaataaaaccacctttggtcgtaacaccctggcgattggcgggaacgaagaggccgcgcgtctggcgggtgtaccggttgttcgcaccaaaattattatctttgttctctcaggcctggtatcagcgatagccggaattattctggcttcacgtatgaccagtgggcagccaatgacgtcgattggttatgagctgattgttatctccgcctgcgttttaggtggcgtttctctgaaaggtggcatcggaaaaatctcatatgtggtggcgggtatcttaattttaggcaccgtggaaaacgccatgaacctgcttaatatttctcctttcgcgcagtacgtggttcgcggcttaatcctgctggcagcggtgatcttcgaccgttacaagcaaaaagcgaaacgcactgtctga

SEQ ID NO: 38892 - protein, 329 aa, Escherichia coli
MMSSVSTSGSGAPKSSFSFGRIWDQYGMLVVFAVLFIACAIFVPNFATFINMKGLGLAISMSGMVACGMLFCLASGDFDLSVASVIACAGVTTAVVINLTESLWIGVAAGLLLGVLCGLVNGFVIAKLKINALITTLATMQIVRGLAYIISDGKAVGIEDESFFALGYANWFGLPAPIWLTVACLIIFGLLLNKTTFGRNTLAIGGNEEAARLAGVPVVRTKIIIFVLSGLVSAIAGIILASRMTSGQPMTSIGYELIVISACVLGGVSLKGGIGKISYVVAGILILGTVENAMNLLNISPFAQYVVRGLILLAAVIFDRYKQKAKRTV

SEQ ID NO: 38893 - DNA, 969 bp, Bacillus subtilis
  CDS (1)..(969): transl_table=11
atgaaaacggaacaactgcaaacagaacaaaaacggattcacttcgacggagtcatgcaaaaactcggcccgtttcttggtttatttattctcgttatcattgtatctattttaaatcccagctttcttgaaccgctgaatattttaaacctgcttcgccaggtcgccattaacggattaatcgcgttcgggatgacctttgttattttgacaggcggcattgatctttctgttggcgctattcttgccctgtccagtgctttagttgcggggatgattgtgtccggtgtcgatccggttctcgcgatcatccttggctgtatcattggtgccgtactaggcatgatcaacggattattgattactaaaggaaaaatggcgccctttatcgccacgcttgcgaccatgactgtgtttcgcggactgacgctagtgtatacagatggaaatccgattaccggacttggcacaaactacggttttcagatgttcggacgcggttactttttaggcattcctgtaccggcaattacgatggttcttgcctttgtcatcctttgggtgcttcttcataaaacaccattcggacgccgaacgtacgctatcggcggcaacgaaaaagccgcgctcatttcaggcatcaaagtgacgcgcgtgaaagtgatgatctattctttagccgggcttttatccgctcttgcaggtgccatattgacttcccgcctgcattcggcccagccgactgcgggagaatcgtacgaacttgatgctatcgcggcagtcgtcttaggagggacaagtctttccggcggccgaggacgcattgtcggcacgttaatcggggtgctgatcatcggcacacttaataacggacttaatctgcttggcgtctcatcattttatcagctggttgtcaaagggattgttatcttaattgcggtattgttagaccgcaagaagtcagcttag

SEQ ID NO: 38894 - protein, 322 aa, Bacillus subtilis
MKTEQLQTEQKRIHFDGVMQKLGPFLGLFILVIIVSILNPSFLEPLNILNLLRQVAINGLIAFGMTFVILTGGIDLSVGAILALSSALVAGMIVSGVDPVLAIILGCIIGAVLGMINGLLITKGKMAPFIATLATMTVFRGLTLVYTDGNPITGLGTNYGFQMFGRGYFLGIPVPAITMVLAFVILWVLLHKTPFGRRTYAIGGNEKAALISGIKVTRVKVMIYSLAGLLSALAGAILTSRLHSAQPTAGESYELDAIAAVVLGGTSLSGGRGRIVGTLIGVLIIGTLNNGLNLLGVSSFYQLVVKGIVILIAVLLDRKKSA

SEQ ID NO: 38895 - DNA, 22 bp, Artificial sequence
  primer
atgaccagtgggcagccaatga

SEQ ID NO: 38896 - DNA, 25 bp, Artificial sequence
  primer
ttagacagtgcgtttcgctttttgc

SEQ ID NO: 38897 - protein, 375 aa, Artificial sequence
  consensus sequence
  Variant (2)..(15): Xaa in position 2 to 15 is any amino acid
  Variant (17)..(28): Xaa in position 17 to 28 is any amino acid
  Variant (33)..(33): Xaa in position 33 is any amino acid
  Variant (35)..(36): Xaa in position 35 to 36 is any amino acid
  Variant (38)..(59): Xaa in position 38 to 59 is any amino acid
  Variant (60)..(75): Xaa in position 60 to 75 is any or no amino acid
  Variant (77)..(79): Xaa in position 77 to 79 is any amino acid
  Variant (81)..(83): Xaa in position 81 to 83 is any amino acid
  Variant (85)..(95): Xaa in position 85 to 95 is any amino acid
  Variant (97)..(97): Xaa in position 97 is any amino acid
  Variant (100)..(105): Xaa in position 100 to 105 is any amino acid
  Variant (108)..(114): Xaa in position 108 to 114 is any amino acid
  Variant (116)..(134): Xaa in position 116 to 134 is any amino acid
  Variant (135)..(225): Xaa in position 135 to 225 is any or no amino acid
  Variant (227)..(243): Xaa in position 227 to 243 is any amino acid
  Variant (244)..(245): Xaa in position 244 to 245 is any or no amino acid
  Variant (247)..(248): Xaa in position 247 to 248 is any amino acid
  Variant (250)..(253): Xaa in position 250 to 253 is any amino acid
  Variant (255)..(255): Xaa in position 255 is any amino acid
  Variant (259)..(260): Xaa in position 259 to 260 is any amino acid
  Variant (262)..(265): Xaa in position 262 to 265 is any amino acid
  Variant (266)..(270): Xaa in position 266 to 270 is any or no amino acid
  Variant (272)..(285): Xaa in position 272 to 285 is any amino acid
  Variant (287)..(291): Xaa in position 287 to 291 is any amino acid
  Variant (294)..(298): Xaa in position 294 to 298 is any amino acid
  Variant (300)..(304): Xaa in position 300 to 304 is any amino acid
  Variant (306)..(311): Xaa in position 306 to 311 is any amino acid
  Variant (314)..(315): Xaa in position 314 to 315 is any amino acid
  Variant (317)..(317): Xaa in position 317 is any amino acid
  Variant (319)..(321): Xaa in position 319 to 321 is any amino acid
  Variant (324)..(324): Xaa in position 324 is any amino acid
  Variant (327)..(327): Xaa in position 327 is any amino acid
  Variant (330)..(330): Xaa in position 330 is any amino acid
  Variant (332)..(338): Xaa in position 332 to 338 is any amino acid
  Variant (340)..(347): Xaa in position 340 to 347 is any amino acid
  Variant (349)..(359): Xaa in position 349 to 359 is any amino acid
  Variant (361)..(364): Xaa in position 361 to 364 is any amino acid
  Variant (366)..(370): Xaa in position 366 to 370 is any amino acid
  Variant (373)..(374): Xaa in position 373 to 374 is any amino acid
NXXXXXXXXXXXXXXAXXXXXXXXXXXXDLSVXSXXAXXXXXXXXXXXXXXXXXXXXXXXXXXXXXXXXXXXXXXGXXXGXXXGXXXXXXXXXXXIXTLXXXXXXRGXXXXXXXGXXXXXXXXXXXXXXXXXXXXXXXXXXXXXXXXXXXXXXXXXXXXXXXXXXXXXXXXXXXXXXXXXXXXXXXXXXXXXXXXXXXXXXXXXXXXXXXXXXXXXXXXXXXXXXPXXXXXXXXXXXXXXXXXXXTXXGXXXXAXGGNXXAXXXXXXXXXGXXXXXXXXXXXXXXGXXXXXAGXXXXXRXXXXXPXXXXXXELXXIXAXXXGGXSLXGGXGXXXXXXXGXXXXXXXXNXXXXXXXXXXXQXXXXGXXXXXAVXXD

SEQ ID NO: 38898 - protein, 53 aa, Artificial sequence
  protein pattern
  Variant (2)..(2): Xaa in position 2 is any amino acid
  Variant (3)..(4): Xaa in position 3 to 4 is any or no amino acid
  Variant (7)..(8): Xaa in position 7 to 8 is any amino acid
  Variant (10)..(10): Xaa in position 10 is Ala or Ser
  Variant (12)..(12): Xaa in position 12 is Ala, Cys, Thr or Val
  Variant (13)..(13): Xaa in position 13 is Phe, Ile or Val
  Variant (14)..(14): Xaa in position 14 is Ile, Leu or Val
  Variant (17)..(17): Xaa in position 17 is Ala, Thr or Val
  Variant (19)..(20): Xaa in position 19 to 20 is any amino acid
  Variant (23)..(23): Xaa in position 23 is any amino acid
  Variant (24)..(24): Xaa in position 24 is Ala or Gly
  Variant (25)..(29): Xaa in position 25 to 29 is any amino acid
  Variant (30)..(30): Xaa in position 30 is Phe, Ile, Leu or Val
  Variant (31)..(31): Xaa in position 31 is any amino acid
  Variant (33)..(33): Xaa in position 33 is any amino acid
  Variant (34)..(34): Xaa in position 34 is Phe, Ile, Leu, Met or Val
  Variant (35)..(35): Xaa in position 35 is any amino acid
  Variant (36)..(36): Xaa in position 36 is Ile, Leu or Met
  Variant (37)..(37): Xaa in position 37 is Ala, Gly or Ser
  Variant (38)..(42): Xaa in position 38 to 42 is any amino acid
  Variant (43)..(43): Xaa in position 43 is Phe, Leu or Met
  Variant (44)..(44): Xaa in position 44 is any amino acid
  Variant (45)..(45): Xaa in position 45 is Phe, Ile, Leu or Met
  Variant (46)..(47): Xaa in position 46 to 47 is any amino acid
  Variant (48)..(48): Xaa in position 48 is Ile, Leu, Met or Val
  Variant (49)..(52): Xaa in position 49 to 52 is any amino acid
GXXXELXXIXAXXXGGXSXXGGXXXXXXXXXGXXXXXXXXXXXXXXXXXXXXQ

SEQ ID NO: 38899 - DNA, 1317 bp, Escherichia coli
  CDS (1)..(1317): transl_table=11
atggactccacgctcatctccactcgtcccgatgaagggacgctttcgttaagtcgcgcccgacgagctgcgttaggcagcttcgctggtgccgtcgtcgactggtatgattttttactctatggcatcaccgccgcactggtgtttaatcgcgagtttttcccgcaagtaagcccggcgatgggaacgctcgccgcatttgctacctttggcgtcggatttcttttccgtccgctcggcggtgtcattttcggtcactttggcgaccgactgggacgtaagcgcatgttaatgctgaccgtctggatgatgggcatcgcgacagccttgattggtattcttccttcattctcgaccattgggtggtgggcacctattttgctggtgacactgcgtgccattcagggatttgcagtcggcggcgaatggggaggcgcggcgttgctttccgttgaaagtgcaccgaaaaataaaaaagccttttacagtagcggtgtacaagttggctacggtgtaggtttactgctttcaaccggactggtttcattgatcagtatgatgacgactgacgaacagtttttaagctggggctggcgcattcctttcctgtttagcatcgtactggtactgggagcattgtgggtgcgcaatggcatggaggagtccgcggaatttgaacaacagcaacattatcaagctgccgcgaaaaaacgcatcccggttatcgaagcgctgttacgacatcccggtgctttcctgaagattattgcgctacgactgtgcgaattgctgacgatgtacatcgttactgcctttgcacttaattattcaacccagaatatggggctaccgcgcgaacttttccttaatattggtttgctggtaggtggattaagctgcctgacaattccctgttttgcctggcttgccgatcgttttggtcgccgtagggtttatatcacaggtacgttaatcggaacgttgagcgcatttcctttctttatggcgcttgaagcacaatctattttctggatagttttcttctccataatgctggcaaacattgcgcatgacatggtggtgtgtgtgcaacaaccgatgtttaccgaaatgtttggtgccagttatcgctatagtggcgctggagtcggttatcaggttgccagtgtggttggcggtggatttacaccttttattgccgctgcactcatcacttactttgccgggaactggcatagcgtcgccatttatttgctggctggatgcctgatttccgcaatgaccgctttgttgatgaaagacagtcaacgcgcttaa

SEQ ID NO: 38900 - protein, 438 aa, Escherichia coli
MDSTLISTRPDEGTLSLSRARRAALGSFAGAVVDWYDFLLYGITAALVFNREFFPQVSPAMGTLAAFATFGVGFLFRPLGGVIFGHFGDRLGRKRMLMLTVWMMGIATALIGILPSFSTIGWWAPILLVTLRAIQGFAVGGEWGGAALLSVESAPKNKKAFYSSGVQVGYGVGLLLSTGLVSLISMMTTDEQFLSWGWRIPFLFSIVLVLGALWVRNGMEESAEFEQQQHYQAAAKKRIPVIEALLRHPGAFLKIIALRLCELLTMYIVTAFALNYSTQNMGLPRELFLNIGLLVGGLSCLTIPCFAWLADRFGRRRVYITGTLIGTLSAFPFFMALEAQSIFWIVFFSIMLANIAHDMVVCVQQPMFTEMFGASYRYSGAGVGYQVASVVGGGFTPFIAAALITYFAGNWHSVAIYLLAGCLISAMTALLMKDSQRA

SEQ ID NO: 38901 - DNA, 1317 bp, Escherichia coli O157:H7 EDL933
  CDS (1)..(1317): transl_table=11
  misc_feature (926)..(926): w is a or t
  misc_feature (1175)..(1175): s is g or c
atggactccacgctcatctccactcgtcccgatgaaaggacggtttcgttaagtcgcgcccgacgagctgcgttaggcagtttcgctggtgccgtcgtcgactggtatgattttttactctatggcattaccgccgcactggtgtttaatcgcgagtttttcccgcaagtaagcccggctatgggaacgctcgccgcatttgccacctttggcgtcggattccttttccgtccgctcggcggtgtcattttcggtcactttggcgaccgactgggacgtaagcgcatgttaatgctgaccgtctggatgatgggcatcgcgacagccttgattggtattcttccttcattctcgaccattgggtggtgggcacctattttactggtgacgctgcgtgccattcagggatttgccgtcggcggcgaatggggaggcgcggcgttgctttccgttgaaagtgcaccgaaaaataaaaaagccttttacagtagcggtgtacaagttggctacggtgtaggtttactgctttcaaccggactggtttcattgatcagtatgatgacgactgacgaacagtttttaagctggggctggcgcattcctttcctgtttagcatcgtactggtactgggagcattgtgggtgcgcaatggcatggaagagtccgcggaatttgaacaacagcaatataatcaagcggccgcgaaaaaacgcatcccggttatcgaagcgctgttacgacatcccggtgctttcctgaagattattgcgctacgactgtgcgagttgctgacaatgtacatcgttaccgcctttgcacttaattattcaactcagaatatggggttaccgcgcgaacttttccttaatattggtttgctggtaggtggattaagctgcctgacaattccctgttttgcctggcwtgccgatcgttttggtcgccgcagggtttatatcacaggcgcgttgatcggaacgttgagcgcatttcctttctttatggcgcttgaagcacaatctattttctggatagttttcttctccataatgctggcaaacattgcgcatgacatggtggtgtgtgtgcaacaaccgatgtttaccgaaatgtttggtgccagttatcgctatagtggtgctggagtcggttatcaggttgccagtgtggttgscggtggatttacaccttttattgccgctgcgctcatcacttactttgccgggaactggcatagcgtcgccatttatttgctggctggatgtctgatttccgcaatgaccgctttgttgatgaaagacaatcaacgcgcttga

SEQ ID NO: 38902 - protein, 438 aa, Escherichia coli O157:H7 EDL933
  misc_feature (309)..(309): The Xaa at location 309 stands for His, or Leu.
  misc_feature (392)..(392): The Xaa at location 392 stands for Ala, or Gly.
MDSTLISTRPDERTVSLSRARRAALGSFAGAVVDWYDFLLYGITAALVFNREFFPQVSPAMGTLAAFATFGVGFLFRPLGGVIFGHFGDRLGRKRMLMLTVWMMGIATALIGILPSFSTIGWWAPILLVTLRAIQGFAVGGEWGGAALLSVESAPKNKKAFYSSGVQVGYGVGLLLSTGLVSLISMMTTDEQFLSWGWRIPFLFSIVLVLGALWVRNGMEESAEFEQQQYNQAAAKKRIPVIEALLRHPGAFLKIIALRLCELLTMYIVTAFALNYSTQNMGLPRELFLNIGLLVGGLSCLTIPCFAWXADRFGRRRVYITGALIGTLSAFPFFMALEAQSIFWIVFFSIMLANIAHDMVVCVQQPMFTEMFGASYRYSGAGVGYQVASVVXGGFTPFIAAALITYFAGNWHSVAIYLLAGCLISAMTALLMKDNQRA

SEQ ID NO: 38903 - DNA, 1302 bp, Salmonella typhimurium LT2
  CDS (1)..(1302): transl_table=11
atgtccggaacgtataatgctactattcgccgggtggtggtttccgcctggataggaaactccattgaatattatgattttctattatacggcctggcaagcgcgctggtatttggcccgcttttttttcctggcgccagcccattgactgcaacgttatcttcttttgccagtttcggcgtgggatttatctcccgaccgctgggcgcgctattttttggcaacaggggagatacgcttgggcgtaaaaacacgttattaattacgttaggggggatgggcgcggtcacgtttctcatcggttgcctgccttcttacgccagtattggcgcgctggcgcctgctttactggttattctgcgttttctacagggatttatggttggaggcgaatggggaggcgccatgttgatggtcgtggaatatgctgctggaaagcaccgggggcggttaagcgcgctatcgcaaacaggaggactcacgggacaattattggcgacaggcgtatttatagtcgtgacccaattaccgcaggaggcgttgttatcgtggggatggcgtattccttttctgctcagtgcgcttttggtgttgcctggattatatatgcgtcatcgtctggatgagacgcctgtcttccgtgcgtttaaaaagcagcaggccattaatcataggcagcaaagagaagaaaggccggtggtcaaagtagtacgagaacaatggcgcagcattttgctgattataattctgcgttttgcggaaagcgttcccttttttcttgctaccgtcttcgcggtttcctgggcgacgacgcagcttgggattgccagcctgactattctgtacattgtaatgttcacctgtctgctggcgtatcccatgcacgtgctatttggcatcatgtcggatcggcgtggctgccgtcaggtgtatattttcggcgcgctttttgtcgcggcaatggcttttccctttttctggctgctggaaagccgttcgctcatactgatgacaatgggctacgttctgcttattaacattggtcataattcactgaatgccgtgcaaccttcttttttcgccggactgtttcatccgcctgtacgctacagcggttcatcaattggcgctcagttgggggcggttgtggcagggggattcacgccgtttatcgctaaagcgttaagcgcagtctatgataacagttgggcgttggttgccggttatgtcgttttgactgcgttggcttcggcgtttgcggcaaagattgcgccggaaaccgtgttaccgcattcgccgtaa

SEQ ID NO: 38904 - protein, 433 aa, Salmonella typhimurium LT2
MSGTYNATIRRVVVSAWIGNSIEYYDFLLYGLASALVFGPLFFPGASPLTATLSSFASFGVGFISRPLGALFFGNRGDTLGRKNTLLITLGGMGAVTFLIGCLPSYASIGALAPALLVILRFLQGFMVGGEWGGAMLMVVEYAAGKHRGRLSALSQTGGLTGQLLATGVFIVVTQLPQEALLSWGWRIPFLLSALLVLPGLYMRHRLDETPVFRAFKKQQAINHRQQREERPVVKVVREQWRSILLIIILRFAESVPFFLATVFAVSWATTQLGIASLTILYIVMFTCLLAYPMHVLFGIMSDRRGCRQVYIFGALFVAAMAFPFFWLLESRSLILMTMGYVLLINIGHNSLNAVQPSFFAGLFHPPVRYSGSSIGAQLGAVVAGGFTPFIAKALSAVYDNSWALVAGYVVLTALASAFAAKIAPETVLPHSP

SEQ ID NO: 38905 - DNA, 1437 bp, Streptomyces coelicolor A3(2)
  CDS (1)..(1437): transl_table=11
gtgtggcgacacgcaaacgtccccgtcacaccccaggaagtggtgccgatgtcgtcgcccgcaaccgctccaccagccccgaacaacctcaagcgcatcgtcgccgccagcctcatcggcaccaccatcgagtggtacgacttcttcctctacggttccgccgccgcgctcgtgttcaacgagttgttcttcccggactccgacccgctggtcggcacgctgttgtcattcctgacctatgccgtcgggttcgccgcgcggccggtcggggccctggtgttcgggcactacggtgaccggctcgggcgtaagaagttgctggtgctgagcctgttgatgatgggcggggcgacgttcgcgatcgggctgctccccacccacgcgaccgtcggcacggccgctcccgtgctgctgaccgtgctgcggctcgtccagggtttcgccctcggcggtgagtggggcggggccgtactgctggtgtcggagcacggggacgcgcggcggcgcgggttctgggcgtcgtggccgcagaccggggcgccggccgggcaactcctcgcgaccggggtgctgtcgttgctcacggccgtgctgtcggacgccgcgttcaacagctggggctggcggattccgttcctgctttccggggtcctggtcatggtcggtttgtggattcgtctgtctgtcgacgaatcaccggtcttcaagcaggccttggcgcaggcggagtcgcggaaggcgaaggccgagccgcttccgctggtcgccgtgatgcggcaccactggcgcgacgtgctgatcgcgatgggcgcgcggatggcggagaacatcagctactacgtcatcacggccttcatcctcgtgtacgccacgaccacggccgacgtctccaagcagaccgcgctcaacgctgtgctgatcgcctcggccgtgcacttcgcggtcataccggcctggggcgccctgtcggaccggatcggccggcgccccgtgtacctgctgggggcggccggtgtcgggctgtggatgttccccttcttcatgctgatcgactccggccacttcggcagtctgttgctcgcggtgaccgtggggctggtgctgcacggcgccatgtacgcgccccaggcggccttcttctccgagatgttcgcgacccggatgcgttattcgggggcttcgatcggcgcccagttcgcctccgtggcggctggtgctccggcgccgctgatcgccaccgcgctgctgtccgagtacgacagttcgacgccgatctcgctgtatgtcatcgcggcggccgtgctgacgctgttcgccgtgggagtggcccgggagacccggcaccgggacctcgcggaggtggactccgtcgccggcgacgcggacgaggacgggccggtgtccgactcccgtgcgcagcgggcgcgtatcgtctga

SEQ ID NO: 38906 - protein, 478 aa, Streptomyces coelicolor A3(2)
MWRHANVPVTPQEVVPMSSPATAPPAPNNLKRIVAASLIGTTIEWYDFFLYGSAAALVFNELFFPDSDPLVGTLLSFLTYAVGFAARPVGALVFGHYGDRLGRKKLLVLSLLMMGGATFAIGLLPTHATVGTAAPVLLTVLRLVQGFALGGEWGGAVLLVSEHGDARRRGFWASWPQTGAPAGQLLATGVLSLLTAVLSDAAFNSWGWRIPFLLSGVLVMVGLWIRLSVDESPVFKQALAQAESRKAKAEPLPLVAVMRHHWRDVLIAMGARMAENISYYVITAFILVYATTTADVSKQTALNAVLIASAVHFAVIPAWGALSDRIGRRPVYLLGAAGVGLWMFPFFMLIDSGHFGSLLLAVTVGLVLHGAMYAPQAAFFSEMFATRMRYSGASIGAQFASVAAGAPAPLIATALLSEYDSSTPISLYVIAAAVLTLFAVGVARETRHRDLAEVDSVAGDADEDGPVSDSRAQRARIV

SEQ ID NO: 38907 - DNA, 1350 bp, Escherichia coli CFT073
  CDS (1)..(1350): transl_table=11
atgtctgaaaagttacccgcaccgcgtgaagggctttccggtaaagccatgagacgtgtcgttatgggcagtttcgcaggcgcgttaatggaatggtatgacttctttatttttggcacggcagcaggactggtatttgcaccgctgttttatccagacagcgatccttttataggtcttatagcttcctttgcgacctttggtgtcggttttctgactcgtcctttaggtggcatcgtctttggtcattttggcgataaaatagggcgaaaaataacgcttatctggacgttggctattgtcggttgctccacatttttgattggttttattccgacgtatcaggaaattgggatctgggcaccgctcatattaatggtgctacgtttaattcagggctttggtcttggtggcgagtacggcggagcggcattgatgaccatagaatcagcgcccgaatcccgacgcggatttttaggttcactcccgcaaacggctgcgtctgtgggtattatgctggcaaccggtatttttgctctctgtaaccattttcttacttcggagcagtttctctcctggggatggcgcattccgttttggctttctgcggtgatgttgatcgttgggctgtttatccgcctgcataccgaagaaacgctggattttcaaaagcaaaaaacgacgaataataaagaaaagtccgttcctccgttgattgaattattcaaaaaacatccacgaaatattttattggcactgggtgcgaggctggcggaaagtgtctcctctaatattattaacgcctttggtattgtctatatttccagccaattagcattgtcgcgagatattcccctgacgggtatgttgattgcctcggcgatcggtattttcagttgtccattggttggatggttatcagatcgtataggtcaaaaaagtctgtatttgtcgggagcaggattttgtgtcctgttcgcgtttcctttcttcttattactggatagcaaaagtacgctcatcatctggtgcagtatgatcctcggctacaacttaggtccgacgatgatgtttgccgtgcagccaacacttttcacccgcatgttcggtaccaaagtacgatataccggcctttcttttgcttatcaattttccgcgattcttggcggactaagcccccttatcgcctcaagtttgctggcgctagggggaggaaaaccgtggtatgtcgctctgtttttatttgctgtctcagttctttcctttgtttgcgtctggctgattgagccgaccgatgaacaagaaaccgcttcttaccgctacatcagggaacaatctcatgaaaactga

SEQ ID NO: 38908 - protein, 449 aa, Escherichia coli CFT073
MSEKLPAPREGLSGKAMRRVVMGSFAGALMEWYDFFIFGTAAGLVFAPLFYPDSDPFIGLIASFATFGVGFLTRPLGGIVFGHFGDKIGRKITLIWTLAIVGCSTFLIGFIPTYQEIGIWAPLILMVLRLIQGFGLGGEYGGAALMTIESAPESRRGFLGSLPQTAASVGIMLATGIFALCNHFLTSEQFLSWGWRIPFWLSAVMLIVGLFIRLHTEETLDFQKQKTTNNKEKSVPPLIELFKKHPRNILLALGARLAESVSSNIINAFGIVYISSQLALSRDIPLTGMLIASAIGIFSCPLVGWLSDRIGQKSLYLSGAGFCVLFAFPFFLLLDSKSTLIIWCSMILGYNLGPTMMFAVQPTLFTRMFGTKVRYTGLSFAYQFSAILGGLSPLIASSLLALGGGKPWYVALFLFAVSVLSFVCVWLIEPTDEQETASYRYIREQSHEN

SEQ ID NO: 38909 - DNA, 1350 bp, Bradyrhizobium japonicum USDA 110
  CDS (1)..(1350): transl_table=11
atgctgcacatgcgcattcgcaaccagggaggacgcaagatgagtgaagcgatctcagtccatcagcttgaggcgagacagccctcgcacgtgaccgtcgccaccgcgagcctgatcggcacagccatcgagtggtacgacttcttcctttacggcaccgccgcggcgctgatcttcaacaagctgttcttcccgaccttcgaccccatgatgggaacgctgctggcgttcgcgacctacgcgctcggcttcatcgcgcgtccgcttggcggcgtcgtgttcggccactacggcgacaagatcggccgcaagaccatgctctatctgaccctgctgatcatgggcgcggcgaccgccgcgatcggcttcctgccgacctacgagaccgccggcatctgggccgcggtcctgctggtgacctgccggctgatccagggctttggcctcggcggcgaatggggcggcgcggtgctgatggcggtcgagcatgcgcccgcggacaagaagggattctacggcagctggccgcaactcggggcgccgctcggtctcgtgctcggcacgctggtgttctcggtggtgtccgcgatgctgaccgacgcacagcttctttcctggggctggcgcatcccgttcctgttctcgatcgcgctggtgctcgtgggcctgtggattcgcttcaccatcgcggaatcgccggagttccagaaggtcaaggacaccaagcaagaggtcaagatgccgatcctcgaggcgatccggatgtatcccaagaacatcctgctcgcgatgggcgcgcgctttgccgaaaacggcttcttctacatctacgcgaccttcgtgctcgcctatgcgacgcaatcgctcggcatgaacaagcaggacatgctcaacggcgtgctgatcggcgcggcgatcgagaccttcaccattcccgccttcggcgcgctctccgaccggctcgggcggcggccgatctacatcttcggcgcggtgttctcggcgctgatgtcgttcccgctgttcatgctgctttcgaccaagaacccgcaatatgcctggatcgcgatcgtgctcggcctcgccgtcggtcacgccgcgatgtacggcccgcaggcgagcttcctgtcggagctgttcggcaccaaggtgcgctatagcggcgtctcgctcggctacaacctcgcctcgatcttcgccggcgcattgtcgccgctgatcgcgacgggattgatgacggcgtacgcgccggcaacctggccgatctcgctctacatgatcgcgctggcgatcatcaccgtcgtgtcggtctatttcgccaccgaaacacgcaagatagtgcagtcctga

SEQ ID NO: 38910 - protein, 449 aa, Bradyrhizobium japonicum USDA 110
MLHMRIRNQGGRKMSEAISVHQLEARQPSHVTVATASLIGTAIEWYDFFLYGTAAALIFNKLFFPTFDPMMGTLLAFATYALGFIARPLGGVVFGHYGDKIGRKTMLYLTLLIMGAATAAIGFLPTYETAGIWAAVLLVTCRLIQGFGLGGEWGGAVLMAVEHAPADKKGFYGSWPQLGAPLGLVLGTLVFSVVSAMLTDAQLLSWGWRIPFLFSIALVLVGLWIRFTIAESPEFQKVKDTKQEVKMPILEAIRMYPKNILLAMGARFAENGFFYIYATFVLAYATQSLGMNKQDMLNGVLIGAAIETFTIPAFGALSDRLGRRPIYIFGAVFSALMSFPLFMLLSTKNPQYAWIAIVLGLAVGHAAMYGPQASFLSELFGTKVRYSGVSLGYNLASIFAGALSPLIATGLMTAYAPATWPISLYMIALAIITVVSVYFATETRKIVQS

SEQ ID NO: 38911 - DNA, 1317 bp, Pseudomonas syringae pv. tomato str. DC3000
  CDS (1)..(1317): transl_table=11
atgaccagcaccccgctctctcgcgaagataacgacgcacccgcacaaccggtgaactcggcgacccgcgtcgccactgccagcttcatcggcaccgccatcgagttctacgacttctatgtctacgccaccgccgccgcactggtgatcggtccggtgtttttcccgcagacctcaggcacggcacaaatgctgtcgtcatttctgacattcggtatcgcctttctcgcacgtccactgggctcggcactgtttggtcacttcggcgaccggatcggccgcaagtcgacgctggttgcatcgctactgctgatgggggtctgcaccacgctgatcggcgtactgcctggctacgcaaccatcggcgcatgggcaccgattctgttgtgcgtgctgcgcttcggccaagggcttggtctgggcggggaatggggcggggcggccttgctggcgactgaaaatgcccccaaaggccagcgcgcgtggttcggcatgtttccgcaactagggccatcgatcggctttctggcggccaatggtctgtttctggcgctggcaatgatcctggatgacgaacagtttcgttcgtggggctggcgaattccgtttctgctcagcgccgtgctggtcatggtcatggtcgggctctacgtgcgcctgaaactggaagaaacacccgtgttcgccaaagcgatggcgcgtcaccagcgcgtcagtctgccgatagttgaaaccgtcagccagcactggaagcccatgttgctcggcgcagcatcaatggtggtctgttatgcgctgttttatatctcgaccgtgttttcgctgagctacggcgtgtctacgctgggctatacccgcgagatattcctcgggctgctgtgcttcgcggtgctgttcatggcggcagcaacgccattggctgcgctggcgagtgaccgattcgggcgcaagccggtgctgattgtcggcggcgtgctggcgatcctctcaggtttcaccatggaaccgctgttgacacatggcagtacctgggccgtggcgctgtttctgtgcatcgagcctttcttgatgggtgtgacttttgctccgatgggcgccctgctaccggaactattcccgacgcacgtgcgctacacaggcgcatcggcggcctacaacctgggcggaatcgtgggcgcatcggtcgcccccttcttcgcccagaaactggtggcgatgggcggcttgagctgggttggcgggtatgtgtctgccgcggcgctgatcagcgtgctggcggtgctgagcttgaaggagacgagagatagggagctttga

SEQ ID NO: 38912 - protein, 438 aa, Pseudomonas syringae pv. tomato str. DC3000
MTSTPLSREDNDAPAQPVNSATRVATASFIGTAIEFYDFYVYATAAALVIGPVFFPQTSGTAQMLSSFLTFGIAFLARPLGSALFGHFGDRIGRKSTLVASLLLMGVCTTLIGVLPGYATIGAWAPILLCVLRFGQGLGLGGEWGGAALLATENAPKGQRAWFGMFPQLGPSIGFLAANGLFLALAMILDDEQFRSWGWRIPFLLSAVLVMVMVGLYVRLKLEETPVFAKAMARHQRVSLPIVETVSQHWKPMLLGAASMVVCYALFYISTVFSLSYGVSTLGYTREIFLGLLCFAVLFMAAATPLAALASDRFGRKPVLIVGGVLAILSGFTMEPLLTHGSTWAVALFLCIEPFLMGVTFAPMGALLPELFPTHVRYTGASAAYNLGGIVGASVAPFFAQKLVAMGGLSWVGGYVSAAALISVLAVLSLKETRDREL

SEQ ID NO: 38913 - DNA, 1434 bp, Streptomyces avermitilis MA-4680
  CDS (1)..(1434): transl_table=11
gtgtccggacacgtacccgtccccaccgaacacccggaagtggtgcacatggcctccgcagcaaccgctcccccgccacccgccagcctcaagcgcatcgtcgccgcgagcctcatcggcaccaccatcgagtggtacgacttcttcctgtacggttccgccgccgcgctcgtcttcaacaagctgttcttcccgggctccgaccccctggtcggcacgctgctgtccttcctgacgtacgccgtggggttcgccgccaggccgctgggcgctctcgtcttcgggcactacggcgaccggctcggccgaaagaaactgctggtcctgagcctgctcctgatgggcggggcgacctttgcgatcggtctgctgcccacgcactcgaccgtcggcagcgccgctccggtcctgctgaccacgctgcggctggtgcagggcttcgcgctcggcggcgaatggggcggcgcggtgctgctcgtctccgagcacggagacgcgcggcgccgcgggttctgggcctcgtggccgcagaccggggcacccgccgggcaactcctcgccaccggtgtgctgtcgctgctcaccgccgtactgtcggacgcggcgttcgtctcctggggctggcgcatccccttcctgctctccggtgtcctggtgatcgtcggtttgtggattcgtctgtctgtcgatgaatcacccgtgttccagcaggcgctggcccgcgcggaggcccgcagcgcggcaccggacgccgtcgcggagaagctcccgctggtgtccgtgctgcggcaccactggcgggacgtgctggtcgcgatgggcgcccgcatggcggagaacatcagctactacgtgatcaccgcgttcatcctcgtgtacgcgacgacatcggccggtgtgtcccggcagacggcactcaacgcggtgctcatcgcctccgccgtgcacttcgcggtcatcccggcctggggcgcgctctcggaccggatcggccgccggcccgtctatctgctgggcgcggccggggtcggcctgtggatgttccccttcttctcactcatcgacacgggcggcttcggcaacatgatcctggccgtgaccgtcggactcgtactgcacggggcgatgtacgcaccccaggcggcgttcttctccgagatgttcgcgacgcggatgcgctactcgggtgcgtccatcggcgcccagttcgcctccgtcgcggccggtgcgcccgctccgctcatcgcgaccgcgctgctctccgactacggcaactccaccccgatctccctgtacgtgatcgcggccgtcgtcctgacgctgatcgcggtgggcgcggcgaaggagacccgcagtcgcgacctggccgcggtcgaccccgtgacggacgcggaacccgccgcggcacgggcagccgacgcgcccgccgtctga

SEQ ID NO: 38914 - protein, 477 aa, Streptomyces avermitilis MA-4680
MSGHVPVPTEHPEVVHMASAATAPPPPASLKRIVAASLIGTTIEWYDFFLYGSAAALVFNKLFFPGSDPLVGTLLSFLTYAVGFAARPLGALVFGHYGDRLGRKKLLVLSLLLMGGATFAIGLLPTHSTVGSAAPVLLTTLRLVQGFALGGEWGGAVLLVSEHGDARRRGFWASWPQTGAPAGQLLATGVLSLLTAVLSDAAFVSWGWRIPFLLSGVLVIVGLWIRLSVDESPVFQQALARAEARSAAPDAVAEKLPLVSVLRHHWRDVLVAMGARMAENISYYVITAFILVYATTSAGVSRQTALNAVLIASAVHFAVIPAWGALSDRIGRRPVYLLGAAGVGLWMFPFFSLIDTGGFGNMILAVTVGLVLHGAMYAPQAAFFSEMFATRMRYSGASIGAQFASVAAGAPAPLIATALLSDYGNSTPISLYVIAAVVLTLIAVGAAKETRSRDLAAVDPVTDAEPAAARAADAPAV

SEQ ID NO: 38915 - DNA, 1338 bp, Acinetobacter sp. ADP1
  CDS (1)..(1338): transl_table=11
atggcttcaaatttatcatcttctgtcccttcaaatgaaaaacgtgcacgcaaagctgcttttagtagttttatcggtgcggttgttgactggtacgattttctcctttacggcattgtcgctgcattgatttttaatcaacagttttttccaagcattagtcctgcgatgggaactttggccgcctttgcaacgtttggtgtaggcttcctcttccgcccgctcggtggtgtggtctttggacattttggcgaccgtttaggtcgtaaaaaaatgctatttctgaccgtattcctgatgggtactgcaacaatattgatcggtcttttacccaactttgaagcaattggctggtgggcacccgtcttactggtgttgttgcgtgctattcaaggcttcgctgtcggtggtgaatggggtggtgctgccttaatggcagttgagaatgcgcctgcgcaccgaaaagcattttatagcagcggtgtacagatcggctatggcgtcggtcttatgttggcgactggtagcgtatccttgattatttatatctttggacaagacggctttgctgactgggcatggcgaatcccttttcttgccagtatcattctggtgctattcgcactttgggttcgtggcggtcaagatgagtcacatgaatttgaacaagaagtgattaaaaaacagatcgcacctgttaaaattcctttatttgaagctgttcgtcaaaatccaaaaggttttttctacattatcgctttgcgtctagcagaactgctgaccatgtatctggtcaccacttttgctctaaattattccaccaaaaatctgggcatgtcgtctagcttatttttacacattggtctgatggtcggtgcaattagctgtttgacgattcctttctttgcacatatttcagatcgttttggacgccgacgcatgtgcgtgattggcggtctgattggtgcaatctgtgcatttccatttttctttgcgcttgaaagtggctctaccttctggatcgtactgtttgctattttattggccaatctgtcacatgatatggtggtcagtgttcatcagcctatttttaccgaactctttggtgcatcttatcgttatagtggtgcgggcgtaggttatcaggtggccagtattgtaggcggtgggtttacgccttttattgcaacaggtctgatcacactaggtcatgggcactggcaatatgtcgcaatttatttaaccatcggttgtttactcaccacgtgggttgcagcacgaatgaaagcccaagtacaatcagtacatccttcttctggttatgttacaggcaaataa

SEQ ID NO: 38916 - protein, 445 aa, Acinetobacter sp. ADP1
MASNLSSSVPSNEKRARKAAFSSFIGAVVDWYDFLLYGIVAALIFNQQFFPSISPAMGTLAAFATFGVGFLFRPLGGVVFGHFGDRLGRKKMLFLTVFLMGTATILIGLLPNFEAIGWWAPVLLVLLRAIQGFAVGGEWGGAALMAVENAPAHRKAFYSSGVQIGYGVGLMLATGSVSLIIYIFGQDGFADWAWRIPFLASIILVLFALWVRGGQDESHEFEQEVIKKQIAPVKIPLFEAVRQNPKGFFYIIALRLAELLTMYLVTTFALNYSTKNLGMSSSLFLHIGLMVGAISCLTIPFFAHISDRFGRRRMCVIGGLIGAICAFPFFFALESGSTFWIVLFAILLANLSHDMVVSVHQPIFTELFGASYRYSGAGVGYQVASIVGGGFTPFIATGLITLGHGHWQYVAIYLTIGCLLTTWVAARMKAQVQSVHPSSGYVTGK

SEQ ID NO: 38917 - DNA, 1398 bp, Erwinia carotovora subsp. atroseptica SCRI1043
  CDS (1)..(1398): transl_table=11
atggacacctcgactacgccaacactctcacagcctggtggctcattacctcatcaggatgattcactctcttctgataaaaccctacaaacacagtcagtaagccattctcaacatcgagcaaaacgtgcagcatggggcagttttgttggtgccgttgtcgattggtacgattttcttctgtacggaattgttgccgctcttgtatttaataccgaatttttcccacagatcagtccgacgatggggacgctggcggcatttggtacgttcggcgttggtttcttgttccgcccgttaggtggcatggtgtttggtcactttggtgacaagctgggccgtaaacggatgttaatgattacggtctggatgatgggtatttccactgcattgattgggctgctgccgtcgtttgattctattggctggtgggcaccggcgctgttggtcacgctgcgggcaattcagggattcgcggtcggtggcgaatggggcggggcggcgctgttggcggtagaaaacgcgccgaagaagaagaaagccttttacagcagtggcgtacaggttggctttggtgtcgggcttttgctggcaaccgggtcggtatcagtggtgagcaatttgacgaccaatgaggaatttaccagttggggttggcgtttgccgttcttattcagcctgattctagttgctatcgcttggtgggtacgtaatgggatggatgagtctcaggaatttgaagccaacaaaactctaggtgaaagagcacagaagctgcgttcgttccctattatggaagcactgcgccagcatccgaaggcattcctgctgattattgcgctacggcttggtgagctgctgacgatgtatatcgtcaccgcgtttgcacttaattactccaccacccatcttgggctatcgcgggatattttcctgaatatcgggctgctggtgggggcgataagctgtgtgtctattcctttctttgcctatctggcggatagctttggccgtcgccgtatctatgtgaccggtgcgttgattggagccgtgagtgcggtgcctttcttcatggcgctggaaagccacaacacgctgatgattctgttttttgccatcatgttggcgaatgctgcccacgatatgatcgttagcgtacagcaaccgatgtttaccgagctatttggtacggcgtatcgctatagcggggctggtgtgggttatcaggtcgccagtgtggtcggcggcggatttacaccttttatcgctgtcctgctggtggaatttatggatggttcatggcacgcggtggcggcctaccttgccatcggctgcttactgtcggcagttgtcgggatggggatgaaagcaccttcagacgatactgtgcctcactaa

SEQ ID NO: 38918 - protein, 465 aa, Erwinia carotovora subsp. atroseptica SCRI1043
MDTSTTPTLSQPGGSLPHQDDSLSSDKTLQTQSVSHSQHRAKRAAWGSFVGAVVDWYDFLLYGIVAALVFNTEFFPQISPTMGTLAAFGTFGVGFLFRPLGGMVFGHFGDKLGRKRMLMITVWMMGISTALIGLLPSFDSIGWWAPALLVTLRAIQGFAVGGEWGGAALLAVENAPKKKKAFYSSGVQVGFGVGLLLATGSVSVVSNLTTNEEFTSWGWRLPFLFSLILVAIAWWVRNGMDESQEFEANKTLGERAQKLRSFPIMEALRQHPKAFLLIIALRLGELLTMYIVTAFALNYSTTHLGLSRDIFLNIGLLVGAISCVSIPFFAYLADSFGRRRIYVTGALIGAVSAVPFFMALESHNTLMILFFAIMLANAAHDMIVSVQQPMFTELFGTAYRYSGAGVGYQVASVVGGGFTPFIAVLLVEFMDGSWHAVAAYLAIGCLLSAVVGMGMKAPSDDTVPH

SEQ ID NO: 38919 - DNA, 1353 bp, Ralstonia eutropha JMP134
  CDS (1)..(1353): transl_table=11
atgacgaagcaggcaacggcggcgcagtccgcacaggacgcggcgcgaaaactgcggcaggttgttacgtcgagcacgattggcgcgatggttgagtggtacgactttttcctttacggggtggtagccggccttgtgttcaacaagctgtatttcccttcagcggatcccgtggtaggcacgctgctcgcctatgcaaccttcgcggcgggctttgtggcgcggccactcgggggcgtgatcttcggacacttcggcgataccctcggtcgcaagcgcatgctggtgctgacgctgatgatcatgggtgtcgcgactaccgccattggcctgattcccacctatcagcagattggtgtctgggcgccgatcctgctgctggtatgtcgggttgcgcaggggattggcctcggtggcgagtggggcggcgcggtactgatgaccttcgagagcgcgccaagccaccgtcgcggattctttgcgagtctgccgcagactggcatgtccctcgggctggtactggcaagcggtgtcattgcaatcttgtcactgctgttgtcagataaggacttcctcgcatggggctggcgcattgctttcatgcttagcgcagtgatggtcttgatcggttcgtacatgcgctcacatgtggaggaatccccggaattcgcggctgcccaacatgaccacgaagaagcccccggacttccattcctggccatgcttcgtcgctatcccgccgttgtgcttgcctgcatgggcgctcgcttcatcgatggcgtcttcttcaatgtgtttggtgtgttttcgctggcctacctcacgcagacgttgaagctctcccgtgatcaagcgttgctgggcgtgctgatcggtgccggtgtgatgacgttcttcattccgctgtggggcgccgtgtccgaccgtgtcgggcggcccatcgtctacggtactggcgcgctgttcgcaggtctttcggccttcccggcattctggctgatgcaacattccgggggcaatgtgctgctggtgtgggcggcgatcatcattccgttcggtatctttcacgcggcggtattcggcacgatgtcgtcgatgttctcagaagtgttcgatcctcgcgttcgttataccggcatttcctttgtctatcagtttgccggggtgtttgcgggaggtctgacgccgatcatcgccgcctggcttaacgccaaggcggacggggagccctggtatctgtgcgcatacgtgctgggagtcggcatcatgagcgccgcctgcacgatgtggattgcctttcagtcggcgcacgccaaccgcgtaagcctggcgccgtcgaaggtccatggctaa

SEQ ID NO: 38920 - protein, 450 aa, Ralstonia eutropha JMP134
MTKQATAAQSAQDAARKLRQVVTSSTIGAMVEWYDFFLYGVVAGLVFNKLYFPSADPVVGTLLAYATFAAGFVARPLGGVIFGHFGDTLGRKRMLVLTLMIMGVATTAIGLIPTYQQIGVWAPILLLVCRVAQGIGLGGEWGGAVLMTFESAPSHRRGFFASLPQTGMSLGLVLASGVIAILSLLLSDKDFLAWGWRIAFMLSAVMVLIGSYMRSHVEESPEFAAAQHDHEEAPGLPFLAMLRRYPAVVLACMGARFIDGVFFNVFGVFSLAYLTQTLKLSRDQALLGVLIGAGVMTFFIPLWGAVSDRVGRPIVYGTGALFAGLSAFPAFWLMQHSGGNVLLVWAAIIIPFGIFHAAVFGTMSSMFSEVFDPRVRYTGISFVYQFAGVFAGGLTPIIAAWLNAKADGEPWYLCAYVLGVGIMSAACTMWIAFQSAHANRVSLAPSKVHG

SEQ ID NO: 38921 - DNA, 1308 bp, Burkholderia sp. 383
  CDS (1)..(1308): transl_table=11
atgaccccaaccttcgacaccctcgacgccgccgccagcgcccgcatacgcagccaggcccgcaaggccgcgatcggcagcttcgtcggcgccgttgtcgactggtacgacttcctgctgtacgggatcgtcgccgcgctggtattcaattccgagtttttcccgaaagtcagcccgacgatgggcacgctcgccgcgttcgcgaccttcggcgtcggcttcctgttccggccgctcggcggcgtcgtgttcggccattatggggaccggctcggccgcaagcggatgctggtgctgaccgtgatgctgatggggctgtcgacggtcgcgatcggcctgctgccggcgttctcgacgatcggctggtgggcacccgtgctgctggtgctgatgcgcgcgatccagggtttcgcggtcggtggcgaatggggcggcgcggcgctgatggccgtcgaaagcgcgccgaagcagaaaaaggcgttttacagcagcggcgtgcaggtcggctacggtgtcggcctcgtgctggccacgggcatcgtgtcgatcctgagccacacgctcggcgaggccgcattcaagtcgtggggctggcgcctgccgttcgtgttcagcatcgtgctcgtgctgatcgggctgtgggtgcgcaagaacatggacgaatcgcaggagttcgtcgagaaagtcgaacacggcaaccgcaaactgcgcctgccggtactggaggcgctcacgcgccatccgaaggcattcctgctgatcatcgcgttgcgcctcgccgaactgttcacgatgtatatcgttaccgcgttcgcgctcagctattcgacgaccaacctcggcatgtcgcgcgacctgttcctgaacatcggcctgctggtgggcgccgtgagctgcgtgacgatcccgtgtttcgcgtggctggccgaccgctacggcctgcgccgcatctacctgatcggcgcgctgatcggcgtcgcgtcggcggtgccgttcttcatcgcgctggaggcacgatcgatcgcgtggatcgtgatcttctcgatcctgcttgccaatgcggcacacgacatggtcgtgagcgtccagcagccgctgttcaccgagttgttcggcgccgaataccgctacagcggcgcgggcgtcggctaccagttcgcgagcgtggtcggcggcgggttcacgccgttcattgcggtcggcctcgtcagcgtggccggcggttcgtggcacctcgtcgccggttatctcgcggtgggctgcctgatttcgctggtggtcgccgcgcggatgcgggcggcgcagtaa

SEQ ID NO: 38922 - protein, 435 aa, Burkholderia sp. 383
MTPTFDTLDAAASARIRSQARKAAIGSFVGAVVDWYDFLLYGIVAALVFNSEFFPKVSPTMGTLAAFATFGVGFLFRPLGGVVFGHYGDRLGRKRMLVLTVMLMGLSTVAIGLLPAFSTIGWWAPVLLVLMRAIQGFAVGGEWGGAALMAVESAPKQKKAFYSSGVQVGYGVGLVLATGIVSILSHTLGEAAFKSWGWRLPFVFSIVLVLIGLWVRKNMDESQEFVEKVEHGNRKLRLPVLEALTRHPKAFLLIIALRLAELFTMYIVTAFALSYSTTNLGMSRDLFLNIGLLVGAVSCVTIPCFAWLADRYGLRRIYLIGALIGVASAVPFFIALEARSIAWIVIFSILLANAAHDMVVSVQQPLFTELFGAEYRYSGAGVGYQFASVVGGGFTPFIAVGLVSVAGGSWHLVAGYLAVGCLISLVVAARMRAAQ

SEQ ID NO: 38923 - DNA, 1320 bp, Burkholderia xenovorans LB400
  CDS (1)..(1320): transl_table=11
atgagcactaccctcccggcggccgcgctggccgacaaccgcaacgcgcgcagccgggcccgcaaagcggcgctcggcagcttcatcggcgccgtggtcgactggtacgacttcctgctgtatggcatcgtcgccgcgctcgttttcaacgccgagttcttccccaaggtcagcccggcaatggggacgctcgccgcgttcgcgactttcggggtgggttttctgttccgtccgctcggcggcttcgtgttcggacacttcggcgaccggctcggacgcaagcgcatgctcgtgctcacggtcatgatgatgggcctctccaccgccgcgatcggcctgctgccgtcgttcgccaccatcggctggctcgcgccggtgctgctcgtgacattgcgcgcaattcagggcttcgcggtaggcggcgaatggggcggcgcggcgctgatggcagtggaaagcgcacctgagaagaagaaagcgttctacagcagcggcgtgcaggtcggctacggcgtgggcctcgtactctcgaccggcctgatcgcgctcatcagccgctcaatggataacgcctcgttcctgagttggggctggcgcctgcccttcctgttcagcgtggtgctggtgctgatcgcgctgtggatccgctcgagcatggaagagtcgaaggagttcgtcgagaaagtcggcgagcacggtgaacacagcgtgcgcctgccaattgtcgaagcgctgttgcggcatccgaaggctttcctgctgatcatcgcgctgcgacttgccgagttgttcacgatgtacatcgtgaccgccttcgccttgaactactccacggcgaatctgcacatgccgcgcgaattcttcctcaccatcggtctgctggtcggcgcgctcagttgcgtgacgatcccgtgcttcgcggcgctggcggaccgcttcggccggcgccgcgtgtatatcgtcggcgcgctggtcggcatgctgagcgcggtgcccttcttcctcgcactggaagcgcgctcgacggtatggatcgtggtctttgccgtcatgctcgccaacatcgcgcacgacatggtggtgagcgtgcagcagcctatgttcacggaactgttcggcacggagtaccgctacagcggagcgggtgtcggctatcaggtggcgagcgtggttggcggcggcttcacgccgttcattgcggtcgcgctggtcaattttgccggcggctcgtggcatccggtggccgcttatctggccgttggctgtctgatctcggtgctcgtggcggccagaatgaagaccgggcgcaccatcgcctga

SEQ ID NO: 38924 - protein, 439 aa, Burkholderia xenovorans LB400
MSTTLPAAALADNRNARSRARKAALGSFIGAVVDWYDFLLYGIVAALVFNAEFFPKVSPAMGTLAAFATFGVGFLFRPLGGFVFGHFGDRLGRKRMLVLTVMMMGLSTAAIGLLPSFATIGWLAPVLLVTLRAIQGFAVGGEWGGAALMAVESAPEKKKAFYSSGVQVGYGVGLVLSTGLIALISRSMDNASFLSWGWRLPFLFSVVLVLIALWIRSSMEESKEFVEKVGEHGEHSVRLPIVEALLRHPKAFLLIIALRLAELFTMYIVTAFALNYSTANLHMPREFFLTIGLLVGALSCVTIPCFAALADRFGRRRVYIVGALVGMLSAVPFFLALEARSTVWIVVFAVMLANIAHDMVVSVQQPMFTELFGTEYRYSGAGVGYQVASVVGGGFTPFIAVALVNFAGGSWHPVAAYLAVGCLISVLVAARMKTGRTIA

SEQ ID NO: 38925 - DNA, 1299 bp, Mycobacterium sp. MCS
  CDS (1)..(1299): transl_table=11
atggcagcgaccagtgccaccgccaccgtcggcacgtcgccgctgcgggtcgcgtcggccagtttcatcggaacgaccgtcgagtactacgacttcctgatctacggcaccgcggccgcgctggtgttccccagactgttctttcccgacgtgtcgccggccaccggactcctgttgtccttcgcgacgttcggggtcggcttcgtcgcccgcccgttgggcggcatcgtcttcggccactacggcgaccgggtgggacgcaagcggatgctggtctactcgctgctcatcatgggcaccgcgacggtgctcatgggtgccctgcccacctacgcgcagatcggtgtcgcggcgccgatcctgttgacgctgttgcggttggcacagggcttcgccgtcggcggtgagtggggcggcgccaccctgatggccgtcgaacacgccacaccggaccgcaaggggctgtacggggcgttcccgcagatgggcgcccccgccggtacggccaccgcgacgttggcgttctacgccgtctcgctgctgcccgacgagcagttcctgtcctggggttggcggatcccgttcctcgccagcgccgtgttgatcgtcatcggcctggtcatcaggctctcgctggcggagagtcccgaattcgcggcggtgcaggcccgtgccgcggtcctgcggttgccgatcgccgtggcgttcagaagacactggcggcagatcctgctcgtcgccggggcgtatctgtcgcagggggtgttcgcctacatctgcgtggcgtacctggtgtcctacgccaccaccgtggccgggatcgaccgtgcccaggcacttctcggtgtctgtgtggccgccgtggtcgcggtcgtgatgtatccggtgttcggccgggtgtccgacgccgtcggccgcaaaccggtcttcctggccggcgtgatcgcgatgggcatgtccgtgctgccggtcttcgcgctgatcaacaccggtaggccggggctgttcctgctcgcgctcgtgctggtgttcgggttggcgatggcaccggcggccggcgtgaccggatcgctgttcagcctggcattcgacgccgacgtgcgctacagcggtgtctcgctgggctatacgctctcggcggtggtcggatcggcattcgcaccgaccatcgccacggccctgtacgcggcgaccgaatccagcgattcgatcgccgcctacatgatcgcggtgtcggtgatctcggcggtgtcggtcagcctgatgcctgggccctggcggcagccccgggtcaggtga

SEQ ID NO: 38926 - protein, 432 aa, Mycobacterium sp. MCS
MAATSATATVGTSPLRVASASFIGTTVEYYDFLIYGTAAALVFPRLFFPDVSPATGLLLSFATFGVGFVARPLGGIVFGHYGDRVGRKRMLVYSLLIMGTATVLMGALPTYAQIGVAAPILLTLLRLAQGFAVGGEWGGATLMAVEHATPDRKGLYGAFPQMGAPAGTATATLAFYAVSLLPDEQFLSWGWRIPFLASAVLIVIGLVIRLSLAESPEFAAVQARAAVLRLPIAVAFRRHWRQILLVAGAYLSQGVFAYICVAYLVSYATTVAGIDRAQALLGVCVAAVVAVVMYPVFGRVSDAVGRKPVFLAGVIAMGMSVLPVFALINTGRPGLFLLALVLVFGLAMAPAAGVTGSLFSLAFDADVRYSGVSLGYTLSAVVGSAFAPTIATALYAATESSDSIAAYMIAVSVISAVSVSLMPGPWRQPRVR

SEQ ID NO: 38927 - DNA, 1386 bp, Rubrobacter xylanophilus DSM 9941
  CDS (1)..(1386): transl_table=11
atgttcggctcgtccgtgcggagcaagcgagagaaggaggagatcgtggagaggctaggaggagagcgggaggggcagacctcctctatccgccaggtggcgctggcgagctttataggcaccgccatagagtggtatgacttcttcctgtacgggacggcggcggcgctcgtcttcggagagctcttcttccccgagttctcgccgctggccgggacgctcgcggcgttcgccacctacgccgtcggctttgtggcgcggccgctcggcgggatcgtcttcggccactacggcgacaggatcgggcgcaaggccatgctggtgctctcgctgctcatcatgggggtggcgaccttcctcatcgggctgctgccgacctacgcccaggtcggggtgctcgcgcccgtcctgctcgtcatcctgcgctttctgcagggcatcggcatcggcggcgagtggggcggggcggtcttgatggccgtcgagcactcgccgcggggccggcgcggcttctacggcagctggccgcagatgggggtgcctgcggggcttctcggcggcaacctggtctacctcgccgccacctccctcatccccgccgactgggcctggaggatacccttcctcttctccatcgtgctcgtcgccgtcgggctcttcatccggctgaagctgctcgagaccccggccttccagcaggtcaaggagaccggcaccgaggcccggatgcccatcctcgacgtcatccggacctaccccaagaacgtgctgctcgccatgggcatgcgcatcgccgagaacggcaccttctacgtcctgaccgtcttcgtgctcagctacgtcgccggggagctcgggctcgaccagagcgtcgggcaggtgggggtcatcatcgccgccgccatcgggctgctgaccatcccgctcttcggggcgctctccgaccgcatcggccggcgcccggtgtacatgttcggggcggccttctcgctggtgttcgccttccccttcttctggctgctcaacaccgggatagagcccctgatctggctcgccatcatcctcggggtcaacttgggccacgacgccatgtacgggccgcaggcctccttcttcgccgagctgttcggcacccgggtccgctactccggggcctcgctcggctaccagctggcctccgtgatcgcgggcggcctctccccgttcatagccacggcgctgctcgccgccttcggctacggggcggtcgccctctacaccgcggcgatggccctgatcaccctgatctccgtcgtgctcgccaccgagaccttccgggaggacatcgccgcaacccaggccgaggagcagcgcctgatctccggcgcccagccccgggtacagtaa

SEQ ID NO: 38928 - protein, 461 aa, Rubrobacter xylanophilus DSM 9941
MFGSSVRSKREKEEIVERLGGEREGQTSSIRQVALASFIGTAIEWYDFFLYGTAAALVFGELFFPEFSPLAGTLAAFATYAVGFVARPLGGIVFGHYGDRIGRKAMLVLSLLIMGVATFLIGLLPTYAQVGVLAPVLLVILRFLQGIGIGGEWGGAVLMAVEHSPRGRRGFYGSWPQMGVPAGLLGGNLVYLAATSLIPADWAWRIPFLFSIVLVAVGLFIRLKLLETPAFQQVKETGTEARMPILDVIRTYPKNVLLAMGMRIAENGTFYVLTVFVLSYVAGELGLDQSVGQVGVIIAAAIGLLTIPLFGALSDRIGRRPVYMFGAAFSLVFAFPFFWLLNTGIEPLIWLAIILGVNLGHDAMYGPQASFFAELFGTRVRYSGASLGYQLASVIAGGLSPFIATALLAAFGYGAVALYTAAMALITLISVVLATETFREDIAATQAEEQRLISGAQPRVQ

SEQ ID NO: 38929 - DNA, 1359 bp, Rhodococcus sp. RHA1
  CDS (1)..(1359): transl_table=11
atgagcgatcacgccttcaccccggcagccgagaagcaggcgcgaagagcagcgctgagcagtttcgtcggcgcggtcatcgactggtacgacttcctgctctacgggctggtcgcagcactggtcttcaactcggagttcttcccgaacgtcagcccggcgatcggcacgctcgccgcgttcgcgacgttcggcgtcggattcctgttccggccgctcggcggcgtcgtgttcggccactacggagaccgcatcggacgcaagcggatgctgatcctcaccgtgctgatcatgggcacgagcaccgccctgatcgggctgctgccgtcgttcgggtcgatcggctggtgggcgccggtcctgctcgtcaccctccgcgccgtccagggcttcgccgtcggcggcgagtggggtggagccgcgctgatggccgtcgagagcgcgccgccgaagaagaaggcgttctacagcagcggagtgcaggtcggctactcggtggggctcatcctcgccaccggattcgtcatgctcatgagcaacctgaccaccgaggacgcgttcagccagtggggttggcgggttccgttcgtcgccagcgtcgtcctggtcggtatcggtctgtggatccgcgccggcgtgcaggagagccccgagttcgtcgaaaaggtcgagaaggtcgaggaggagcagaccgcccaggacaagaagcggattccgctcgtcgaggcactgcgcaaccacccgaaggcattcctccagatcatcggtctgcgtttcgcagaactgttctccatgtacatcgtgaccacgttcgcgttgagctactccacccaggaactggggatggagcgcaacttcatgctcaacgtcggcctgctcgtcggtgcggtgggtatcggcaccatcccgctgttcgcgtggctgtccgacaagcacggccggcggcgcgtctacatcctcggcgccctgatcggcgcggtgtgcgcgttcccgttcttcatcttcctcgagaacgggtcgatgatcggcaccgtcatcctcgccgtgctcctcgtcaacatctcgcacgacatggtcgtcagcgtgcagcagccgctgttcaccgaaatgttcggggccgaataccgctacagcggcgcgggtgtcgggtaccaggtggccagcgcgatcggcggcggcttcaccccgttcatcgcggccgccctcgtcaccgccagcggcgggtcctggcacctcgtggccgtgtacctcgccggcggctgcatcgtcagcgccctgatcgcgtggcgactgcagcccgatgccagtgccgacacgacggacgccgccacacccgcgaagctcgagaacgcgcactga

SEQ ID NO: 38930 - protein, 452 aa, Rhodococcus sp. RHA1
MSDHAFTPAAEKQARRAALSSFVGAVIDWYDFLLYGLVAALVFNSEFFPNVSPAIGTLAAFATFGVGFLFRPLGGVVFGHYGDRIGRKRMLILTVLIMGTSTALIGLLPSFGSIGWWAPVLLVTLRAVQGFAVGGEWGGAALMAVESAPPKKKAFYSSGVQVGYSVGLILATGFVMLMSNLTTEDAFSQWGWRVPFVASVVLVGIGLWIRAGVQESPEFVEKVEKVEEEQTAQDKKRIPLVEALRNHPKAFLQIIGLRFAELFSMYIVTTFALSYSTQELGMERNFMLNVGLLVGAVGIGTIPLFAWLSDKHGRRRVYILGALIGAVCAFPFFIFLENGSMIGTVILAVLLVNISHDMVVSVQQPLFTEMFGAEYRYSGAGVGYQVASAIGGGFTPFIAAALVTASGGSWHLVAVYLAGGCIVSALIAWRLQPDASADTTDAATPAKLENAH

SEQ ID NO: 38931 - DNA, 1368 bp, Burkholderia vietnamiensis G4
  CDS (1)..(1368): transl_table=11
atgcagcatcggacgcggcgccgccgcgaatcacgatgcgcgatgccaggagacaccgtcgtgaccccaactttcgacaccctcgacaccgctgccggcgagcgcgcccgcagccaggcccgcaaggcggcgatcggcagctttgtcggcgccgtcgtcgactggtacgacttcctgctgtatggaatcgtcgccgcgctggtcttcaattccgcgttcttcccgaaggtcagcccgacgatgggcacgctcgcggcgttcgcgaccttcggcgtcggcttcctgttccgcccgctcggcggcgtcgtgttcggccattacggcgaccggctcggccgcaagcggatgctggtgctcaccgtgatgctgatggggctgtcgaccgtcgcgatcggcctgctgcccggcttcgcgacgatcggctggtgggcgccggtgctgctcgtgacgatgcgcgcgatccagggcttcgcggtcggcggcgaatggggcggcgcggcgctgatggccgtcgaaagcgcgccgaagcagaagaaggcgttctacagcagcggcgtgcaggtcggctacggcgtcgggctggtgctggccacgggcatcgtgtcgatcctgagccacacgctcggcgacgccgcgttcaagtcgtggggctggcggctgccgttcctgttcagcatcgtgctggttctgatcggactgtgggtgcgcaagagcatggacgagtcgcaggagttcgtcgagaaggtcgagcacggcaaccgcaagctgcgcctgccggtgctcgaagcgctgacgcgccatccgaaggcgttcctgctgatcgtcgcgctgcggctggccgagctgttcacgatgtacatcgtcaccgcgttcgcgctcagctattcgacgtcgaacctcggcatgtcgcgcgacctgttcctgagcatcggcctgctggtcggcacggtgagctgcgtgacgatcccgagcttcgcgtggctcgccgatcgcttcggcctgcgccgcatctatctgaccggcgcgctgatcgggctcgcatcggcggtgccgttcttcctcgcgctggagtcgcgctcggtcgcgtggatcgtcgtgttctcgatcctgctcgccaatgccgcgcacgacatggtggtcagcgtccagcagccgctcttcaccgagttgttcggcgccgagtaccgttacagcggcgcgggcgtcggctatcagttcgcgagcgtcgtcggcggcggcttcacgccgttcatcgcggtggcgctggtcagcttcgcgggcggcgcgtggcatctcgtcgccggctatctcgccgtgggttgcctgatctcgctggtcgtcgccgcgcggatgcgggtgacccaatga

SEQ ID NO: 38932 - protein, 455 aa, Burkholderia vietnamiensis G4
MQHRTRRRRESRCAMPGDTVVTPTFDTLDTAAGERARSQARKAAIGSFVGAVVDWYDFLLYGIVAALVFNSAFFPKVSPTMGTLAAFATFGVGFLFRPLGGVVFGHYGDRLGRKRMLVLTVMLMGLSTVAIGLLPGFATIGWWAPVLLVTMRAIQGFAVGGEWGGAALMAVESAPKQKKAFYSSGVQVGYGVGLVLATGIVSILSHTLGDAAFKSWGWRLPFLFSIVLVLIGLWVRKSMDESQEFVEKVEHGNRKLRLPVLEALTRHPKAFLLIVALRLAELFTMYIVTAFALSYSTSNLGMSRDLFLSIGLLVGTVSCVTIPSFAWLADRFGLRRIYLTGALIGLASAVPFFLALESRSVAWIVVFSILLANAAHDMVVSVQQPLFTELFGAEYRYSGAGVGYQFASVVGGGFTPFIAVALVSFAGGAWHLVAGYLAVGCLISLVVAARMRVTQ

SEQ ID NO: 38933 - DNA, 1311 bp, marine gamma proteobacterium HTCC2080
  CDS (1)..(1311): transl_table=11
atggccgccgagcatgacgacagaaaaaatatgcgtaaagtcgctctcacatcactcgccgggacaagtattgagtggtacgatttttttatttacggcactgccgccgccatcgtttttccaaaagcatttttcccgcaggaccttcctcccatggttctgcttattatttccttcagtacatttgccgttggatttgttgccagaccggtgggcggcattatctttggccatttcggtgatagggtgggtcgaaagcacaccttagtcgctgcccttatgatgatgggattggcaacaacgcttatcggattgcttcccacctatggaagcatcggtattgcggcaccgttgctactggttttactgcgctttattcagggccttgccattggtggtcaatggggcggtgcaatgttactggtcaccgaaagtgcccctgccaataaacgaggctggtatggcgcttatgcgcaggccggtgctcccgttggggtcatcctcgctaacctcgcgtttatcggtgtcagcatgagcatgagtgacgaggcctttatgagctggggctggcggctgccctttctcgccagtatcattttgatcggcgtatcactctttgtgcagctacgccttgaggataccgaagcctttaaagctctaaaggccacgcaagactcgcaaagtcataccgaggtggttgttcgatcaccagttttacaggccctgaaaaaatacccccgaacaatcatgctcgcagctggtgcatttttatcggtacaagtgaccttctatattttgatcgctttcaccgttgcctacgggctcaactcacccaccgtcaatctgtcccgagagtccatgctcgtagcagttttaatcgcttctgcggtgatggtgccaacgcagttttatttctcagggctctctgatcgattgggacgaaaaagggtttatcgttggggcgctatattaacggggctatggagtttcgctttattccctcttatcgatacaggctctctgcccctgattgtattaggcatcactttggggctggcttttctcggcatgcagtatggccctcaagccgcttactttaccgagctattttctacagaggttcggtattccggtgcatccttgggttatcaaataggagccattgtcggtggtgcgctcgcccccaccattgcggttttgctctggcacgagctggggattatcttcgtttcgatctacatattgttggcagctttgctgacgctgtggtcgctctctttattggaagagactggcggtcaacccctttaa

SEQ ID NO: 38934 - protein, 436 aa, marine gamma proteobacterium HTCC2080
MAAEHDDRKNMRKVALTSLAGTSIEWYDFFIYGTAAAIVFPKAFFPQDLPPMVLLIISFSTFAVGFVARPVGGIIFGHFGDRVGRKHTLVAALMMMGLATTLIGLLPTYGSIGIAAPLLLVLLRFIQGLAIGGQWGGAMLLVTESAPANKRGWYGAYAQAGAPVGVILANLAFIGVSMSMSDEAFMSWGWRLPFLASIILIGVSLFVQLRLEDTEAFKALKATQDSQSHTEVVVRSPVLQALKKYPRTIMLAAGAFLSVQVTFYILIAFTVAYGLNSPTVNLSRESMLVAVLIASAVMVPTQFYFSGLSDRLGRKRVYRWGAILTGLWSFALFPLIDTGSLPLIVLGITLGLAFLGMQYGPQAAYFTELFSTEVRYSGASLGYQIGAIVGGALAPTIAVLLWHELGIIFVSIYILLAALLTLWSLSLLEETGGQPL

SEQ ID NO: 38935 - DNA, 1341 bp, Corynebacterium glutamicum
  CDS (1)..(1341): transl_table=11
atggcatctttccttggctccacacttgagtactacgatttcttcatttacggcaccgcagcagcactcgtcttccctaagctcttcttcccggatggaaaccctgcgatcgctactatcgcggcttttgcaacattcggtgttgcttatatcgctcgtcctttaggaggccttgtcatgggacacttcggtgaccgcttgggccgaaagaatgtcctccttgtcaccttgctcatcatgggtatcgcttcactatccatcggtttgctacccacatattcgcagatcggtatttgggctacaatcctcctcgttgtcgcccgtctagctcaaggtttctcagcgggtgccgaagcagccggcgcatcgtctcttaccttggaacactcaccggaaggtcgacgtggtttcttcaattccttcgtgatgaccggttacgcatccggaatggtgttgtcgaccttggttttcatccctgttgcagcgctccctgaagcacaaatgttgagttggggctggcgaatccccttcctgctttcagtcgtagtcctcatcattgccttctgggtccgaacgagactcgatgaaactccggtctttgaagatgaagttgctgaagcaggggaagagaagaaactccctgctggtcgagttttgaagtaccagggtggcgacgttttgcgagtgctgctgatgtccatcttctcagtcatgcagaccatcttcacggttttcggattgtcctacgcaaccagccacggtggcttcgaacgttcctccatccttgcagtaaacgccatcgccatcggtctatctatgattatgatgccgctagctggacgactctctgaccgcatcggccgcaagccactcatgctgactgccatgatcggctgtggattcaccatcttcgtctacttcttggcccttggtactggaaacatcctgctcgtcttcggcgcaagcttcctgttcatgaccatcctttactccggattcaatggcgtctggaccagcttcttcgctgaactcttcgcagcgccagtgcgctacaccggcatggccatgggcaatcagctcggcctggtcgtcgcaggtttcggccctatgatcggcggcatgttgcttaacgacggcacctacggctggattccagtcgccgtattcggtgcaggttgctctttgctggcaatcggcgcagtgctctccacacgtgaaaccgcattcaccgatatcaaactgctcggtgagccttatttgaaggcaaccggcgcatggccaacacagcaagcagctcagcctgcaatgtcccagaccaaagaaccagcacccagcttgtaa

SEQ ID NO: 38936 - protein, 446 aa, Corynebacterium glutamicum
MASFLGSTLEYYDFFIYGTAAALVFPKLFFPDGNPAIATIAAFATFGVAYIARPLGGLVMGHFGDRLGRKNVLLVTLLIMGIASLSIGLLPTYSQIGIWATILLVVARLAQGFSAGAEAAGASSLTLEHSPEGRRGFFNSFVMTGYASGMVLSTLVFIPVAALPEAQMLSWGWRIPFLLSVVVLIIAFWVRTRLDETPVFEDEVAEAGEEKKLPAGRVLKYQGGDVLRVLLMSIFSVMQTIFTVFGLSYATSHGGFERSSILAVNAIAIGLSMIMMPLAGRLSDRIGRKPLMLTAMIGCGFTIFVYFLALGTGNILLVFGASFLFMTILYSGFNGVWTSFFAELFAAPVRYTGMAMGNQLGLVVAGFGPMIGGMLLNDGTYGWIPVAVFGAGCSLLAIGAVLSTRETAFTDIKLLGEPYLKATGAWPTQQAAQPAMSQTKEPAPSL

SEQ ID NO: 38937 - DNA, 1317 bp, Escherichia fergusonii
  CDS (1)..(1317): transl_table=11
atggactccactctcacctccacacatcccaacgaggagacaccttcgctcaatcgtgcccgccgcgcagccctcggcagcttcgcgggtgccgtcgtcgactggtatgattttctgctttacggcattactgccgcgctggtgtttaaccgcgaattcttcccccagattagcccggcaatgggtacgctcgccgcgtttgctacctttggcgtcggcttcctgtttcgtccactgggcggagtgatcttcggccacttcggtgaccgtctcggtcgcaaacgcatgctgatgctcaccgtctggatgatgggcatcgccaccgcgctgattggcattctcccttcattttccaccattggctggtgggcgccggtgctgctggttacgctgcgcgccattcagggcttcgcggtaggcggcgaatggggtggcgcggcgctgttatccgttgagagtgccccgaagaataagaaagcgttttacagcagcggcgtgcaggtgggctatggcgtaggtctgctgctctccaccgggctggtgtcgctgatgagccacttcaccaccgatgaacaattcctgagctggggctggcgcattccgtttatcttcagcatcgtgctggttgtcgctgccctgtggatccgcaacggcatggaggaatctgctgagttcgaacaacagcggcaagaaccgcccgttgccagaaaacgactgccggtgatggaagcgcttgtccggcatcctggcgcttttctgaaaattattgccctgcgcctgtgtgaactgctgacgatgtatatcgtgaccgcatttgccctcaattattcaacgcaaaatctcggtctgccccgcgagctgttcctgaacattggcctgctggtcggcgggatcagctgcctgactatcccctgcttcgcctgcctggcggacaggtttggtcgccgtcgcgtctatatcaccggggcgctgattggcaccctcagcgcctggccgttcttcatggcgctggaggcacagtcgatcttctggattgtcttctttgccatcatgctcgctaacatcgcccacgatatggtggtctgcgtgcagcagcccatgtttaccgaactgttcggggcgagctatcgctacagcggcgcgggcgtaggctatcaggtggcaagcgtggtcggcggcgggtttacgccatttattgccgccgcgctggtgaccttctccggcggcaactggcacagtgtggcactttatctgctggccggttgcctgctgtcagcggcgacggcgctcttgatgaaagagacgagccacacctga

SEQ ID NO: 38938 - protein, 438 aa, Escherichia fergusonii
MDSTLTSTHPNEETPSLNRARRAALGSFAGAVVDWYDFLLYGITAALVFNREFFPQISPAMGTLAAFATFGVGFLFRPLGGVIFGHFGDRLGRKRMLMLTVWMMGIATALIGILPSFSTIGWWAPVLLVTLRAIQGFAVGGEWGGAALLSVESAPKNKKAFYSSGVQVGYGVGLLLSTGLVSLMSHFTTDEQFLSWGWRIPFIFSIVLVVAALWIRNGMEESAEFEQQRQEPPVARKRLPVMEALVRHPGAFLKIIALRLCELLTMYIVTAFALNYSTQNLGLPRELFLNIGLLVGGISCLTIPCFACLADRFGRRRVYITGALIGTLSAWPFFMALEAQSIFWIVFFAIMLANIAHDMVVCVQQPMFTELFGASYRYSGAGVGYQVASVVGGGFTPFIAAALVTFSGGNWHSVALYLLAGCLLSAATALLMKETSHT

SEQ ID NO: 38939 - DNA, 22 bp, Artificial sequence
  primer
atggactccacgctcatctcca

SEQ ID NO: 38940 - DNA, 25 bp, Artificial sequence
  primer
ttaagcgcgttgactgtctttcatc

SEQ ID NO: 38941 - protein, 405 aa, Artificial sequence
  consensus sequence
  Variant (2)..(3): Xaa in position 2 to 3 is any amino acid
  Variant (5)..(8): Xaa in position 5 to 8 is any amino acid
  Variant (13)..(14): Xaa in position 13 to 14 is any amino acid
  Variant (17)..(18): Xaa in position 17 to 18 is any amino acid
  Variant (24)..(26): Xaa in position 24 to 26 is any amino acid
  Variant (30)..(32): Xaa in position 30 to 32 is any amino acid
  Variant (33)..(33): Xaa in position 33 is any or no amino acid
  Variant (35)..(36): Xaa in position 35 to 36 is any amino acid
  Variant (40)..(41): Xaa in position 40 to 41 is any amino acid
  Variant (43)..(43): Xaa in position 43 is any amino acid
  Variant (46)..(46): Xaa in position 46 is any amino acid
  Variant (50)..(51): Xaa in position 50 to 51 is any amino acid
  Variant (57)..(58): Xaa in position 57 to 58 is any amino acid
  Variant (62)..(62): Xaa in position 62 is any amino acid
  Variant (65)..(66): Xaa in position 65 to 66 is any amino acid
  Variant (70)..(71): Xaa in position 70 to 71 is any amino acid
  Variant (73)..(78): Xaa in position 73 to 78 is any amino acid
  Variant (81)..(82): Xaa in position 81 to 82 is any amino acid
  Variant (84)..(85): Xaa in position 84 to 85 is any amino acid
  Variant (88)..(88): Xaa in position 88 is any amino acid
  Variant (91)..(94): Xaa in position 91 to 94 is any amino acid
  Variant (97)..(98): Xaa in position 97 to 98 is any amino acid
  Variant (101)..(101): Xaa in position 101 is any amino acid
  Variant (104)..(106): Xaa in position 104 to 106 is any amino acid
  Variant (108)..(109): Xaa in position 108 to 109 is any amino acid
  Variant (113)..(114): Xaa in position 113 to 114 is any amino acid
  Variant (122)..(122): Xaa in position 122 is any amino acid
  Variant (124)..(126): Xaa in position 124 to 126 is any amino acid
  Variant (128)..(128): Xaa in position 128 is any amino acid
  Variant (131)..(135): Xaa in position 131 to 135 is any amino acid
  Variant (137)..(138): Xaa in position 137 to 138 is any amino acid
  Variant (140)..(141): Xaa in position 140 to 141 is any amino acid
  Variant (143)..(143): Xaa in position 143 is any amino acid
  Variant (145)..(147): Xaa in position 145 to 147 is any amino acid
  Variant (149)..(150): Xaa in position 149 to 150 is any amino acid
  Variant (152)..(152): Xaa in position 152 is any amino acid
  Variant (154)..(164): Xaa in position 154 to 164 is any amino acid
  Variant (165)..(167): Xaa in position 165 to 167 is any or no amino acid
  Variant (169)..(169): Xaa in position 169 is any amino acid
  Variant (175)..(175): Xaa in position 175 is any amino acid
  Variant (178)..(179): Xaa in position 178 to 179 is any amino acid
  Variant (181)..(182): Xaa in position 181 to 182 is any amino acid
  Variant (183)..(184): Xaa in position 183 to 184 is any or no amino acid
  Variant (187)..(189): Xaa in position 187 to 189 is any amino acid
  Variant (191)..(192): Xaa in position 191 to 192 is any amino acid
  Variant (194)..(197): Xaa in position 194 to 197 is any amino acid
  Variant (199)..(201): Xaa in position 199 to 201 is any amino acid
  Variant (203)..(214): Xaa in position 203 to 214 is any amino acid
  Variant (215)..(223): Xaa in position 215 to 223 is any or no amino acid
  Variant (225)..(236): Xaa in position 225 to 236 is any amino acid
  Variant (238)..(242): Xaa in position 238 to 242 is any amino acid
  Variant (244)..(249): Xaa in position 244 to 249 is any amino acid
  Variant (250)..(250): Xaa in position 250 is any or no amino acid
  Variant (252)..(255): Xaa in position 252 to 255 is any amino acid
  Variant (257)..(257): Xaa in position 257 is any amino acid
  Variant (259)..(259): Xaa in position 259 is any amino acid
  Variant (261)..(261): Xaa in position 261 is any amino acid
  Variant (262)..(263): Xaa in position 262 to 263 is any or no amino acid
  Variant (265)..(274): Xaa in position 265 to 274 is any amino acid
  Variant (276)..(289): Xaa in position 276 to 289 is any amino acid
  Variant (291)..(296): Xaa in position 291 to 296 is any amino acid
  Variant (299)..(299): Xaa in position 299 is any amino acid
  Variant (302)..(304): Xaa in position 302 to 304 is any amino acid
  Variant (306)..(307): Xaa in position 306 to 307 is any amino acid
  Variant (309)..(317): Xaa in position 309 to 317 is any amino acid
  Variant (319)..(319): Xaa in position 319 is any amino acid
  Variant (321)..(352): Xaa in position 321 to 352 is any amino acid
  Variant (353)..(355): Xaa in position 353 to 355 is any or no amino acid
  Variant (357)..(357): Xaa in position 357 is any amino acid
  Variant (359)..(359): Xaa in position 359 is any amino acid
  Variant (361)..(364): Xaa in position 361 to 364 is any amino acid
  Variant (369)..(371): Xaa in position 369 to 371 is any amino acid
  Variant (375)..(380): Xaa in position 375 to 380 is any amino acid
  Variant (382)..(383): Xaa in position 382 to 383 is any amino acid
  Variant (384)..(384): Xaa in position 384 is any or no amino acid
  Variant (386)..(386): Xaa in position 386 is any amino acid
  Variant (389)..(390): Xaa in position 389 to 390 is any amino acid
  Variant (392)..(402): Xaa in position 392 to 402 is any amino acid
  Variant (403)..(404): Xaa in position 403 to 404 is any or no amino acid
SXXGXXXXWYDFXXYGXXAALVFXXXFFPXXXXPXXGTLXXFXTFXVGFXXRPLGGXXFGHXGDXXGRKXXLXXXXXXMGXXTXXIGXLPXXXXIGXXAPXLLXXXRXXQGFXXGGEWGGAXLXXXEXAPXXXXXFXXSXXQXGXXXGXXLXTXXXXXXXXXXXXXXFXSWGWRXPFXXSXXXXLVXXXLXXRXXXXEXXXFXXXXXXXXXXXXXXXXXXXXXPXXXXXXXXXXXXLXXXXXRXXXXXXXYXXXXFXLXYXXXTXXXXXXXXXXLXXXXXXXXXXXXXXPXXXXXXDRXGRXXXYXXGXXXXXXXXXPXFXXXXXXXXXXXXXXXXXXXXXXXXXXXXXXXXXXXFXEXFXXXXRYSGXXXGYQXXXXXXGXXXPXIAXXLXXXXXXXXXXXXXY

SEQ ID NO: 38942 - protein, 31 aa, Artificial sequence
  protein pattern
  Variant (2)..(2): Xaa in position 2 is any amino acid
  Variant (3)..(4): Xaa in position 3 to 4 is any or no amino acid
  Variant (6)..(7): Xaa in position 6 to 7 is any or no amino acid
  Variant (9)..(9): Xaa in position 9 is Ala, Ile, Leu or Val
  Variant (10)..(10): Xaa in position 10 is any amino acid
  Variant (15)..(15): Xaa in position 15 is Ala, Gly or Ser
  Variant (16)..(16): Xaa in position 16 is any amino acid
  Variant (17)..(17): Xaa in position 17 is Ile, Leu or Val
  Variant (21)..(21): Xaa in position 21 is Phe or Tyr
  Variant (24)..(24): Xaa in position 24 is any amino acid
  Variant (25)..(25): Xaa in position 25 is Ile, Leu or Val
  Variant (29)..(30): Xaa in position 29 to 30 is any amino acid
TXXXGXXFXXRPLGXXXFGHXGDXXGRKXXL

SEQ ID NO: 38943 - protein, 60 aa, Artificial sequence
  protein pattern
  Variant (2)..(4): Xaa in position 2 to 4 is any amino acid
  Variant (6)..(6): Xaa in position 6 is any amino acid
  Variant (9)..(9): Xaa in position 9 is Ala, Gly, Asn, Ser or Thr
  Variant (10)..(10): Xaa in position 10 is Phe, His or Tyr
  Variant (11)..(11): Xaa in position 11 is Ala, Asp, Glu, Gly or Ser
  Variant (12)..(12): Xaa in position 12 is Ala, Gln, Ser or Thr
  Variant (13)..(13): Xaa in position 13 is Ile or Val
  Variant (15)..(16): Xaa in position 15 to 16 is any amino acid
  Variant (19)..(19): Xaa in position 19 is Ala, Ile, Leu or Val
  Variant (22)..(22): Xaa in position 22 is Cys, Thr or Val
  Variant (23)..(23): Xaa in position 23 is any amino acid
  Variant (24)..(24): Xaa in position 24 is Leu or Met
  Variant (26)..(26): Xaa in position 26 is any amino acid
  Variant (27)..(27): Xaa in position 27 is Ala, Gly, Ile, Leu or Val
  Variant (30)..(30): Xaa in position 30 is Phe, Ile or Leu
  Variant (31)..(31): Xaa in position 31 is any amino acid
  Variant (32)..(32): Xaa in position 32 is Ile, Leu or Val
  Variant (35)..(35): Xaa in position 35 is Glu or Gln
  Variant (40)..(40): Xaa in position 40 is any amino acid
  Variant (42)..(42): Xaa in position 42 is Leu or Met
  Variant (43)..(43): Xaa in position 43 is Ala, Ser or Val
  Variant (44)..(44): Xaa in position 44 is Ser, Thr or Val
  Variant (46)..(46): Xaa in position 46 is any amino acid
  Variant (47)..(47): Xaa in position 47 is Ala, Gly or Ser
  Variant (48)..(48): Xaa in position 48 is Ala, Asp, Pro or Thr
  Variant (49)..(51): Xaa in position 49 to 51 is any amino acid
  Variant (52)..(52): Xaa in position 52 is Lys or Arg
  Variant (53)..(53): Xaa in position 53 is Ala or Gly
  Variant (54)..(55): Xaa in position 54 to 55 is any amino acid
  Variant (56)..(56): Xaa in position 56 is Ala, Gly or Ser
  Variant (57)..(59): Xaa in position 57 to 59 is any amino acid
TXXXGXLPXXXXXGXXAPXLLXXXRXXQGXXXGGXWGGAXLXXXEXXXXXXXXXXXXXXQ

SEQ ID NO: 38944 - protein, 40 aa, Artificial sequence
  protein pattern
  Variant (2)..(2): Xaa in position 2 is any amino acid
  Variant (3)..(3): Xaa in position 3 is Ala, Ile or Val
  Variant (5)..(5): Xaa in position 5 is Ala or Thr
  Variant (6)..(6): Xaa in position 6 is any amino acid
  Variant (7)..(7): Xaa in position 7 is Ile, Met or Val
  Variant (8)..(8): Xaa in position 8 is Asp or Glu
  Variant (13)..(13): Xaa in position 13 is Phe or Leu
  Variant (14)..(14): Xaa in position 14 is Ile or Leu
  Variant (15)..(15): Xaa in position 15 is Phe or Tyr
  Variant (17)..(17): Xaa in position 17 is any amino acid
  Variant (18)..(18): Xaa in position 18 is Ala, Thr or Val
  Variant (20)..(20): Xaa in position 20 is Ala or Gly
  Variant (21)..(21): Xaa in position 21 is Ile or Leu
  Variant (22)..(22): Xaa in position 22 is Ile or Val
  Variant (24)..(26): Xaa in position 24 to 26 is any amino acid
  Variant (27)..(27): Xaa in position 27 is any or no amino acid
  Variant (29)..(29): Xaa in position 29 is any or no amino acid
  Variant (31)..(33): Xaa in position 31 to 33 is any amino acid
  Variant (35)..(37): Xaa in position 35 to 37 is any amino acid
  Variant (38)..(38): Xaa in position 38 is any or no amino acid
  Variant (40)..(40): Xaa in position 40 is Ala, Ile or Leu
SXXGXXXXWYDFXXXGXXAXXXFXXXXFXPXXXPXXXXLX

SEQ ID NO: 38945 - protein, 35 aa, Artificial sequence
  protein pattern
  Variant (2)..(6): Xaa in position 2 to 6 is any amino acid
  Variant (7)..(11): Xaa in position 7 to 11 is any or no amino acid
  Variant (13)..(13): Xaa in position 13 is Leu, Met or Val
  Variant (15)..(15): Xaa in position 15 is Ala, Asp, Gly, Pro or Ser
  Variant (16)..(16): Xaa in position 16 is Ala, Pro or Thr
  Variant (17)..(18): Xaa in position 17 to 18 is any amino acid
  Variant (21)..(21): Xaa in position 21 is Ser or Thr
  Variant (23)..(23): Xaa in position 23 is Ala, Ile or Val
  Variant (24)..(24): Xaa in position 24 is Gly or Ser
  Variant (25)..(25): Xaa in position 25 is any amino acid
  Variant (26)..(26): Xaa in position 26 is Ala, Gly or Val
  Variant (27)..(27): Xaa in position 27 is any amino acid
  Variant (28)..(28): Xaa in position 28 is Asn or Gln
  Variant (29)..(29): Xaa in position 29 is Phe, Ile, Leu or Val
  Variant (30)..(30): Xaa in position 30 is Ala or Gly
  Variant (31)..(31): Xaa in position 31 is Ala, Gly or Ser
  Variant (32)..(32): Xaa in position 32 is Ala, Ile or Val
  Variant (33)..(34): Xaa in position 33 to 34 is any amino acid
  Variant (35)..(35): Xaa in position 35 is Ala or Gly
MXXXXXXXXXXEXFXXXXRYXGXXXXXXXXXXXXX

SEQ ID NO: 38946 - protein, 16 aa, Artificial sequence
  protein pattern
  Variant (2)..(2): Xaa in position 2 is Ala or Gly
  Variant (5)..(5): Xaa in position 5 is Ile or Leu
  Variant (8)..(8): Xaa in position 8 is any or no amino acid
  Variant (10)..(10): Xaa in position 10 is any or no amino acid
  Variant (12)..(13): Xaa in position 12 to 13 is any amino acid
  Variant (14)..(14): Xaa in position 14 is any or no amino acid
  Variant (16)..(16): Xaa in position 16 is Ile or Val
WXWRXPFXLXSXXXLX

SEQ ID NO: 38947 - DNA, 1650 bp, Escherichia coli
  CDS (1)..(1650): transl_table=11
atgccccgatttatccatgatcgaattgtgacatttgtcatacaacgaataggttttgtacttactatggaatggattgccgatccgtctatctgggccgggttaatcacgctgattgtgatcgaactggtcctcggcattgataacctggtctttattgccatcctcgccgaaaaactaccgccgaagcagcgtgaccgcgcacgggttaccgggctgctgctggcaatgttaatgcgcctgttactgctggcgtcaatctcctggctggtcaccctgactcaaccgctgttcagcttccgctcgtttacctttagcgcccgcgacttaatcatgctgtttggtggtttcttcctgttgttcaaagccacgatggagctgaacgaacggctggaagggaaagacagcaataatcccacacaacgcaaaggtgcgaagttctggggcgtggtgacgcaaattgtggtactggacgccattttctcactcgactcagtgattaccgccgtcgggatggtcgaccatttactggtcatgatggccgccgtggttatcgctatcagcctgatgttgatggccagcaagccgttaacgcaatttgttaacagtcacccgacgatcgttattctctgcttaagcttcctgttgatgattggctttagcctggtggcagaaggtttcggcttcgtcattccgaaaggctacctgtacgctgccattggtttctcggtgatgatcgaggcgctcaatcagttggctatctttaaccggcgacgttttctttccgctaaccagacgctgcgccagcggactaccgaagcggtaatgcgcctgcttagcgggcaaaaagaagatgcggaactggacgccgaaaccgcgtccatgctggtggatcatggtaaccagcagatctttaatccgcaggaacggcggatgattgagcgggtacttaatcttaaccagcgtaccgtcagcagcattatgacgtcgcgccacgatattgagcatatcgatctcaacgcgccggaagaagaaatccgccagttgctggagcgaaatcagcatacgcggctggtggttaccgacggtgatgacgcagaagatttgctcggtgttgttcacgttatcgacctgctacaacagtctctgcgcggcgaaccgctcaacctgcgggtgttgattcgccagccgctggtgttcccggaaaccttgccgttgttacctgccctggagcagttccgtaatgcccgcacgcactttgcttttgtggtggatgagtttggctcggtggaagggattgtgacattaagtgacgtcactgaaaccattgccggtaacttaccgaacgaagtggaagagatcgacgcccgccatgatattcagaagaatgcggacggttcctggacggcgaatggtcatatgccgctggaggatctggtgcaatatgtgccgctgccgctggatgaaaaacgtgaatatcacaccattgccgggctgttgatggagtatttgcagcgtattccaaaacctggcgaagaagttcaggtgggggattatttgcttaaaacgttgcaggtagaaagccatcgcgtgcagaaggtgcagattataccgctgcgtaaggatggcgagatggagtacgaggtgtaa

SEQ ID NO: 38948 - protein, 549 aa, Escherichia coli
MPRFIHDRIVTFVIQRIGFVLTMEWIADPSIWAGLITLIVIELVLGIDNLVFIAILAEKLPPKQRDRARVTGLLLAMLMRLLLLASISWLVTLTQPLFSFRSFTFSARDLIMLFGGFFLLFKATMELNERLEGKDSNNPTQRKGAKFWGVVTQIVVLDAIFSLDSVITAVGMVDHLLVMMAAVVIAISLMLMASKPLTQFVNSHPTIVILCLSFLLMIGFSLVAEGFGFVIPKGYLYAAIGFSVMIEALNQLAIFNRRRFLSANQTLRQRTTEAVMRLLSGQKEDAELDAETASMLVDHGNQQIFNPQERRMIERVLNLNQRTVSSIMTSRHDIEHIDLNAPEEEIRQLLERNQHTRLVVTDGDDAEDLLGVVHVIDLLQQSLRGEPLNLRVLIRQPLVFPETLPLLPALEQFRNARTHFAFVVDEFGSVEGIVTLSDVTETIAGNLPNEVEEIDARHDIQKNADGSWTANGHMPLEDLVQYVPLPLDEKREYHTIAGLLMEYLQRIPKPGEEVQVGDYLLKTLQVESHRVQKVQIIPLRKDGEMEYEV

SEQ ID NO: 38949 - DNA, 1557 bp, Agrobacterium tumefaciens str. C58
  CDS (1)..(1557): transl_table=11
atggaattcctcgcagatccgaatatatgggtcggcctcgtcacccttatcgttctcgaagtcgtgctcggcatcgacaatctcgtcttcatcgcgatccttgccgacaagctgccgccgcaccagcgccagaaagcgcgaatgatcggcctgtcgctcgcgctcgtcatgcgcctgctgctgctgttttcgatctcgtggatcgtcacgctgacgcggccgcttttcaccatttcggatttctccttttccggtcgcgatctcatcctcatcctcggcggtgccttcctgcttgccaaaggcacgatggaactgcacgaacggctggagggtgaccagaagccgaaacagggcaaggtggtccatgcagtcttctggcaggtcatcgtgcagatcgtcgtgctcgacgccgtcttctcgctcgacagcgtcatcaccgccgttggcatggtcaataatctctgggtgatgattaccgccgtctgcgtggccatggccgtgatgatggcggcatcgcggccgctgatggccttcgtgtcgaaacacccgaccgtggtcattctctgccttggttttcttctgatgatcggcttcagcctgatcgtcgagggtttcggtttccatctgccgaagggttatctttatgcggccatcggcttttccgttctcatcgaggcggcaaaccagatcggacggcgcaaccgcgaaaggcgcatcaccgccggcgatatgcgcgaacgcacctccgatgccattctgcggcttctgggtggccgggtcggcgaacagcagtcgctcggcgagaccgctgacgttatcgccgcgcaggctgcgcaaggcgaccttttcaaatccgaggaaaaggacatgatacgcggggtgctgacgcttgccgagcgcccggtcgtatcgatcatgacaccgcgcaccgaaatcgactggctcgatattgatgccgatcacgacacgttacgaagccggctgctggaactcgaccattcccgcctgatgctggcgcagggcaagctggactccttcctgggcgtcgccgccaccagggacctgctgcgcgatctgctgcatgacggaaaactgaacctcgagcgttcgctgcgcgagcctctcgtcgtgcacgaaagcgccacggccttgcaggtgatggaacagctgcgcacatcgccgctgcagatggccgtcatcatcgacgaatatggcacgcttcagggtatcgctacgccgacggacatactagaggcgatcgcgggtgagttccccgacgagggtgaggaagcccagatttccggacttgagcaagacggctcctggctgatcgacggcaccgtcgatatcagacgcgtctcctatctcctggatatcgatctggtggatgatgccgaccgttactccacgatcgccggctacatcctctggcgcctcagccgccttcccgaaatcggcgagcggatttccggcgacgggttcgaattcgagatcgtttcctgctcggacagaaacatcgaaaaaatccgggcgtggaataccagccttgccacctga

SEQ ID NO: 38950 - protein, 518 aa, Agrobacterium tumefaciens str. C58
MEFLADPNIWVGLVTLIVLEVVLGIDNLVFIAILADKLPPHQRQKARMIGLSLALVMRLLLLFSISWIVTLTRPLFTISDFSFSGRDLILILGGAFLLAKGTMELHERLEGDQKPKQGKVVHAVFWQVIVQIVVLDAVFSLDSVITAVGMVNNLWVMITAVCVAMAVMMAASRPLMAFVSKHPTVVILCLGFLLMIGFSLIVEGFGFHLPKGYLYAAIGFSVLIEAANQIGRRNRERRITAGDMRERTSDAILRLLGGRVGEQQSLGETADVIAAQAAQGDLFKSEEKDMIRGVLTLAERPVVSIMTPRTEIDWLDIDADHDTLRSRLLELDHSRLMLAQGKLDSFLGVAATRDLLRDLLHDGKLNLERSLREPLVVHESATALQVMEQLRTSPLQMAVIIDEYGTLQGIATPTDILEAIAGEFPDEGEEAQISGLEQDGSWLIDGTVDIRRVSYLLDIDLVDDADRYSTIAGYILWRLSRLPEIGERISGDGFEFEIVSCSDRNIEKIRAWNTSLAT

SEQ ID NO: 38951 - DNA, 1557 bp, Salmonella typhimurium LT2
  CDS (1)..(1557): transl_table=11
atggaattattaatggatccctcaatttgggtgggtttactcacgctcgtcgtcctggaaattgttctgggtatcgataacctggtctttatcgcgatcctcgccgataaattgccgccaaagcagcgtgacaaagcgcgtcttatcgggctctcgctggcgctgattatgcgtctggcgctgctgtccattatttcgtggctggtgaccttaacaaagccgctctttaccgtctgggattttaccttctccggccgcgatttaattatgctgctgggcggtatattcctgctgtttaaagcgaccaccgagctgcatgaacgtctggaaaaccgcgagcatgacaccggacacggtaaaggctatgcgagcttctgggtggtagtcacgcagattgtcatcctggatgcggtcttctcgctggacgccgtgattacggcggtaggtatggtaaaccatctgccggttatgatggcggcggtggtgattgcgatggcggtgatgctactggcgtcaaaaccgctgacccgttttgtcaaccagcatccgacggtggtggtgctctgtctgagtttcctgctgatgatcggcttgagcctggtggcggaagggtttggtttccatattccgaaaggctacctgtacgcggcaattggtttctcgatcgttatcgaggtgtttaaccagattgcgcgccgcaactttattcgtcatcagtccacgttgccgctgcgcgcgcgtactgcggacgctatcctgcgtctgatgggcggtaaacgccaggcgagtacgcaacatgaaacggatagcccggccgcgatatcggtgtcggaaggcgccttcgccgaagaagaacgctacatgattaacggcgtactgactctggcgtcgcgctccctgcgcggcattatgacgccgcgaggcgaaattagttgggtggatgcgaatctcagcgtagctgaaatccgtcagcagttactctcttctccgcatagcctgttcccggtatgtcggggcgagctggatgaaattatcggtatcgttcgcgcgaaagagttgctggtggcgctggaagagggcgcggatgttgcggctatcgccgcgtcttccccggcgatagtggtgccggaaacgcttgatcctatcaatctgttaggcgttttgcgcgcgcgcggcagtttcgttatcgtcactaacgagttcggcgtggtgcaggggctggttacgccgctggatgtgctggaagcgattgccggtgagttcccggatgccgatgaaacgccggaaatcgttgccgatgccgagggctggatagtgaagggtggcaccgatctccatgcgctacagcaggcgctggaagttgaccatctggtgaacgaagagggcgatattgcgacggtcgcggggttagtgatcgccgctaatggccatattcctcgtgtaggcgatgtcattgatgttccgcccctgcggatcaccattgtcgaggccaacgactatcgtgtcgatctggttcgaattgttaaagaacagcctgcccacgacgaagaggaataa

SEQ ID NO: 38952 - protein, 518 aa, Salmonella typhimurium LT2
MELLMDPSIWVGLLTLVVLEIVLGIDNLVFIAILADKLPPKQRDKARLIGLSLALIMRLALLSIISWLVTLTKPLFTVWDFTFSGRDLIMLLGGIFLLFKATTELHERLENREHDTGHGKGYASFWVVVTQIVILDAVFSLDAVITAVGMVNHLPVMMAAVVIAMAVMLLASKPLTRFVNQHPTVVVLCLSFLLMIGLSLVAEGFGFHIPKGYLYAAIGFSIVIEVFNQIARRNFIRHQSTLPLRARTADAILRLMGGKRQASTQHETDSPAAISVSEGAFAEEERYMINGVLTLASRSLRGIMTPRGEISWVDANLSVAEIRQQLLSSPHSLFPVCRGELDEIIGIVRAKELLVALEEGADVAAIAASSPAIVVPETLDPINLLGVLRARGSFVIVTNEFGVVQGLVTPLDVLEAIAGEFPDADETPEIVADAEGWIVKGGTDLHALQQALEVDHLVNEEGDIATVAGLVIAANGHIPRVGDVIDVPPLRITIVEANDYRVDLVRIVKEQPAHDEEE

SEQ ID NO: 38953 - DNA, 1581 bp, Salmonella typhimurium LT2
  CDS (1)..(1581): transl_table=11
atggaatggattgccgatccgtcaatctgggccggactggtaacgttaatcgttatcgaacttgttctcggcattgataacctggtctttattgccatcctcgctgaaaaactaccgccggggcagcgcgaccgcgcgcgcattaccggcctgatactggcgatgatcatgcgcctgctgctgctggcgtcaatctcgtggctggtcaccttgactaagccgctttttagcgtacaggcgttaagctttagcgcccgcgatctgattatgctgttcggcggcttcttcctgctctttaaagccaccatggagctcaacgaacggctggaagggaaagatagcgccaaccctacccagcgtaagggggcgaaattctgggcggtggtcgcgcaaatcgtggtgctggacgctatcttttctctcgactccgtgattaccgccgtggggatggtcgatcacctggcggtcatgatggcggccgtgataatcgccattagcctgatgctgctcgccagcaagtcactgacccgatttgtgaacaaccatcccaccattgtcattttgtgtcttagcttcctgctaatgatcggctttagcctggtggcggaagggtttggtttccacattccgaaagggtatctgtacgcggctatcggcttctcggtgatgatcgaggcgctcaaccaactggctatttttaaccgccgccgttttctttccgctaaccatacgctgcgccagcgcacaacggaggccgtgatgcggctgattagcggtaaaaaagaggatgccgaactggatgcggaaaccgccgcgatgctggcagaccatgacgacagccagatttttaatccgcaggagcgcaggatgattgagcgggtgctgaatctcaaccagcgcaccgtaagtagcatcatgacgtcgcgtcacgatatcgagcatatcgatctcaacgcgccggaagcggaaatccgcgctctgctggaaaagaaccagcatacgcgtctggtcgtgacgggtgaaaatgaacaggaagatttactcggcgtcgtccacgtcatcgatctgttgcaacaatcgctgcgcggcgaaccgctcaacctgcgggcgctgattcgccaaccgctggttttcccggaaacattgccgctgctgcctgcgctggagcagttccgtaacgccagaacccattttgcctttgtcgtagatgagtttggctcggttgaaggcattgtgacattaagcgatgtcatggagactattgccggtaatctgccgaatgaagtcgaggaaattgacgcccgccacgatattcagaagaacccggacggttcctggacagcaaacggccatatgccgctggaggatttggtgcagtacgtgccgctaccgctggatgaaaaacgggaataccatacgattgccggattattgatggaatatttgcaacgcataccgcaaaccggtgaagaggttcaggtgggcgattatttgctgaaaacattgcaggtagaaagccatcgagtgcagaaagtgcagttaattccgctgcataacggcgagccagaccaggagatgtaa

SEQ ID NO: 38954 - protein, 526 aa, Salmonella typhimurium LT2
MEWIADPSIWAGLVTLIVIELVLGIDNLVFIAILAEKLPPGQRDRARITGLILAMIMRLLLLASISWLVTLTKPLFSVQALSFSARDLIMLFGGFFLLFKATMELNERLEGKDSANPTQRKGAKFWAVVAQIVVLDAIFSLDSVITAVGMVDHLAVMMAAVIIAISLMLLASKSLTRFVNNHPTIVILCLSFLLMIGFSLVAEGFGFHIPKGYLYAAIGFSVMIEALNQLAIFNRRRFLSANHTLRQRTTEAVMRLISGKKEDAELDAETAAMLADHDDSQIFNPQERRMIERVLNLNQRTVSSIMTSRHDIEHIDLNAPEAEIRALLEKNQHTRLVVTGENEQEDLLGVVHVIDLLQQSLRGEPLNLRALIRQPLVFPETLPLLPALEQFRNARTHFAFVVDEFGSVEGIVTLSDVMETIAGNLPNEVEEIDARHDIQKNPDGSWTANGHMPLEDLVQYVPLPLDEKREYHTIAGLLMEYLQRIPQTGEEVQVGDYLLKTLQVESHRVQKVQLIPLHNGEPDQEM

SEQ ID NO: 38955 - DNA, 1557 bp, Brucella suis 1330
  CDS (1)..(1557): transl_table=11
atggactggattgccgatcccaacgcctggataggtttggtgacattggtggtgctcgagatcgttctcggtatcgacaatctcgtcttcatcgccattctggccgacaagctgccgccgcaccagcgcaatcgtgcgcgcctggttggccttggtttggcgcttgtgatgcgtctggtgctgctcgcgtcgatctcgtggatcgtcacgctgcgcgaaccgctcatttccataatggggctgtcgttctccggtcgcgatatcatcatgctcactggcggtctgttcctgcttggcaagggcacgatggagcttcatgaacgccttgagggcagccatggaccgaaaagcagccggattgtccatgcggtgttctggcaggtgatcgtgcagatcgtggtgctcgatgccgtcttctcgctcgacagtgtgatcacggccgtaggtatggtccagcatctgacggtcatgatgatagccgtcattctggccatcggcgtgatgatgcttgcctcccgacccttgatggatttcgtcaacaagcatcccaccgtcgttatcctctgtctcggcttcctgatgatgattggtttcagtctcgttgcggaaggtttcggcttgcatattcccaagggctatctctatgcggccattggcttttcggtgcttgtggaggcagccaaccagtttgcgcgccgcaatcgcgaaaagctggtgacgacaaacgacctgcgcgaacgcaccgcaggggccgtgctgcggcttttgggcggcagccgcggtgagaacccgctttccgacacggttgacgtgattgcgcagcagattgcggccagcgatgtcttcctgccggaggaaaaggaaatgatccgcggtgttcttgatctggcggagcgcccggtgcggtccatcatgtcgccgcgcaacgaggtggaatggctcgatctcgacgaggatgaagacaaaatccacgccactatccgcaagctttcgcattcgcgggtcgtggtggcgcgccatcaggtggatgagttcatcggcgtggcgctggtcaaggatctgctgctcgatatgaccgacaagaaggccatcgactgggacaaggttgtgaagcagccgctcgttgtgcatgagaatgccaatgtgcttcgtgtcatggagcagttgcgcatctcgccgatccagcttggcgtggtcgtggacgagcatggctccttcgagggtgtggtgacgccaacggatattctggaggccatcgccggggaattcccggatgaggacgaggaagtcgcggtcgcccaatccgacgggcagggcggttatctcgtggatggttttacggatattcgccgcttgagcggacttctcgaccgcgatctggtggacgagggtgatcgctatacgacgcttgcaggctatgtgctctggcatctcggccatttgccggttggcggcgagagtttcactgccgacggctttgatttcacgatcgaggccatgagcggtcgccacgtcgagaaggtccggatcaggcccgtgccggattacgaggtgtag

SEQ ID NO: 38956 - protein, 518 aa, Brucella suis 1330
MDWIADPNAWIGLVTLVVLEIVLGIDNLVFIAILADKLPPHQRNRARLVGLGLALVMRLVLLASISWIVTLREPLISIMGLSFSGRDIIMLTGGLFLLGKGTMELHERLEGSHGPKSSRIVHAVFWQVIVQIVVLDAVFSLDSVITAVGMVQHLTVMMIAVILAIGVMMLASRPLMDFVNKHPTVVILCLGFLMMIGFSLVAEGFGLHIPKGYLYAAIGFSVLVEAANQFARRNREKLVTTNDLRERTAGAVLRLLGGSRGENPLSDTVDVIAQQIAASDVFLPEEKEMIRGVLDLAERPVRSIMSPRNEVEWLDLDEDEDKIHATIRKLSHSRVVVARHQVDEFIGVALVKDLLLDMTDKKAIDWDKVVKQPLVVHENANVLRVMEQLRISPIQLGVVVDEHGSFEGVVTPTDILEAIAGEFPDEDEEVAVAQSDGQGGYLVDGFTDIRRLSGLLDRDLVDEGDRYTTLAGYVLWHLGHLPVGGESFTADGFDFTIEAMSGRHVEKVRIRPVPDYEV

SEQ ID NO: 38957 - DNA, 1572 bp, Pseudomonas putida KT2440
  CDS (1)..(1572): transl_table=11
atggaatggctagccgaccccacggcctggctaggcctgttgacgcttatcgtcctcgagctggtgctgggtatcgacaacctggtgttcatcgccatccttgccgacaagttgccgccccatcagcgcgaccgcgcgcgggtcattggcctgagcctggcgctcatcatgcgcctgggcctgttggccagcatttcgtggatggtcaccctgaccgcaccgctgttcgaagtgttcggcaagagcttctctggccgtgacctgatcatgctgttcggtggtgtgttcctgttgttcaaggccaccatggagctgcacgaacgcctggaaggtcacgtaacccaggccagtggcacgctgcgccatgccgcgttctggccgatcgttgcccagatcgtggtactggacgcggtattctcgctggatgccgtgatcacggcggtcggcatggtcgatgagttgtccgtgatgatgatcgcggtgatcttctcgatcggtatcatgatcgttgccagcaagccgctgacccgcttcgtcaacgcccaccccacggtgatcatgctgtgcctgggcttcctgatgatgatcggtttcagcctcaccgccgaaggcctgggcttccatatccccaaaggctacctgtacgcggccatcggcttctcgatcctgatcgagctgttcaaccagctggcccgtgcccgccgcaagcgcagcctgcaacagcacaggccgttgcgcgaacgtactgcccatgccgtgctgcgcctgctgggcggccgccgggtcgaggctgacgaggtcggcgaggagattgccgacctggtcgagggcggcggggaacaggtgctgttcgaccgccgtgagcgggtcatgatcagcggcgtgctgaacctggccgagcggcctattcgtacggtgatgactgcccgtgccgaggttgatgtgatcgacctggcgcaaccggccgacgccattgcccaggccctggccaattcgccgtactcgcgcctgccgctgatccgcgatggtcgcgtggacgagcccttgggctttgtgcacaagaaggaactgctgaaggaactgctctcgggcagccagcccgacctggaaagcatggcccgggcgccgttgaacctgctggagagcttcagcatcctcaatgccctggagcaaatgcgcggtcagtcgacccatattgccttcgtggtcaacgagttcggtgacttcaccgggctgttgaccatgaccgacatccttgagtcgattgccggtgagctgccggatgccagtgaggttgaaggcccgggcatcgttcaggagggggaaggctttgtggtcagcggtgcgctgaacctcagccaggtgcaggcgcgtactggcttcagcgcccgtgctaccgaggattaccagacccttgcgggcctggtgatgagcttgctggaccgcctgccgatggtcggtgaccggctagcctggaatggctggatgctgaccgtggaggcggttgaagagcgacgggtacgccaggttcggcttacaccgaacggcgacgctgacgtagcaggtgcttga

SEQ ID NO: 38958 - protein, 523 aa, Pseudomonas putida KT2440
MEWLADPTAWLGLLTLIVLELVLGIDNLVFIAILADKLPPHQRDRARVIGLSLALIMRLGLLASISWMVTLTAPLFEVFGKSFSGRDLIMLFGGVFLLFKATMELHERLEGHVTQASGTLRHAAFWPIVAQIVVLDAVFSLDAVITAVGMVDELSVMMIAVIFSIGIMIVASKPLTRFVNAHPTVIMLCLGFLMMIGFSLTAEGLGFHIPKGYLYAAIGFSILIELFNQLARARRKRSLQQHRPLRERTAHAVLRLLGGRRVEADEVGEEIADLVEGGGEQVLFDRRERVMISGVLNLAERPIRTVMTARAEVDVIDLAQPADAIAQALANSPYSRLPLIRDGRVDEPLGFVHKKELLKELLSGSQPDLESMARAPLNLLESFSILNALEQMRGQSTHIAFVVNEFGDFTGLLTMTDILESIAGELPDASEVEGPGIVQEGEGFVVSGALNLSQVQARTGFSARATEDYQTLAGLVMSLLDRLPMVGDRLAWNGWMLTVEAVEERRVRQVRLTPNGDADVAGA

SEQ ID NO: 38959 - DNA, 1581 bp, Salmonella enterica subsp. enterica serovar Typhi Ty2
  CDS (1)..(1581): transl_table=11
atggaatggattgccgatccgtcaatctgggccggactggtaacgttaatcgttatcgaacttgttctcggcattgataacctggtctttattgccatcctcgctgaaaaactaccgccggggcagcgcgaccgcgcgcgcattaccggcctgatactggcgatgatcatgcgcctgctgctgctggcgtcaatctcgtggctggtcaccttgactaagccgctctttagcgtacaggcgttaagctttagcgcccgcgatctgattatgctgttcggcggcttcttcctgctctttaaagccaccatggagctcaacgaacggctggaagggaaagatagcgccaaccctacccagcgtaagggggcgaaattctgggcggtggtcgcgcaaatagtggtgctggacgctatcttttctctcgactccgtgattaccgccgtggggatggtcgatcacctagcggtcatgatggcggccgtgataatcgccattagcctgatgctgctcgccagcaagtccctgacccgatttgtgaacaaccatcccaccattgtcattttgtgccttagcttcctgctaatgatcggctttagcctggtggcggaagggtttggtttccacattccgaaagggtatctgtacgcggctatcggcttctcggtgatgatcgaggcgctcaaccaactggctatttttaaccgccgccgttttctttccgctaaccatacgctgcgccagcgcacaacggaggccgtgatgcggctgattagcggtaaaaaagaggatgccgaactggatgcggaaaccgccgcgatgctggcagaccatgacgacagccagatttttaatccgcaggagcgcaggatgattgagcgggtgctgaatctcaaccagcgcaccgtaagtagcatcatgacgtcgcgtcacgatatcgagcatatcgatctcaacgcgccggaagcggaaatccgcgctctgctggaaaagaaccagcatacgcgtctggtcgtgacgggtgaaaatgaacaggaagatttactcggcgtcgtccacgtcatcgatctgttgcaacaatcgctgcgcggcgaaccgctcaacctgcgggcgctgattcgccaaccgctggttttcccggaaacattgccgctgctgcctgcgctggagcagttccgtaacgccagaacccattttgcctttgtcgtagatgagtttggctcggttgaaggcattgtgacattaagcgatgtcatggagactatcgccggtaatctgccgaatgaagtcgaggaaattgacgcccgccacgatattcagaagaacccggacagttcctggacagcaaacggccatatgccgctggaggatttggtgcagtacgtgccgctaccgctggatgaaaaacgggaataccatacgattgccggattattgatggaatatttgcaacgcataccgcaaaccggtgaagaggttcaggtgggcgattatttgctgaaaacattgcaggtagaaagccatcgagtgcagaaagtgcagttaattccgctgcataacggcgagccagaccaggagatgtaa

SEQ ID NO: 38960 - protein, 526 aa, Salmonella enterica subsp. enterica serovar Typhi Ty2
MEWIADPSIWAGLVTLIVIELVLGIDNLVFIAILAEKLPPGQRDRARITGLILAMIMRLLLLASISWLVTLTKPLFSVQALSFSARDLIMLFGGFFLLFKATMELNERLEGKDSANPTQRKGAKFWAVVAQIVVLDAIFSLDSVITAVGMVDHLAVMMAAVIIAISLMLLASKSLTRFVNNHPTIVILCLSFLLMIGFSLVAEGFGFHIPKGYLYAAIGFSVMIEALNQLAIFNRRRFLSANHTLRQRTTEAVMRLISGKKEDAELDAETAAMLADHDDSQIFNPQERRMIERVLNLNQRTVSSIMTSRHDIEHIDLNAPEAEIRALLEKNQHTRLVVTGENEQEDLLGVVHVIDLLQQSLRGEPLNLRALIRQPLVFPETLPLLPALEQFRNARTHFAFVVDEFGSVEGIVTLSDVMETIAGNLPNEVEEIDARHDIQKNPDSSWTANGHMPLEDLVQYVPLPLDEKREYHTIAGLLMEYLQRIPQTGEEVQVGDYLLKTLQVESHRVQKVQLIPLHNGEPDQEM

SEQ ID NO: 38961 - DNA, 1560 bp, Candidatus Blochmannia floridanus
  CDS (1)..(1560): transl_table=11
atggaatttttaacagatatatcagtatgggcaggattatttactttagttgtactggaggtcatacttagtgttgataatttagtatttatagctattttagtagataaattaccaaaaaatcaacgtgagcatgtatgtataattggattaactttagccttaattatgcgtataatattgttgtctttagtttcatggattactacactaacaaaaccattatttaaaatagtttctttttcgttttctattcgtgatttaattttattgtttggaggtatttttttattatttaaagcaactactgaattgcatcgacaattagagtataaagtgcataatcgtaatcttaaccgagaatatgcgagtttttgggttgtggtaatacaaattgtagtattagatgcaattttttctattgatgcagtaattacggcagttggtacggttgattatttatcagtgatgattatttcagtagtaattgcggttgttataatgttattagcatcgaagttattgattaattttgtaaatagtcaccaaactgttgtagtgttatgtttaagttttttactaattattggattaagtttaatggcggaaggaatgggtttttatattccaaaaggttatttatatgttgctattggattttctattttgattgagttctttaatcaaattgcttattgtaattctataaaaaatcaatcaactacatctatgcgtgaacgtactgcagaaataattatgaaattaatgggaggaggttcatcaataaagtggaatcctgtgtcaaaaaaagctttaatttttccattaaaaacacattttgccgaagaagaacgtcatatgattactggagtattatctttagcttctcgttcattgcgtagtattatgacaccacgtaatgaaattacatggttaaattctcaaaaatcaatacgagaattgtattctatattaaccaatactcctcataatatgtttcctgtatgtaatggagagttagatcaattaataggtattgttcgagctaaagatttaatggtatctgttgcacaaggaaaacctgttgaaacatatgcctctgaaaatttacctattgtagttccagaaacattaaatgtattaaatttattaactgaattaaggcgtgcaaaaggtagtatggtgatagtatctaatgaatttggagtaattcaaggtttaattacgccattagatatattagaagcgatagcaggtgaattccctgatgaagatgaaactccagaaattaaattgattagtgatagaagttggttagtaaaaggtagtacagatttacatgcattacagcgggcgttatgtacgcataatttggcagaaatatgtgatcatgttgcttctgtagcaggtttattgttatccagatgcgatcgaataccgaaggaaggagatatattaataattaatgaatggcgttttataataaaaaagatgatagaatatcgtatcgaattagtagaggtagaacagttacataatatagataatacatttaattaa

SEQ ID NO: 38962 - protein, 519 aa, Candidatus Blochmannia floridanus
MEFLTDISVWAGLFTLVVLEVILSVDNLVFIAILVDKLPKNQREHVCIIGLTLALIMRIILLSLVSWITTLTKPLFKIVSFSFSIRDLILLFGGIFLLFKATTELHRQLEYKVHNRNLNREYASFWVVVIQIVVLDAIFSIDAVITAVGTVDYLSVMIISVVIAVVIMLLASKLLINFVNSHQTVVVLCLSFLLIIGLSLMAEGMGFYIPKGYLYVAIGFSILIEFFNQIAYCNSIKNQSTTSMRERTAEIIMKLMGGGSSIKWNPVSKKALIFPLKTHFAEEERHMITGVLSLASRSLRSIMTPRNEITWLNSQKSIRELYSILTNTPHNMFPVCNGELDQLIGIVRAKDLMVSVAQGKPVETYASENLPIVVPETLNVLNLLTELRRAKGSMVIVSNEFGVIQGLITPLDILEAIAGEFPDEDETPEIKLISDRSWLVKGSTDLHALQRALCTHNLAEICDHVASVAGLLLSRCDRIPKEGDILIINEWRFIIKKMIEYRIELVEVEQLHNIDNTFN

SEQ ID NO: 38963 - DNA, 1587 bp, Bordetella bronchiseptica RB50
  CDS (1)..(1587): transl_table=11
atggagtggctgcaggaccccgccgcgtgggtcggcctgcttaccttggtcgtcctcgaaatcgtactggggatcgacaaccttatcttcatagccatcctggcggacaagctgccccccgcgcagcgcgaccgcgcgcgcatcgtcgggctgagcctggcgctgctcatgcgcctgggcctgctgtcagtgatgtcctggctggtcacgctgaccacgccgtggttctccgtgggaccgatgtcgttttccggccgggacctgattctcatgctgggcggcctgttcctgctcttcaagggcaccatggagctgcacgaacgcatcgaaggcggccagagcctggacacgggcggtccgcgcgtctatgccagcttctgggtcatcgtgacccagatcgtggtgctggacgcggtgttctcgctggattcggtcatcaccgcggtgggcatggtggaccacctggccatcatgatgatcgccgtcatcatcgccatcggcatcatgctgctggcgtccaagccgttgacgcgcttcgtcaacgcgcaccccacggtggtggtgctgtgcctgggctttctgctgatgatcggcttttcgctgctggccgagagcttcggcttcaaggtgcccaagggctacctgtatgccgccatcggcttttccgtggccatcgaggcgctcaaccaggtggcgcgccgcaacctgctcaagctggacgcgcgccgtccgatgcgcgagcgcaccgccacggcggtgctgcgcatgctgggcaagcgcccgcccgccagcgacgagtccgacctgcccagcgccatgcccgccgtgccggcgttcggcgtggaagagcgcaacatggtcagcggcgtgctgacgctggccgaacgttccatccgctccatcatgacgccgcgcaccgatgtgtcgtgggtcaatatcgatgatgacgccgccaccatccgccagcagctgaccgccgcgccgcacagtttcttcccggtgtgccggggctcgctggacgaagtggtgggcatcggccgcgccaaggacctggtggccgacctgatcacggaagggcgggtgcgccgcaatcgcctgcgcgaccccatcatcgtgcacgagtcgatcggcatcctgcgcctgatggacaccctcaagcgttcgcgcggccagctggtgctggtggccgacgagttcggcgccatcgaagggctggtgacgcccatcgacgtattcgaggccatcgccggcgagttccccgacgaggatgaactgcccgacatcgtcgccgaaagcgaaaatgtctggaaggtagacggcgccgccgacctgcaccacctggagcaggtgctggagatcgaggggctgatcgacgagtccgaggactactccaccctggcaggctacctgctggcccgtttcggccatctgcccaagcccggcgatacctgcgaattcgaaggatcccatcatcggcgcgtgcgcttcgaagtgctgcagatggatgggcggcgcgtggcgctggtgcgggtcgagcgcctgccctacgacaccgtcgacgaaagcgaggcggccgacgccgattaa

SEQ ID NO: 38964 - protein, 528 aa, Bordetella bronchiseptica RB50
MEWLQDPAAWVGLLTLVVLEIVLGIDNLIFIAILADKLPPAQRDRARIVGLSLALLMRLGLLSVMSWLVTLTTPWFSVGPMSFSGRDLILMLGGLFLLFKGTMELHERIEGGQSLDTGGPRVYASFWVIVTQIVVLDAVFSLDSVITAVGMVDHLAIMMIAVIIAIGIMLLASKPLTRFVNAHPTVVVLCLGFLLMIGFSLLAESFGFKVPKGYLYAAIGFSVAIEALNQVARRNLLKLDARRPMRERTATAVLRMLGKRPPASDESDLPSAMPAVPAFGVEERNMVSGVLTLAERSIRSIMTPRTDVSWVNIDDDAATIRQQLTAAPHSFFPVCRGSLDEVVGIGRAKDLVADLITEGRVRRNRLRDPIIVHESIGILRLMDTLKRSRGQLVLVADEFGAIEGLVTPIDVFEAIAGEFPDEDELPDIVAESENVWKVDGAADLHHLEQVLEIEGLIDESEDYSTLAGYLLARFGHLPKPGDTCEFEGSHHRRVRFEVLQMDGRRVALVRVERLPYDTVDESEAADAD

SEQ ID NO: 38965 - DNA, 1584 bp, Chromobacterium violaceum ATCC 12472
  CDS (1)..(1584): transl_table=11
atggacctttcatggctgtccgaccccgccgcctggctgggcctcttgacgctgatcatcctcgagatcgtactcggcatcgacaacctgatcttcgtggccatcctggccgaaaaactcccgccggaacaacgcgaccgcgcccgcatcgtcggcctgtcgctggcgctggtgatgcgcctgatcctgctggccagcatctcctggctggtcaccctgaccacgccgttgttctcggtctggggccagtccttcgccggccgcgacctgatcatgctgtgcggcggcgtgttcctgctgttcaaggccaccaccgagctgcatgagcggctggagggcgtcgaacacgtgaagggcggcgcgcagcgcgcctacgcggccttcgccaccgtggtcgcccagatcctggtgctggacgcggtgttctcgatcgactcggtgatcaccgccatcggcatgtccgaacacctgccggtgatgatgctggccgtcgtcatcgccatggtcctgatgatcgccgccagcaagccgctgaccaccttcgtcaacgcccaccccaccgtggtgatgctgtgcctgggcttcctgctgatgataggcttcagcctgatcgcggaaggcttcggcttccacatccccaagggctacctgtacgccgccatcggcttctcggtgttgatcgaagccttcaaccaggtatcgcaggccaaccgcatccgctacctgaaccgcacccagagcttccgcgagcgcaccgccaacacggtgctgagcctgatgggcagccgcctgaccgccgccagcgccgacgaagccaagccggaagccggcccgcagccggtggaggacaccgccttcggccagaacgagcgcgcgatgatacacagcgtgctgacgctggccgagcggccgatccgcgtgatcgccaccccgcgcgccgacatccaccgcctggacctgagccagccggaggcgtcccagcgcaaggcgctgcgcgacagcccctactcccgcctggtggtgatacgcgacggcagcatagacgagccgctgggcatcgtcgcccgcaaggacctgctggcccagctgctggacggccgcccgctggacatcgacgccgcgctgcgccagccgctggtgctgccggaaaccgtcaccgtgctgaaggcgctggagagcttccgccagcacgccgccgacatggccttcgtggtcaacgagttcggcagcctggaaggcatcgtcacccagaaggacctgatggaggcgatcgccggcgaattcccggaagagcacgagcgccacgagctgccggccatcgtggtccagccggacggcagctacgacgtggaaggcagcctggagctcgtcacgctggagcagtacctgacgctgggcgatttcgaggacgaggacttccacaccgtggccggcctgctgatggactgcctggagcgcatcccgcgcgagggcgacgaagtcaccgtcggcgaatggaagctgcgcgtcaccgcgcagaagggcaaccgcaccgagcgcgtgctgatcagcccgctggccgacggcttcgatgccgccatctga

SEQ ID NO: 38966 - protein, 527 aa, Chromobacterium violaceum ATCC 12472
MDLSWLSDPAAWLGLLTLIILEIVLGIDNLIFVAILAEKLPPEQRDRARIVGLSLALVMRLILLASISWLVTLTTPLFSVWGQSFAGRDLIMLCGGVFLLFKATTELHERLEGVEHVKGGAQRAYAAFATVVAQILVLDAVFSIDSVITAIGMSEHLPVMMLAVVIAMVLMIAASKPLTTFVNAHPTVVMLCLGFLLMIGFSLIAEGFGFHIPKGYLYAAIGFSVLIEAFNQVSQANRIRYLNRTQSFRERTANTVLSLMGSRLTAASADEAKPEAGPQPVEDTAFGQNERAMIHSVLTLAERPIRVIATPRADIHRLDLSQPEASQRKALRDSPYSRLVVIRDGSIDEPLGIVARKDLLAQLLDGRPLDIDAALRQPLVLPETVTVLKALESFRQHAADMAFVVNEFGSLEGIVTQKDLMEAIAGEFPEEHERHELPAIVVQPDGSYDVEGSLELVTLEQYLTLGDFEDEDFHTVAGLLMDCLERIPREGDEVTVGEWKLRVTAQKGNRTERVLISPLADGFDAAI

SEQ ID NO: 38967 - DNA, 1572 bp, Photorhabdus luminescens subsp. laumondii TTO1
  CDS (1)..(1572): transl_table=11
atggaatggatcgctgatccgacgatatgggctgggctagttactcttatcgttctagaaattgtcctcggaattgacaacttggtctttattgccattctggcagataaacttcctgaaaaacaaagagacaaagcaagaattacaggtctaggttgtgcgttactgatgcgtatcgtactgctttttagtctttcctggttgataacgctaactcatccattaattacgctttgggaacatccatttagtgcccgtgacctgattatgctaataggtggtcttttcttactgttcaaagcgacaatggagctcaatgaacggctggaaggtaaagatgcccactcaggacaacaacgtaaaacatctaaattttggacggttgtcgttcagataattgtccttgacgctgtattctcactggattcagtggtgactgctgttggtatggtagacaacatcggtatcatgatcgcggccgtcaccattgcgatgttcctgatgatactggcaagtaaaccgttgaccactttcgtcaatgctcacccgactatcgttattctctgtctgagcttcttgttaatgatcggtttcagtctggtcgccgaaggttttggttatcatatccccaaaggttacttgtacgccgctatcggcttctccattatgattgaagccttaaaccaatttgctcaatttaaccgccgcagatttcttactgcttcccgttcactacgtgaaagaacagcggaagccgttttacgtatcctgagtggtaagcatgaaaatgcagaattggataatcatacatctaatctgatttctgataatcaggaagtgtttgatccacaagaacgtcaaatgattgccagggttctaggcatggcgcagcgtaacgttaacagtatcatgacttcccgtcacgacgtggagtaccttgatattcatgcaccaactgaaaatctgacgcaaatactgaataaaaatcctcacacacgcattgtggtaactgatgaaaatatcagtgacgaaccattaggtgttgtccatgttattgatctactgaatcaacaactcaaccaacagccttttgatttacattcgctgataaaacagcctctgattttccctgaacagctttcactactccaggcattggagcagttccgccaggcacaaactcacttcgcgtttgttgtcgatgaatttggttctgtggaaggtgtggtgactttgaccgacgtaatggaaactatcgcgggtaatttaccggtagatggcgaagaaactgatgcccgccatgatattcaagcgactgaacatgggggttggatcgccaatggttatatgccgctggatgatttgatcctttatgtccctttgcaactggatgaaaaacgtgaatatcaaaccttagcaggtttgttaatggaacattcacaacatattccacggcaaggtgagcaattacagattgataattatctgtttgaaccgttggaagtaaccagtcaccgaattaataaggtaaaaattacccctctggtgtcaaatgaagaaaataaaaaataa

SEQ ID NO: 38968 - protein, 523 aa, Photorhabdus luminescens subsp. laumondii TTO1
MEWIADPTIWAGLVTLIVLEIVLGIDNLVFIAILADKLPEKQRDKARITGLGCALLMRIVLLFSLSWLITLTHPLITLWEHPFSARDLIMLIGGLFLLFKATMELNERLEGKDAHSGQQRKTSKFWTVVVQIIVLDAVFSLDSVVTAVGMVDNIGIMIAAVTIAMFLMILASKPLTTFVNAHPTIVILCLSFLLMIGFSLVAEGFGYHIPKGYLYAAIGFSIMIEALNQFAQFNRRRFLTASRSLRERTAEAVLRILSGKHENAELDNHTSNLISDNQEVFDPQERQMIARVLGMAQRNVNSIMTSRHDVEYLDIHAPTENLTQILNKNPHTRIVVTDENISDEPLGVVHVIDLLNQQLNQQPFDLHSLIKQPLIFPEQLSLLQALEQFRQAQTHFAFVVDEFGSVEGVVTLTDVMETIAGNLPVDGEETDARHDIQATEHGGWIANGYMPLDDLILYVPLQLDEKREYQTLAGLLMEHSQHIPRQGEQLQIDNYLFEPLEVTSHRINKVKITPLVSNEENKK

SEQ ID NO: 38969 - DNA, 1566 bp, Bartonella quintana str. Toulouse
  CDS (1)..(1566): transl_table=11
atggagtggatcgttgatccccatgcgtggtttggcttgatcacgttgatttttctcgaaattgttttaggaatagataaccttgtttttattgcaattttagccgaaaaattgccgttacatttgcgtgatcgtgcacgcttgataggtattactttagcattggtgatgcgactttttcttcttacggttattggatgggtgttaaatctcgatacgatgcttttttcattctcatcctttgtgtttagttggcatagcctcatcttgattagtggtggggcttttttgcttgcaaagggaacgttagagttacatgaaagattagaaggtatctcgcatgaaagaaaaacaggcgttgcttatgtcgttttttggcaggtgattgttcaaatcgtggtgcttgatgctgtgttttccctagatagtattattactgcgacaggtatgattgcaaaagagcaggcagcagttatgtatatagcagtaattattgctatgggtgtgatgatgtgtggatcgggcgctcttatgcgttttattaatcgccatcccactattgtgattctttgtcttggttttttgatgatgattggttttactctcattgttgaaggatttggctttcatattccaaaagggtatttatatgctgctattggtttttctgttctcattgaagcttttaaccaaattggacgtcgtaatcgtgaaaagatgattacaacaaatgatctacgtggtcgaacagctgatgctgttttaaggctcttaggaggtggaaacaaagatggtaatcttggtgagactgtagatgtcattgctgagcaggcggcagcttctgagctgtttcgtccagaagaaaaagaaatgattcgtggtgttctcgatttagctgatcgtcctgtccgctctattatgtcgccgcgtaatgagattgagtggttggatttaaatggtgacgagaataagatgcgtgaggagttacaacaggttaaacatagccgcttaattcttgcacgtgaaaaagtagacgaatttgttggcgttgctttgaccaaagatcttctgttaaatttggctgaggggaaaaagattaattggaaaaaagctatgcgagaaccacttgtcgttcatgaaaatacaagtgttttgcgattgatggagcaattacgtcattcttcgattcagcttgcaattattgttgatgagcatggatcttttgaagggattgcaacaccaactgatattcttgaagctattgcaggtgattttcctgatgatgatgaagaaccggttatagcagaacagcttgaagatggaagccttcttgttgagggatatgctgatatccgccgtttaagcggttatcttgagcgtaatcttgtagacgaggcagaccgttatactactctggcagggtttatgctttggcgatttgggcatttaccgaatgagggtgaaagctttgaagctgatggtctgcgctttaaagttatcgaaatggatcgtcgaaatgtatctaaaatccttatctcttcacttgtgttgccggaaaaaagctaa

SEQ ID NO: 38970 - protein, 521 aa, Bartonella quintana str. Toulouse
MEWIVDPHAWFGLITLIFLEIVLGIDNLVFIAILAEKLPLHLRDRARLIGITLALVMRLFLLTVIGWVLNLDTMLFSFSSFVFSWHSLILISGGAFLLAKGTLELHERLEGISHERKTGVAYVVFWQVIVQIVVLDAVFSLDSIITATGMIAKEQAAVMYIAVIIAMGVMMCGSGALMRFINRHPTIVILCLGFLMMIGFTLIVEGFGFHIPKGYLYAAIGFSVLIEAFNQIGRRNREKMITTNDLRGRTADAVLRLLGGGNKDGNLGETVDVIAEQAAASELFRPEEKEMIRGVLDLADRPVRSIMSPRNEIEWLDLNGDENKMREELQQVKHSRLILAREKVDEFVGVALTKDLLLNLAEGKKINWKKAMREPLVVHENTSVLRLMEQLRHSSIQLAIIVDEHGSFEGIATPTDILEAIAGDFPDDDEEPVIAEQLEDGSLLVEGYADIRRLSGYLERNLVDEADRYTTLAGFMLWRFGHLPNEGESFEADGLRFKVIEMDRRNVSKILISSLVLPEKS

SEQ ID NO: 38971 - DNA, 1596 bp, Acinetobacter sp. ADP1
  CDS (1)..(1596): transl_table=11
atgatttttgaatggatgtctgatccttcagcatgggtaggtcttgctacgctcgttgttttagaaattgtactgggtattgataacctggtctttattgctattttggcagaaaagcttccgccagaacaacgaaataccgcacgtattgtgggtttaattctggccttgggaatgcgtctgattctgctggcttcaattgcatgggtggttacgctgaccgagccactctttcatatttttgatcatccattttcagggcgtgatctgatcttgctatttggtggtgtattcctgctgtttaaaggaaccatggaactgcatgagcgtctggaaggtaaacagtttcaaaaagaagaaaatcctgtccatgcaaccttctggatggtgattgttcagatcgtggtgcttgatgccgtcttctcgctggatagtgtaattaccgcagtggggatggttaagcatcttcctgttatgatgatcgcagtaatcattgctgtaggtatcatgctgtgggcatctaaaccattgatggattttgtcaataaacatccaacagtcgtgattttgtgtttgtcattcctgatgatgattggtttctctttggtggtggaaggctttggttttcatataccaaaagggtatttatacgcagcaatcggctttgcggtgttgattgaaatgatgaaccagaccatgcgtcataatcaggaaaaatcagtcaccaccacagatttacgttatcgcactgcatctgcggtgatgaaaatgctgggcgggaaaaactcaagtaatggttcagattcccagaaaaatgagaatgaaaatgtactggcgacacaagcctttgcagatgaggtttttgatgaagaaaatagtgtttatcatagtgtgatggttcaaggtgttttaggtcttgccgaacgcccagttaaatcggtgatgacaccacgtccagagattgagtggattgatttggatgttgcaccagagttgctgaaagaacgtttacttacgatgacacattcacgtcttattgtggcacgtggcgagctggacaatattgaaggcattaccctgacacataaggtgctgaatgaatatatcgaaacaggtgtactgaactttagtcatcatttaagagaacctgtgattgtgcatgaaaatgcgcaggtcttgatggtgatggaacagctacgccaagcaccgttacaaatggcgattgttcttaatgaatatggttcaattgaggggattgtgacgcctattgatgtgcttgaagccattgcgggtgagtttccagatgaagatgaacttgaagcggcagcagagagtctggaagatggttcattaatactggaaggttcgaccgatatccgtcatgtttccttgcttttgaatcgtgatttggttgatgagtcagaggaatattcgaccttgtcaggttatattctatttcacttggggcgtttgcctgaaaatgggcagaaaatgcatgcagatggctatatctttgaagtcgtgaccatggatggccacaaaattgaaaaagtccatattgttgctgatcccgacgcggggaaagagaaagactag

SEQ ID NO: 38972 - protein, 531 aa, Acinetobacter sp. ADP1
MIFEWMSDPSAWVGLATLVVLEIVLGIDNLVFIAILAEKLPPEQRNTARIVGLILALGMRLILLASIAWVVTLTEPLFHIFDHPFSGRDLILLFGGVFLLFKGTMELHERLEGKQFQKEENPVHATFWMVIVQIVVLDAVFSLDSVITAVGMVKHLPVMMIAVIIAVGIMLWASKPLMDFVNKHPTVVILCLSFLMMIGFSLVVEGFGFHIPKGYLYAAIGFAVLIEMMNQTMRHNQEKSVTTTDLRYRTASAVMKMLGGKNSSNGSDSQKNENENVLATQAFADEVFDEENSVYHSVMVQGVLGLAERPVKSVMTPRPEIEWIDLDVAPELLKERLLTMTHSRLIVARGELDNIEGITLTHKVLNEYIETGVLNFSHHLREPVIVHENAQVLMVMEQLRQAPLQMAIVLNEYGSIEGIVTPIDVLEAIAGEFPDEDELEAAAESLEDGSLILEGSTDIRHVSLLLNRDLVDESEEYSTLSGYILFHLGRLPENGQKMHADGYIFEVVTMDGHKIEKVHIVADPDAGKEKD

SEQ ID NO: 38973 - DNA, 1587 bp, Erwinia carotovora subsp. atroseptica SCRI1043
  CDS (1)..(1587): transl_table=11
atggagtggatcgctgatccaacgatatgggccgggttggccacgctggttgtcctggaactggttctgggcattgataatctcatcttcattgccattctggctgagaaattaccaaaagaacaacgcgataaagccaggatcgtcggcctgctgcttgccctgattatgcggctgggcttgctggcgtctatttcctggctggtatcgttgacgacccccctcttcacgttccttgaacataccttcagcgctcgagatgtcatcatgctgattggcgggctatttctactctttaaagccaccatggagctcaacgagcgtcttgaaggaaaggatgaagatcagcaagcccaacgtaaaggggcacgtttctggccggtagtcgctcagatagtggtactggatgcgatattctcgctggattccgtgatcaccgccgtcggcatgaccgaccatctgctggtcatgatgtccgccgtgacgattgctattctcctgatgctgctggccagcaagccactgacccgttttgtcgcggaacacccgaccatagttatcctgtgtctcagcttcctgctgatgattggcttcagtctggtggcagacgcctttggttaccacatccccaaaggctatctctacgctgcgataggtttctcggtactgatcgagatgttaaatcaggtttccctgtttaaccgccgacgctttctttcttctacggttccgctacgccagcgcaccgcagaagttgttttgcgtattttgcgcggcaatcatgaagaagctgagctggacaatcaaacctcgtcgatgattgcagacaacacccgagcaggccgagaggttttcaatatccaggaacgccggatgataaagcgggtattggggctggcacagcgaaccatcagcagcattatgacgtcgcggcatgatattgagtcggttgagttggatactacgcagggtgcgcttgctaagctgttaacgaccaaccagcattctcggctcgtggtcaccgacagcaatacctctgacgagccgctgggcatcataaatgttgccgatttactacagcagcagctaaaccgcgagccgtttaatccacgcattctgatccgtcagccactggtgttccccgaacaactctcgcttttacaggcgttagaacagtttagagaaggaaggacacattttgcgtttgtcgttgatgagtttggctcaatggaaggaattgtcacattaagcgacgtgatggaaaccatcgcaggtaacctaccgcgcgaaggtgaagatcgcgatgcgcgccacagcgttcagcaaaatgacgacggcagttggaccgtaaacggctatattccgctggaagatctggcgatgtatgttccgctgacgctggatgaaaagcgcgaatactatacgttggcagggctgctgatggagcacacgcagcgggttccacaagtgggcgatacattatcaatcgataactatcagttcactattctggcggtggaaagccatcgcatcgtggaagtccgcatcacaccgaacgacgaaccacagactgattttgaagtgtga

SEQ ID NO: 38974 - protein, 528 aa, Erwinia carotovora subsp. atroseptica SCRI1043
MEWIADPTIWAGLATLVVLELVLGIDNLIFIAILAEKLPKEQRDKARIVGLLLALIMRLGLLASISWLVSLTTPLFTFLEHTFSARDVIMLIGGLFLLFKATMELNERLEGKDEDQQAQRKGARFWPVVAQIVVLDAIFSLDSVITAVGMTDHLLVMMSAVTIAILLMLLASKPLTRFVAEHPTIVILCLSFLLMIGFSLVADAFGYHIPKGYLYAAIGFSVLIEMLNQVSLFNRRRFLSSTVPLRQRTAEVVLRILRGNHEEAELDNQTSSMIADNTRAGREVFNIQERRMIKRVLGLAQRTISSIMTSRHDIESVELDTTQGALAKLLTTNQHSRLVVTDSNTSDEPLGIINVADLLQQQLNREPFNPRILIRQPLVFPEQLSLLQALEQFREGRTHFAFVVDEFGSMEGIVTLSDVMETIAGNLPREGEDRDARHSVQQNDDGSWTVNGYIPLEDLAMYVPLTLDEKREYYTLAGLLMEHTQRVPQVGDTLSIDNYQFTILAVESHRIVEVRITPNDEPQTDFEV

SEQ ID NO: 38975 - DNA, 1587 bp, Yersinia pseudotuberculosis IP 32953
  CDS (1)..(1587): transl_table=11
atggaatggatcgcggatccaactatttgggcaggactggctacattggttgtgctcgaaattgtattgggtattgataaccttatatttattgccatcttggcagagaaacttcctcgtcatcaacgagacaaagccagagtcactggtttactctgcgcattgttaatgcgtctggcactgttggcctgtatttcgtggctggctacattgaccacaccaatagtcactctctctgaacattcgttcagtgcacgtgacttgattatgttggtcgggggaatattcctgctgttcaaagctacgatggagctaaatgaacggctggaagggaaagatcatcagcagaatcagcaacgcaaagcggctcgtttctggccggtggtggcacagatagtggttctggatgctatcttctcgctcgattccgtgatcaccgccgtcggcatggttgatcaccttgcggtgatgatggccgccgtttgtatcgcaattggcttgatgttactcgccagtaaaccgttgactcgctttgtcaatgcacatccaacgattgtcattctgtgcttgagcttcttactgatgatcggtttcagcttagtcgctgaaggttttggttaccatattcctaagggctacctgtacgcggctattggtttctcagtaattattgagtcactgaaccagtttgcacaattcaatcgtcggcgcttcctgtcaacggttagaccattacgcgaacgtaccgcagaggccgttttacggatgctcagtggcaaacacgaagaagctgaattggataaccatactgccaatctgatcgctgataataccagcgaaggccaggaagtgttcaatgcgcaagaacggcgcatgattgaacgggtcttagggctggcacagcgaaccgtcagtagcatcatgacatcacgccatgatgttgaatatttggacctcaatgacccaccagagaaattgactcagttgctggcgaaaaatctgcatacccggatcgtggttactgaagatagctctactgatgaacctttgggagttattcacgtaattgatttattgaaacaacaattagcgaatgaaaaactcgacttgcggtcattaattcgccaaccacttatctttcctgagcaagtttcattgctgatggctctggaacaattccgtcaggcacagacacattttgcttttgtcgtcgatgagttcggttctattgagggggttgtgacccttaccgacgtgatggaaactatcgcaggtaacttacccgtagcaggggaagagttagatgcgcgccacgatattcagcaaactgaagatggctgttggatagcgaacggttatatgccgctggaagatttggtgctctatttgccgctgccaattgatgaaaaacgtgaataccacacactggccgggttactcatggagcatacccagaggatacccaaagtaggtgaacaactgaccattggcgattacttattcgaacctctggtggtcaatagccacaggatcttaaaagtgaagataacaccattgaagattcctgagccagattacgaagtgtag

SEQ ID NO: 38976 - protein, 528 aa, Yersinia pseudotuberculosis IP 32953
MEWIADPTIWAGLATLVVLEIVLGIDNLIFIAILAEKLPRHQRDKARVTGLLCALLMRLALLACISWLATLTTPIVTLSEHSFSARDLIMLVGGIFLLFKATMELNERLEGKDHQQNQQRKAARFWPVVAQIVVLDAIFSLDSVITAVGMVDHLAVMMAAVCIAIGLMLLASKPLTRFVNAHPTIVILCLSFLLMIGFSLVAEGFGYHIPKGYLYAAIGFSVIIESLNQFAQFNRRRFLSTVRPLRERTAEAVLRMLSGKHEEAELDNHTANLIADNTSEGQEVFNAQERRMIERVLGLAQRTVSSIMTSRHDVEYLDLNDPPEKLTQLLAKNLHTRIVVTEDSSTDEPLGVIHVIDLLKQQLANEKLDLRSLIRQPLIFPEQVSLLMALEQFRQAQTHFAFVVDEFGSIEGVVTLTDVMETIAGNLPVAGEELDARHDIQQTEDGCWIANGYMPLEDLVLYLPLPIDEKREYHTLAGLLMEHTQRIPKVGEQLTIGDYLFEPLVVNSHRILKVKITPLKIPEPDYEV

SEQ ID NO: 38977 - DNA, 1557 bp, Neisseria gonorrhoeae FA 1090
  CDS (1)..(1557): transl_table=11
atggatttcagttggttggcagaaccgcatacctggataggttttgccacgcttttggtgttggaagtcgtattggggatagacaaccttgtctttgtggcgattttggcaaacaaggtccagcccgcacggcgcgaccgcgcacggattaccgggctggggctggcagtcgtcatccgcatcattatgcttgcttttatggcgcatatcatcacgctgaccgaaccgctgttccaaatcggcggcctcgccgtttccggcaaggacatgattatgctcgcgggcggtattttcctgctttacaaagccactaccgaactgcacgaacgcctcgaagggcataaccggtttgccgttgccgacaaccaaaaaaaacacgcgccgttttggggcgtggtcgcgcaaatcctgatactggatgccgtgttttccatcgattcggtcatcaccgccgtggcgatggtcgatcacatcgtcgtggcgatgggcgcggtcgtcgtcgcaatggctgtcatgatttccgccagcaaactcttgaccgaatttgtggacaggcatcccaccgtcgtgatgctctgccttggttttttgttgatgatcggtttcagcctgattgcggaagccttccatttccacattcccaaaggctacctctacgccgccatcggcttctcgattttaatcgaactgtttaaccagatttcgcaacgcaacagccgcaaaaacgactacatcggcagctcgtggcgcaagcgcaccgccgaaaacgttttgggtatgatgggcatacgcgaaagcgtgcttgctgatgcgggcggcgaatccgtggatgacgcgcattttgaagaaaacgaaaaatcgatgatacgcagcgtgctgacgcttgccgaacgcccgattatgggggtgatgattccacgccgcgacatcgaacggctggacatttcccaaagccgcgaagaacagtatgcccaactgcaaaacacgccttacagccgcctgctcgttgtcggaaaggcgggcgtggacgaaccgttgggctacatcaacaaaaaagacctgctgtcccaactgctggaaacaggcggtctcgacattcagacggcattgcgccagccgctcgtcctgcccgacggcacgaccgccttgggcgcgctcgaactcttccgccaaagcagcgcggattacgctttggtggtggacgagttcggcgcggtgttgggtatggtgacgatgaaagacctgttggaagccatcgcaggcgagttccccgaagaattcgagcgcgaagaagaacccgccgttcaggagaatcccgatgaaagcctgacggtggaaggcgcgttggaatatgtggagctggcatcccaactcaacctgccgcagcaggaggaagataccgatttccataccgttgccgggctgattatggaagaattgcaaaccatccccgatgtcggcgattttgccgattttcacggctggcggtttgaagtggtcgaaaaagaagggcagcgcatcgagcgggtcaaaatcaccaaattgcccgaagaataa

SEQ ID NO: 38978 - protein, 518 aa, Neisseria gonorrhoeae FA 1090
MDFSWLAEPHTWIGFATLLVLEVVLGIDNLVFVAILANKVQPARRDRARITGLGLAVVIRIIMLAFMAHIITLTEPLFQIGGLAVSGKDMIMLAGGIFLLYKATTELHERLEGHNRFAVADNQKKHAPFWGVVAQILILDAVFSIDSVITAVAMVDHIVVAMGAVVVAMAVMISASKLLTEFVDRHPTVVMLCLGFLLMIGFSLIAEAFHFHIPKGYLYAAIGFSILIELFNQISQRNSRKNDYIGSSWRKRTAENVLGMMGIRESVLADAGGESVDDAHFEENEKSMIRSVLTLAERPIMGVMIPRRDIERLDISQSREEQYAQLQNTPYSRLLVVGKAGVDEPLGYINKKDLLSQLLETGGLDIQTALRQPLVLPDGTTALGALELFRQSSADYALVVDEFGAVLGMVTMKDLLEAIAGEFPEEFEREEEPAVQENPDESLTVEGALEYVELASQLNLPQQEEDTDFHTVAGLIMEELQTIPDVGDFADFHGWRFEVVEKEGQRIERVKITKLPEE

SEQ ID NO: 38979 - DNA, 1557 bp, Psychrobacter arcticus 273-4
  CDS (1)..(1557): transl_table=11
atgatagagcttctaagcgatccttcgatatggcttggtttcttcgcactggttagtcttgagataattctaggtattgataatctagtcttcattgccattctcgctaataagcttcccccacatcaacgcactaaagcgcgcaatcttggacttggtctagcgctcattatgcgtttaggactgctatttgtcatgtcgtggctcgtgacactgaccgaacctgtggtcagttatgctacgttcaatttatcaatcagagatttgatcttaatcgtcggtggtttctttctattacttaaagcgacgcttgagctacacgaacggttagaaggcaagcttgatgctaataacaatagcaaagtctatgctggctttgcagctgttgttgctcaaattgttatcttagatgctgttttctcctttgatgcggttatcactgcggtcggcatggtagagcatctagaagtaatgatggccgcagttattgtggcgatggcagtgatggttttagccgctaaagctttaactgattttgtcggtaagcaccctactgttgttatcctgtgcttgagcttcttgcttatgatcggctttagtctgatcgttgaaggcttgggcttccatattccaaagagctatttatatgcagccattggtttctctattgttattgaagcctttaatcagtttatgcagcgtaaccgtactaaacatgagagtgccattccgctacgcgacagaacggcggataatatcctaagactgatgggcggcaaaacatctaacaatgatgaagagttactagcagaagatgagacttcagcgccgagcattccttttgcagaagaagagcgctacatgattagcggtgtgctcgcgcttggcgaacgcgatgttgaaaccattatgacgccacgatcagaagtctcttgggttaacgtcgaagatgatttaaaagagattcgtgagcaagtgttgtcaacgccacacagcttattgcctatttgccaaggacagttgaacaaaatattgggcgtagtacgagccaaagatatcttagcggtattagatgaacagcctaacaatatttatctggctttagagcctttactaactaagcagcagcctgtttttgtttctgacactattgataacttgcgtcttatcaatttgctaaaaaatgccaagggcaatttagctatagtggtcgatgagtatggtcaagttgcaggactggtgacgcccttagatctgtttgaagctattgctggtgagtttcctgatgaagatgaaactttagagattgttaaacaagaagatcattggatagctgagggtactattagcttagatcagttgcgtcttgaattaaatgatccaagcctattaggagaagccgaacagctgaccataggcggctatattaatttcaaactagatggtattgctcaagttaatgagcacgtcagcagcgacggctttattttcacggtattagaaacgttatcgacaagaattcttctagtaaaaattgagagagatgtcgctcaatga

SEQ ID NO: 38980 - protein, 518 aa, Psychrobacter arcticus 273-4
MIELLSDPSIWLGFFALVSLEIILGIDNLVFIAILANKLPPHQRTKARNLGLGLALIMRLGLLFVMSWLVTLTEPVVSYATFNLSIRDLILIVGGFFLLLKATLELHERLEGKLDANNNSKVYAGFAAVVAQIVILDAVFSFDAVITAVGMVEHLEVMMAAVIVAMAVMVLAAKALTDFVGKHPTVVILCLSFLLMIGFSLIVEGLGFHIPKSYLYAAIGFSIVIEAFNQFMQRNRTKHESAIPLRDRTADNILRLMGGKTSNNDEELLAEDETSAPSIPFAEEERYMISGVLALGERDVETIMTPRSEVSWVNVEDDLKEIREQVLSTPHSLLPICQGQLNKILGVVRAKDILAVLDEQPNNIYLALEPLLTKQQPVFVSDTIDNLRLINLLKNAKGNLAIVVDEYGQVAGLVTPLDLFEAIAGEFPDEDETLEIVKQEDHWIAEGTISLDQLRLELNDPSLLGEAEQLTIGGYINFKLDGIAQVNEHVSSDGFIFTVLETLSTRILLVKIERDVAQ

SEQ ID NO: 38981 - DNA, 1569 bp, Rhodospirillum rubrum ATCC 11170
  CDS (1)..(1569): transl_table=11
atgatgttcgaatggatcgctgacccctccgcctgggtaggtttggccaccctggtgctgctggagatcgttctggggatcgacaatctcgtcttcatcgcgattctcgccgacaagctgccgccatcccagcgcaacaaggcccgcctgctcggcctgtcgctggccctgatcatgcgccttgggctgctggcctcgatctcgtggatcgtcaccctgacccagccgttgttcaccgtttacggtttcggcttttcgggacgcgacctgatcttgctgatcggcggcctgttcttgatgttcaagggcacgatggaactgcacgagcgcctggagggcgccgaggggcccaaggaaggcaaggtggttcacgccgtcttctggcaggtcatcgtccagatcgtcgttctcgatgccgtcttctcgcttgattcggtgatcaccgccgttggcatgatcagccatctgtcggtgatgatgatcgccgtggtcgtggcgatggcggtgatgatggccgcctccaagccgttgatggcttttgtgtcgcgccatccgaccgtggtgatcctctgcctgggctttttgatgatgatcggcttctcgctgatcgtcgaaggcttcggcttccatatccccaaggggtatctctacgccgccatcggcttctcgatcctgatcgaggccttcaatcaggtcgcccggcgcaaccgcgaacgcatcaccagcaccagtgacctgcgcgagcgcacggccaatgccgttcttagcctgatcggcggccggtcggccgaacagggcctgggggaaaccgccgatgtcgtcgccgaccgcggggcggtgaagcagatcttcgcccccgaggaaaaggacatgatccacggggtgctgaccctggccgagcggccggtgaagtcgatcatgacgccgcgccccgatatcgactggctcgacctcgattcccccaaggatgaactgcgcgccgaaatcctgtcgatggggcattcgcgcttcctgctcgcccatggcagcctcgaccagttcatcggcgtcgccctggcccgcgacctgatgcgcgacctgatggaagagggccagatcaacctggaacgctcggtgcgccagccgctggtcgtccatgaaagcgtcaaggttctgcggctgatggagcaattgcgccagtcgccgctgcaggtcgccgtcgtgcttgacgaatacggctcgctcgaaggcatcgccaccccgaccgatatcctggaagccatcgccggcgagttccccgacgaggacgaggattacgtgaccgtggagcgcggcgaggacggatcctggctggtcgaaggctggctcgacatccgccgcatctccaacatcatcggcgtcgatctggtcgacgaggccgatcgctattccaccctggccggatacattctttggcaactcggccatctgcccaccgagggcgagcgggtgatcaagggcgatctggtcgtcgaggtcgtctcgatgcagggccgcagcatcgacaaggtgcgtctccacttcgagaacaccgacggcgagggggcctaa

SEQ ID NO: 38982 - protein, 522 aa, Rhodospirillum rubrum ATCC 11170
MMFEWIADPSAWVGLATLVLLEIVLGIDNLVFIAILADKLPPSQRNKARLLGLSLALIMRLGLLASISWIVTLTQPLFTVYGFGFSGRDLILLIGGLFLMFKGTMELHERLEGAEGPKEGKVVHAVFWQVIVQIVVLDAVFSLDSVITAVGMISHLSVMMIAVVVAMAVMMAASKPLMAFVSRHPTVVILCLGFLMMIGFSLIVEGFGFHIPKGYLYAAIGFSILIEAFNQVARRNRERITSTSDLRERTANAVLSLIGGRSAEQGLGETADVVADRGAVKQIFAPEEKDMIHGVLTLAERPVKSIMTPRPDIDWLDLDSPKDELRAEILSMGHSRFLLAHGSLDQFIGVALARDLMRDLMEEGQINLERSVRQPLVVHESVKVLRLMEQLRQSPLQVAVVLDEYGSLEGIATPTDILEAIAGEFPDEDEDYVTVERGEDGSWLVEGWLDIRRISNIIGVDLVDEADRYSTLAGYILWQLGHLPTEGERVIKGDLVVEVVSMQGRSIDKVRLHFENTDGEGA

SEQ ID NO: 38983 - DNA, 1593 bp, Ralstonia metallidurans CH34
  CDS (1)..(1593): transl_table=11
atggaatggttgaccgacccctcgatctggatcggactggtcacgctggtcgtgctcgagatcgtcctcggcatcgacaaccttatcttcgtggcgattctcgcggacaaactgccgccgagccagcgcgacaaggcgcgggtggttggcctgtcgctggcgatgttcatgcggcttggcttgctgtcggtgatgtcgtggctcatcacgctcacccggccgctgttctccattgggccgctctcgatgtcggcccgggacctgatcctggcggtaggcggcttcttcctgttgctcaaggccacgctcgagcttcatgagcgcctggagggcatgccacatatggaggggggcaagaccgagtacgccggcttctgggtggtagtgacccagatcgtgattctcgacgcggtgttctcgctggacgccgtgatcactgcggtgggggtggccgaccatctcggcgtgatgatggccgccgtcgtgatcgcggtcggcgtcatgctgattgcttccaagccgctgacccgattcgtgaatgcgcacccgacggtggtggtgctgtgtctcagcttcctgctgatgatcggcatgagcctggtggcggaggggctcggcttccatattccgaagggctacctgtattcggcgatcggattctcggtgctgatcgaggcattcaaccaggtcgcgcagcgcaactttctgcgtcatatggcgcgggtgccgatgcggcagaggacagccgatgccgtattgcgcctgctcggcgaccggcgcgccaatgcatcggagacgccagaaggcggggccgtgaagcgggatgaaccgctgccgttcgcgccggaagagcgcagcatggtgagtggcgtgatgaccctggccgaacgatccgtccactccctgatgacgccgcgcgccgatatctcatatctggacgtgaacgccgatggcggaacgctgcgcaaacagattcttgatgacccgcacagtttcttcccggtatgccgcggcgaactggacaacgtgattggcgtcgtgcgcggcaaggatgcgctcggagacctgttcgacaagggcgccatcgacgagacacagagcctgcgcgagccgatcgtggtccacgagtcgatcaatatcctgcgtttgatcgatacgctgaaggactcgcattcgcgcggccgtctggtgctggtggcggacgagtatggcgcgatcgttgggctggtgacaccgatcgacatcctcgaagccattgcgggagagtttcccgacgaggacgagaccgccacgatcacgaagatcgacgaagggcactggctcatggatggcgctgcggatctgcacggcgtggcgcaggcgctcggcctggaccccgcctgggtgagttcggcgaaaggcgccgcatcgctgggtggcttgctgctcgaacacttcggcatggtgccgaaaccacggatgacgctcgatctggagggctatcgtttcacggtcacggaggtgagcgatcgccggatcgagcgcgtcgacgttcaggccgtgggaagggctaccgccgatgccgagggcgcgcccattgactcgggtgcctga

SEQ ID NO: 38984 - protein, 530 aa, Ralstonia metallidurans CH34
MEWLTDPSIWIGLVTLVVLEIVLGIDNLIFVAILADKLPPSQRDKARVVGLSLAMFMRLGLLSVMSWLITLTRPLFSIGPLSMSARDLILAVGGFFLLLKATLELHERLEGMPHMEGGKTEYAGFWVVVTQIVILDAVFSLDAVITAVGVADHLGVMMAAVVIAVGVMLIASKPLTRFVNAHPTVVVLCLSFLLMIGMSLVAEGLGFHIPKGYLYSAIGFSVLIEAFNQVAQRNFLRHMARVPMRQRTADAVLRLLGDRRANASETPEGGAVKRDEPLPFAPEERSMVSGVMTLAERSVHSLMTPRADISYLDVNADGGTLRKQILDDPHSFFPVCRGELDNVIGVVRGKDALGDLFDKGAIDETQSLREPIVVHESINILRLIDTLKDSHSRGRLVLVADEYGAIVGLVTPIDILEAIAGEFPDEDETATITKIDEGHWLMDGAADLHGVAQALGLDPAWVSSAKGAASLGGLLLEHFGMVPKPRMTLDLEGYRFTVTEVSDRRIERVDVQAVGRATADAEGAPIDSGA

SEQ ID NO: 38985 - DNA, 1548 bp, Pseudomonas aeruginosa UCBPP-PA14
  CDS (1)..(1548): transl_table=11
atggaatggatagctgacccgactgcctggctcggcctggcgaccctgatcgtgctggagatcgtcctcggcatcgacaacctggtgttcatcgcgatcctcgccgacaagctgccgccgcacctgcgcgaccgcgcccgggtcctcggcctgtcgctggcgctgctgatgcgcctgggcctgctggcgagcatctcgtggatggtgaccctcaccgagccgctgttcgaggtattcggcaagagcttctccggccgcgacctgatcatgctgttcggtggcgtgttcctgctgttcaaggccaccatggagctgcacgaacgcctcgaaggccatgtcgcccagcacgccggcaacaagacctacgcgctgttctggccgatcgtcgcgcagatcgtggtgctcgacgcggtgttctcgctcgacgcggtgatcaccgcagtgggcatggtcgagcacctggaagtgatgatgatcgcggtgatcgtctccatcggcctgatgatcgtcgccagcaagccgctgacccgcttcgtcaatcgtcacccgacggtgatcatgctgtgcctgggcttcctgatgatgatcggcttcagcctgaccgccgagggcctgggcttccatatcccgaaaggctacctgtacgcggccatcggcttctcgatcctcatcgaggtgttcaaccaggtcgcccgcaagcgccgcaagaagagcctgcagggccaccgcccgctgcgcgcacgtaccgcccatgcggtgctgcgcctgctcggcggccagcgcctggaggccgacgaggtcggcgaggaagtcgccgacctgttcgaggagggcgacgaccaggtggtcttcgaccgccgcgagcgggtgatgatcagcggtgtgctgcaattggccgagaagcccatccgcagcctgatgacggtacgcgccgaggtcgactgcatcgacctcgacagcggccgcgaggcgatccgcgcggcgctgctcgaatcgtcctactcgcgcctgccactggtgcgcgacgggcgcgtcgaggagccgctgggctacgtgcacaagaaggaactgctcaaggagctgctcgccggcgcccagccggacctggaaagcctggcccgccagccgctcaacctgttgcaggactgttcgatcctcaatgccctggagcagatgcgcgaggcctcgacccacgtggccttcgtggtcaacgagttcggcgaattcatcggcctgctgaccctgaccgacattctcgaatccatcgccggcgagctgcccgacgccagcgagatcgacggtccggacgtggtcgaggagaacgacggctacctggtcagcggtgccatgaacctcagccaggtgcgtcgacgcgtggggttcgacgcgcgcgccacggaggactaccagaccctcgccgggctggtgatgagcctgctcgaccgcctgccggtgatcggcgaccgcctgcagtggcaggactgggaactgcgggtggtggaagtggaagaacgccgggtgacccgggtcctgctgcgcaggggctga

SEQ ID NO: 38986 - protein, 515 aa, Pseudomonas aeruginosa UCBPP-PA14
MEWIADPTAWLGLATLIVLEIVLGIDNLVFIAILADKLPPHLRDRARVLGLSLALLMRLGLLASISWMVTLTEPLFEVFGKSFSGRDLIMLFGGVFLLFKATMELHERLEGHVAQHAGNKTYALFWPIVAQIVVLDAVFSLDAVITAVGMVEHLEVMMIAVIVSIGLMIVASKPLTRFVNRHPTVIMLCLGFLMMIGFSLTAEGLGFHIPKGYLYAAIGFSILIEVFNQVARKRRKKSLQGHRPLRARTAHAVLRLLGGQRLEADEVGEEVADLFEEGDDQVVFDRRERVMISGVLQLAEKPIRSLMTVRAEVDCIDLDSGREAIRAALLESSYSRLPLVRDGRVEEPLGYVHKKELLKELLAGAQPDLESLARQPLNLLQDCSILNALEQMREASTHVAFVVNEFGEFIGLLTLTDILESIAGELPDASEIDGPDVVEENDGYLVSGAMNLSQVRRRVGFDARATEDYQTLAGLVMSLLDRLPVIGDRLQWQDWELRVVEVEERRVTRVLLRRG

SEQ ID NO: 38987 - DNA, 1584 bp, Escherichia coli
  CDS (1)..(1584): transl_table=11
atggaatggattgccgatccgtctatctgggccgggttaatcacgctgattgtgatcgaactggtcctcggcattgataacctggtctttattgccatcctcgccgaaaaactaccgccgaagcagcgcgaccgcgcacgggttaccgggctgctgctggcgatgttaatgcgcctgttactgctggcgtcaatctcctggctggtcaccctgactcaaccgctgttcagcttccgctcgtttacctttagcgcccgcgacttaatcatgctgtttggtggtttcttcctgttgttcaaagccacgatggagctgaacgaacggctggaagggaaagacagcaataatcccacacaacgcaaaggtgcgaagttctggggcgtggtgacgcaaattgtggtgctggacgccatcttctcactcgactcggtgattaccgccgtcgggatggtcgaccatttactggtcatgatggccgccgtcgttatcgctatcagcctaatgctgatggccagcaagccgttaacgcaatttgttaacagtcacccgaccatcgttattctctgcttaagcttcctgttgatgattggctttagcctggtggcagaaggtttcggcttcgtcattccgaaaggctacctgtacgccgccattggcttctcggtgatgatcgaggcgctcaatcagttggctatctttaaccggcgacgttttctttccgctaaccagacgctgcgccagcggactaccgaagcggtaatgcgcctgcttagcgggcaaaaagaagatgcggaactggacgccgaaaccgcgtccatgctggtggatcatggtaaccagcagatctttaatccgcaggaacggcggatgattgagcgggtacttaatcttaaccagcgtaccgtcagcagcattatgacgtcgcgccacgatattgagcatatcgatctcaacgcgccggaagaagaaatccgccagttgctggagcgaaatcagcatacgcggctggtggttaccgacggtgatgacgcagaagatttgctcggtgttgttcacgttatcgacctgctacaacagtcactgcgtggcgaaccgctcaacctgcgggtgttgattcgccagccactggtgttcccggaaaccttgccgttgttacctgccctggagcagttccgtaatgcccgcacacactttgcttttgtggtggatgagtttggctcggtggaagggattgtgacattaagtgacgtcactgaaaccattgccggtaacttaccgaacgaagtggaagagatcgacgcccgccatgatattcagaagaatgcggacggttcctggacggcgaatggtcatatgccgctggaagatctggtgcaatatgtgccgctgccgctggatgaaaaacgtgaatatcacaccattgccgggctgttgatggagtatttgcagcgtattccaaaacctggcgaagaagttcaggtgggggattatttgcttaaaacgttgcaggtagaaagccatcgcgtgcagaaggtgcagattataccgctgcgtaaggatggcgagatggagtacgaggtgtga

SEQ ID NO: 38988 - protein, 527 aa, Escherichia coli
MEWIADPSIWAGLITLIVIELVLGIDNLVFIAILAEKLPPKQRDRARVTGLLLAMLMRLLLLASISWLVTLTQPLFSFRSFTFSARDLIMLFGGFFLLFKATMELNERLEGKDSNNPTQRKGAKFWGVVTQIVVLDAIFSLDSVITAVGMVDHLLVMMAAVVIAISLMLMASKPLTQFVNSHPTIVILCLSFLLMIGFSLVAEGFGFVIPKGYLYAAIGFSVMIEALNQLAIFNRRRFLSANQTLRQRTTEAVMRLLSGQKEDAELDAETASMLVDHGNQQIFNPQERRMIERVLNLNQRTVSSIMTSRHDIEHIDLNAPEEEIRQLLERNQHTRLVVTDGDDAEDLLGVVHVIDLLQQSLRGEPLNLRVLIRQPLVFPETLPLLPALEQFRNARTHFAFVVDEFGSVEGIVTLSDVTETIAGNLPNEVEEIDARHDIQKNADGSWTANGHMPLEDLVQYVPLPLDEKREYHTIAGLLMEYLQRIPKPGEEVQVGDYLLKTLQVESHRVQKVQIIPLRKDGEMEYEV

SEQ ID NO: 38989 - DNA, 1584 bp, Shigella flexneri
  CDS (1)..(1584): transl_table=11
atggaatggattgccgatccgtctatctgggccgggttaatcacgctgattgtgatcgaactggtcctcggcattgataacctggtctttattgccatcctcgccgaaaaactaccgccgaagcagcgcgaccgcgcacgggttaccgggctgctgctggcgatgttaatgcgcctgttactgctagcgtcaatctcctggctggtcaccctgactcaaccgctgttcagcttccgctcgtttacctttagcgcccgcgacttaatcatgctgtttggtggtttcttcctgttgttcaaagccacgatggagctgaacgaacggctggaagggaaagacagcaataatcccacacaacgcaaaggtgcgaagttctggggcgtggtgacgcaaattgtggtactggacgccattttctcactcgactcagtgattaccgccgtcgggatggtcgaccatttactggtcatgatggccgccgtggttatcgctatcagcctgatgttgatggccagcaagccgttaacgcaatttgttaacagtcacccgaccatcgttattctctgcttaagcttcctgttgatgattggctttagcctggtggcagaaggtttcggcttcgtcattccgaaaggctacctgtacgctgccattggtttctcggtgatgatcgaggcactcaatcagttggctatctttaaccggcgacgttttctttccgctaatcagacgctacgccagcggactaccgaagcggtaatgcgcctgcttagcgggcaaaaagaagatgcggaactggacgccaaaaccgcgtccatgctggtggatcatggaaaccagcagatctttaatccgcaggaacggcggatgattgagcgggtacttaatcttaaccagcgtaccgtaagcagcattatgacgtcgcgccacgatattgagcatatcgatctcaacgcgccggaagaagaaatccgccagttgctggagcgaaatcagcatacgcggctggtggttaccgacggtgatgacgcagaagatttgctcggtgttgttcacgttatcgacctgctacaacagtcactgcgcggcgaaccgctcaacctgcgggtgttgattcgccagccgctggtgttcccggaaaccttgccgttgttaccagccctggagcagttccgtaatgcccgcacgcactttgcttttgtggtggatgagtttggctcggtggaagggattgtgacattaagtgacgtcactgaaaccattgccggtaacttaccgaacgaagtggaagagatcgacgcccgccatgatattcagaagaatgcggacggttcctggacggcgaatggtcatatgccgctggaggatctggtgcaatatgtgccgctgccgctggatgaaaaacgtgaatatcacaccattgccgggctgttgatggagtatttgcagcgtattccaaaacctggcgaagaagttcaggtgggggattatttgcttaaaacgttgcaggtggaaagccatcgcgtgcagaaggtgcagattataccgctgcgtaaggatggcgagatggagtacgaggtgtga

SEQ ID NO: 38990 - protein, 527 aa, Shigella flexneri
MEWIADPSIWAGLITLIVIELVLGIDNLVFIAILAEKLPPKQRDRARVTGLLLAMLMRLLLLASISWLVTLTQPLFSFRSFTFSARDLIMLFGGFFLLFKATMELNERLEGKDSNNPTQRKGAKFWGVVTQIVVLDAIFSLDSVITAVGMVDHLLVMMAAVVIAISLMLMASKPLTQFVNSHPTIVILCLSFLLMIGFSLVAEGFGFVIPKGYLYAAIGFSVMIEALNQLAIFNRRRFLSANQTLRQRTTEAVMRLLSGQKEDAELDAKTASMLVDHGNQQIFNPQERRMIERVLNLNQRTVSSIMTSRHDIEHIDLNAPEEEIRQLLERNQHTRLVVTDGDDAEDLLGVVHVIDLLQQSLRGEPLNLRVLIRQPLVFPETLPLLPALEQFRNARTHFAFVVDEFGSVEGIVTLSDVTETIAGNLPNEVEEIDARHDIQKNADGSWTANGHMPLEDLVQYVPLPLDEKREYHTIAGLLMEYLQRIPKPGEEVQVGDYLLKTLQVESHRVQKVQIIPLRKDGEMEYEV

SEQ ID NO: 38991 - DNA, 24 bp, Artificial sequence
  primer
atgccccgatttatccatgatcga

SEQ ID NO: 38992 - DNA, 24 bp, Artificial sequence
  primer
ttacacctcgtactccatctcgcc

SEQ ID NO: 38993 - protein, 538 aa, Artificial sequence
  consensus sequence
  Variant (3)..(4): Xaa in position 3 to 4 is any amino acid
  Variant (7)..(8): Xaa in position 7 to 8 is any amino acid
  Variant (10)..(10): Xaa in position 10 is any amino acid
  Variant (13)..(13): Xaa in position 13 is any amino acid
  Variant (16)..(16): Xaa in position 16 is any amino acid
  Variant (18)..(18): Xaa in position 18 is any amino acid
  Variant (20)..(20): Xaa in position 20 is any amino acid
  Variant (28)..(28): Xaa in position 28 is any amino acid
  Variant (35)..(35): Xaa in position 35 is any amino acid
  Variant (39)..(40): Xaa in position 39 to 40 is any amino acid
  Variant (43)..(44): Xaa in position 43 to 44 is any amino acid
  Variant (47)..(48): Xaa in position 47 to 48 is any amino acid
  Variant (51)..(51): Xaa in position 51 is any amino acid
  Variant (54)..(55): Xaa in position 54 to 55 is any amino acid
  Variant (59)..(59): Xaa in position 59 is any amino acid
  Variant (62)..(64): Xaa in position 62 to 64 is any amino acid
  Variant (67)..(68): Xaa in position 67 to 68 is any amino acid
  Variant (72)..(72): Xaa in position 72 is any amino acid
  Variant (76)..(81): Xaa in position 76 to 81 is any amino acid
  Variant (84)..(84): Xaa in position 84 is any amino acid
  Variant (89)..(91): Xaa in position 89 to 91 is any amino acid
  Variant (94)..(94): Xaa in position 94 is any amino acid
  Variant (98)..(98): Xaa in position 98 is any amino acid
  Variant (100)..(100): Xaa in position 100 is any amino acid
  Variant (102)..(102): Xaa in position 102 is any amino acid
  Variant (105)..(105): Xaa in position 105 is any amino acid
  Variant (111)..(121): Xaa in position 111 to 121 is any amino acid
  Variant (122)..(123): Xaa in position 122 to 123 is any or no amino acid
  Variant (125)..(125): Xaa in position 125 is any amino acid
  Variant (128)..(128): Xaa in position 128 is any amino acid
  Variant (130)..(131): Xaa in position 130 to 131 is any amino acid
  Variant (139)..(139): Xaa in position 139 is any amino acid
  Variant (144)..(144): Xaa in position 144 is any amino acid
  Variant (152)..(154): Xaa in position 152 to 154 is any amino acid
  Variant (155)..(156): Xaa in position 155 to 156 is any or no amino acid
  Variant (158)..(158): Xaa in position 158 is any amino acid
  Variant (162)..(162): Xaa in position 162 is any amino acid
  Variant (165)..(166): Xaa in position 165 to 166 is any amino acid
  Variant (168)..(170): Xaa in position 168 to 170 is any amino acid
  Variant (172)..(173): Xaa in position 172 to 173 is any amino acid
  Variant (177)..(177): Xaa in position 177 is any amino acid
  Variant (179)..(180): Xaa in position 179 to 180 is any amino acid
  Variant (183)..(184): Xaa in position 183 to 184 is any amino acid
  Variant (188)..(188): Xaa in position 188 is any amino acid
  Variant (190)..(190): Xaa in position 190 is any amino acid
  Variant (194)..(194): Xaa in position 194 is any amino acid
  Variant (197)..(197): Xaa in position 197 is any amino acid
  Variant (204)..(205): Xaa in position 204 to 205 is any amino acid
  Variant (208)..(208): Xaa in position 208 is any amino acid
  Variant (211)..(211): Xaa in position 211 is any amino acid
  Variant (225)..(226): Xaa in position 225 to 226 is any amino acid
  Variant (229)..(230): Xaa in position 229 to 230 is any amino acid
  Variant (233)..(236): Xaa in position 233 to 236 is any amino acid
  Variant (238)..(247): Xaa in position 238 to 247 is any amino acid
  Variant (248)..(248): Xaa in position 248 is any or no amino acid
  Variant (250)..(250): Xaa in position 250 is any amino acid
  Variant (253)..(255): Xaa in position 253 to 255 is any amino acid
  Variant (257)..(261): Xaa in position 257 to 261 is any amino acid
  Variant (263)..(280): Xaa in position 263 to 280 is any amino acid
  Variant (281)..(289): Xaa in position 281 to 289 is any or no amino acid
  Variant (291)..(293): Xaa in position 291 to 293 is any amino acid
  Variant (295)..(296): Xaa in position 295 to 296 is any amino acid
  Variant (297)..(300): Xaa in position 297 to 300 is any or no amino acid
  Variant (303)..(304): Xaa in position 303 to 304 is any amino acid
  Variant (307)..(307): Xaa in position 307 is any amino acid
  Variant (309)..(310): Xaa in position 309 to 310 is any amino acid
  Variant (312)..(316): Xaa in position 312 to 316 is any amino acid
  Variant (319)..(319): Xaa in position 319 is any amino acid
  Variant (321)..(326): Xaa in position 321 to 326 is any amino acid
  Variant (328)..(338): Xaa in position 328 to 338 is any amino acid
  Variant (340)..(343): Xaa in position 340 to 343 is any amino acid
  Variant (345)..(358): Xaa in position 345 to 358 is any amino acid
  Variant (359)..(359): Xaa in position 359 is any or no amino acid
  Variant (361)..(365): Xaa in position 361 to 365 is any amino acid
  Variant (369)..(384): Xaa in position 369 to 384 is any amino acid
  Variant (385)..(390): Xaa in position 385 to 390 is any or no amino acid
  Variant (392)..(395): Xaa in position 392 to 395 is any amino acid
  Variant (397)..(400): Xaa in position 397 to 400 is any amino acid
  Variant (402)..(407): Xaa in position 402 to 407 is any amino acid
  Variant (409)..(415): Xaa in position 409 to 415 is any amino acid
  Variant (416)..(418): Xaa in position 416 to 418 is any or no amino acid
  Variant (420)..(421): Xaa in position 420 to 421 is any amino acid
  Variant (423)..(423): Xaa in position 423 is any amino acid
  Variant (425)..(427): Xaa in position 425 to 427 is any amino acid
  Variant (429)..(430): Xaa in position 429 to 430 is any amino acid
  Variant (432)..(433): Xaa in position 432 to 433 is any amino acid
  Variant (435)..(436): Xaa in position 435 to 436 is any amino acid
  Variant (438)..(438): Xaa in position 438 is any amino acid
  Variant (442)..(443): Xaa in position 442 to 443 is any amino acid
  Variant (445)..(462): Xaa in position 445 to 462 is any amino acid
  Variant (463)..(467): Xaa in position 463 to 467 is any or no amino acid
  Variant (469)..(490): Xaa in position 469 to 490 is any amino acid
  Variant (491)..(493): Xaa in position 491 to 493 is any or no amino acid
  Variant (495)..(495): Xaa in position 495 is any amino acid
  Variant (498)..(506): Xaa in position 498 to 506 is any amino acid
  Variant (508)..(509): Xaa in position 508 to 509 is any amino acid
  Variant (511)..(532): Xaa in position 511 to 532 is any amino acid
  Variant (533)..(537): Xaa in position 533 to 537 is any or no amino acid
EWXXDPXXWXGLXTLXVXEXVLGIDNLXFIAILAXKLPXXQRXXARXXGLXLAXXMRLXLLXXXSWXXTLTXPLFXXXXXXFSXRDLIXXXGGXFLLXKXTXELXERLEGXXXXXXXXXXXXXAXFWXVXXQIVVLDAXFSLDXVITAVGMXXXXXLXVMMXAVXXAXXXMXXASKXLXXFVXXHPTXVXLCLXFLXMIGFSLXXEGXGFXIPKGYLYAAIGFSXXIEXXNQXXXXNXXXXXXXXXXXRXRTXXXVXXXXXGXXXXXXXXXXXXXXXXXXXXXXXXXXXFXXXEXXXXXXMIXXVLXLXXRXXXXXMTXRXXXXXXDXXXXXXXXXXXLXXXXHXXXXXXXXXXXXXXXGXXXXXDLLXXXXXXXXXXXXXXXXXXXXXXPXXXXEXXXXLXXXXXXRXXXXXXXXXXVXXEXGXXXGXXTXXDXXEXIAGXXPXXXXXXXXXXXXXXXXXXXXXXXGXXXXXXXXXXXXXXXXXXXXXXXXXTXAGXXXXXXXXXPXXGXXXXXXXXXXXXXXXXXXXXXXXXXXXV

SEQ ID NO: 38994 - protein, 59 aa, Artificial sequence
  protein pattern
  Variant (2)..(2): Xaa in position 2 is any amino acid
  Variant (4)..(4): Xaa in position 4 is any amino acid
  Variant (6)..(7): Xaa in position 6 to 7 is any amino acid
  Variant (10)..(10): Xaa in position 10 is Ala, Asp, Gly, Asn or Ser
  Variant (11)..(11): Xaa in position 11 is any amino acid
  Variant (15)..(16): Xaa in position 15 to 16 is Ile or Val
  Variant (17)..(17): Xaa in position 17 is Ile, Met or Val
  Variant (21)..(21): Xaa in position 21 is Gly or Ser
  Variant (24)..(24): Xaa in position 24 is Leu or Met
  Variant (28)..(28): Xaa in position 28 is Phe, Leu or Met
  Variant (31)..(31): Xaa in position 31 is any amino acid
  Variant (32)..(32): Xaa in position 32 is Ala or Val
  Variant (33)..(33): Xaa in position 33 is Asp or Glu
  Variant (34)..(34): Xaa in position 34 is Ala, Gly or Ser
  Variant (35)..(35): Xaa in position 35 is Phe or Leu
  Variant (36)..(36): Xaa in position 36 is any amino acid
  Variant (37)..(37): Xaa in position 37 is Phe or Tyr
  Variant (38)..(38): Xaa in position 38 is any amino acid
  Variant (39)..(39): Xaa in position 39 is Ile or Val
  Variant (42)..(42): Xaa in position 42 is Gly or Ser
  Variant (46)..(46): Xaa in position 46 is Ala or Ser
  Variant (51)..(51): Xaa in position 51 is Ala or Ser
  Variant (52)..(52): Xaa in position 52 is Ile or Val
  Variant (53)..(53): Xaa in position 53 is any amino acid
  Variant (56)..(56): Xaa in position 56 is any amino acid
  Variant (57)..(57): Xaa in position 57 is Phe, Leu or Met
AXKXLXXFVXXHPTXXXLCLXFLXMIGXSLXXXXXXXXXPKXYLYXAIGFXXXIEXXNQ

SEQ ID NO: 38995 - protein, 55 aa, Artificial sequence
  protein pattern
  Variant (2)..(2): Xaa in position 2 is any amino acid
  Variant (3)..(4): Xaa in position 3 to 4 is any or no amino acid
  Variant (6)..(6): Xaa in position 6 is Ala, Ile, Leu or Val
  Variant (9)..(9): Xaa in position 9 is Ala, Ile, Leu or Val
  Variant (12)..(12): Xaa in position 12 is Ile or Val
  Variant (13)..(13): Xaa in position 13 is Ile, Leu or Val
  Variant (14)..(14): Xaa in position 14 is Ile or Leu
  Variant (16)..(16): Xaa in position 16 is Ile, Leu or Val
  Variant (24)..(24): Xaa in position 24 is Ile or Val
  Variant (26)..(26): Xaa in position 26 is Ile or Val
  Variant (31)..(31): Xaa in position 31 is Asp or Glu
  Variant (35)..(37): Xaa in position 35 to 37 is any amino acid
  Variant (39)..(39): Xaa in position 39 is Asp, Asn or Gln
  Variant (40)..(40): Xaa in position 40 is any amino acid
  Variant (43)..(43): Xaa in position 43 is Ile, Leu, Met or Val
  Variant (44)..(44): Xaa in position 44 is any amino acid
  Variant (47)..(48): Xaa in position 47 to 48 is any amino acid
  Variant (50)..(50): Xaa in position 50 is Leu or Met
  Variant (51)..(51): Xaa in position 51 is any amino acid
  Variant (54)..(54): Xaa in position 54 is Ile or Leu
  Variant (55)..(55): Xaa in position 55 is Ala, Gly, Ile, Leu or Val
DXXXWXGLXTLXXXEXVLGIDNLXFXAILAXKLPXXXRXXARXXGLXXAXXMRXX

SEQ ID NO: 38996 - protein, 25 aa, Artificial sequence
  protein pattern
  Variant (2)..(3): Xaa in position 2 to 3 is any amino acid
  Variant (4)..(4): Xaa in position 4 is any or no amino acid
  Variant (6)..(6): Xaa in position 6 is any or no amino acid
  Variant (10)..(10): Xaa in position 10 is Ile or Val
  Variant (14)..(14): Xaa in position 14 is Ile or Val
  Variant (17)..(17): Xaa in position 17 is Ile or Leu
  Variant (19)..(19): Xaa in position 19 is Ala or Ser
  Variant (20)..(20): Xaa in position 20 is Ile or Val
  Variant (24)..(24): Xaa in position 24 is Thr or Val
WXXXVXQIVXLDAXFSXDXXITAXG

SEQ ID NO: 38997 - protein, 51 aa, Artificial sequence
  protein pattern
  Variant (2)..(3): Xaa in position 2 to 3 is any amino acid
  Variant (4)..(4): Xaa in position 4 is any or no amino acid
  Variant (6)..(7): Xaa in position 6 to 7 is any or no amino acid
  Variant (9)..(9): Xaa in position 9 is Ile, Leu, Met or Val
  Variant (10)..(10): Xaa in position 10 is any amino acid
  Variant (14)..(14): Xaa in position 14 is any amino acid
  Variant (16)..(16): Xaa in position 16 is any amino acid
  Variant (17)..(17): Xaa in position 17 is Phe, Ile or Val
  Variant (18)..(22): Xaa in position 18 to 22 is any amino acid
  Variant (23)..(23): Xaa in position 23 is Gly, Asn, Pro, Ser or Thr
  Variant (24)..(24): Xaa in position 24 is Phe, Leu or Met
  Variant (25)..(25): Xaa in position 25 is Ala or Ser
  Variant (26)..(26): Xaa in position 26 is Ala, Gly or Ile
  Variant (31)..(31): Xaa in position 31 is Leu or Met
  Variant (32)..(33): Xaa in position 32 to 33 is any amino acid
  Variant (36)..(36): Xaa in position 36 is any amino acid
  Variant (39)..(39): Xaa in position 39 is Leu or Met
  Variant (40)..(40): Xaa in position 40 is any amino acid
  Variant (42)..(42): Xaa in position 42 is Ala or Gly
  Variant (44)..(44): Xaa in position 44 is any amino acid
  Variant (47)..(47): Xaa in position 47 is any amino acid
  Variant (48)..(48): Xaa in position 48 is Glu or Arg
  Variant (49)..(49): Xaa in position 49 is Gln or Arg
  Variant (50)..(50): Xaa in position 50 is Ile or Leu
LXXXSXXWXXTLTXPXXXXXXXXXXXRDLIXXXGGXFLXXKXTXELXXXXE

SEQ ID NO: 38998 - protein, 39 aa, Artificial sequence
  protein pattern
  Variant (2)..(6): Xaa in position 2 to 6 is any amino acid
  Variant (7)..(9): Xaa in position 7 to 9 is any or no amino acid
  Variant (11)..(11): Xaa in position 11 is any amino acid
  Variant (12)..(12): Xaa in position 12 is Asp or Asn
  Variant (14)..(14): Xaa in position 14 is Phe or Tyr
  Variant (16)..(16): Xaa in position 16 is any amino acid
  Variant (17)..(17): Xaa in position 17 is Phe, Ile, Leu, Met or Val
  Variant (18)..(18): Xaa in position 18 is any amino acid
  Variant (20)..(20): Xaa in position 20 is Ile, Leu, Met or Val
  Variant (21)..(21): Xaa in position 21 is Ala, Ile, Leu or Val
  Variant (23)..(24): Xaa in position 23 to 24 is any amino acid
  Variant (26)..(26): Xaa in position 26 is Ile, Leu or Val
  Variant (27)..(27): Xaa in position 27 is any amino acid
  Variant (29)..(29): Xaa in position 29 is Ala, Ser or Thr
  Variant (33)..(33): Xaa in position 33 is Glu or Asn
  Variant (34)..(34): Xaa in position 34 is Phe or Leu
  Variant (36)..(36): Xaa in position 36 is any amino acid
  Variant (37)..(37): Xaa in position 37 is Ala, Asp or Glu
  Variant (38)..(38): Xaa in position 38 is any amino acid
RXXXXXXXXVXXEXGXXXGXXTXXDXXEXIAGXXPXXXE

SEQ ID NO: 38999 - protein, 36 aa, Artificial sequence
  protein pattern
  Variant (2)..(3): Xaa in position 2 to 3 is any amino acid
  Variant (4)..(5): Xaa in position 4 to 5 is any or no amino acid
  Variant (8)..(9): Xaa in position 8 to 9 is any amino acid
  Variant (12)..(12): Xaa in position 12 is Ala, Asp, Gly, Asn, Gln, Ser or Thr
  Variant (14)..(14): Xaa in position 14 is Ala, Gly or Asn
  Variant (15)..(15): Xaa in position 15 is Asp, Glu, Gln or Ser
  Variant (16)..(16): Xaa in position 16 is Lys or Arg
  Variant (17)..(17): Xaa in position 17 is Asp, Pro, Ser or Thr
  Variant (18)..(18): Xaa in position 18 is Ile, Leu or Val
  Variant (19)..(19): Xaa in position 19 is any amino acid
  Variant (20)..(20): Xaa in position 20 is Gly, Ser, Thr or Val
  Variant (21)..(21): Xaa in position 21 is Ile, Leu or Val
  Variant (22)..(24): Xaa in position 22 to 24 is any amino acid
  Variant (26)..(26): Xaa in position 26 is any amino acid
  Variant (27)..(27): Xaa in position 27 is Asp or Glu
  Variant (28)..(28): Xaa in position 28 is Ile or Val
  Variant (29)..(30): Xaa in position 29 to 30 is any amino acid
  Variant (31)..(31): Xaa in position 31 is Ile, Leu or Val
  Variant (32)..(32): Xaa in position 32 is Asp, Glu or Asn
  Variant (33)..(33): Xaa in position 33 is any amino acid
  Variant (34)..(34): Xaa in position 34 is Ala, Asp, Glu, Asn, Gln or Ser
  Variant (35)..(35): Xaa in position 35 is any amino acid
  Variant (36)..(36): Xaa in position 36 is Asp, Gly, Pro, Ser or Thr
EXXXXMIXXVLXLXXXXXXXXXXXRXXXXXXXXXXX

SEQ ID NO: 39000 - protein, 20 aa, Artificial sequence
  protein pattern
  Variant (2)..(2): Xaa in position 2 is Ile, Leu or Val
  Variant (5)..(6): Xaa in position 5 to 6 is any or no amino acid
  Variant (8)..(13): Xaa in position 8 to 13 is any amino acid
  Variant (14)..(15): Xaa in position 14 to 15 is any or no amino acid
  Variant (17)..(18): Xaa in position 17 to 18 is any amino acid
  Variant (20)..(20): Xaa in position 20 is Asp or Glu
TXAGXXLXXXXXXXXPXXGX

SEQ ID NO: 39001 - protein, 15 aa, Artificial sequence
  protein pattern
  Variant (2)..(2): Xaa in position 2 is any amino acid
  Variant (3)..(3): Xaa in position 3 is Ile or Val
  Variant (5)..(5): Xaa in position 5 is Ile or Met
  Variant (6)..(6): Xaa in position 6 is any amino acid
  Variant (9)..(9): Xaa in position 9 is any amino acid
  Variant (10)..(10): Xaa in position 10 is Phe, Ile, Leu or Val
  Variant (11)..(11): Xaa in position 11 is Ala or Ser
  Variant (12)..(12): Xaa in position 12 is Ile, Met or Val
  Variant (13)..(13): Xaa in position 13 is any amino acid
  Variant (14)..(14): Xaa in position 14 is Ile, Leu or Val
LXXMXXAVXXXXXXM

SEQ ID NO: 39002 - DNA, 519 bp, Escherichia coli
  CDS (1)..(519): transl_table=11
atgattcttaaatcagctatttccgctgactctctgctcgctaaggatgcttttagggcatcctttcatttacactttttacgaaatcatgggatcactaacaaaatatcgcttgtcagttatattgtatggcaggaaagatatgcgactgatattacagatccccaaagtggagagtttatgaccattaaaaataagatgttgctgggtgcgcttttgctggttaccagtgccgcctgggccgcaccagccaccgcgggttcgaccaatacctcgggaatttctaagtatgagttaagtagtttcattgctgactttaagcatttcaaaccaggggacaccgtaccagaaatgtaccgtaccgatgagtacaacattaagcagtggcagttgcgtaacctgcccgcgcctgatgccgggacgcactggacctatatgggtggcgcgtacgtgttgatcagcgacaccgacggtaaaatcattaaagcctacgacggtgagattttttatcatcgctaa

SEQ ID NO: 39003 - protein, 172 aa, Escherichia coli
MILKSAISADSLLAKDAFRASFHLHFLRNHGITNKISLVSYIVWQERYATDITDPQSGEFMTIKNKMLLGALLLVTSAAWAAPATAGSTNTSGISKYELSSFIADFKHFKPGDTVPEMYRTDEYNIKQWQLRNLPAPDAGTHWTYMGGAYVLISDTDGKIIKAYDGEIFYHR

SEQ ID NO: 39004 - DNA, 315 bp, Salmonella typhimurium
  CDS (1)..(315): transl_table=11
atgaaaagtaagttgctgccttgcgcgctgttgcttgcaaccagttttgcatgggccgcccccgcgacaacgggcattgatcaatatgagttaaaaagctttatcgccgacttcacccacttcaagcccggcgataccgttccgcaaatgtaccgcaccgatgagtataatattaaacagtggaaattacgtaatctgcccgcgccagatgccggtactcactggacctatatgggcggcgcgtatgtactgattaacgataccgatggaaaaatcatcaaagcctatgatggcgagattttttatcatcgataa

SEQ ID NO: 39005 - protein, 104 aa, Salmonella typhimurium
MKSKLLPCALLLATSFAWAAPATTGIDQYELKSFIADFTHFKPGDTVPQMYRTDEYNIKQWKLRNLPAPDAGTHWTYMGGAYVLINDTDGKIIKAYDGEIFYHR

SEQ ID NO: 39006 - DNA, 519 bp, Escherichia coli O157:H7 EDL933
  CDS (1)..(519): transl_table=11
atgattcttaaatcagcttattccgctcacttctcgctcaatgaggatgcttttgctacatcctttcatttacactttttacgaaatcatgggatcactaacaaaatatcgcttgtcagttatattgtatggcaggaaagatatgcgactgatattacagatccccaaagtggagagtttatgaccattaaaaataagatgttgctgggtgcgcttttgctggttaccagtgccgcctgggccgcaccagccaccgcgggttcgaccaatacctcgggaatttctaagtatgagttaagcagtttcattgctgactttaagcattacaaaccaggggacaccgtaccagagatgtaccgtaccgatgagtacaacattaagcagtggcagttgcgtaacctgcccgcgccggatgccgggacgcactggacctatatgggtggcgcgtacgtgttgatcagcgacaccgacggtaaaatcattaaagcctacgacggtgagattttttatcatcgctaa

SEQ ID NO: 39007 - protein, 172 aa, Escherichia coli O157:H7 EDL933
MILKSAYSAHFSLNEDAFATSFHLHFLRNHGITNKISLVSYIVWQERYATDITDPQSGEFMTIKNKMLLGALLLVTSAAWAAPATAGSTNTSGISKYELSSFIADFKHYKPGDTVPEMYRTDEYNIKQWQLRNLPAPDAGTHWTYMGGAYVLISDTDGKIIKAYDGEIFYHR

SEQ ID NO: 39008 - DNA, 519 bp, Escherichia coli O6; identical to SEQ ID NO: 39002
  CDS (181)..(519): transl_table=11

SEQ ID NO: 39009 - protein, 112 aa, Escherichia coli O6
MTIKNKMLLGALLLVTSAAWAAPATAGSTNTSGISKYELSSFIADFKHFKPGDTVPEMYRTDEYNIKQWQLRNLPAPDAGTHWTYMGGAYVLISDTDGKIIKAYDGEIFYHR

SEQ ID NO: 39010 - DNA, 26 bp, Artificial sequence
  primer
atgattcttaaatcagctatttccgc

SEQ ID NO: 39011 - DNA, 25 bp, Artificial sequence
  primer
ttagcgatgataaaaaatctcaccg

SEQ ID NO: 39012 - protein, 109 aa, Artificial sequence
  consensus sequence
  Variant (2)..(2): Xaa in position 2 is any amino acid
  Variant (4)..(4): Xaa in position 4 is any amino acid
  Variant (6)..(7): Xaa in position 6 to 7 is any amino acid
  Variant (12)..(12): Xaa in position 12 is any amino acid
  Variant (15)..(15): Xaa in position 15 is any amino acid
  Variant (23)..(23): Xaa in position 23 is any amino acid
  Variant (25)..(30): Xaa in position 25 to 30 is any amino acid
  Variant (32)..(33): Xaa in position 32 to 33 is any amino acid
  Variant (37)..(37): Xaa in position 37 is any amino acid
  Variant (44)..(44): Xaa in position 44 is any amino acid
  Variant (46)..(46): Xaa in position 46 is any amino acid
  Variant (54)..(54): Xaa in position 54 is any amino acid
  Variant (67)..(67): Xaa in position 67 is any amino acid
  Variant (91)..(91): Xaa in position 91 is any amino acid
KXKXLXXALLLXTSXAWAAPATXGXXXXXXIXXYELXSFIADFXHXKPGDTVPXMYRTDEYNIKQWXLRNLPAPDAGTHWTYMGGAYVLIXDTDGKIIKAYDGEIFYHR

SEQ ID NO: 39013 - DNA, 1137 bp, Escherichia coli
  CDS (1)..(1137): transl_table=11
atgtctgaactgaacgatcttctgaccacccgtgagctacaacgctggcgattaattcttggcgaagcggcagaaacgacgctttgtgggctggatgacaacgcccggcagatagaccacgcgctggagtggctgtatgggcgcgatcctgaacggctccagcgtggtgaacgttccggtggattaggtggctcaaatctcaccacccctgagtggatcaacagtattcacacgctgtttccgcagcaggtgattgagcggctggaaagcgatgccgtgctgcgctacggcattgaagatgtggtgacgaatctcgacgtgctggaacgtatgcagccttctgaaagcctgctacgcgctgttttgcacaccaaacatctgatgaaccccgaagtactggctgccgcccgccggatagtgtgccaggttgttgaagaaattatggctcgactggcaaaggaagttcgtcaggctttttctggtgtccgcgatcgccgtcgccgttcatttattccactggcgcgaaactttgatttcaaaagtactctgcgcgccaacctgcaacactggcacccgcaacacggcaagttgtatatcgaatccccccgctttaacagccgcattaaacgccaaagcgaacaatggcaactggtcttactggttgatcaaagcggatcgatggtcgattcggtgatccactctgcggtgatggcggcctgtttgtggcagttacccggcattcgtacccatctggtggcgtttgacacaagcgtcgttgatctcacggcagacgttgccgatccggtagagttattaatgaaagtacagttgggcggcgggaccaatatcgccagtgccgtggagtatggtcggcaacttattgaacaaccagcgaaaagcgtcattatcctcgtgagcgatttttacgaagggggttcatcatcattactgacgcatcaggtgaaaaagtgtgtccagagcggcatcaaagtgctgggactggcagcgctcgatagcaccgcaacaccttgctatgaccgcgatacggcccaggcgctggttaatgtcggcgcacaaatagccgccatgacgccgggcgagctggcatcatggcttgcggagaatcttcagtcataa

SEQ ID NO: 39014 - protein, 378 aa, Escherichia coli
MSELNDLLTTRELQRWRLILGEAAETTLCGLDDNARQIDHALEWLYGRDPERLQRGERSGGLGGSNLTTPEWINSIHTLFPQQVIERLESDAVLRYGIEDVVTNLDVLERMQPSESLLRAVLHTKHLMNPEVLAAARRIVCQVVEEIMARLAKEVRQAFSGVRDRRRRSFIPLARNFDFKSTLRANLQHWHPQHGKLYIESPRFNSRIKRQSEQWQLVLLVDQSGSMVDSVIHSAVMAACLWQLPGIRTHLVAFDTSVVDLTADVADPVELLMKVQLGGGTNIASAVEYGRQLIEQPAKSVIILVSDFYEGGSSSLLTHQVKKCVQSGIKVLGLAALDSTATPCYDRDTAQALVNVGAQIAAMTPGELASWLAENLQS

SEQ ID NO: 39015 - DNA, 1248 bp, Mesorhizobium loti MAFF303099
  CDS (1)..(1248): transl_table=11
gtgggaacggcaatggatgaccaagtcgacatcggcgaaacggagcccgccggcgacagccgggagcgtcgctggcggctggcgatcggtgccgacgaccagtcctccccagcgctgtcagacaccgacaagcggctgtcggcggcgctcgatgcgctctatggcgatggtgccggcgatacgaccgccgatccgcgcaagcggcgcggcgggctcggccgctcggcgccccgggtggcgcaatggatgggcgatatcaggtcgttctttcctgcgcaggtcgtgcagatcgtccagaaggatgcgttcgagcggctcaatctgaagcagatgctgatggagccggaattcctcaaggcgatcgaggctgacgtcaatctcgtcgccgacctgatctcgctgcgttcggtcatgccggccaagaccaaggatatagcgcgcaccatcatcgccgatatcgtcgccaagctgatgcagcggttggaacagaagaccgccgaggcgatccgcggcgcgctcgaccggtcgcaacgcaccaaccgtccacgccagcgcgacatcgactggccgcgcaccatctcggccaaccttcgccattaccaggccgagcacaagaccatcgtgccggagaggctggtcggcttcatgcgcaagcagcgtagactggtcgacctggacgaggtggtgctgtgcgtcgaccagtccggctcgatggcaagttcggtgatctacgcctcgatattcgccgccgtgatggcttccttgcctgtggtgcggaccaagctcgtctgcttcgatacggcgatcgtcgacctgaccgaggaactcagcgatcccgtcgaggtcctgttcggcgtgcagcttggcggcggcaccgacatcaaccaggccgtcgcctattgcgccgaccgtatcgagcggccgaccaagtcgcatatggtgctgatcaccgacctttatgagggcggcaacggccaggaattgctgcagcggctggcgtcactcgttcgctccggcgtcaatgtcgtggtgcttctggcgctaaccgatcagggcaggccgggctatgacccgaagatggcaggctccgtggcagcgctcggcatcccggtcttcacctgcacgccggatctgtttcccgacatgatggcagcggccttgcgacgggaagatgtcagcgcatgggcggcaggcgccgacatcaagctggttcgcgccgaggacgacagtccggcggccaacccgtaa

SEQ ID NO: 39016 - protein, 415 aa, Mesorhizobium loti MAFF303099
MGTAMDDQVDIGETEPAGDSRERRWRLAIGADDQSSPALSDTDKRLSAALDALYGDGAGDTTADPRKRRGGLGRSAPRVAQWMGDIRSFFPAQVVQIVQKDAFERLNLKQMLMEPEFLKAIEADVNLVADLISLRSVMPAKTKDIARTIIADIVAKLMQRLEQKTAEAIRGALDRSQRTNRPRQRDIDWPRTISANLRHYQAEHKTIVPERLVGFMRKQRRLVDLDEVVLCVDQSGSMASSVIYASIFAAVMASLPVVRTKLVCFDTAIVDLTEELSDPVEVLFGVQLGGGTDINQAVAYCADRIERPTKSHMVLITDLYEGGNGQELLQRLASLVRSGVNVVVLLALTDQGRPGYDPKMAGSVAALGIPVFTCTPDLFPDMMAAALRREDVSAWAAGADIKLVRAEDDSPAANP

SEQ ID NO: 39017 - DNA, 1155 bp, Streptomyces coelicolor A3(2)
  CDS (1)..(1155): transl_table=11
gtggacgccgaggcggcacgggagcggctgcggcgctggcgcctcgtcctcggcggtgacccggccgacggcaccggccacgtgctctgtggacgggacgccgcgatggacggggcactcaccgcgctgtacggaagagggggtgccccccgggcgggccgggaccgggcggcggggctcggggcctcggcaccggcggtggcgcgctggctgggggacatccggacctacttcccgtctcccgtggtccaggtgatgcagcgggacgcgatcgaccggctcgggctcgccacgctcctgctggagccggagatgctccaggccgtggaggccgacgtacacctcgtcggcaccctgctgtccctgaacgaggcgatgccggacacgacgagggagacggcacgggccgtcgtgcgcaaggtcgtcgaggacctggagaaacgcctcgtcacccgtacccgcgccaccctgtccggcgccctggaccgcagtgcccgcaccgcccggccccgcccccacgacatcgactggaaccgcacgatcggggccaacctcaagcactacctgccggagtaccgcacggtcgtgccggagcggctcgtcggctacgggcgggcgtcccgttcggtcaggaaggatatcgtcctgtgcgtcgaccagtccgggtcgatggcggcttccctcgtgtacgcctccgtgttcggcgcggtgctggcgtccatgcgctcgatcgacacccggctcgtcgtcttcgacacggcggtcgccgacctcaccgaccagctcgacgacccggtcgacgtgctcttcggcacgcgactcggcggcggtacggacatcaaccgcgcgctggcgtactgccagtcgcggatcacccggcccgcggacacggtggtcgtgctgatcagcgatctgtacgagggcggcatacgtgaggagatgctcaagcgggtcgcggcgatgcgggtcgcgggggtgcggttcgtgaccctgctggccctgtccgacgagggcacgcccgcgtacgaccgggagcacgcggcggccctcgcggcgctcggcgcaccggccttcgcctgcacgcccgatctcttcccggaggtgatggcggcggcgatcgaggggcggcccctgccgataccggatgccgggtga

SEQ ID NO: 39018 - protein, 384 aa, Streptomyces coelicolor A3(2)
MDAEAARERLRRWRLVLGGDPADGTGHVLCGRDAAMDGALTALYGRGGAPRAGRDRAAGLGASAPAVARWLGDIRTYFPSPVVQVMQRDAIDRLGLATLLLEPEMLQAVEADVHLVGTLLSLNEAMPDTTRETARAVVRKVVEDLEKRLVTRTRATLSGALDRSARTARPRPHDIDWNRTIGANLKHYLPEYRTVVPERLVGYGRASRSVRKDIVLCVDQSGSMAASLVYASVFGAVLASMRSIDTRLVVFDTAVADLTDQLDDPVDVLFGTRLGGGTDINRALAYCQSRITRPADTVVVLISDLYEGGIREEMLKRVAAMRVAGVRFVTLLALSDEGTPAYDREHAAALAALGAPAFACTPDLFPEVMAAAIEGRPLPIPDAG

SEQ ID NO: 39019 - DNA, 1137 bp, Shigella flexneri 2a str. 301
  CDS (1)..(1137): transl_table=11
atgtctgaactgaacgatcttctgaccacccgtgagctacaacgctggcgattaattcttggcgaagcggcagaaacgacgctttgtgggctggatgacaacgcccggcagatagatcacgcgctggagtggctgtatgggcgcgatcctgaacggctccagcgtggtgaacgctctagtggattaggtggctcaaatctcaccactcctgagtggatcaacagtattcacacgctgtttccgcaacaggtgattgagcggctggaaagcgatgccgtactgcgctacggcattgaagatgtggtgacaaatctcgacgtgctggaacgtatgcagccttccgaaagcctgctacgcgccgttttgcacaccaaacatctgatgaaccccgaagtactggctgccgcccgcaggattgtgcgccaggttgtggaagaaattatggcgcgactggcaaaggaagttcgtcaggctttttctggtgtccgcgatcgtcgtcgccgctcatttattccactggcgcgaaactttgatttcaaaagtactctgcgcgccaacctgcaacactggcacccgcaacacggcaagttgtatatcgaattcccccgctttaacagccgcattaaacgccaaagcgagcaatggcaactggtcttactggttgatcaaagcggatcgatggtcgattcggtgatccactctgcggtgatggcggcctgtttatggcagttacccggcattcgtacccatctggtggcgtttgacacaagcgtcgttgatctcacggcagacgttgccgatccggtagagttattaatgaaagtgcaattaggcggcggaaccaatatcgccagtgccatggagtatggtcggcaacttattgaacaacctgcaaaaagcgtcattatcctcgtgagcgatttttatgaagggggttcatcatcattgctgacgcaccaagtgaaaaagtgtgtccagagcggcatcaaagtgctgggactggcagcgctcgatagcacagcaacaccttgctatgaccgcgatacggcccaggcgctggttaatgtcggcgcacaaatagccgccatgacaccgggcgagctggcatcatggcttgcggagaatcttcagtcatga

SEQ ID NO: 39020 - protein, 378 aa, Shigella flexneri 2a str. 301
MSELNDLLTTRELQRWRLILGEAAETTLCGLDDNARQIDHALEWLYGRDPERLQRGERSSGLGGSNLTTPEWINSIHTLFPQQVIERLESDAVLRYGIEDVVTNLDVLERMQPSESLLRAVLHTKHLMNPEVLAAARRIVRQVVEEIMARLAKEVRQAFSGVRDRRRRSFIPLARNFDFKSTLRANLQHWHPQHGKLYIEFPRFNSRIKRQSEQWQLVLLVDQSGSMVDSVIHSAVMAACLWQLPGIRTHLVAFDTSVVDLTADVADPVELLMKVQLGGGTNIASAMEYGRQLIEQPAKSVIILVSDFYEGGSSSLLTHQVKKCVQSGIKVLGLAALDSTATPCYDRDTAQALVNVGAQIAAMTPGELASWLAENLQS

SEQ ID NO: 39021 - DNA, 1131 bp, Bacteroides thetaiotaomicron VPI-5482
  CDS (1)..(1131): transl_table=11
atggaagaagaattactgaaaaggtggcgtctgatactgggcggcgatgaggctgacggtacaggcgtgacattgaatctggaagaacagcggatagatcattctctggaagctgtatatgatagtgacagaagaggagggctgggttcctcggctcccaaagtaagccgatggcttggagatatccgtgagttctttccgcagacggtggtacaagtgattcagcgggatgccataaaacgtctgaatctgaccagtctgcttaccgaaaaagaaatgctggaaacggtcgtccccgatgttcatctggttgccaccctgatgtcgttaagccgggtgattcccgaaaagaataaggagatggcacgtcaggtagtccgcaaggtggttgaggagttgcttcgcaaactgtcggctcctacgcaacaggcggtaaccggtgctttgaaccgttccagccgtcgcaggaacccgcgttacaatgagatagattggaaaacgaccattaccaagaacctgaaaaactaccaaccggactataagacgattattcccgaaatccgtattggctacgggcgtaaacggaaagcgatgaaagatattatcctgtgtctggatcaaagcggttctatggggacgtcggtcatttattccggcatattcggttctgtgttggcatccattccggcggtatctacccgtatggtggtttttgatacggcagtcgttgatctgacggatgatttgcaagatcccgtggatctgcttttcggggtacagctcgggggaggaaccgatatagcccgtgcgctgacttattgtcagggagtcattacccgtccgcaggacacggtgatggtgttggtgactgacctttacgaaggaggagactccagagaaatgagaaagaaatttgtctcgttggtcaatagcggtgtgcagttgattgtccttccggcgttgaacgatgacggtgctccgtcctatgacaaggggcatgctgagtttctcgcttccataggagtgccgacatttgcctgtactccggataagtttccggaccttatggcggctgctttgagtaaacaggacattggaatgtgggtttctcagaatgtaaagagtgaatga

SEQ ID NO: 39022 - protein, 376 aa, Bacteroides thetaiotaomicron VPI-5482
MEEELLKRWRLILGGDEADGTGVTLNLEEQRIDHSLEAVYDSDRRGGLGSSAPKVSRWLGDIREFFPQTVVQVIQRDAIKRLNLTSLLTEKEMLETVVPDVHLVATLMSLSRVIPEKNKEMARQVVRKVVEELLRKLSAPTQQAVTGALNRSSRRRNPRYNEIDWKTTITKNLKNYQPDYKTIIPEIRIGYGRKRKAMKDIILCLDQSGSMGTSVIYSGIFGSVLASIPAVSTRMVVFDTAVVDLTDDLQDPVDLLFGVQLGGGTDIARALTYCQGVITRPQDTVMVLVTDLYEGGDSREMRKKFVSLVNSGVQLIVLPALNDDGAPSYDKGHAEFLASIGVPTFACTPDKFPDLMAAALSKQDIGMWVSQNVKSE

SEQ ID NO: 39023 - DNA, 1125 bp, Leptospira interrogans serovar Copenhageni str. Fiocruz L1-130
  CDS (1)..(1125): transl_table=11
atgaaaaacgatcttagcacattcatccgatggaaactcatccttggtaacggttccgaacaatcttttggaaacgagacgttttccgaagaacaacaaagaatgaacatcgcgatggaatatctatacgatagagaatacggagaagaccgtaacatacgaaccggaggtttaagtgaatctaatctgaccgtacctttatggatcaacgaaatacatgaactgtttcctaaaaaaacgatagaacgaatcgaaaaagatgcattagaacgttatcaaataatggaaatggtaaccaacccagaacttttgaaacgggcctctcctaatacaactcttttaaaagcggtgttacacacccaacatcttatgaatccgcaagtattaagtttggctcgagaactcgttcgaaaagtgatcgatgaattgatgaaaaaattagaaactacaatattaacttcttttcaaggaattaaaaatagaaacctacgttcttcttttaagatttataaaaacttcgacatcaaaaatacaatccgctccaacttaaaacactacgatcttaaatctcaaaagttggttcttcaaaagccattgtttcattccagaactcatcgttctatggcagaacgttggcatttgatcattttagtggatcaatccggaagtatgttagacagtgtcatccattctgcggttacagcttctatcttttggggaattaaatcgattaaaaccagtttgattttatttgataccgaagtcgtggacgttaccgaccattgttctgatccagtagaaactctcatgaaagtgcagttaggtggtggtacagatattggctcggcgctattatacgcagaaggaaaagttgaaaatccgcgcagaaccataattatattgattagcgatttttgcgaaggggctcctcccttcaaactcatttccaatactcatcacttggtagaaagcggagtaaaagtgctaggattagcagcgttagacgaaactgcaaatcctagctatgacaaggaaatggcagagaaactcgttaaagtgggagcagaaatagccgcgatgactcctggggaactcgccaattgggtgagcgaaaaaatcaagtaa

SEQ ID NO: 39024 - protein, 374 aa, Leptospira interrogans serovar Copenhageni str. Fiocruz L1-130
MKNDLSTFIRWKLILGNGSEQSFGNETFSEEQQRMNIAMEYLYDREYGEDRNIRTGGLSESNLTVPLWINEIHELFPKKTIERIEKDALERYQIMEMVTNPELLKRASPNTTLLKAVLHTQHLMNPQVLSLARELVRKVIDELMKKLETTILTSFQGIKNRNLRSSFKIYKNFDIKNTIRSNLKHYDLKSQKLVLQKPLFHSRTHRSMAERWHLIILVDQSGSMLDSVIHSAVTASIFWGIKSIKTSLILFDTEVVDVTDHCSDPVETLMKVQLGGGTDIGSALLYAEGKVENPRRTIIILISDFCEGAPPFKLISNTHHLVESGVKVLGLAALDETANPSYDKEMAEKLVKVGAEIAAMTPGELANWVSEKIK

SEQ ID NO: 39025 - DNA, 1233 bp, Thermobifida fusca YX
  CDS (1)..(1233): transl_table=11
atgaccaaccgttctgaacccaccccactcctgcccgaacgagcccgccgctggcggctcgtcctcggcgaagccgccgaaaacgcctgcgccgcagcaaccggagccacaacccccgccacaggcaccgtgctcaaccgcgacgacgcccgaatcgacgcggccctcgccgccctctacaactactccgacaccgggggacgcctccgcggcccagggaaacgcagcgcaagcctcgactcctccgcacccaccgtggcccgctggctcggcgacatccgcacctatttccccagcagcgtggtccgggtcatccaacacgacgcgctcacccggctcaacctcaccaccctgctgctcgaaccggaaatgatggacgccgtcgaacccgacgtccacctggtgggcaccctgctggccctcaaagacgtcatgccggaaagcgcccgcgaaacagcgcgcaccgtcgtgcgtcgcgtcgtcaacgacctggaacggaaactcgcccaccacacccgttccaccgtgcaaggcgccttggaccgctccgcccgcaccacccgcccccgccgagtctccgacatcgactgggaccgcaccatccgccgcaatctccagcactacctgccggaacaccgcaccatcgtcccgcagacccttgtcggctacgctcgccgcagccgcggcgtgcaacgcgacgtcatcctcgccgtcgaccagagcggctccatggcctcttccgtggtgtacgccagcgtgttcagcgcagtgctggcatcactccgaaccctgcgcacctccctcgtagtgttcgacaccgctgtcgttgacctcaccgaccagttgagcgaccccgtcgacgtgctgttcggcacccaactcggcggcggcaccgacatcaaccgggccatcgcctactgccaagggctcatcacccgccccgccaattcgatcttcgtgctcatcagtgacctgtacgaagggggaatccgcgaagaaatgctgcgccgggtcgcagaaatgaccgcggccggagtccaagtcatcgtgctgctcgccctctccgacgacggggcacccgcctaccaccacgacaacgccgccgccctcgccgccctcggcgtgcctgccttcgcctgcacccccgacaagttccccgacctcatggctgcggccatccaaggccagtcgctcaccgcctgggtcgaacagaacatctacgacgcctcctag

SEQ ID NO: 39026 - protein, 410 aa, Thermobifida fusca YX
MTNRSEPTPLLPERARRWRLVLGEAAENACAAATGATTPATGTVLNRDDARIDAALAALYNYSDTGGRLRGPGKRSASLDSSAPTVARWLGDIRTYFPSSVVRVIQHDALTRLNLTTLLLEPEMMDAVEPDVHLVGTLLALKDVMPESARETARTVVRRVVNDLERKLAHHTRSTVQGALDRSARTTRPRRVSDIDWDRTIRRNLQHYLPEHRTIVPQTLVGYARRSRGVQRDVILAVDQSGSMASSVVYASVFSAVLASLRTLRTSLVVFDTAVVDLTDQLSDPVDVLFGTQLGGGTDINRAIAYCQGLITRPANSIFVLISDLYEGGIREEMLRRVAEMTAAGVQVIVLLALSDDGAPAYHHDNAAALAALGVPAFACTPDKFPDLMAAAIQGQSLTAWVEQNIYDAS

SEQ ID NO: 39027 - DNA, 1146 bp, Burkholderia sp. 383
  CDS (1)..(1146): transl_table=11
gtggtttccgcgagacctgcgatgccgctgaacattcccggtccgctcgaacgctggcgcctgctgctcggcgaaccggccgaagccgcgtgcggcacgccgggcgccgacgcgcaggctgccgacgcggcgctcgaatggctgtacggtcgcgacgacgatcgcgcgaagcgtggcgagcgcggtgccggcctggggccgtccgcgctgagcacgccggactggatcaacacgatccacacgctgtttccgaaagaagtgatcgaccggctcgaacgcgatgcggtcgagcgcttcggcatcgacgaagtcgtcacgaacctcgaggtgctggagcggatcgagccatccgaatcactgctgcgcgccgtcctgcacacgaagcacctgatgaatcccgaggtgctcgcggccgcgcggcggctggttgccgaggtggtccggcgcatcatggagcggctggcgaccgaggtgcgacaggccttcagcggcacgcgcgaccggcggcggcgctcgcggatgaagatcgcgcgcaacttcgactacacacgcacgctggccgcgaacctgcgccactggcatcccgagcggcgcaagctgtatctcgacacgccggtcttcaacagtcgcacgcgtcgccaggccgagccgtgggacatcgtgctgctcgtcgaccagagcggatcgatggtcaactcggtgatccacagcgcggtgatggccgcgtgcctgtggcaattgccgggcatgcgcacgcggctcgtggccttcgatacgtcggtggtcgacctgaccgccgacgtatccgacccggtcgagctgctgatgaaggttcagctcggcggcggcacggacattgcgaaagccgtcgcgtatgcgcaatcctgcgttgcgaatcccgcgcgcacggtcgtcgtgctcgtcagcgatttctatgaaggcggcagcggctacgaactcgtgcgtcgcgtgaaggcactggccgagagcggcgcgcgcgtgctcggtttggctgcgctcgattcggcggccgagcccgcgtacgaccgcgagatggcggcgcggctcgtgaacgccggcgcgcaaatcggcgcgatgacgcccgggcaactggccgcgtggctcgccgagaaggtgcagggatga

SEQ ID NO: 39028 - protein, 381 aa, Burkholderia sp. 383
MVSARPAMPLNIPGPLERWRLLLGEPAEAACGTPGADAQAADAALEWLYGRDDDRAKRGERGAGLGPSALSTPDWINTIHTLFPKEVIDRLERDAVERFGIDEVVTNLEVLERIEPSESLLRAVLHTKHLMNPEVLAAARRLVAEVVRRIMERLATEVRQAFSGTRDRRRRSRMKIARNFDYTRTLAANLRHWHPERRKLYLDTPVFNSRTRRQAEPWDIVLLVDQSGSMVNSVIHSAVMAACLWQLPGMRTRLVAFDTSVVDLTADVSDPVELLMKVQLGGGTDIAKAVAYAQSCVANPARTVVVLVSDFYEGGSGYELVRRVKALAESGARVLGLAALDSAAEPAYDREMAARLVNAGAQIGAMTPGQLAAWLAEKVQG

SEQ ID NO: 39029 - DNA, 1251 bp, Polyangium cellulosum
  CDS (1)..(1251): transl_table=11
atgcccgcccgcaccccccgcaagcccccgccgcccgcctcgcccgctggtcccgccggcgcgccggacgacctcaccgacagcgatcgcgacgcgctgctgcgctggcggctcgcgctcgggcccgaggccgagcgggtcgacccgcgcctctccctcggcgggctcgggggcgcggcgcccgcgctcgacgtcgacgcgcggcggctcggcgacctcgacaaggcgctctcgttcatctacgacgagcgcgccggcggcctcggcggctcgcggccctacgtgcccgagtggctctccgccgtgcgcgagttcttcagccacgaggtcgtcgccctcgtccagaaggacgccatcgagcgaaaggggctgacgcagctcctcttcgagcccgagacgctgccgttcctcgagaagaacgtcgagctcgtcgccacgctcatgagcgccaagggcctcatcccggacgccgcgcgggacaccgcccggcagatcgtgcgcgaggtcgtcgaggaggtgcggcgcgcgctcgaggccgaggtccgcaccgccgtcctcggcgcgctgcgccggaacacgacgagcccgctgcgcgtcctcaggaacctcgactggaagcgcaccatccgcaagaacctgaaggggtgggacgcggagcggcgccgcctcgtccccgacaagctctatttctgggcgaaccagacgcgacggcacgagtgggacgtcgccatcctcgtcgaccagtcgggctcgatgggcgagagcgtcgtctacagctccatcatggccgcgatcttcgcgtcgctcgacgtcctccgcacccggctcctcttcttcgacaccgaggtcgtcgacgtgactccgatgctcgtcgatccggtcgacgtgctgttcacggcgcagctcggcggcggcaccgacatcaaccgcgccgtggcctacgcccaggcgaacttcatcgagcggcccgagaagacgctgctcatcctgatcaccgacctgttcgagggcggcaacgccgaggagctcgtcgcgcgcatgcgccagctcgccgacagcaaggtgaagtcgatctgcctgctcgcgctgtcggacggcggaaagccctcgtacgaccacgagatggcgcagaagctcgccgcgctcgggaccccgtgcttcggctgcacgccgaagctcctcgtcaaggtggtggagcggctcatgcgaggtcaggacctcggcccgctgctcggcgccgaggcgcggtga

SEQ ID NO: 39030 - protein, 416 aa, Polyangium cellulosum
MPARTPRKPPPPASPAGPAGAPDDLTDSDRDALLRWRLALGPEAERVDPRLSLGGLGGAAPALDVDARRLGDLDKALSFIYDERAGGLGGSRPYVPEWLSAVREFFSHEVVALVQKDAIERKGLTQLLFEPETLPFLEKNVELVATLMSAKGLIPDAARDTARQIVREVVEEVRRALEAEVRTAVLGALRRNTTSPLRVLRNLDWKRTIRKNLKGWDAERRRLVPDKLYFWANQTRRHEWDVAILVDQSGSMGESVVYSSIMAAIFASLDVLRTRLLFFDTEVVDVTPMLVDPVDVLFTAQLGGGTDINRAVAYAQANFIERPEKTLLILITDLFEGGNAEELVARMRQLADSKVKSICLLALSDGGKPSYDHEMAQKLAALGTPCFGCTPKLLVKVVERLMRGQDLGPLLGAEAR

SEQ ID NO: 39031 - DNA, 20 bp, Artificial sequence
  primer
atgtctgaactgaacgatct

SEQ ID NO: 39032 - DNA, 25 bp, Artificial sequence
  primer
ttatgactgaagattctccgcaagc

SEQ ID NO: 39033 - protein, 369 aa, Artificial sequence
  consensus sequence
  Variant (5)..(5): Xaa in position 5 is any amino acid
  Variant (8)..(30): Xaa in position 8 to 30 is any amino acid
  Variant (31)..(43): Xaa in position 31 to 43 is any or no amino acid
  Variant (45)..(47): Xaa in position 45 to 47 is any amino acid
  Variant (48)..(58): Xaa in position 48 to 58 is any or no amino acid
  Variant (60)..(61): Xaa in position 60 to 61 is any amino acid
  Variant (64)..(65): Xaa in position 64 to 65 is any amino acid
  Variant (67)..(72): Xaa in position 67 to 72 is any amino acid
  Variant (74)..(76): Xaa in position 74 to 76 is any amino acid
  Variant (78)..(80): Xaa in position 78 to 80 is any amino acid
  Variant (83)..(84): Xaa in position 83 to 84 is any amino acid
  Variant (86)..(91): Xaa in position 86 to 91 is any amino acid
  Variant (94)..(95): Xaa in position 94 to 95 is any amino acid
  Variant (97)..(108): Xaa in position 97 to 108 is any amino acid
  Variant (110)..(117): Xaa in position 110 to 117 is any amino acid
  Variant (119)..(136): Xaa in position 119 to 136 is any amino acid
  Variant (139)..(140): Xaa in position 139 to 140 is any amino acid
  Variant (142)..(143): Xaa in position 142 to 143 is any amino acid
  Variant (146)..(151): Xaa in position 146 to 151 is any amino acid
  Variant (153)..(161): Xaa in position 153 to 161 is any amino acid
  Variant (163)..(165): Xaa in position 163 to 165 is any amino acid
  Variant (167)..(178): Xaa in position 167 to 178 is any amino acid
  Variant (179)..(179): Xaa in position 179 is any or no amino acid
  Variant (181)..(183): Xaa in position 181 to 183 is any amino acid
  Variant (185)..(187): Xaa in position 185 to 187 is any amino acid
  Variant (190)..(208): Xaa in position 190 to 208 is any amino acid
  Variant (210)..(210): Xaa in position 210 is any amino acid
  Variant (211)..(211): Xaa in position 211 is any or no amino acid
  Variant (213)..(221): Xaa in position 213 to 221 is any amino acid
  Variant (222)..(223): Xaa in position 222 to 223 is any or no amino acid
  Variant (231)..(232): Xaa in position 231 to 232 is any amino acid
  Variant (235)..(251): Xaa in position 235 to 251 is any amino acid
  Variant (253)..(253): Xaa in position 253 is any amino acid
  Variant (255)..(256): Xaa in position 255 to 256 is any amino acid
  Variant (260)..(260): Xaa in position 260 is any amino acid
  Variant (264)..(264): Xaa in position 264 is any amino acid
  Variant (266)..(269): Xaa in position 266 to 269 is any amino acid
  Variant (273)..(274): Xaa in position 273 to 274 is any amino acid
  Variant (276)..(278): Xaa in position 276 to 278 is any amino acid
  Variant (285)..(285): Xaa in position 285 is any amino acid
  Variant (287)..(288): Xaa in position 287 to 288 is any amino acid
  Variant (290)..(291): Xaa in position 290 to 291 is any amino acid
  Variant (293)..(299): Xaa in position 293 to 299 is any amino acid
  Variant (300)..(300): Xaa in position 300 is any or no amino acid
  Variant (302)..(307): Xaa in position 302 to 307 is any amino acid
  Variant (309)..(310): Xaa in position 309 to 310 is any amino acid
  Variant (312)..(313): Xaa in position 312 to 313 is any amino acid
  Variant (317)..(331): Xaa in position 317 to 331 is any amino acid
  Variant (333)..(337): Xaa in position 333 to 337 is any amino acid
  Variant (339)..(339): Xaa in position 339 is any amino acid
  Variant (342)..(346): Xaa in position 342 to 346 is any amino acid
  Variant (348)..(348): Xaa in position 348 is any amino acid
  Variant (351)..(353): Xaa in position 351 to 353 is any amino acid
  Variant (355)..(356): Xaa in position 355 to 356 is any amino acid
  Variant (358)..(360): Xaa in position 358 to 360 is any amino acid
  Variant (362)..(367): Xaa in position 362 to 367 is any amino acid
RWRLXLGXXXXXXXXXXXXXXXXXXXXXXXXXXXXXXXXXXXXYXXXXXXXXXXXXXXRXXGLXXSXXXXXXWXXXIXXXFPXXVXXXXXXDAXXRXXXXXXXXXXXXLXXXXXXXXLXXXXXXXXXXXXXXXXXXARXXVXXVVXXXXXXLXXXXXXXXXGXXXRXXXXXXXXXXXXXDXXXTXXXNLXXXXXXXXXXXXXXXXXXXRXXRXXXXXXXXXXXVDQSGSMXXSVXXXXXXXXXXXXXXXXXTXLXXFDTXVVDXTXXXXDPVXXLXXXQLGGGTXIXXAXXYXXXXXXXXPXXXXXXLXXDXXEGGXXXXXXXXXXXXXXXGXXXXXLXALXXXXXPXYDXXXAXXLXXXGXXXXXXTP

SEQ ID NO: 39034 - protein, 60 aa, Artificial sequence
  protein pattern
  Variant (7)..(7): Xaa in position 7 is Ala, Gly, Leu or Val
  Variant (8)..(8): Xaa in position 8 is Asp, Glu, Asn, Ser or Thr
  Variant (11)..(11): Xaa in position 11 is Ile or Val
  Variant (12)..(12): Xaa in position 12 is His or Tyr
  Variant (13)..(13): Xaa in position 13 is Ala or Ser
  Variant (14)..(14): Xaa in position 14 is Ala, Gly or Ser
  Variant (15)..(15): Xaa in position 15 is Ile or Val
  Variant (16)..(16): Xaa in position 16 is any amino acid
  Variant (17)..(17): Xaa in position 17 is Ala, Gly or Ser
  Variant (18)..(18): Xaa in position 18 is Ala or Ser
  Variant (19)..(19): Xaa in position 19 is any amino acid
  Variant (20)..(20): Xaa in position 20 is Phe, Leu or Met
  Variant (21)..(21): Xaa in position 21 is any amino acid
  Variant (22)..(22): Xaa in position 22 is Gly, Gln or Ser
  Variant (23)..(23): Xaa in position 23 is Ile or Leu
  Variant (24)..(24): Xaa in position 24 is any amino acid
  Variant (25)..(25): Xaa in position 25 is Ala, Gly, Ser, Thr or Val
  Variant (26)..(26): Xaa in position 26 is Ile, Leu, Met or Val
  Variant (27)..(27): Xaa in position 27 is any amino acid
  Variant (29)..(29): Xaa in position 29 is any amino acid
  Variant (30)..(30): Xaa in position 30 is Leu or Met
  Variant (31)..(31): Xaa in position 31 is Ile, Leu or Val
  Variant (32)..(32): Xaa in position 32 is any amino acid
  Variant (36)..(36): Xaa in position 36 is Ala, Glu or Ser
  Variant (37)..(37): Xaa in position 37 is Ile or Val
  Variant (40)..(40): Xaa in position 40 is Leu or Val
  Variant (42)..(45): Xaa in position 42 to 45 is any amino acid
  Variant (49)..(49): Xaa in position 49 is Asp or Glu
  Variant (50)..(50): Xaa in position 50 is any amino acid
  Variant (52)..(52): Xaa in position 52 is Phe or Met
  Variant (53)..(53): Xaa in position 53 is any amino acid
  Variant (54)..(54): Xaa in position 54 is Ala, Thr or Val
DQSGSMXXSVXXXXXXXXXXXXXXXXXTXXXXFDTXXVDXTXXXXDPVXXLXXXQLGGGT

SEQ ID NO: 39035 - protein, 56 aa, Artificial sequence
  protein pattern
  Variant (2)..(3): Xaa in position 2 to 3 is any amino acid
  Variant (5)..(5): Xaa in position 5 is Ala or Asn
  Variant (6)..(6): Xaa in position 6 is Leu or Pro
  Variant (7)..(7): Xaa in position 7 is any amino acid
  Variant (8)..(8): Xaa in position 8 is Thr or Val
  Variant (9)..(9): Xaa in position 9 is Ala, Pro or Ser
  Variant (10)..(10): Xaa in position 10 is any amino acid
  Variant (12)..(12): Xaa in position 12 is Ile, Leu or Met
  Variant (13)..(13): Xaa in position 13 is Gly or Asn
  Variant (14)..(14): Xaa in position 14 is Asp, Glu, Ser or Thr
  Variant (16)..(16): Xaa in position 16 is His or Arg
  Variant (17)..(17): Xaa in position 17 is Glu, Ser or Thr
  Variant (18)..(18): Xaa in position 18 is any amino acid
  Variant (21)..(22): Xaa in position 21 to 22 is any amino acid
  Variant (23)..(23): Xaa in position 23 is Thr or Val
  Variant (24)..(24): Xaa in position 24 is Ile or Val
  Variant (25)..(25): Xaa in position 25 is Asp, Glu, Gln or Arg
  Variant (26)..(26): Xaa in position 26 is any amino acid
  Variant (27)..(27): Xaa in position 27 is Ile, Leu, Met or Val
  Variant (28)..(28): Xaa in position 28 is Glu or Gln
  Variant (29)..(29): Xaa in position 29 is any amino acid
  Variant (32)..(32): Xaa in position 32 is Phe, Ile, Leu or Val
  Variant (33)..(33): Xaa in position 33 is any amino acid
  Variant (35)..(35): Xaa in position 35 is any amino acid
  Variant (36)..(36): Xaa in position 36 is Gly, Asn or Gln
  Variant (37)..(37): Xaa in position 37 is Ile or Leu
  Variant (38)..(38): Xaa in position 38 is any amino acid
  Variant (39)..(39): Xaa in position 39 is Asp, Glu, Gln, Ser or Thr
  Variant (40)..(40): Xaa in position 40 is Leu, Met or Val
  Variant (41)..(41): Xaa in position 41 is Leu or Val
  Variant (42)..(42): Xaa in position 42 is any amino acid
  Variant (43)..(43): Xaa in position 43 is Glu or Asn
  Variant (44)..(44): Xaa in position 44 is any amino acid
  Variant (45)..(45): Xaa in position 45 is Asp or Glu
  Variant (46)..(46): Xaa in position 46 is Phe, Leu, Met or Val
  Variant (47)..(47): Xaa in position 47 is Leu or Met
  Variant (48)..(51): Xaa in position 48 to 51 is any amino acid
  Variant (52)..(52): Xaa in position 52 is Ala or Pro
  Variant (53)..(53): Xaa in position 53 is Asp, Asn or Ser
  Variant (54)..(55): Xaa in position 54 to 55 is any amino acid
LXXSXXXXXXWXXXIXXXFPXXXXXXXXXDAXXRXXXXXXXXXXXXXXXXXXXXXL

SEQ ID NO: 39036 - protein, 35 aa, Artificial sequence
  protein pattern
  Variant (2)..(3): Xaa in position 2 to 3 is any amino acid
  Variant (4)..(5): Xaa in position 4 to 5 is any or no amino acid
  Variant (7)..(7): Xaa in position 7 is Phe, Trp or Tyr
  Variant (8)..(9): Xaa in position 8 to 9 is any amino acid
  Variant (11)..(11): Xaa in position 11 is Ile or Leu
  Variant (12)..(13): Xaa in position 12 to 13 is any amino acid
  Variant (16)..(17): Xaa in position 16 to 17 is any amino acid
  Variant (18)..(18): Xaa in position 18 is Trp or Tyr
  Variant (19)..(19): Xaa in position 19 is any amino acid
  Variant (20)..(20): Xaa in position 20 is Ala or Pro
  Variant (21)..(21): Xaa in position 21 is Asp, Glu or Gln
  Variant (22)..(24): Xaa in position 22 to 24 is any amino acid
  Variant (25)..(25): Xaa in position 25 is Ile, Leu or Val
  Variant (26)..(26): Xaa in position 26 is any amino acid
  Variant (27)..(27): Xaa in position 27 is Ile, Leu or Pro
  Variant (28)..(28): Xaa in position 28 is Asp, Glu or Gln
  Variant (29)..(34): Xaa in position 29 to 34 is any amino acid
  Variant (35)..(35): Xaa in position 35 is Asn or Arg
RXXXXDXXXTXXXNLXXXXXXXXXXXXXXXXXXXX

SEQ ID NO: 39037 - protein, 38 aa, Artificial sequence
  protein pattern
  Variant (2)..(5): Xaa in position 2 to 5 is any amino acid
  Variant (6)..(7): Xaa in position 6 to 7 is any or no amino acid
  Variant (9)..(9): Xaa in position 9 is any or no amino acid
  Variant (11)..(11): Xaa in position 11 is any amino acid
  Variant (12)..(12): Xaa in position 12 is Ile, Leu or Val
  Variant (14)..(15): Xaa in position 14 to 15 is any amino acid
  Variant (17)..(17): Xaa in position 17 is Ile or Val
  Variant (18)..(18): Xaa in position 18 is Asp, Glu, Asn or Arg
  Variant (19)..(19): Xaa in position 19 is Asp, Glu or Arg
  Variant (20)..(20): Xaa in position 20 is Ile, Leu or Val
  Variant (21)..(23): Xaa in position 21 to 23 is any amino acid
  Variant (25)..(29): Xaa in position 25 to 29 is any amino acid
  Variant (30)..(30): Xaa in position 30 is Ala, Gln, Ser or Thr
  Variant (31)..(31): Xaa in position 31 is Ala, Ser or Thr
  Variant (32)..(32): Xaa in position 32 is Phe, Leu or Val
  Variant (33)..(33): Xaa in position 33 is any amino acid
  Variant (35)..(36): Xaa in position 35 to 36 is any amino acid
  Variant (37)..(37): Xaa in position 37 is Asp, Asn or Arg
PXXXXXXAXRXXVXXVXXXXXXXLXXXXXXXXXGXXXR

SEQ ID NO: 39038 - protein, 22 aa, Artificial sequence
  protein pattern
  Variant (2)..(3): Xaa in position 2 to 3 is any amino acid
  Variant (4)..(5): Xaa in position 4 to 5 is any or no amino acid
  Variant (7)..(8): Xaa in position 7 to 8 is any or no amino acid
  Variant (10)..(10): Xaa in position 10 is Ala, Cys or Gly
  Variant (11)..(11): Xaa in position 11 is any amino acid
  Variant (12)..(12): Xaa in position 12 is Asp, Gly, Gln or Ser
  Variant (13)..(13): Xaa in position 13 is any amino acid
  Variant (14)..(14): Xaa in position 14 is Ile or Val
  Variant (15)..(15): Xaa in position 15 is Ala, Glu or Thr
  Variant (16)..(16): Xaa in position 16 is Asn, Gln or Arg
  Variant (18)..(19): Xaa in position 18 to 19 is any amino acid
  Variant (20)..(20): Xaa in position 20 is Ser or Thr
  Variant (21)..(21): Xaa in position 21 is any amino acid
  Variant (22)..(22): Xaa in position 22 is Phe, Ile, Met or Val
IXXXXAXXYXXXXXXXPXXXXX

SEQ ID NO: 39039 - protein, 12 aa, Artificial sequence
  protein pattern
  Variant (5)..(5): Xaa in position 5 is Ala, Ile, Leu or Val
  Variant (6)..(6): Xaa in position 6 is Ile or Leu
  Variant (8)..(10): Xaa in position 8 to 10 is any or no amino acid
  Variant (12)..(12): Xaa in position 12 is Ala, Asp or Glu
RWRLXXGXXXAX

SEQ ID NO: 39040 - DNA, 1095 bp, Escherichia coli
  CDS (1)..(1095): transl_table=11
atgggcgcttacctgattcgccgtctgttgctggtgatcccaacattatgggcgattatcaccatcaactttttcatcgtgcaaattgcgcctggcggtccggtcgaccaggccatcgccgccattgagtttggtaatgccggagtattacccggcgcaggcggtgaaggtgttcgtgccagccatgcgcaaacgggtgtcggcaatatcagcgacagtaattaccgtggcggacgcggattagatccagaagtgatcgctgagatcactcatcgctacggttttgataagccgatccacgaacgttacttcaaaatgctctgggactacatccgctttgattttggcgatagcctgtttcgcagcgcctcggtgctgacgctgattaaagacagtctgccggtttccatcaccctcggattgtggagcacgctgattatctatctggtgtcgattccgttaggcattcgcaaagctgtttataatgggagccgctttgacgtctggagtagcgcatttatcatcatcggctacgccattccggcctttttgtttgccatcctgctgattgtcttcttcgcgggcggcagctatttcgacctgttccctctacgcggcctggtttccgctaactttgattcgctgccgtggtatcagaaaatcaccgattatctgtggcatatcacgctgccggtgctggcgacagtgattggtggctttgcggcgctgaccatgctgacaaaaaactcattccttgatgaagtgcgcaagcaatacgtggtgaccgcgcgtgcgaaaggggtaagtgaaaaaaatattctctggaaacatgtgttccgcaacgccatgctgctggtgattgccggttttccggcgacgtttatcagcatgttttttaccggctcgctgctgattgaggtgatgttttcactcaatggtctgggcttactgggctacgaagcgaccgtctcgcgcgattatcctgtaatgtttggtaccttgtatattttcaccctgattggcctgctgctgaatattgtcagtgatatcagctatacgctggttgatccgcgtattgattttgagggacgttaa

SEQ ID NO: 39041 - protein, 364 aa, Escherichia coli
MGAYLIRRLLLVIPTLWAIITINFFIVQIAPGGPVDQAIAAIEFGNAGVLPGAGGEGVRASHAQTGVGNISDSNYRGGRGLDPEVIAEITHRYGFDKPIHERYFKMLWDYIRFDFGDSLFRSASVLTLIKDSLPVSITLGLWSTLIIYLVSIPLGIRKAVYNGSRFDVWSSAFIIIGYAIPAFLFAILLIVFFAGGSYFDLFPLRGLVSANFDSLPWYQKITDYLWHITLPVLATVIGGFAALTMLTKNSFLDEVRKQYVVTARAKGVSEKNILWKHVFRNAMLLVIAGFPATFISMFFTGSLLIEVMFSLNGLGLLGYEATVSRDYPVMFGTLYIFTLIGLLLNIVSDISYTLVDPRIDFEGR

SEQ ID NO: 39042 - DNA, 1083 bp, Vibrio cholerae O1 biovar eltor str. N16961
  CDS (1)..(1083): transl_table=11
atgctcagttatattctgcgccgtttgttactggtggtgcccacattgtgggccatcatcaccattaacttttttattattcagattgctcctgggggcccagtagagcaggccattgctcagttggaaggtaacacctcaggcgtcatggaacgttttacgggaggcgggcaagaagtcgcggcgccgacggatgcgccggtttctggttataaaggttcacgtggacttgatccgcaagtggtcgaagagatcacccgtcgttttggttttgataagcccatccatgaacgctatttccagatgcttaaggattacgccacgtttaattttggtgaaagcttatttcgtggcggcgatgtgattgacttgattgtggagcgattaccggtttccatttccctcggattgtggagcacgctgctcatatatctgatttcgattcctttggggatcagcaaagcgattcatcacggctcgcgttttgatgtttggtcgagtgcggtggtgatcattggctacgctatccccggatttctgtttgcgatcatcttgattatcctctttgccagcggcaactatttcagttggtttccgctgcgcggtttagtttccgataacttcgccagcttgccttggtatcaacaagtgctcgattacttttggcacctcacgttacccacattagccatggtcattggcggttttgctacgttaagcatgctcaccaaaaactcgtttttagatgagattaacaagcaatatgtggtcaccgcgcgcgcgaaggggttggatgaacggcgcattctctacaaacatgtgtttcgtaatgccatgttgatcatcattgccggatttccgagcgcatttatcagcatcttcttcacgggttcgatgttgattgaagtgatgttctcgctggaaggtattggtctacttggctttgaagccactatccaacgtgattatcctttggtatttagttcgttgtatatcatgacattgctcgggttgttgctcagcatcatttcagatttgacttacatgtgggttgacccacgcattgattttgaggctcgttga

SEQ ID NO: 39043 - protein, 360 aa, Vibrio cholerae O1 biovar eltor str. N16961
MLSYILRRLLLVVPTLWAIITINFFIIQIAPGGPVEQAIAQLEGNTSGVMERFTGGGQEVAAPTDAPVSGYKGSRGLDPQVVEEITRRFGFDKPIHERYFQMLKDYATFNFGESLFRGGDVIDLIVERLPVSISLGLWSTLLIYLISIPLGISKAIHHGSRFDVWSSAVVIIGYAIPGFLFAIILIILFASGNYFSWFPLRGLVSDNFASLPWYQQVLDYFWHLTLPTLAMVIGGFATLSMLTKNSFLDEINKQYVVTARAKGLDERRILYKHVFRNAMLIIIAGFPSAFISIFFTGSMLIEVMFSLEGIGLLGFEATIQRDYPLVFSSLYIMTLLGLLLSIISDLTYMWVDPRIDFEAR

SEQ ID NO: 39044 - DNA, 1083 bp, Sinorhizobium meliloti 1021
  CDS (1)..(1083): transl_table=11
atgggtgcctatatcctgcgccggctcctgctgatgatcccgacgatcgtcggcatcatggcgatctccttcgccgtcgtgcagtttgcgccgggcgggccggtggaacaggtgatctccgacctcaccaacgcggcaggctctgacaggctttccggcaatgccggcgacctcatgcctgtcggcggtggcgacggcgggcagtatcgcggggcgcaagggctcgatcccgatttcatcgccaagctcgagaaacagttcggcttcgacaagccgccgctcgagcgcttcgtcaccatgatgtgggactatatgcgcttcgacttcggcgagagcttcttccgcaatacgccggtcatcgacctcatcatccagaaaatgccggtttcgatctcgctcggggtctggatcctcatattttcctatgccatctcgatcccgctcggcatcaagaaagcggtctccgacggttcgaccttcgacgtctggacctcgggcgtcatcatcgtcggctatgcggtgccgagtttcctcttcggcattctcctgatcgtgctttttgccggcggatccttcttcgactggttccccttgcgcggcctggtctcggacaatttcgaccagctttcctggtacgagaagataatcgattatttctggcacatgacgctgccgctgatcacgcttctgctctccgccttcgcgaccaccacgctgctcacgaagaattccttcatcgacgagatcaagaagcaatatgtgacgacggcgcgggccaagggtctgaccgagcggcgcgttctctacggacacgtgttccgcaacgcgatgctgatcatcattgcgggctttcccggcgccttcatctccgccttcttcaccgggtcgctgctcatcgaatacatcttctcgctcgatgggctggggcggctcggctacgacgcggtcgtcaagcgcgactatccgatcgtcttcgcgaccctcttcatctactcgctgatggggcttgtcgtgagcctcgtctccgacctcatctatacctgggtcgacccgcgcatcgatttcgagcggagggacgtctga

SEQ ID NO: 39045 - protein, 360 aa, Sinorhizobium meliloti 1021
MGAYILRRLLLMIPTIVGIMAISFAVVQFAPGGPVEQVISDLTNAAGSDRLSGNAGDLMPVGGGDGGQYRGAQGLDPDFIAKLEKQFGFDKPPLERFVTMMWDYMRFDFGESFFRNTPVIDLIIQKMPVSISLGVWILIFSYAISIPLGIKKAVSDGSTFDVWTSGVIIVGYAVPSFLFGILLIVLFAGGSFFDWFPLRGLVSDNFDQLSWYEKIIDYFWHMTLPLITLLLSAFATTTLLTKNSFIDEIKKQYVTTARAKGLTERRVLYGHVFRNAMLIIIAGFPGAFISAFFTGSLLIEYIFSLDGLGRLGYDAVVKRDYPIVFATLFIYSLMGLVVSLVSDLIYTWVDPRIDFERRDV

SEQ ID NO: 39046 - DNA, 1095 bp, Agrobacterium tumefaciens str. C58
  CDS (1)..(1095): transl_table=11
atgggcgcctatattctcagacgtctggcactgatgatcccgacgatcgtcggcatcatgggcatttcgtttctcgtcatccagttcgcgccgggcgggccggtggaacaggtcgtggcgcagctgaccgggcagggcgacagcgcctccgaccggctctcgggcggcggcgatctcatgggccagtccggtggtttcgatgaaagcggctcgaaatatcgcggcgcgcagggtcttgatccagagctgatcaagaagctcgaaaaacagttcggcttcgacaagccaccgctcacccgttttcttgaaatgatgtggaattacatccgcttcgatttcggtgacagcttcttccgcaattcctcggtcatcgatctcatcatcgataagctgccggtctcggcctccctcggcttctggatcctgatcatttcctatgtgatttccattccgctcggcatcaagaaggccgtctccgatggctcgaccttcgatgtctggacatcgggcatcatcatcatcggatatgcggtgccgagcttcctgttcggtatcctgctaatcgtgcttttcgccggcggatcattcttcgactggtttccgctgcgcggtctggtctcggataatttcgaccagctgaactggtggcagaagatcatcgactatttctggcacctgaccctgccgttgatcgcgctttcgctttcggccttcgcgacgacgacgctactcaccaagaattccttcatcgatgagatcaagaagcaatatgtcgtcaccgcccgcgccaagggtctctccgaacgcaaggttctctacggccatgtcttccgcaacgcgatgctgatcgtgatcgccggttttccgggcgccttcatctcggccttcttcaccggttcgctgctgatcgaaaatatcttctcgctggatggtctcggtcgtctcggttatctctcggtggtcaaccgggattatccaatcgtctttggcacgctcttcatcttctcgctgatgggcctcgtggtcggactactatccgacctgatctacacatggatcgatccgcgcatcgatttcgagcggagggacgtgtga

SEQ ID NO: 39047 - protein, 364 aa, Agrobacterium tumefaciens str. C58
MGAYILRRLALMIPTIVGIMGISFLVIQFAPGGPVEQVVAQLTGQGDSASDRLSGGGDLMGQSGGFDESGSKYRGAQGLDPELIKKLEKQFGFDKPPLTRFLEMMWNYIRFDFGDSFFRNSSVIDLIIDKLPVSASLGFWILIISYVISIPLGIKKAVSDGSTFDVWTSGIIIIGYAVPSFLFGILLIVLFAGGSFFDWFPLRGLVSDNFDQLNWWQKIIDYFWHLTLPLIALSLSAFATTTLLTKNSFIDEIKKQYVVTARAKGLSERKVLYGHVFRNAMLIVIAGFPGAFISAFFTGSLLIENIFSLDGLGRLGYLSVVNRDYPIVFGTLFIFSLMGLVVGLLSDLIYTWIDPRIDFERRDV

SEQ ID NO: 39048 - DNA, 1098 bp, Brucella suis 1330
  CDS (1)..(1098): transl_table=11
atgggcgcatatattcttcgccgcctgcttctgatgatccccaccctactgggtattatggccatttccttcgctgtcgtacaattcgcccccggcggcccggtcgagcgcgtaatcgcgcagctttccggccagggcggcgatgcgctcgaccgtctttccggcgcaggcagcgatttcggccaaagtgctatcgatagcggttcggtcagttccaaatatcgcggcgctcagggccttgatccgcaattcatcgcagatctggagaagcagttcggtttcgacaagcctccgctggagcgtttcggccagatgttgtggaactatatgcgcttcgatttcggccgcagctatttccgcgacatcagcgtgatcgatcttatcaaggaaaaaatgccggtttcgatctcgctcggtctatggctgacctttctgtcctacatgatctcgattccactcggcattcgcaaggcgatcaaggatggttcgcgcttcgacacatggaccagcgccgtcatcatcatcggctatgccattccaagcttccttttcgccattcttctgatcgtggtctttgcgggcggttccttctttgactggttccccttgcgcggcctcacctcgcccgatttcgcgcagatgacatggttcgagaagatcaaggattatctctggcacatggtcctgccggtaacggcactggtgctttcggcctttgcaacgacgacacttctcaccaagaattcgtttctggaagaaatccgcaagcaatatgtgacgaccgcacgcgccaaggggctgaccgagaaccaggttctctatcgccacgtcttccgcaatgcgatgctgatcgtgatcgccggttttcccggtgcgttcatttccgccttcttcaccggttcgcttttgatcgagacgatcttctcgctcgacgggcttggcctgctcggctaccagtcggtcatcaaccgcgactatccggtggttttcgccaatctcttcatcttttcgctgattggccttctggtcggcctcctgtccgatcttacctatacgtggatcgatccgcgcatcgatttcgaccggagggacgtgtga

SEQ ID NO: 39049 - protein, 365 aa, Brucella suis 1330
MGAYILRRLLLMIPTLLGIMAISFAVVQFAPGGPVERVIAQLSGQGGDALDRLSGAGSDFGQSAIDSGSVSSKYRGAQGLDPQFIADLEKQFGFDKPPLERFGQMLWNYMRFDFGRSYFRDISVIDLIKEKMPVSISLGLWLTFLSYMISIPLGIRKAIKDGSRFDTWTSAVIIIGYAIPSFLFAILLIVVFAGGSFFDWFPLRGLTSPDFAQMTWFEKIKDYLWHMVLPVTALVLSAFATTTLLTKNSFLEEIRKQYVTTARAKGLTENQVLYRHVFRNAMLIVIAGFPGAFISAFFTGSLLIETIFSLDGLGLLGYQSVINRDYPVVFANLFIFSLIGLLVGLLSDLTYTWIDPRIDFDRRDV

SEQ ID NO: 39050 - DNA, 1059 bp, Pseudomonas putida KT2440
  CDS (1)..(1059): transl_table=11
atgaccgcttatatcctgcgccgtctgttgctgatcatcccgacgctgctggcaatcctgctggtcaatttcgccatcgtccaggccgcgccgggtggcccggtggaacaagccgtggcgcgcctgcagggcctcggtggcggcgcacccggcgcgcgagccgaagtggtccatggcgaatcccgggccacacgcggcctggacccgaaactgatcgaagaaatcaagcgccagtatggcttcgacaaatccgcccccgagcggctttggttgatgctcggccaatatgcccggctggactttggcaacagcttcttccgcggcgccaaagtcaccgacctgattctcgacaagttgccggtcaccctgtcgctgggcttctgggccacgctgatcacctacctggtgtctatcccgctgggcatccgcaaggcgatgcgccacggcagccgcttcgatgcctggagcagcgcgttgatcgtgatcggttacgccctgccttcgttcctgttcgccctgctgctgatcgtcctgtttgccggcggcacttcgctcaactggttcccggtgcgcggcctggtctcggacaatttcgacgagctcagcctgctgggcaaggtcgccgactacttctggcacctggtgctgccggttgcggccctggtgatcggtgggttcgccaccctcacgctgttgaccaagaatgccttcctcgacgaggtttcccgccaatacgtggtcactgcccgggccaagggcctcagcgaacgccgcgtgctgtatggccatgtgttgcgcaacgccatgctgctggtggtggccgggctgccacaggcgctgatcaccgtgttctttgccggctcgttgctgatcgaggtgatcttctcgctcgatggcctgggccgcatgagctatgaggccgccgtgtcgcgggattacccagtggtgttcggcacgctgttcatctttaccctggcgggcctgctgattcgcctgatcggtgacctgtcttacaccctgctcgacccgcgcatcgacttcgatacgagggcgcactga

SEQ ID NO: 39051 - protein, 352 aa, Pseudomonas putida KT2440
MTAYILRRLLLIIPTLLAILLVNFAIVQAAPGGPVEQAVARLQGLGGGAPGARAEVVHGESRATRGLDPKLIEEIKRQYGFDKSAPERLWLMLGQYARLDFGNSFFRGAKVTDLILDKLPVTLSLGFWATLITYLVSIPLGIRKAMRHGSRFDAWSSALIVIGYALPSFLFALLLIVLFAGGTSLNWFPVRGLVSDNFDELSLLGKVADYFWHLVLPVAALVIGGFATLTLLTKNAFLDEVSRQYVVTARAKGLSERRVLYGHVLRNAMLLVVAGLPQALITVFFAGSLLIEVIFSLDGLGRMSYEAAVSRDYPVVFGTLFIFTLAGLLIRLIGDLSYTLLDPRIDFDTRAH

SEQ ID NO: 39052 - DNA, 1074 bp, Pseudomonas putida KT2440
  CDS (1)..(1074): transl_table=11
atgctggcctacatcctgcgccgcctgctgctgatcatcccgaccctgttcggcatcctcatcatcaacttcatcatcgtccaggccgcccccggtggcccggtcgagcaaatgatcgccaagctcgaaggcttcgaaggcgccaccagccgcattgccggtggcggtgccgaggtttccgtggccggctccagctaccgcggcgcccagggcctggacccggcgctgatcgctgaaatcgaacgcatgtacggcttcgacaagtcgccgcccgagcgcctgtggatcatggtcaagaactacgcccagctggacttcggcgacagcttcttccgcgacgccaaggtgatcgacctgatcgccgagaagatgccggtttcgatctcgctggggctatggagcacgctgatcatgtacctggtgtcgatcccgctggggatcgccaaggccgtgcgccacggcagccacttcgacgtgtggaccagctcggcaatcatcgtcggctacgccatcccggcgttcctgttcgccatcctgctgatcgtgctgttcgccggtggcagctacttcgactggttcccgctgcgtggcctcacctccaacaacttcgacgaactgagcaccaccggcaaggtgctggactacttctggcacctggtgctgccgatcaccgcgctggtcatcggcaacttcgccaccatgaccctgctgaccaagaacagcttcctcgacgaaatcaacaaacagtacgtggtcaccgccaaggccaagggcctgagccgatcacgggtgctgtacggccacgtgttccgcaacgccatgctgctggtgatcgccggcttcccctcggcgttcatcggcatcttcttcacaggctccttgctgatcgaggtgatcttcagcctcgacggcctgggcctgatgagtttcgaagcggccatcaaccgcgactacccggtggtcttcggcaccctgttcatcttcaccctgctagggctggtggtgaaactgatcggcgacctgacctacaccttggtcgatccgcgcatcgactttgccagccgggagcactga

SEQ ID NO: 39053 - protein, 357 aa, Pseudomonas putida KT2440
MLAYILRRLLLIIPTLFGILIINFIIVQAAPGGPVEQMIAKLEGFEGATSRIAGGGAEVSVAGSSYRGAQGLDPALIAEIERMYGFDKSPPERLWIMVKNYAQLDFGDSFFRDAKVIDLIAEKMPVSISLGLWSTLIMYLVSIPLGIAKAVRHGSHFDVWTSSAIIVGYAIPAFLFAILLIVLFAGGSYFDWFPLRGLTSNNFDELSTTGKVLDYFWHLVLPITALVIGNFATMTLLTKNSFLDEINKQYVVTAKAKGLSRSRVLYGHVFRNAMLLVIAGFPSAFIGIFFTGSLLIEVIFSLDGLGLMSFEAAINRDYPVVFGTLFIFTLLGLVVKLIGDLTYTLVDPRIDFASREH

SEQ ID NO: 39054 - DNA, 1053 bp, Helicobacter hepaticus ATCC 51449
  CDS (1)..(1053): transl_table=11
atgttaggctatattttcaaacggcttttacttgttatccccactcttataggtgtgatgagtattaattttttgcttatgcagcttgcccctggtggtcctgtggagcagacaatagctaaaatagagaatcttgggcatttaagtgaggcagcagtagggcaaaatactctttataaaggttctattggcttagagcctgaacttatagaagagataaaaaaactctatggctttgataagtctctaagcgaacgatattttcaaatgctttttcattttgcctgttttgattttggtgagagtttttatagccaatcaagtgtgctttcaatcatcgcacaaaaattgcctgtgtctatttcgctagggatatttagcacacttattatttatcttattagcattccgctaggtattgcaaaagcagtgcgtaatggttcgcattttgatgtgataagtagcgtcattattgttgtgcttaatgcgattccggcttttatgtttggtgtggtgcttatcgtgcttttttgtggagggagttattttgatatttttcctttacgagggctagtgagcgagcattttgaatctttaaatatgtggggcaagattaaagattatttatggcatttatttttgcctgtgctgtgtatttccataggtggttttgcaactttaagtatgttaagcaaaaattgctttttggaggagattcgcaaaagctatgtgataagtgctaaagcaaagggtgggagcgaatcttatatactttataagcatatttttcgcaatgcaatgcttttaatcgtaagcggatttcctgctgtgtttgtgggtgcattttttagcggaagtttgcttattgaaattatttttagccttgatggtttgggacttttgggatatgaaagtgtgattaaccgcgattatcctgttatttttggcactttatatatttttacttttattgcccttgtgataggtattataagtgatgtgatgtattatctcattgacccacgtatccattttgggagcaaaaatgtctaa

SEQ ID NO: 39055 - protein, 350 aa, Helicobacter hepaticus ATCC 51449
MLGYIFKRLLLVIPTLIGVMSINFLLMQLAPGGPVEQTIAKIENLGHLSEAAVGQNTLYKGSIGLEPELIEEIKKLYGFDKSLSERYFQMLFHFACFDFGESFYSQSSVLSIIAQKLPVSISLGIFSTLIIYLISIPLGIAKAVRNGSHFDVISSVIIVVLNAIPAFMFGVVLIVLFCGGSYFDIFPLRGLVSEHFESLNMWGKIKDYLWHLFLPVLCISIGGFATLSMLSKNCFLEEIRKSYVISAKAKGGSESYILYKHIFRNAMLLIVSGFPAVFVGAFFSGSLLIEIIFSLDGLGLLGYESVINRDYPVIFGTLYIFTFIALVIGIISDVMYYLIDPRIHFGSKNV

SEQ ID NO: 39056 - DNA, 1077 bp, Wolinella succinogenes DSM 1740
  CDS (1)..(1077): transl_table=11
ttgggcgcttatatcttcaagcgacttttgctcattctccctacgctctttggcatcatcacactcaacttttttatcattcaagcagcacctggaggacccgtggagcagatgctagccaagctagagcatatccaagggggagcacaagagcgaatctcctctagctctagcgaggtgagcctgagtgtttcggggcaatatcgcggctccaagggcttggatgagaggttgatcaaagagattgagaagctctatggctttgataaacccctccatgagcgctattttctgatgcttaaaaactaccttgtctttgatttgggggagagcttctatcgccaaaaaagagtggtggagctggtggtggagcgcctccctgtctctatttctctcggggtttggagcacgattcttatctatctcatctccatccccttaggaatcaagaaagccgtgagacatgggagctcttttgatgtgggaagtagcttcatcattgtccttgggagcgcgattcccgtctttctctttgccatcgtgctgattatcttcttggcaggcggaagctatttgcagctctttccgcttcgaggattggtgagcgaagggtttgaggggttgagtctggggggtaagattttggattatctttggcatatcactctgcctgtcgcctctttgacgattggagggtttgcctcactcaccctcctaaccaaaaactcttttctcgaagagatcaataagcagtatgtcttcacggcgcgcgccaagggggcgagtgagcgaaaaattctttatggtcatgtctttagaaatgcgatgcttatcgttgtttcaggttttcccgctgctttcattgggatgttttttgcaggctctcttttggtggagatcgttttttcactcgatgggttgggccttttggggtatgaatccacgctcaatcgagactaccctgtgatgtttggcacgctctatattttcaccctcattgggctcatcaccacgcttattagtgaccttgtctatacgctcattgacccaagaatcgactttgagaggcgcgcatga

SEQ ID NO: 39057 - protein, 358 aa, Wolinella succinogenes DSM 1740
MGAYIFKRLLLILPTLFGIITLNFFIIQAAPGGPVEQMLAKLEHIQGGAQERISSSSSEVSLSVSGQYRGSKGLDERLIKEIEKLYGFDKPLHERYFLMLKNYLVFDLGESFYRQKRVVELVVERLPVSISLGVWSTILIYLISIPLGIKKAVRHGSSFDVGSSFIIVLGSAIPVFLFAIVLIIFLAGGSYLQLFPLRGLVSEGFEGLSLGGKILDYLWHITLPVASLTIGGFASLTLLTKNSFLEEINKQYVFTARAKGASERKILYGHVFRNAMLIVVSGFPAAFIGMFFAGSLLVEIVFSLDGLGLLGYESTLNRDYPVMFGTLYIFTLIGLITTLISDLVYTLIDPRIDFERRA

SEQ ID NO: 39058 - DNA, 1110 bp, Rhodopseudomonas palustris CGA009
  CDS (1)..(1110): transl_table=11
atggccgcctatatcgcccgccgcatcctgctgatgtttcccacgctgctcgggattctgttcgtgtcgttcgtcgtggtgcagttcgcgcccggaggtcccgtcgaacgggtgatcgcgcagatctccggcgccgacaccggcgcgtcgtcacgcatctccggttcttccggcggtgacttcggcgcgcggccgcaagcggccggcgcggcggaagcggtgaactcgaaatatcgcggcgctcaggggctcgatcctgaattcgtcaagagcctggagaagcagttcggcttcgataagccggcgcctgaacgcttcgcgatcatgctgtggaatttcgcgcggttcgatttcggcaagagctacttccgcgacgtcagcgtgctgcaactgatcaaggagaagctgccggtctcgatgtcgctcgggatctggatgacgctcctgacctacctgatctcgattccgctcggcattcgcaaggcggtgcaggacggctccaaattcgacacctggacctcggcggtgatcatcgtcggcttcgcgatcccaggcttcctgttcgcgatcctgttgatcatcctgttcgccggcggctccttcttcagctggtttccgctccgcggcctgacctccgatggctggagccagtttccatggtactggaagatcctcgactatttctggcacctcacattgccgctgatctcgatggcgctcggcgcgttcgccaccatgacgctgctgaccaaaaactcgttcctggacgagatccgtaagcaatacgtcatgaccgcgcgcgccaagggttgcagcgagacccaggtgctgtacgggcacgtgttccgcaacgccatgctgatcgtgatcgccggcttccctggcgccttcatccacgcgttcttctccggcgcgctgttgatcgagaccatcttctcgctcgacgggctgggcctgctcggcttcgagagcgtgctcaaccgcgactatccggtcgtgttcggtacactgttcatcttttcactggtgggcctggtggtgaacctgatctccgatctcacctatatgtggatcgatccgcggatcgacttcgaggcgcgggacgtctga

SEQ ID NO: 39059 - protein, 369 aa, Rhodopseudomonas palustris CGA009
MAAYIARRILLMFPTLLGILFVSFVVVQFAPGGPVERVIAQISGADTGASSRISGSSGGDFGARPQAAGAAEAVNSKYRGAQGLDPEFVKSLEKQFGFDKPAPERFAIMLWNFARFDFGKSYFRDVSVLQLIKEKLPVSMSLGIWMTLLTYLISIPLGIRKAVQDGSKFDTWTSAVIIVGFAIPGFLFAILLIILFAGGSFFSWFPLRGLTSDGWSQFPWYWKILDYFWHLTLPLISMALGAFATMTLLTKNSFLDEIRKQYVMTARAKGCSETQVLYGHVFRNAMLIVIAGFPGAFIHAFFSGALLIETIFSLDGLGLLGFESVLNRDYPVVFGTLFIFSLVGLVVNLISDLTYMWIDPRIDFEARDV

SEQ ID NO: 39060 - DNA, 1011 bp, Leptospira interrogans serovar Copenhageni str. Fiocruz L1-130
  CDS (1)..(1011): transl_table=11
atgaaaaaatatttccttaaacgattccttctaatcattcctacactattgggaatgacttttatcgtctttttaatttctcattttgcgccaggtggtccacttgaaaccgaaatcgcaaaaatcagaggttatgcaagttctcaaggaggaagcgctaaaacaatttcagaagaagaaataaatataattaaaaaaagattacatttagataaaccagttggaatcgcttatctttattggctcaaagaaattttgactttcaatttgggagaatccagacttcatactcgaccggtatccgaactgatcttggaaaaacttccggtatctctcacgttcggtctttctggatttttactttcatatctgatttgtatccctttaggaattactaaagcacttcgaaacggagaacgtttcgacataacatccagcggaatcattttaatcacgtattcaattccggtatttgcactttcggttctacttctttatacattcgcttcgggtgaactattatctatctttcctttaggtcacgaggtttcggacgaatatgaatctctatcttcttgggaaaaagtaatcgatcgaatcgaacacatgtttcttccagtaatctgttacgtttccggttcgtttgcagttctcaccttgcttatgaaaaactcacttttagatcaaatttcgaaagaatatgttcgtacggctctttccaaaggttttagttttcaagaagccatctttaaacacgcacttcgtaattctttaattcctatcgcgacaggttttggaaacaacctcagtttgatttttgcgggatctttggttatagagctcgtatttaatatagacggaatgggacttttaagttttcaagcagttaccgaaagggatacggatttgatgatggggcttttatttgtacaaagccttctttctttagtcggaaacattctatcagacttttgttatgtactcatagatccgaggattcagttcgaatga

SEQ ID NO: 39061 - protein, 336 aa, Leptospira interrogans serovar Copenhageni str. Fiocruz L1-130
MKKYFLKRFLLIIPTLLGMTFIVFLISHFAPGGPLETEIAKIRGYASSQGGSAKTISEEEINIIKKRLHLDKPVGIAYLYWLKEILTFNLGESRLHTRPVSELILEKLPVSLTFGLSGFLLSYLICIPLGITKALRNGERFDITSSGIILITYSIPVFALSVLLLYTFASGELLSIFPLGHEVSDEYESLSSWEKVIDRIEHMFLPVICYVSGSFAVLTLLMKNSLLDQISKEYVRTALSKGFSFQEAIFKHALRNSLIPIATGFGNNLSLIFAGSLVIELVFNIDGMGLLSFQAVTERDTDLMMGLLFVQSLLSLVGNILSDFCYVLIDPRIQFE

SEQ ID NO: 39062 - DNA, 1122 bp, Bartonella henselae str. Houston-1
  CDS (1)..(1122): transl_table=11
atggtagtctatattctccggcgtttttttctgcttataccgacactgattggtattttaacagtcacctttattattgttcaatttacgccaggagggcctattgaaaatattattgcccagttacaaggaacaggcggtgatgctgtaggacgagtggggggtgggagtgatctcggtctttcttctgatgttatcttggatggtgcagaggttgaatcgtcttcttctagagtttttaagtatcgcggtgcgcaaggattggatccagaatttattgccaagctcgaaaagcaatttggatttgataagccgcctttggaacgttatttaacaatgctggggcgttatctgcgttttgattttggcgattcttatacacaagggcgttcagttattgaactgattaagagtgctttacccgtttctctttcgcttgggttttggcaattgttgatttcatactctatttctataccgttaggaattcagaaagctcttaaagagggtgcgccttttgatgtatggacaagtgcacttatcattattggctatgctattccgagcttcctctttggtatttttttaatggttttttttgctggagggtcttttttaaattggtttccgttaagccatttaacgtctgataattttgaccaattatcctttgggggtaaaatattagattacctttatcatttggttctccctttaacagcaatgatcatttcttcttttgctacaacgaccttgctaacaaaaaattgttttctagaagaaattcgtcaacaatatgttattacagcacgcgctaagggtttaagcgaacgctcagttctttatggtcatgtttttcgcaatgcaattttaattgtgattgccagttttcctgcaacttttatggcatcattttttagcggatctttgttgattgaaatgctctattcattaaatggtatggggcttttaagttatacgtctattgtcaatcgtgattattctgttgtatttgcttctctttatattttttcgctcattggtctgattgtgagtctcatttctgatatcgtttatatgttcgttgatccacgtattgattttgataaaaaggatttgtga

SEQ ID NO: 39063 - protein, 373 aa, Bartonella henselae str. Houston-1
MVVYILRRFFLLIPTLIGILTVTFIIVQFTPGGPIENIIAQLQGTGGDAVGRVGGGSDLGLSSDVILDGAEVESSSSRVFKYRGAQGLDPEFIAKLEKQFGFDKPPLERYLTMLGRYLRFDFGDSYTQGRSVIELIKSALPVSLSLGFWQLLISYSISIPLGIQKALKEGAPFDVWTSALIIIGYAIPSFLFGIFLMVFFAGGSFLNWFPLSHLTSDNFDQLSFGGKILDYLYHLVLPLTAMIISSFATTTLLTKNCFLEEIRQQYVITARAKGLSERSVLYGHVFRNAILIVIASFPATFMASFFSGSLLIEMLYSLNGMGLLSYTSIVNRDYSVVFASLYIFSLIGLIVSLISDIVYMFVDPRIDFDKKDL

SEQ ID NO: 39064 - DNA, 1068 bp, Acinetobacter sp. ADP1
  CDS (1)..(1068): transl_table=11
atgggtacatacattatcaagcggcttctactgattattccgacactttttctcattttgttgatcaattttattgtggtgcaaattgcaccaggcggccctgttgagcaggccattcagcaagcagaaagtattcctggccttaagggtggaggggaaacagtttctgtagcgacagatacgcattatcaaggggcacgtgggcttactccagaaatggtcgataaaatcaaggcacagtatggttttgataaatccgcaccagaacggttctggatcatgcttaaaggttatttaacactggattttggaaccagcttttttaaagataaacccgtgacacagttactttatgagaaaatgcctgtcactgtctctttggggttgtggagtaccttgctgatttatttggtgtccattccgttaggtattcgaaaagcaaaacaacatggcttgttgtttgataaatctacctcaatgctacttgctgtaggctatgctgttccgacgtttgtatttggtgtggtgctgattgtattttttgcagggggatcgtattttcagtggtttcctttacaaggcttggtttctgataatttccaaagtttgggaatgtgggcgaagatcaaagattatttttggcatatggcattgccccttgttaccatgttattgggtggatttgcgggactcacctatctgaccaaatacgcatttatggaagagcttaacaaacagtatgtgctcgcggcgcgttcaaaaggattgagcgaaaacagagtgctttatgggcatgtctttcgtaatgcgatgttgatagtcattgctggacttcctgaagcattggtcggaattttctttgtcggtaatctgtttatcgaaattatttttaaccttgatggaattggcttgcttggatttgaagcgattacccagcgtgattatcctgtgatttttggtactttatttttgtttaccttattggggttggtgctaagactgatcagtgatgtgctttaccagatcattgaccctcgcattaatttcgaatcaagaggagcaaaataa

SEQ ID NO: 39065 - protein, 355 aa, Acinetobacter sp. ADP1
MGTYIIKRLLLIIPTLFLILLINFIVVQIAPGGPVEQAIQQAESIPGLKGGGETVSVATDTHYQGARGLTPEMVDKIKAQYGFDKSAPERFWIMLKGYLTLDFGTSFFKDKPVTQLLYEKMPVTVSLGLWSTLLIYLVSIPLGIRKAKQHGLLFDKSTSMLLAVGYAVPTFVFGVVLIVFFAGGSYFQWFPLQGLVSDNFQSLGMWAKIKDYFWHMALPLVTMLLGGFAGLTYLTKYAFMEELNKQYVLAARSKGLSENRVLYGHVFRNAMLIVIAGLPEALVGIFFVGNLFIEIIFNLDGIGLLGFEAITQRDYPVIFGTLFLFTLLGLVLRLISDVLYQIIDPRINFESRGAK

SEQ ID NO: 39066 - DNA, 1098 bp, Erwinia carotovora subsp. atroseptica SCRI1043
  CDS (1)..(1098): transl_table=11
atgggaacgtatctgttacgccgcctcttgctggtcattccaaccctgtgggcgattatcacgattaacttcttcattgtacaaattgctcccggcggccctgtcgatcaagctatcgcagcgatcgaaatgggacacggaagcggctatacctccaatagcggaatggatgcaggaatggcacgcactggcaccagcggcgcgcccaatatcgaaaacgcttaccgaggctcacgcgggcttgacccggaagtcatcgaagaaatcactaaacgctatggcttcgataaaccaatccatgagcgctattttaaactgctgtgggattacgtacgttttgacttcggcgacagcctgtttcgtggctcttcggtgatgcagctcattaaggaaagcatgccggtttcgattacgctggggctatggagtacgctgattatctacctggtttccattccacttggcatcaaaaaagcggtgaagaacggcacaccgttcgatacctggagcagtacattaatcatcgtcgggtatgccattccggcgtttttgtttgcgattattttaattgtgctgttcgcaggcggcagttatctagactggttcccacttcgaggactgatctccagcaattttgataccctgccgtggtacagcaagattaccgattatttgtggcatatcgcgctaccggtagtagcttccgtgattggcggttttgctaccctcacgatgctcactaagaactcctttatggatgagattcgtaagcaatacgttgttaccgcacgcgctaaagggctggatgaaaaaagcatcctctatcggcatgtgttccgtaatgccatgctgctggtgattgctggcttccctgccacgtttatcagcatgtttttcactggttcgctgctgattgaggtgatgttttctctcaacgggctgggtctgttgggctatgacgccacgctgcaacgtgattatcccgtcatgttcggcacgctgtatatcttcacgctgatcggtttattgttgaatatcgtcagtgacataacctatacactggtggatccgcgtatcgattttgagggacgccaatga

SEQ ID NO: 39067 - protein, 365 aa, Erwinia carotovora subsp. atroseptica SCRI1043
MGTYLLRRLLLVIPTLWAIITINFFIVQIAPGGPVDQAIAAIEMGHGSGYTSNSGMDAGMARTGTSGAPNIENAYRGSRGLDPEVIEEITKRYGFDKPIHERYFKLLWDYVRFDFGDSLFRGSSVMQLIKESMPVSITLGLWSTLIIYLVSIPLGIKKAVKNGTPFDTWSSTLIIVGYAIPAFLFAIILIVLFAGGSYLDWFPLRGLISSNFDTLPWYSKITDYLWHIALPVVASVIGGFATLTMLTKNSFMDEIRKQYVVTARAKGLDEKSILYRHVFRNAMLLVIAGFPATFISMFFTGSLLIEVMFSLNGLGLLGYDATLQRDYPVMFGTLYIFTLIGLLLNIVSDITYTLVDPRIDFEGRQ

SEQ ID NO: 39068 - DNA, 1101 bp, Yersinia pseudotuberculosis IP 32953
  CDS (1)..(1101): transl_table=11
gtgggcgcatatctattacggcgactattccttgttattcctacgctgtgggccattattactatcaatttctttattgtgcagattgcacctggcgggccagttgatcaggctatcgccaatattgaattgggtcacaccactggatttactgccggtagcggtgatggcggtttaggaggggctaaagccggtctgaatgcagcacaggtcggtgacagtaattatcgcggttcacgcggattagacccggaagttattgctgaaataaaacagcgctttggttttgataagcccctacatcaacgctatttcgatatgctatggcgctatgtccgttttgattttggcgacagtttgttccgtggcgaatcggtgatgtcactgataaaacaaagcctgccggtgtcaatctcgcttgggctatggagtacgctgattatttatctggtttccatacctctggggataaaaaaagcggtgcgcaatggcaccgccttcgatacctggagcagcaccttaattatcatcggttatgcaatcccctccttcctattcgctattttactggtagtgctgttttccggggggagctatttcgacctattcccactccgcggtctggtttccagtaactgggacaccctaccgtggtacagcaaaatcacagactatttgtggcatattaccctgcccgtgctggccacggtgattggtggtttcgcgacactgacgatgctaacgaaaaactcattcctcgatgaaatacgtaagcaatatgtcgttacggcccgcgccaagggactaccagaggaaaaaattctctatcgccatgtctttcgtaacgccatgctgttagtcatcgccggattccccgccacctttgtcagtatgtttttcacgggttcactcttgattgaagtgatgttctcactcaatggcttaggcctgctgggatacgacgccaccatacagcgagattacccggtaatgtttggcacgctctatattttcacactcattggtttactgctgaatatcgtcagtgacattacctataccctggtagacccacgtattgattttgagggccgccaataa

SEQ ID NO: 39069 - protein, 366 aa, Yersinia pseudotuberculosis IP 32953
MGAYLLRRLFLVIPTLWAIITINFFIVQIAPGGPVDQAIANIELGHTTGFTAGSGDGGLGGAKAGLNAAQVGDSNYRGSRGLDPEVIAEIKQRFGFDKPLHQRYFDMLWRYVRFDFGDSLFRGESVMSLIKQSLPVSISLGLWSTLIIYLVSIPLGIKKAVRNGTAFDTWSSTLIIIGYAIPSFLFAILLVVLFSGGSYFDLFPLRGLVSSNWDTLPWYSKITDYLWHITLPVLATVIGGFATLTMLTKNSFLDEIRKQYVVTARAKGLPEEKILYRHVFRNAMLLVIAGFPATFVSMFFTGSLLIEVMFSLNGLGLLGYDATIQRDYPVMFGTLYIFTLIGLLLNIVSDITYTLVDPRIDFEGRQ

SEQ ID NO: 39070 - DNA, 1092 bp, Silicibacter pomeroyi DSS-3
  CDS (1)..(1092): transl_table=11
atgggcgcctatatcctcagacgattgctgttggtgatcccgaccttgctcgggatcatgctggtgaacttcgtgctggtgcagttcgtgccgggtggtccggtggatcaggccattgcgcaattgcagggtggcggtgatgtgttcgaaagctttgccggccagggcaacgacgcgcagctgaacagccagaccaacgcggtgaacgacagctatatcggcgcgcgcggcctgccgcccgaattcatcaaggagctggaagagctatacggtctggacaaaccggcgcacgaacggttcctgatgatgttgtggaactatatgacgctcgattttggcgagagctatttccgcaagatcgacgtggtcgatctggtgctggagaagatgccggtgtcgatcacgctgggcctgtggtcgaccttgatcgcctatgcgatctcgatcccgctgggcatccgcaaggcggtgcgcgatggctcgcgttttgacacctggaccagcgggttgatcatcgcggcctatgcgatccccgggttcctgttcgccatcctgctgctggtgctcttcgccgggggcagctattggcagatcttcccgttgcgcggcctcacctcggacaatttctcggacctgtcgctgttgggcaaggtgctggattatttctggcacatcgccctgccgctgaccgcctatacgatcggcgccttcaccacgctgaccctgctgaccaagaacagctttctggacgagatcaagaagcaatacgtgatcaccgcccgcgccaaggggctgagcgaaagccgggtgctgtacggccatgtgttccgcaacgcgatgctgatcgtgatctcgggctttccgggcgtgttcctgtcggtctttctgggcggctcgctgatcatcgagacgatcttctcgctcgacgggctgggccggctggggttcgaggcgacggtggcgcgcgactatccggtgatgttcggcacgctcttcgtgtttggcctgatcggccttttggtcggtatcctgtcggacctgacctatgtgctggtcgatccccgcatcgactttgagcggcgggagggttga

SEQ ID NO: 39071 - protein, 363 aa, Silicibacter pomeroyi DSS-3
MGAYILRRLLLVIPTLLGIMLVNFVLVQFVPGGPVDQAIAQLQGGGDVFESFAGQGNDAQLNSQTNAVNDSYIGARGLPPEFIKELEELYGLDKPAHERFLMMLWNYMTLDFGESYFRKIDVVDLVLEKMPVSITLGLWSTLIAYAISIPLGIRKAVRDGSRFDTWTSGLIIAAYAIPGFLFAILLLVLFAGGSYWQIFPLRGLTSDNFSDLSLLGKVLDYFWHIALPLTAYTIGAFTTLTLLTKNSFLDEIKKQYVITARAKGLSESRVLYGHVFRNAMLIVISGFPGVFLSVFLGGSLIIETIFSLDGLGRLGFEATVARDYPVMFGTLFVFGLIGLLVGILSDLTYVLVDPRIDFERREG

SEQ ID NO: 39072 - DNA, 1068 bp, Psychrobacter arcticus 273-4
  CDS (1)..(1068): transl_table=11
atgggtcgttatatcctaaaaaggttattgctgatattaccgacgctatttttgatattgctggcaaacttcgtcattgtacaagcagcgcctggtggtcctgttgagcagcaactcgccatgattgagcaaggcgcaaaagacaatgccttgggcggtaatcttggtgcaggtagtgccggtaataatagtacctatcaagggactcgcggcttatcagaggagatggtggcagcaattaatgcgcaatacggctttgataaatctgcgcctgagcgcttttggctgatgctaaaaaattatggccagctggattttggggagtcgttttttaaagggcaatcagtgacagacttgattgttgaaaagctacccgtatcaatctcgcttggactatggagtacgctgctgatttatatgatagcgattccacttggtgtctataaagccatgcatcatggttcagggattgataaagtcactgccatgctacttgctatcgggcatgcaataccggtctttgtatttgctgttattttgctcgtgttttttgctggtggcagctactggaatatttttccgctgcaagggttaacctccgagaattttgatcagttaagtgtcattggtaaagtgaaagactacttttggcatctggcgttgccgctattggcaagtacggttggcggttttgctggcctaacctatctgaccaagtttagctttttagaggagctcggcaagcaatatgtgcttaccgctcgtgccaaaggcttgggtgagcgtcaagtcttgtacggacatgtgtttcgtaatgccatgctgattattatcgcgggtattccagcggctatcgtgggaattttctttgcgggtaatttcttaattgagattatctttaagcttgatggtttaggattgttaggtttcgaagccattcagcagcgcgattatccagtgatatttggcaccttatttatttttactctagtaggattgttattacaattaatcagtgatttaagttatcacttaattgatccccgtatcgactttgaagggcgctaa

SEQ ID NO: 39073 - protein, 355 aa, Psychrobacter arcticus 273-4
MGRYILKRLLLILPTLFLILLANFVIVQAAPGGPVEQQLAMIEQGAKDNALGGNLGAGSAGNNSTYQGTRGLSEEMVAAINAQYGFDKSAPERFWLMLKNYGQLDFGESFFKGQSVTDLIVEKLPVSISLGLWSTLLIYMIAIPLGVYKAMHHGSGIDKVTAMLLAIGHAIPVFVFAVILLVFFAGGSYWNIFPLQGLTSENFDQLSVIGKVKDYFWHLALPLLASTVGGFAGLTYLTKFSFLEELGKQYVLTARAKGLGERQVLYGHVFRNAMLIIIAGIPAAIVGIFFAGNFLIEIIFKLDGLGLLGFEAIQQRDYPVIFGTLFIFTLVGLLLQLISDLSYHLIDPRIDFEGR

SEQ ID NO: 39074 - DNA, 1074 bp, Pseudomonas syringae pv. phaseolicola 1448A
  CDS (1)..(1074): transl_table=11
atgctggcttatattctgcgacggctgctgctgatcatccctaccctgctcggcattctgatcatcaacttcgtcatcattcaggccgcacccggtggaccggtcgagcagatgatcgccaagatcgaaggcttcgatggcgctaccagccgaattgcgggtggcggtgccgaggtatcggtggcgggctccaactaccgtggcgcgcagggcctggacccggcactgatcaaagaaatcgaacgcatgtacggcttcgataaatcggcaccggaacgcctgtggatcatgatcaagaactacgccacgctggatttcggcgacagcttctttcgcgatgccaaggtgatcgacctgatcgtcgagaagatgccggtctccatctctctggggttatggagcacgctgatcatgtacctggtgtcgatcccgctggggatcgccaaagccactcgccacggcagtcagttcgacgtgtggaccagctcggcgatcatcgtcggctacgccatcccggcgtttctgttcgcgattctgctgatcgtggtgtttgccggtggcagctacttcaactggttcccgctgcgtgggctgacctcgaacaactatgacgaactgagcaccctgggcaaggtcttcgactacttctggcatctggtgctgccggtcaccgcgctggtgatcggcaacttcgccaccatgaccctgctgaccaagaacagctttctcgacgaaatcagcaagcaatatgtcaccaccgccaaagccaagggcctgagcaaccacaaggtgctctacggccatgtgtttcgcaacgcgatgctgctagtgatcgctggcttcccgtcggcgttcatcggtatcttcttcaccggctcgctgctggtggaagtgatcttttcgctggacggcctaggcctgatgagctttgaagccgctatcaaccgcgactacccggtggtgttcggcaccctgttcatcttcaccctgctggggttggtggtgaagctgatcggcgacatcacctacaccctggtagacccgcgcatcgacttcgaaagcaggaagcattga

SEQ ID NO: 39075 - protein, 357 aa, Pseudomonas syringae pv. phaseolicola 1448A
MLAYILRRLLLIIPTLLGILIINFVIIQAAPGGPVEQMIAKIEGFDGATSRIAGGGAEVSVAGSNYRGAQGLDPALIKEIERMYGFDKSAPERLWIMIKNYATLDFGDSFFRDAKVIDLIVEKMPVSISLGLWSTLIMYLVSIPLGIAKATRHGSQFDVWTSSAIIVGYAIPAFLFAILLIVVFAGGSYFNWFPLRGLTSNNYDELSTLGKVFDYFWHLVLPVTALVIGNFATMTLLTKNSFLDEISKQYVTTAKAKGLSNHKVLYGHVFRNAMLLVIAGFPSAFIGIFFTGSLLVEVIFSLDGLGLMSFEAAINRDYPVVFGTLFIFTLLGLVVKLIGDITYTLVDPRIDFESRKH

SEQ ID NO: 39076 - DNA, 1053 bp, Ralstonia eutropha JMP134
  CDS (1)..(1053): transl_table=11
atgcttgcctatctgttcaagcgcattttgctgatgatcccgacgctgatcggcgtcatcacgctgacctttgtcgtcatccagttcgtgccgggtggccccgtcgagcagatgatgctggaactgaaggggcgtggcggcggcagcggcgaggcgagtggcggcggtgccgagtaccgtggccggcgcggggtcgatcccgagaagatcaaggaaatccaggcgctgtacggtttcgacaagccgccgctcgaacgctacttcctgatgctcaagcgctttgcgcggttcgatctcggccagagctacttccagcaccgcagtgtgtgggagttggtgaagtccaagctgccggtttcggtcagcctggggctatggacgttcttcctgacttacctgatatcggtgccgctcggtatttcgaaggcgatccgggcgggtagccgcttcgacgtggtgaccagcatgatcgtgctggtcggctacgcgattccgggtttcgtgctgggcgtgctgctgctcgtgctgttcggcggcggcaccttcgttcagtggttcccgctgcgcggcctgacttccgacaactgggaccagctctcgctgatgggcaaggtcatggattacctgtggcacctggtgctgccgatcaccgcatcggtggtgggcagctttgccgtggtgaccatgctgaccaagaacgcgttcctggacgagatccgccggcagtatgtactgacggcaagggccaagggtttgtcggagcgccgcgtgctgtggaagcatgtgttccgcaatgcgctgatcccgctcgtgacggggtttccggctgcgttcatcggcgcgttcttcacgggctcgctgctgatcgaaacgctcttctcgcttgatggcctcgggctgttgtcctatgaagcggtattgcggcgcgactatcccgtcgtgctcggcacgctctacctgtttacgctgatcggcctggtgacccggctgatttccgacgtttgctacgtgctggtcgacccgcgcatccacttcgaggccctgcacaaatga

SEQ ID NO: 39077 - protein, 350 aa, Ralstonia eutropha JMP134
MLAYLFKRILLMIPTLIGVITLTFVVIQFVPGGPVEQMMLELKGRGGGSGEASGGGAEYRGRRGVDPEKIKEIQALYGFDKPPLERYFLMLKRFARFDLGQSYFQHRSVWELVKSKLPVSVSLGLWTFFLTYLISVPLGISKAIRAGSRFDVVTSMIVLVGYAIPGFVLGVLLLVLFGGGTFVQWFPLRGLTSDNWDQLSLMGKVMDYLWHLVLPITASVVGSFAVVTMLTKNAFLDEIRRQYVLTARAKGLSERRVLWKHVFRNALIPLVTGFPAAFIGAFFTGSLLIETLFSLDGLGLLSYEAVLRRDYPVVLGTLYLFTLIGLVTRLISDVCYVLVDPRIHFEALHK

SEQ ID NO: 39078 - DNA, 1089 bp, Rhodobacter sphaeroides 2.4.1
  CDS (1)..(1089): transl_table=11
atgggagcctacatcctccggcgacttcttctgatcgtgccgaccctgttcggcatcatggtcatcaacttcgtcctgacgcagttcgtgccgggcggcccgatcgagcaggtgctggcgcggctcgacgggcagggcgacgtgttccagaccgttgcgggcggcggcgatgccggcacggcgagcgcaccctcggcgcagacgtccgaacgctacgtcggctcgcgcgggctgccgcccgaattcatcgcccagctcgagaagcagttcggcttcgacaagccgccgctggagcgtttcctcgacatgatgtggaactacgtccgcttcgacttcggcgagagctacttccgctcgatctcggtggtggatctggtcaaggagaagatgccggtctcgatctcgctcgggctctggtccacgctgatcgcctatctggtctcgatcccgctcggcatccgcaaggccgtccgcgacggatcgagcttcgacacctggacgagcggcgccatcatcgtggcctatgcgatcccgggcttcctcttcgcgattctgctcctcgtgctcttcgcgggcggatcctactggcagtggttccccctgcgcgggttgacatctgacaactgggacagcctgtccccgctgggcaaggtggccgactatttctggcacatcaccctgcccgtggtggcctcgacgatctcggccttcgccacgctcacgctgctgacgaagaactccttcctcgaggagatccgcaagcaatatgtgatgaccgcgcgggccaagggactggccgagggccgggtgctctacggccatgtcttccgcaatgcgatgctcatcgtgatcgcgagcttcccgtccgtcttcgtctcggtcttcttcggcggcagcctcatcatcgagacgatcttctcgctcgacgggctgggccggctcgggttcgaggcggcggtggcgcgggattatccggtgatcttcggcacgctcttcgtcttcggcctgctcggcctgctcatggggatcctgtcggacctgatgtatgtctggatcgatccgcgcatcgacttcgggacgcggggctga

SEQ ID NO: 39079 - protein, 362 aa, Rhodobacter sphaeroides 2.4.1
MGAYILRRLLLIVPTLFGIMVINFVLTQFVPGGPIEQVLARLDGQGDVFQTVAGGGDAGTASAPSAQTSERYVGSRGLPPEFIAQLEKQFGFDKPPLERFLDMMWNYVRFDFGESYFRSISVVDLVKEKMPVSISLGLWSTLIAYLVSIPLGIRKAVRDGSSFDTWTSGAIIVAYAIPGFLFAILLLVLFAGGSYWQWFPLRGLTSDNWDSLSPLGKVADYFWHITLPVVASTISAFATLTLLTKNSFLEEIRKQYVMTARAKGLAEGRVLYGHVFRNAMLIVIASFPSVFVSVFFGGSLIIETIFSLDGLGRLGFEAAVARDYPVIFGTLFVFGLLGLLMGILSDLMYVWIDPRIDFGTRG

SEQ ID NO: 39080 - DNA, 1122 bp, Desulfovibrio desulfuricans G20
  CDS (1)..(1122): transl_table=11
atggccgcgtatatcctgcgcagactggcactgcttgtgcctacgtttttcggaataatcgccctgaatttctttgtcatccagtcggcaccgggcgggcctgtggagcagtacctgctccggcttgaaggtgcggattcggtgttcatggaaagggtgggcggcgagtcgggcgatacaggtatagccaccccgcagcttgatggcggcagtgccgcacagggcgacgggctttacaaggggcagcgcggtctgtcgcctgaagtggtcgaggccgtcagacgcatgtacgggtttgacagacccgtgcacgagcgtttctggcttatgctcaggaactacctgacctttgacttcggcgacagttttttcaaagggcgcagcgtcatgcagctgctgggcgacgccctgccggtgtccatctcgctgggactctggagtacgctcatcatatactttgtgtccattcctctgggtatccggcgtgccgtcagacacggcagcaggtttgatgcggttacgggcacactggtggtcatcggcgacgccatacccgggtttctgtttgccgtgctgctggtggtgctgtttgccggcggcagctactggaacatctttccgctgcgggggcttgtttcgcccgactttgcccagatgaccctgtggcagaagataggcgattatttttcgcatcttgcgctgccgctgacatcgctggtcataggtggttttgccacgctgaccacgctgaccagaaactcgtttctggacgagatacaccggcagtacacggctacggcactggccaagggactgaccatgcggcaggtgctgtacggccatgtgttccgcaatgccatgctgattgtcattgccggctttcccggtacgttcatccacatgttcttcaccggctctgtgctcatcgaagtcatcttttcgcttaacgggctggggttgctggggtttgaagcggccatgacgcgggattatccggtcatgtttgccacgctgtacatgttcaccctgctggggctgctgacgcgcatcattacggatatcacctactcgctggtggatccgcggataaccttcggcggcaggggggtggcccgtggctga

SEQ ID NO: 39081 - protein, 373 aa, Desulfovibrio desulfuricans G20
MAAYILRRLALLVPTFFGIIALNFFVIQSAPGGPVEQYLLRLEGADSVFMERVGGESGDTGIATPQLDGGSAAQGDGLYKGQRGLSPEVVEAVRRMYGFDRPVHERFWLMLRNYLTFDFGDSFFKGRSVMQLLGDALPVSISLGLWSTLIIYFVSIPLGIRRAVRHGSRFDAVTGTLVVIGDAIPGFLFAVLLVVLFAGGSYWNIFPLRGLVSPDFAQMTLWQKIGDYFSHLALPLTSLVIGGFATLTTLTRNSFLDEIHRQYTATALAKGLTMRQVLYGHVFRNAMLIVIAGFPGTFIHMFFTGSVLIEVIFSLNGLGLLGFEAAMTRDYPVMFATLYMFTLLGLLTRIITDITYSLVDPRITFGGRGVARG

SEQ ID NO: 39082 - DNA, 1104 bp, Rhodospirillum rubrum ATCC 11170
  CDS (1)..(1104): transl_table=11
atgatcgcctatatcctgcgccgtctggcgctaatccctttgaccctgttcgggatcatcctggtcaatttcctgatcgtccagatcgctccgggcggtccggtcgagcaggtgctctcacgccttcagggcatggacggcggggccacggcgcgcttcagcggcagtggcggcggcgaagcgggcggtggatccgcgacgagcgccctcggcccgaccaccgcctatcgcggcgcccgcggcctggatccggcctatgtgaaaagcctcgaggtccagttcggcttcgaccgcccggcccacgagcgcttcttgaagatggtcggcgattatctgaccttcgatcttggccaatcctattaccgctcgatcccggtcatcgatctgatcttggaaaaaatgccggtgtccctgtcgctgggcatctggagcacgatgatcatctatctggtgtcgatcccgctgggcatcgccaaggcggtgcgcgacggctcgcgtttcgacatggcgacaagctggatggtggtggtcggctacgccgtgccgtcgttcctcttcgccatcttactgatcatcgtcttcgccggcggccgctatttcgactggttcccgctgcgcggcatcctgtcggacaactggcgcgagctgtcctggccgcaactggccctggattacctctggcatatggtgctgccggtcaccgccctggtcatcggcggcttcgccagcctgaccatgctgaccaagaacagtttcctcgaggaaatccgcaagcaatacgtcatcaccgcccgggccaaggggctgaccgaaagcaagatcctctaccgccatgtttttcgcaacgccatgctgctggtggtggccggcttccccgccgccctggtgtcgatgctgttcaccggttcggtgctgatcgaggtgatcttctcgcttgatggcctgggcctactgggctttgaaagcacgatgaaccgggattatccggtgatgttcggcacgctctatatcttcgggctgatcggacttttgctgtcgctgatcagcgatgccacctatcacatcatcgatccgcgcatcgatttcgaaagccgggagaactag

SEQ ID NO: 39083 - protein, 367 aa, Rhodospirillum rubrum ATCC 11170
MIAYILRRLALIPLTLFGIILVNFLIVQIAPGGPVEQVLSRLQGMDGGATARFSGSGGGEAGGGSATSALGPTTAYRGARGLDPAYVKSLEVQFGFDRPAHERFLKMVGDYLTFDLGQSYYRSIPVIDLILEKMPVSLSLGIWSTMIIYLVSIPLGIAKAVRDGSRFDMATSWMVVVGYAVPSFLFAILLIIVFAGGRYFDWFPLRGILSDNWRELSWPQLALDYLWHMVLPVTALVIGGFASLTMLTKNSFLEEIRKQYVITARAKGLTESKILYRHVFRNAMLLVVAGFPAALVSMLFTGSVLIEVIFSLDGLGLLGFESTMNRDYPVMFGTLYIFGLIGLLLSLISDATYHIIDPRIDFESREN

SEQ ID NO: 39084 - DNA, 1089 bp, Silicibacter sp. TM1040
  CDS (1)..(1089): transl_table=11
atgttaaactatattctgcggcgtcttctgctggtgatcccgacactgatcgggatcatggtagtgaatttcgcgctcgtgcagtttgtccccggtggaccggtggagcagatgattgcccgccttgagggcggtggcgatgtctttggcggctttgctggggcggcgaatgatgccggggcagagaccgttggtcaggccgaaagccaatacgccggggcgcgggggctgccgcctgaattcatcgaggaactggagcgcgagttcggctttgacaaacctcccctcgagcggttcctcaacatgatgtggaactacgtccggcttgatttcggcgagagctattttcgcaatatcggcgtgattgatctggtgctcgaaaagatgccagtgtcgatctcgctgggactgtggtccaccctcattgcctatctgatctcgatcccgcttggtgtgaaaaaggcgctgcgcgatggcagcagctttgacagttggaccagtggcgtgatcatcgcggcctatgcaatcccgggcttcttgtttgcgatcctccttcttgtgcttctggccggggggtcatactggcagattttccctctaaggggcctgacatccgagaattgggaagagctgagccttctgggcaagatcggcgactatttctggcacattaccttgccggtggtggcctcgaccatttcggcctttgcgacgctcaccttgctgaccaagaactcctttttggacgagatcaagaaacagtatgtgatgactgcccgtgccaaagggttgacggaaaaccgggtgctctacgggcatgtgtttcgcaatgcgatgctgatcgtgattgctggttttccgggggtgttcatctcgatctttttcaccggcagcctgatcatcgagacgatcttctcgctcgacggtctcgggcggctcgggtttgaggctgcggtcgcgcgtgactacccgattgtatttgggacacttttcatctttggtctgatgggcctggtggttgggatcttgtcagacattatgtatgtgctggtggatccacgcatcgactttgaaaagcgggagggatga

SEQ ID NO: 39085 - protein, 362 aa, Silicibacter sp. TM1040
MLNYILRRLLLVIPTLIGIMVVNFALVQFVPGGPVEQMIARLEGGGDVFGGFAGAANDAGAETVGQAESQYAGARGLPPEFIEELEREFGFDKPPLERFLNMMWNYVRLDFGESYFRNIGVIDLVLEKMPVSISLGLWSTLIAYLISIPLGVKKALRDGSSFDSWTSGVIIAAYAIPGFLFAILLLVLLAGGSYWQIFPLRGLTSENWEELSLLGKIGDYFWHITLPVVASTISAFATLTLLTKNSFLDEIKKQYVMTARAKGLTENRVLYGHVFRNAMLIVIAGFPGVFISIFFTGSLIIETIFSLDGLGRLGFEAAVARDYPIVFGTLFIFGLMGLVVGILSDIMYVLVDPRIDFEKREG

SEQ ID NO: 39086 - DNA, 1101 bp, Mesorhizobium sp. BNC1
  CDS (1)..(1101): transl_table=11
atgggagcctacatcctccgccgcctgcttcttatgatcccgaccctgttcggcatcatggccatttccttcatcgtcattcagttcgcgccgggtggcccggtggagcaggtcatagcccaggtcacaggccaaggaggcggggccgatgcccgcatcggcggtggcggaggagacgcgggcgctcagaatttcgaggcggcgggcggcgcgaattcccgctatcgcggggcgcaggggctcgatccggaattcattgcccagcttgaaaagcagttcggcttcgacaagcctcccctggaacgcttcgggctgatgctctggaactatatccggttcgatttcggcgagagttatttccgcgatatttcggtcgtcgacctgatccttgagaagatgccggtctcgatctccctcggcctctggatcacgctgctctcctacggcatttccattccgctcggcatccgcaaggccgttaaggacggaacgcccttcgacgtctggaccagcgggatcgtcattgtcgcatatgcgattccgagctttctcttcgcgattctgcttatggttctcttcgccggcggctctttcttcgactggtttcccctgcgcggactgacatcggacaactggagctcgctatcctggccggaacgaatcctggactacttctggcaccttgccttgccgctgacggcgcttgtgctatccgccttcgccacgacgaccctgctcaccaagaactccttcctcgatgagatccggaaacagtacgtcgtcacagcccgcgcgaaaggcttgtcagaccggcaggtgctctatggacatgttttccgcaacgccatgctgcttatcattgccggctttccaggagccttcatttcctccttcttcaccggctcgctcctgatcgaaagcatcttttcgctggacgggctgggcctgctcggctttcgctctgtgattgaccgcgattatcccgtggtgtttgccacgctctatatcttctcgctcatgggcctgatcatcagtcttgtctccgacctcacctacacgctcatcgacccgcgcatcgatttcgagcggagggatgtctag

SEQ ID NO: 39087 - protein, 366 aa, Mesorhizobium sp. BNC1
MGAYILRRLLLMIPTLFGIMAISFIVIQFAPGGPVEQVIAQVTGQGGGADARIGGGGGDAGAQNFEAAGGANSRYRGAQGLDPEFIAQLEKQFGFDKPPLERFGLMLWNYIRFDFGESYFRDISVVDLILEKMPVSISLGLWITLLSYGISIPLGIRKAVKDGTPFDVWTSGIVIVAYAIPSFLFAILLMVLFAGGSFFDWFPLRGLTSDNWSSLSWPERILDYFWHLALPLTALVLSAFATTTLLTKNSFLDEIRKQYVVTARAKGLSDRQVLYGHVFRNAMLLIIAGFPGAFISSFFTGSLLIESIFSLDGLGLLGFRSVIDRDYPVVFATLYIFSLMGLIISLVSDLTYTLIDPRIDFERRDV

SEQ ID NO: 39088 - DNA, 1092 bp, Alkalilimnicola ehrlichei MLHE-1
  CDS (1)..(1092): transl_table=11
atgtgggggtatgtcgcccggcgcctgctgctcatgatcccgaccctgcttgggatcatggtcatcaacttcgccatcgtgcagttcgcccccggcgggcccatcgagcggatcgccgcccaggtgcagggcagcatggcggatgccaccggtcgctttaccggggtggatgcccgcgaggcgggcgacgccaccgggatggccgacgaggtctcccgtggcgcccgcggcctccacccggagttcatcgccgagttggaggcgcagttcggcttcgaccggcccgcccacgagcgcttcctgcagatgacctggaactacctgcggttcgacttcggcgagtcgttctacgccgaccggaccgtcatcgagctgatccgcgatcggctgccggtctccatctccctgggcctgtggaccaccgtgctggtctacctcatctccatccccctgggcatccgcaaggcggtgcgcgacggcagccgcttcgatctcaccacctcggcggtggtctttgtcggctacgccatccccaacttcctgtttgccatcctgctcatcgtgctcttcgccggcggctcctggctggatctcttcccgctgcgggggctggtctccgacaactggcacgatttgagctggcccatgcgcatcctcgactacctgcaccacatcaccctgccggtgctggccatggtgatcagcggtttcgccgggctgaccatgctcaccaagaacagcttcctggaggaggtgaacaagcagtacgtgatgaccgcccgtgccaagggctgcaccgagcgcggcgtgctctatggccacgtcttccgcaacgccatgctcatcgttattgccggcttcccggccgcctttatcggcatcctctttaccggggcgttgctgattgaggtgatcttctccctggacgggttggggctgctgggcttcgaggcggtggtgaaccgggactacccggtggtcttcggcaccctgttcatcttcaccctgctcgggctggtgctgaacctcatcggcgacctgatgtacgtggccatcgacccgcggatcgacttcgagcggagggcgggctga

SEQ ID NO: 39089 - protein, 363 aa, Alkalilimnicola ehrlichei MLHE-1
MWGYVARRLLLMIPTLLGIMVINFAIVQFAPGGPIERIAAQVQGSMADATGRFTGVDAREAGDATGMADEVSRGARGLHPEFIAELEAQFGFDRPAHERFLQMTWNYLRFDFGESFYADRTVIELIRDRLPVSISLGLWTTVLVYLISIPLGIRKAVRDGSRFDLTTSAVVFVGYAIPNFLFAILLIVLFAGGSWLDLFPLRGLVSDNWHDLSWPMRILDYLHHITLPVLAMVISGFAGLTMLTKNSFLEEVNKQYVMTARAKGCTERGVLYGHVFRNAMLIVIAGFPAAFIGILFTGALLIEVIFSLDGLGLLGFEAVVNRDYPVVFGTLFIFTLLGLVLNLIGDLMYVAIDPRIDFERRAG

SEQ ID NO: 39090 - DNA, 1089 bp, Rhizobium leguminosarum bv. viciae 3841
  CDS (1)..(1089): transl_table=11
atgggcgcctatattcttcgccgcctgcttctaatgatcccgaccatcgtcggcatcatggcgatttccttcgtcgtcattcagttcgcgcccggcggtcccgtcgagcaggtgatcgcccaattgaccggtcaggccgatagtgccgaccagcgcctctccggcggtggcgatcttctcggcggtggcggcagcgacgaaggctcgaaatatcgcggcgcccagggactcgatccggaactgattgccaagctcgaaaagcagttcggcttcgacaagccgccgctgacccgtttcggcgagatgatgtggaattacatccgcttcgatttcggcgagagtttcttccgcaacacctccgtgctcgaactcatcaaggagaagcttccggtatcgatctcgctcggcatctggatcctgatcttctcctatgccatttccatcccgctcggcatccgcaaggcagtcaaggatggatcgaccttcgatgtctggacatcgggcgtcatcgtcgtcggctacgccgtcccgagcttcctcttcggcatcctcctgatcgtgcttttcgccggcggctccttctacgactggtttccgttgcgcggcctggtctccgacaatttcgatcagctcgcctggtggcagaagccgctcgattatttttggcacctcaccctgccactgatctcgctttcgctgtccgccttcgcgacgacgaccctgctgaccaagaattccttcatcgaggaaatcaagaagcagtatgttgtcaccgcccgcgccaagggtctgaatgagcggcaggtcctttacggccatattttccgcaatgccatgctgatcatcatcgccggcttccccggcgccttcatctccgccttcttcaccggatcgctgctgatcgaaaatatcttctcgctcgatggcctcggccgtctcggttatctctcagtcatcaaccgggattacccgatcgtcttcgccacgctctacatcttctcgctgctcggcctcgtcgtcagcctggtttccgacctgatctacacctggatcgatccgcgcattgatttcgagcggagggatgtctga

SEQ ID NO: 39091 - protein, 362 aa, Rhizobium leguminosarum bv. viciae 3841
MGAYILRRLLLMIPTIVGIMAISFVVIQFAPGGPVEQVIAQLTGQADSADQRLSGGGDLLGGGGSDEGSKYRGAQGLDPELIAKLEKQFGFDKPPLTRFGEMMWNYIRFDFGESFFRNTSVLELIKEKLPVSISLGIWILIFSYAISIPLGIRKAVKDGSTFDVWTSGVIVVGYAVPSFLFGILLIVLFAGGSFYDWFPLRGLVSDNFDQLAWWQKPLDYFWHLTLPLISLSLSAFATTTLLTKNSFIEEIKKQYVVTARAKGLNERQVLYGHIFRNAMLIIIAGFPGAFISAFFTGSLLIENIFSLDGLGRLGYLSVINRDYPIVFATLYIFSLLGLVVSLVSDLIYTWIDPRIDFERRDV

SEQ ID NO: 39092 - DNA, 1083 bp, Pseudomonas aeruginosa UCBPP-PA14
  CDS (1)..(1083): transl_table=11
atgctctcctatatcctgcggcgcctgctgctgatcgtccctaccctgttcggcatcctgctgatcaacttcatcatcatccaggccgctcccggcggtccggtggagcagatgatcgccaagctggaaggcttcgacgccgcttccggcggcgccaccggacgcatctccggcggcggcggcgaagtcgccgtggccggctcgcaataccgcggcgcgcaaggcctggacccggagctggtgaaagagatcgagcgcatgtacggcttcgacaagtcggcccccgagcgcttcatgatcatgctgaagaactacctgcacctggactttgggcagagtttcttccgcgacgccaaggtcaccgacctgatcatcgagaaattgccggtgtcgatctcgctcggactctggagcacgctgatcatgtacctggtgtcgatcccgctggggatcgccaaggcggtccgccatggcagcgtcttcgacatctggaccagctcggcgatcatcgtcggctacgccattcccgccttcctcttcgccatcctgctggtggtgctgttcgccggcggcagctactgggactggttccccctgcgcggcctgacctcgaacaacttcgaccagctcagcctcggcggcaaggtactcgactatttctggcacctggccttgccggtaaccgccctggtgatcggcaacttcgccaccatcacgctgctgaccaagaacagcttcctcgacgagatcggcaagcaatacgtggtcaccgcccgcgccaagggcctgaccgaacgccgcgtgctctacgggcacgtattccgcaacgccatgctgctggtgattgccggcctgccggctgcgctgctggggatcttcttcaccggttcgctgttgatcgaggtgatcttctccctcgacggcctcggcctgctcagcttcgaagcggcgatgaaccgcgactacccggtggtcttcggcacgctgttcatcttcaccctgttcgggctggtcatgaagctgatcagcgatatcgtctacaccctggtcgatccgcgcatcgacttcgagaaccgggagtaa

SEQ ID NO: 39093 - protein, 360 aa, Pseudomonas aeruginosa UCBPP-PA14
MLSYILRRLLLIVPTLFGILLINFIIIQAAPGGPVEQMIAKLEGFDAASGGATGRISGGGGEVAVAGSQYRGAQGLDPELVKEIERMYGFDKSAPERFMIMLKNYLHLDFGQSFFRDAKVTDLIIEKLPVSISLGLWSTLIMYLVSIPLGIAKAVRHGSVFDIWTSSAIIVGYAIPAFLFAILLVVLFAGGSYWDWFPLRGLTSNNFDQLSLGGKVLDYFWHLALPVTALVIGNFATITLLTKNSFLDEIGKQYVVTARAKGLTERRVLYGHVFRNAMLLVIAGLPAALLGIFFTGSLLIEVIFSLDGLGLLSFEAAMNRDYPVVFGTLFIFTLFGLVMKLISDIVYTLVDPRIDFENRE

SEQ ID NO: 39094 - DNA, 1104 bp, Magnetospirillum magnetotacticum MS-1
  CDS (1)..(1104): transl_table=11
atgatcgcctacacgctgcgccgtctgctgctgatcccgctgactctgttcggcatcatggtgatcaatttctccgtggtgcagttcgctcctggcgggccagtggaactgatgatctcccggctgcagggaacggcggtggatgccgccgcccgcgtctcgggctcgggctcgggagaaaccgcccagatcaagccgccgcccggccagggcaatcagggggcctatcgcggggcccaaggcctgccgcccgacttcatcaaggaaatcgagaagcagttcggctttgatcgcccggcccatgaacgcttctggttgatgatgacccagtatgcccgcttcgatttcggcaaaagcttttaccgcgacacatcggtggtgggtctcgtcatcgagaagatgcccacctccatctcactggggctatggagcacgctgatcatctatctggtctccattccgcttggcatcatgaaggcgacgcgcgacgggtcgcgcctggacgtggtgtcgtcctgggcggtgatcatcggctatgccgtgcccggctttttgttcgccatcgccctgatcgtcctcttcgctggcggccagtatttcgcgtggttccctctgcgcggcctgacctcgcccggtatggaaggcgcctccttcgcggcgcgcgccctggattacttctggcatctgacgctgcccgtaacagcattggtggttggaggattcgcgggcctcaccatgctgaccaagaactccttcctggaggagatcaacaagcagtatgtggtcaccgcgcgcgccaagggtttgagcgagagccgcatcctttacggccacatcttcaggaatgccatgctgctgatcgtggcgggctttccccgcgccctggtggggattctcttcaccggctcggtgctggtggagatcatcttctcgctggacggtatcggcctgttgggcttcgaggcggtgagcaaccgcgactatccggtgatgttcggcacgctttacgccttctcgctgctgggcctggtgctcaatctggtcagcgacctcacctatcactgggtcgatccccgcatcgatttcgaggggagggggggatga

SEQ ID NO: 39095 - protein, 367 aa, Magnetospirillum magnetotacticum MS-1
MIAYTLRRLLLIPLTLFGIMVINFSVVQFAPGGPVELMISRLQGTAVDAAARVSGSGSGETAQIKPPPGQGNQGAYRGAQGLPPDFIKEIEKQFGFDRPAHERFWLMMTQYARFDFGKSFYRDTSVVGLVIEKMPTSISLGLWSTLIIYLVSIPLGIMKATRDGSRLDVVSSWAVIIGYAVPGFLFAIALIVLFAGGQYFAWFPLRGLTSPGMEGASFAARALDYFWHLTLPVTALVVGGFAGLTMLTKNSFLEEINKQYVVTARAKGLSESRILYGHIFRNAMLLIVAGFPRALVGILFTGSVLVEIIFSLDGIGLLGFEAVSNRDYPVMFGTLYAFSLLGLVLNLVSDLTYHWVDPRIDFEGRGG

SEQ ID NO: 39096 - DNA, 1044 bp, Burkholderia vietnamiensis G4
  CDS (1)..(1044): transl_table=11
atgtggagctacatcctcaaacgtctgctgctgatgattccgacgctcgtcggcgtgctcacgctcaccttcgccgtgatccagttcgtgccgggcggcccggtcgaacaggccgtgcaggaattgcgcaagggcgccacgggcgagggcgcggtgccgttcggcatgcgcgcgcataccggcgtcgacgcgcagcagctcgcgcagctcaaggcactgtacggcttcgacaagccgccgctcgaacgctactggctgatgctcaagcgcttcgcgcgcttcgatctcggcgacagctacttccgccaccagagcgtctggtcgctgatcgtgcagaagctgccggtatcgatcagcatcgggctgtggactttcttcctcacgtatctgatctcggtgccgctcggcatcgcgaaggccgtgcgcaacggctcgccgttcgacgtcgcaacgagcctcgtcgtgctggtcggctatgcgattcccggcttcgtgctcggcgtgctgctgctcgtgctgttcggcggcggctcgttctggcagctgtttccgctgcgcggcctcacgtcggacaacttctcgcagctgtcgctgctcggcaaggtgctcgactatctgtggcacatcgcgctgccgatcaccgcatcggtcgtcggcagcttcgcggtcatcacgatgctcacgaagaacgcgttcctcgacgagatccgcaagcagtacgtgctcacggcgcgcgcgaaggggctcaccgagcgcacggtgctgtggaagcacgtgttccgcaacgcgatgctgccgctgatcgtcggctttccggccgcgttcatcggcgcgttcttcaccggcagcctgctgatcgagacgctgttctcgctcgacggcctcgggctgctgtcgtacgaatcggttgtgcggcgcgactatccggtcgtgctcggcacgctgtacctgttcacgctgatcgggctcgcgaccaagctcgtctccgacctctgctacgtgtgggtcgacccgcgcattcaattcgaaaacctggagcgctga

SEQ ID NO: 39097 - protein, 347 aa, Burkholderia vietnamiensis G4
MWSYILKRLLLMIPTLVGVLTLTFAVIQFVPGGPVEQAVQELRKGATGEGAVPFGMRAHTGVDAQQLAQLKALYGFDKPPLERYWLMLKRFARFDLGDSYFRHQSVWSLIVQKLPVSISIGLWTFFLTYLISVPLGIAKAVRNGSPFDVATSLVVLVGYAIPGFVLGVLLLVLFGGGSFWQLFPLRGLTSDNFSQLSLLGKVLDYLWHIALPITASVVGSFAVITMLTKNAFLDEIRKQYVLTARAKGLTERTVLWKHVFRNAMLPLIVGFPAAFIGAFFTGSLLIETLFSLDGLGLLSYESVVRRDYPVVLGTLYLFTLIGLATKLVSDLCYVWVDPRIQFENLER

SEQ ID NO: 39098 - DNA, 1089 bp, Sulfitobacter sp. EE-36
  CDS (1)..(1089): transl_table=11
atgggcgcatatattcttcgacggctgttgctgatcataccgacgttgcttgggatcatgctgatcaactttgcactggtgcagtttgtgccgggtggccctgttgagcaggcgatcgcgcgtattcagggcggtggtgacgtgttcgaagggttctctggcgggggatcggatgcggggaatgccgcagataccggcggcaacgagaattacgttggcgcacggggcctgccgcccgaattcatcgccgagcttgagaaagagttcggctttgacaaaccaccggtagagcggttcgtgaacatgctgtggaattacatgcggttcgatttcggcgacagctatttccggtcgatcagcgtgatcgagttgatcaaggaaaagctgcccgtgtcgatcacgctggggctgtggtccacgttgattgcctatctggtgtcgatcccccttggcatccgcaaggccgtcaaggacggcacggcctttgatacatggacatcgggcgcgattatcgccgcctatgcgatcccgggctttctgttcgcgatcctgctgctggtgctgttcgcgggcgggtcctactggcagatattcccgctgcgggggctgacctcggataattttgaccagctgagcccattgggcaaggtcgcggattacttctggcacatcacgctgccggtgctggcctcgaccatctcggcctttgcgacgctgacgttgctgaccaagaacagctttctcgacgagatcaagaagcaatatgttgtcacggcgcgggccaagggcctgtcggagcgtaaggtgttgtacggccacgtcttccgcaacgcgatgctgatcgtgatcgcgggctttccagcggtgtttatcggtgtgttctttggcggctcgctgatcatcgagacgatctttagccttgatgggctgggccgtctggggttcgaggctgcggtcgcgcgggattatccgatcgtcttcggcacgctgttcatctttggccttatcggtctgctggtcggtatcctgtctgacctgatgtatgtggtcgtcgacccgcgcatcgactttgaaaaacgcgagggctga

SEQ ID NO: 39099 - protein, 362 aa, Sulfitobacter sp. EE-36
MGAYILRRLLLIIPTLLGIMLINFALVQFVPGGPVEQAIARIQGGGDVFEGFSGGGSDAGNAADTGGNENYVGARGLPPEFIAELEKEFGFDKPPVERFVNMLWNYMRFDFGDSYFRSISVIELIKEKLPVSITLGLWSTLIAYLVSIPLGIRKAVKDGTAFDTWTSGAIIAAYAIPGFLFAILLLVLFAGGSYWQIFPLRGLTSDNFDQLSPLGKVADYFWHITLPVLASTISAFATLTLLTKNSFLDEIKKQYVVTARAKGLSERKVLYGHVFRNAMLIVIAGFPAVFIGVFFGGSLIIETIFSLDGLGRLGFEAAVARDYPIVFGTLFIFGLIGLLVGILSDLMYVVVDPRIDFEKREG

SEQ ID NO: 39100 - DNA, 1089 bp, Roseovarius nubinhibens ISM
  CDS (1)..(1089): transl_table=11
atgggggcctatattcttcgcaggctgttgctgatcattccgacgcttctcgggatcatggtcatcaactttgccttggtgcaattcgtccccggcgggccggtggagcagatcatcgccaatatgcagggcgagggtgacgcgttttcgagcatctccggcggggcgggggacaccaccaccacggcgggcgagttcgagaacgaaggctatctcggtgcacgcggtctgccgcccgagttcatcaaggagctcgaggcgcagttcggtctcgacaaaccgccgctcgagcggttcctcaatatgatgtggaactacatgcggttcgatttcggcgagagctatttccgcaaagtgtcggtgaccgatctggtgctggaaaagctgccggtgtcgatcacgctcggcctgtggtcgacgcttttggcctatctcatttcgatccctctcggcattcgcaaggcggtgcatgatggatcgcgctttgacacctggacgagcggcgtgatcatcgcggcctatgccatcccgtcctttctgttcgcggtgctgttgctggtgctctttgccgggggcagtcattggcagatattcccgctgcgtgggctgacttcggacaatttcgaagagctgaccctcctgggcaaggtgggcgattacctgtggcatatcgtgctgccggtgaccgccatgctgatcggcagtttcgcgacgctgaccctgctcaccaagaacagctttctcgacgagatcaagaaacactatgtgatgacggcgcgggccaaggggcttagcgagagccgggtcatgtatggccatgtctttcgcaatgcgatgctcattgtgatcgcgggctttccggcggtgttcatcggcgtgttttttggcggcagccttctcatcgagacgatcttcacgctcgatgggctggggcggcttggctatgaggcggcggtggggcgtgactatccggtgatgttcggcacgctgttcatctttggcctgatcagcctcgtggtcggcattctcagcgacctgatgtatgtgctggtcgatccgcgcatcgatttcgaccggcgggagggatga

SEQ ID NO: 39101 - protein, 362 aa, Roseovarius nubinhibens ISM
MGAYILRRLLLIIPTLLGIMVINFALVQFVPGGPVEQIIANMQGEGDAFSSISGGAGDTTTTAGEFENEGYLGARGLPPEFIKELEAQFGLDKPPLERFLNMMWNYMRFDFGESYFRKVSVTDLVLEKLPVSITLGLWSTLLAYLISIPLGIRKAVHDGSRFDTWTSGVIIAAYAIPSFLFAVLLLVLFAGGSHWQIFPLRGLTSDNFEELTLLGKVGDYLWHIVLPVTAMLIGSFATLTLLTKNSFLDEIKKHYVMTARAKGLSESRVMYGHVFRNAMLIVIAGFPAVFIGVFFGGSLLIETIFTLDGLGRLGYEAAVGRDYPVMFGTLFIFGLISLVVGILSDLMYVLVDPRIDFDRREG

SEQ ID NO: 39102 - DNA, 1092 bp, Oceanicola batsensis HTCC2597
  CDS (1)..(1092): transl_table=11
atgggagcctacatccttcgacgcctcctgctggtgatcccgaccctgttggggatcatggtgatcaatttcgtcctggtgcagttcgtgccgggcggaccgatcgaacagatcatcgcccagcagcaggggcagggcgacgtgttcggaagcttttccgggtccggcaccgacgtgggcatggaggatacctcctcggcctacgaaggagactatgccggcgcgcgcgggctgccgcccgagttcatcgcgcaactcgaaaaggaattcgggttcgaccagccgccggtccagcggttcttcaacatgatgtggaactacctgcagctcgacttcggcgagagctatttccgcaaggcggacgtgatcgacctggtgatcgaccgcctgccggtgtcgatctcgctcgggctctggtcgacgctcatcgcctatctgatctcgatcccgctcgggatccgcaaggcggtgcgtgacgggtcgcggttcgacacctggacctcgggcctgatcatcgcggcctatgccattccgggctttcttttcgcgatcctgcttctcgtgctcttcgctggcgggtcgtactatcgcatcttcccgctgcgcggcctgacctcggacaatttcgaccagctgacgctctggggccagatcgtcgactacgcctggcacatcaccctgccggtgctggcctccaccatctcgagctttgcgacgctgacgctgctgaccaagaactcgttcctcgacgagatcaagaaacactatgtcatgaccgcccgcgccaagggcctgtccgagcggcgggtgctttatggccacgtcttccgcaacgccatgctgatcgtcatcgcgggctttccggcggtcttcatcggggtgttcttcggcgggtcgatcatcatcgagacgctgttctctctcgaagggctggggcggctcggctacgaggcggcggtggcgcgcgactatccgatcatcttcgggtcgctcttcgtcttcggcctgatcggtctgatcgtcgggatcctgtcggatctcatgtacgtcttcgtcgatccgcgtatcgacttcgagcggcgggagggctga

SEQ ID NO: 39103 - protein, 363 aa, Oceanicola batsensis HTCC2597
MGAYILRRLLLVIPTLLGIMVINFVLVQFVPGGPIEQIIAQQQGQGDVFGSFSGSGTDVGMEDTSSAYEGDYAGARGLPPEFIAQLEKEFGFDQPPVQRFFNMMWNYLQLDFGESYFRKADVIDLVIDRLPVSISLGLWSTLIAYLISIPLGIRKAVRDGSRFDTWTSGLIIAAYAIPGFLFAILLLVLFAGGSYYRIFPLRGLTSDNFDQLTLWGQIVDYAWHITLPVLASTISSFATLTLLTKNSFLDEIKKHYVMTARAKGLSERRVLYGHVFRNAMLIVIAGFPAVFIGVFFGGSIIIETLFSLEGLGRLGYEAAVARDYPIIFGSLFVFGLIGLIVGILSDLMYVFVDPRIDFERREG

SEQ ID NO: 39104 - DNA, 1101 bp, Oceanospirillum sp. MED92
  CDS (1)..(1101): transl_table=11
atgggcgcatatattctccgccgtttattcctgattattccgaccctgatcggtattctaacgattaactttatcatcgttcaggctgcgcccggcggtccggttgaacaggccatagctcaactagaaggctatgatcagggggctacggcacgggtcagcggtgttcagaatgatttgtctcagggtggtgcgtctggcaataataccggcgacagctcataccgcggagcgcgtggattagaccctgaaattgttaaagagattgaagcacaatacggttttgataagccggcccatgaacgcttctggcagatgcttaaagactatgccgtgttcgatttcggtaaaagcctgtttagcgataaatcggtcatcgatctgatcattgaaaagctgccggtgtcgatctcacttggactttgggcaacactcatcacctacgccgtttccatacctttaggcatcagaaaagccgtacgtgatggcaccccatttgatatctggaccagtagtgccattatcattggctatgcgattcccaacttcctgtttgcgattttattaatcgtcgtatttgcaggcggaacttggttagattggttccctcttcgcggattaacctcgcctggttttgaagagatgagtctttttgaacagataaaagattatttctggcacattaccttgcccgttatcgcaacggtgataggcagtttcgcaaccctgacgatgctgaccaaaaactcatttcttgatgagataaacaaacagtatgtgcttaccgcccgcgcgaaaggcttaagtgaaaataaggtgctgtacggtcatgtgttccgtaacgcgatgctgattattattgcaggtatgcccgcggcactgatttctatcttttttaccggatcgatgctgatagaagttattttctctctggatggtataggtcttctcggatacgaggcggtaatcaatcgtgattaccctgtcatcttcggcaccctctacatcttcaccttgattggtctgttattgaaactgattagtgacatcacctatgtgttagttgatccgcgtatcgattttgaaagcagggagcagtaa

SEQ ID NO: 39105 - protein, 366 aa, Oceanospirillum sp. MED92
MGAYILRRLFLIIPTLIGILTINFIIVQAAPGGPVEQAIAQLEGYDQGATARVSGVQNDLSQGGASGNNTGDSSYRGARGLDPEIVKEIEAQYGFDKPAHERFWQMLKDYAVFDFGKSLFSDKSVIDLIIEKLPVSISLGLWATLITYAVSIPLGIRKAVRDGTPFDIWTSSAIIIGYAIPNFLFAILLIVVFAGGTWLDWFPLRGLTSPGFEEMSLFEQIKDYFWHITLPVIATVIGSFATLTMLTKNSFLDEINKQYVLTARAKGLSENKVLYGHVFRNAMLIIIAGMPAALISIFFTGSMLIEVIFSLDGIGLLGYEAVINRDYPVIFGTLYIFTLIGLLLKLISDITYVLVDPRIDFESREQ

SEQ ID NO: 39106 - DNA, 1116 bp, Xanthobacter autotrophicus Py2
  CDS (1)..(1116): transl_table=11
atgctcgcttatatcatccgccgcatagccctgatggtgccgaccattctcggcatcatgctggtgtcgttcgtggtcatccagttcgcccccggcggcccggtggagcgggtgatcgcccagctcaccggcgacgacgtgtccgccacctcccgcgtttccggcggcggcggcgacttctcgggcgccggagccgccgcccaggccggcgcggccatggatgcagccggctcgaaatatcgcggcgcacaggggctggacccggccttcgtcaagcagctcgaaaagcagttcggcttcgacaagccggctcacgagcgcttctggaagatgattacggattacgccactttcgatttcggccgctcctatttccgcgacatcacggtgctgcagctgatcggggagaagatgcccgtctccatttcccttggcctttggatgacgttgctcacctatctcatctccattccgctcggcatctccaaggccatgcgcgacggctcccgcttcgacatgtggacctcggcggtgatcatcgtcggctatgcgatcccgtcgttcctgttcgccatcctgctgatcatcctgttcgccggcggctcgttcctcgacctgttcccgctgcgcgggctgacatcggagaacttctggcagatgagctggccggagcggatcgtcgactatgcctggcacctggtgctgccgctgacctctatggtgctcggcgccttcgccaccatgaccctgctcaccaagaattcgttcctggaggagatccgcaagcaatatgtcaccaccgcgcggatgaaggggttgagcgagcggcgggtgctctacggccatgtgttcaggaacgccatgctgatcgtgatcgccggctttcccagcgccttcatcgccgccttcttctccggctcgctgctgatcgagaccatcttctccctggacggcctcggcctgctggggttcgagagcgtgctcaaccgcgactatccggtggtgttcgccaccctctacatcttctcgctggcggggctcatcgtcggcctgatctcggacctcacctacatgctggtcgatccgcgtatcgacttcgagacgcgggaggtctga

SEQ ID NO: 39107 - protein, 371 aa, Xanthobacter autotrophicus Py2
MLAYIIRRIALMVPTILGIMLVSFVVIQFAPGGPVERVIAQLTGDDVSATSRVSGGGGDFSGAGAAAQAGAAMDAAGSKYRGAQGLDPAFVKQLEKQFGFDKPAHERFWKMITDYATFDFGRSYFRDITVLQLIGEKMPVSISLGLWMTLLTYLISIPLGISKAMRDGSRFDMWTSAVIIVGYAIPSFLFAILLIILFAGGSFLDLFPLRGLTSENFWQMSWPERIVDYAWHLVLPLTSMVLGAFATMTLLTKNSFLEEIRKQYVTTARMKGLSERRVLYGHVFRNAMLIVIAGFPSAFIAAFFSGSLLIETIFSLDGLGLLGFESVLNRDYPVVFATLYIFSLAGLIVGLISDLTYMLVDPRIDFETREV

SEQ ID NO: 39108 - DNA, 1089 bp, Methylocapsa acidiphila
  CDS (1)..(1089): transl_table=11
atgttcgcctatatcgcccgccgcctccttttgatgattccgacgatcctcggaatcctgctcgtctccttcgcgatcgtgcaattcgcgccgggcgggccggtggagcgaattctggcgcaattgcagggcgtcgactccggcgccactgcccatttcggcggcggaggcgaaatgggcgcgtcggggggcggcgatttctcctcgaaatatcgcggcgcgcaggggctcgacccgaaattcatcgccgagctcgaaaagcaattcggattcgacaagcccgcctatgagcgattcttcttaatggtcaagaactacgcgacctttgatttcggacggtcctatttccgcgacgtgcctgtgctgcggctcatcaaggagaagctcccggtctcgatctcgctcgggctctggatgacccttctctcttacgccatctcaattccactcggcgtgaagaaggcggtgagcgacggcacgcgcttcgacgtctggacctcggcggtcgtcatcatcggctatgcgatcccgagctttcttttcgcgatccttctcatcgtccttttttgcggcggctcgttctggcagattttcccgctgcgcgggctaacttcggagaattggccgcagctttcgcttttcggcaaggtcgtcgattatttctggcatatcgcgttgccggtcacatccatgacgctcggcgctttcgccacctcgacctttctcaccaagaactcgtttctcgacgagattcgcaagcaatatgttcagaccgcgcgcatgaaaggcctcgcggaaaaccgcgttctctacggccatgtgttccgcaacgcgatgatgatcgtcgtcgccggctttcccggcgcgttcgtgacggcgtttttcggcggctcgctccttatcgagacgatcttttcattggacggcctcggcctcctctctttcgaatcgatcgtcaatcgcgattatccggtcgttttcgccaatctttatattttcgccttgctcgggctcgtcgtgaatctcttgtccgatctcacctatatgtggatcgacccacgcatcgactttgagaccagggaggtctga

SEQ ID NO: 39109 - protein, 362 aa, Methylocapsa acidiphila
MFAYIARRLLLMIPTILGILLVSFAIVQFAPGGPVERILAQLQGVDSGATAHFGGGGEMGASGGGDFSSKYRGAQGLDPKFIAELEKQFGFDKPAYERFFLMVKNYATFDFGRSYFRDVPVLRLIKEKLPVSISLGLWMTLLSYAISIPLGVKKAVSDGTRFDVWTSAVVIIGYAIPSFLFAILLIVLFCGGSFWQIFPLRGLTSENWPQLSLFGKVVDYFWHIALPVTSMTLGAFATSTFLTKNSFLDEIRKQYVQTARMKGLAENRVLYGHVFRNAMMIVVAGFPGAFVTAFFGGSLLIETIFSLDGLGLLSFESIVNRDYPVVFANLYIFALLGLVVNLLSDLTYMWIDPRIDFETREV

SEQ ID NO: 39110 - DNA, 22 bp, Artificial sequence
  primer
atgggcgcttacctgattcgcc

SEQ ID NO: 39111 - DNA, 25 bp, Artificial sequence
  primer
ttaacgtccctcaaaatcaatacgc

SEQ ID NO: 39112 - protein, 371 aa, Artificial sequence
  consensus sequence
  Variant (2)..(3): Xaa in position 2 to 3 is any amino acid
  Variant (6)..(6): Xaa in position 6 is any amino acid
  Variant (12)..(13): Xaa in position 12 to 13 is any amino acid
  Variant (17)..(17): Xaa in position 17 is any amino acid
  Variant (20)..(23): Xaa in position 20 to 23 is any amino acid
  Variant (25)..(27): Xaa in position 25 to 27 is any amino acid
  Variant (29)..(30): Xaa in position 29 to 30 is any amino acid
  Variant (37)..(37): Xaa in position 37 is any amino acid
  Variant (38)..(39): Xaa in position 38 to 39 is any or no amino acid
  Variant (41)..(49): Xaa in position 41 to 49 is any amino acid
  Variant (50)..(81): Xaa in position 50 to 81 is any or no amino acid
  Variant (83)..(83): Xaa in position 83 is any amino acid
  Variant (85)..(86): Xaa in position 85 to 86 is any amino acid
  Variant (89)..(89): Xaa in position 89 is any amino acid
  Variant (91)..(100): Xaa in position 91 to 100 is any amino acid
  Variant (106)..(107): Xaa in position 106 to 107 is any amino acid
  Variant (110)..(112): Xaa in position 110 to 112 is any amino acid
  Variant (114)..(116): Xaa in position 114 to 116 is any amino acid
  Variant (118)..(120): Xaa in position 118 to 120 is any amino acid
  Variant (124)..(124): Xaa in position 124 is any amino acid
  Variant (126)..(126): Xaa in position 126 is any amino acid
  Variant (128)..(131): Xaa in position 128 to 131 is any amino acid
  Variant (133)..(134): Xaa in position 133 to 134 is any amino acid
  Variant (136)..(140): Xaa in position 136 to 140 is any amino acid
  Variant (144)..(144): Xaa in position 144 is any amino acid
  Variant (148)..(148): Xaa in position 148 is any amino acid
  Variant (150)..(150): Xaa in position 150 is any amino acid
  Variant (152)..(154): Xaa in position 152 to 154 is any amino acid
  Variant (156)..(157): Xaa in position 156 to 157 is any amino acid
  Variant (164)..(164): Xaa in position 164 is any amino acid
  Variant (167)..(169): Xaa in position 167 to 169 is any amino acid
  Variant (171)..(172): Xaa in position 171 to 172 is any amino acid
  Variant (175)..(177): Xaa in position 175 to 177 is any amino acid
  Variant (179)..(184): Xaa in position 179 to 184 is any amino acid
  Variant (189)..(189): Xaa in position 189 is any amino acid
  Variant (193)..(195): Xaa in position 193 to 195 is any amino acid
  Variant (197)..(197): Xaa in position 197 is any amino acid
  Variant (199)..(199): Xaa in position 199 is any amino acid
  Variant (205)..(208): Xaa in position 205 to 208 is any amino acid
  Variant (215)..(215): Xaa in position 215 is any amino acid
  Variant (217)..(221): Xaa in position 217 to 221 is any amino acid
  Variant (223)..(229): Xaa in position 223 to 229 is any amino acid
  Variant (232)..(232): Xaa in position 232 is any amino acid
  Variant (235)..(236): Xaa in position 235 to 236 is any amino acid
  Variant (239)..(246): Xaa in position 239 to 246 is any amino acid
  Variant (249)..(250): Xaa in position 249 to 250 is any amino acid
  Variant (252)..(252): Xaa in position 252 is any amino acid
  Variant (260)..(260): Xaa in position 260 is any amino acid
  Variant (263)..(263): Xaa in position 263 is any amino acid
  Variant (268)..(268): Xaa in position 268 is any amino acid
  Variant (276)..(276): Xaa in position 276 is any amino acid
  Variant (278)..(280): Xaa in position 278 to 280 is any amino acid
  Variant (283)..(283): Xaa in position 283 is any amino acid
  Variant (292)..(294): Xaa in position 292 to 294 is any amino acid
  Variant (299)..(304): Xaa in position 299 to 304 is any amino acid
  Variant (307)..(307): Xaa in position 307 is any amino acid
  Variant (314)..(315): Xaa in position 314 to 315 is any amino acid
  Variant (323)..(323): Xaa in position 323 is any amino acid
  Variant (325)..(331): Xaa in position 325 to 331 is any amino acid
  Variant (336)..(337): Xaa in position 336 to 337 is any amino acid
  Variant (339)..(339): Xaa in position 339 is any amino acid
  Variant (342)..(343): Xaa in position 342 to 343 is any amino acid
  Variant (345)..(345): Xaa in position 345 is any amino acid
  Variant (347)..(347): Xaa in position 347 is any amino acid
  Variant (350)..(354): Xaa in position 350 to 354 is any amino acid
  Variant (357)..(358): Xaa in position 357 to 358 is any amino acid
  Variant (360)..(362): Xaa in position 360 to 362 is any amino acid
  Variant (369)..(370): Xaa in position 369 to 370 is any amino acid
MXXYIXRRLLLXXPTLXGIXXXXFXXXQXXPGGPVEXXXAXXXXXXXXXXXXXXXXXXXXXXXXXXXXXXXXXXXXXXXXXYXGXXGLXPXXXXXXXXXXGFDKPXXERXXXMXXXYXXXDFGXSXFXXXXVXXLXXXXXPVSXSLGXWXTXXXYXXSIPLGIXKAXXXGXXFDXXXSXXXXXXYAIPXFLFXXXLXVXFAGGSXXXXFPLRGLXSXXXXXLXXXXXXXDYXWHXXLPXXXXXXXXFAXXTXLTKNSFLXEIXKQYVXTARAKGLXEXXXLYXHVFRNAMLXXXAGFPXXXXXXFFXGSLLIEXXFSLDGLGXLXXXXXXXRDYPXXFXTLXXFXLXGLXXXXXSDXXYXXXDPRIDFXXR

SEQ ID NO: 39113 - protein, 60 aa, Artificial sequence
  protein pattern
  Variant (2)..(2): Xaa in position 2 is any amino acid
  Variant (5)..(5): Xaa in position 5 is Ile, Leu or Met
  Variant (6)..(6): Xaa in position 6 is Ala, Thr or Val
  Variant (9)..(9): Xaa in position 9 is Ile, Leu or Val
  Variant (10)..(10): Xaa in position 10 is any amino acid
  Variant (11)..(11): Xaa in position 11 is Ala, Ser or Thr
  Variant (12)..(13): Xaa in position 12 to 13 is any amino acid
  Variant (14)..(14): Xaa in position 14 is Ile, Leu or Val
  Variant (15)..(15): Xaa in position 15 is Gly or Ser
  Variant (16)..(16): Xaa in position 16 is Ala, Gly, Asn or Ser
  Variant (19)..(19): Xaa in position 19 is Ala, Gly, Ser, Thr or Val
  Variant (20)..(20): Xaa in position 20 is any amino acid
  Variant (22)..(22): Xaa in position 22 is any amino acid
  Variant (26)..(26): Xaa in position 26 is any amino acid
  Variant (27)..(27): Xaa in position 27 is Ala or Ser
  Variant (29)..(29): Xaa in position 29 is Ile, Leu or Met
  Variant (30)..(30): Xaa in position 30 is Asp or Glu
  Variant (32)..(32): Xaa in position 32 is Ile, Leu or Val
  Variant (33)..(33): Xaa in position 33 is any amino acid
  Variant (34)..(34): Xaa in position 34 is Lys or Arg
  Variant (35)..(35): Xaa in position 35 is any amino acid
  Variant (38)..(38): Xaa in position 38 is any amino acid
  Variant (39)..(39): Xaa in position 39 is Ala or Thr
  Variant (41)..(41): Xaa in position 41 is Lys or Arg
  Variant (42)..(42): Xaa in position 42 is any amino acid
  Variant (45)..(45): Xaa in position 45 is any amino acid
  Variant (46)..(46): Xaa in position 46 is Ala, Asp, Gly, Asn, Pro, Ser or Thr
  Variant (47)..(47): Xaa in position 47 is Asp, Glu, Asn or Arg
  Variant (48)..(49): Xaa in position 48 to 49 is any amino acid
  Variant (50)..(50): Xaa in position 50 is Ile or Val
  Variant (51)..(51): Xaa in position 51 is Leu or Met
  Variant (52)..(52): Xaa in position 52 is Trp or Tyr
  Variant (53)..(53): Xaa in position 53 is any amino acid
  Variant (55)..(55): Xaa in position 55 is Ile or Val
  Variant (56)..(56): Xaa in position 56 is Phe or Leu
  Variant (60)..(60): Xaa in position 60 is Leu or Met
YXWHXXLPXXXXXXXXFAXXTXLTKXXFXXEXXXXYVXXAXXKGXXXXXXXXXHXXRNAX

SEQ ID NO: 39114 - protein, 58 aa, Artificial sequence
  protein pattern
  Variant (2)..(2): Xaa in position 2 is any amino acid
  Variant (3)..(3): Xaa in position 3 is Ile, Met or Val
  Variant (5)..(5): Xaa in position 5 is any amino acid
  Variant (7)..(7): Xaa in position 7 is Asp or Asn
  Variant (9)..(9): Xaa in position 9 is Ile or Leu
  Variant (11)..(11): Xaa in position 11 is any amino acid
  Variant (12)..(12): Xaa in position 12 is Leu or Met
  Variant (13)..(13): Xaa in position 13 is Gly or Ser
  Variant (14)..(14): Xaa in position 14 is Phe or Tyr
  Variant (15)..(15): Xaa in position 15 is any amino acid
  Variant (16)..(16): Xaa in position 16 is Ala or Ser
  Variant (17)..(18): Xaa in position 17 to 18 is any amino acid
  Variant (19)..(19): Xaa in position 19 is Ala, Asp, Gly, Asn, Gln, Ser or Thr
  Variant (24)..(24): Xaa in position 24 is any or no amino acid
  Variant (26)..(26): Xaa in position 26 is any or no amino acid
  Variant (28)..(28): Xaa in position 28 is Ala or Gly
  Variant (29)..(29): Xaa in position 29 is Asn or Thr
  Variant (31)..(31): Xaa in position 31 is Phe or Tyr
  Variant (32)..(32): Xaa in position 32 is any amino acid
  Variant (34)..(34): Xaa in position 34 is Ala, Gly, Ser or Thr
  Variant (35)..(35): Xaa in position 35 is Phe or Leu
  Variant (36)..(36): Xaa in position 36 is any amino acid
  Variant (37)..(37): Xaa in position 37 is Ala, Gly or Ser
  Variant (39)..(39): Xaa in position 39 is Ile, Leu or Val
  Variant (40)..(41): Xaa in position 40 to 41 is any amino acid
  Variant (42)..(42): Xaa in position 42 is Ile or Leu
  Variant (43)..(43): Xaa in position 43 is Ile, Leu or Val
  Variant (44)..(44): Xaa in position 44 is Gly, Ser or Thr
  Variant (46)..(46): Xaa in position 46 is Ala, Ile, Leu or Val
  Variant (47)..(47): Xaa in position 47 is any amino acid
  Variant (49)..(50): Xaa in position 49 to 50 is any amino acid
  Variant (51)..(51): Xaa in position 51 is Ile, Leu or Val
  Variant (56)..(56): Xaa in position 56 is any amino acid
  Variant (58)..(58): Xaa in position 58 is Ala, Asp, Glu or Gly
EXXFXLXGXGXXXXXXXXXRDYPXVXFXXLXXFXXXXLXXXXXXDXXYXXXDPRIXFX

SEQ ID NO: 39115 - protein, 54 aa, Artificial sequence
  protein pattern
  Variant (2)..(2): Xaa in position 2 is any amino acid
  Variant (3)..(3): Xaa in position 3 is Ser or Thr
  Variant (4)..(4): Xaa in position 4 is Ile or Leu
  Variant (6)..(6): Xaa in position 6 is Phe, Ile, Leu or Val
  Variant (8)..(8): Xaa in position 8 is any amino acid
  Variant (9)..(10): Xaa in position 9 to 10 is any or no amino acid
  Variant (12)..(12): Xaa in position 12 is any amino acid
  Variant (13)..(14): Xaa in position 13 to 14 is any or no amino acid
  Variant (16)..(16): Xaa in position 16 is any amino acid
  Variant (17)..(17): Xaa in position 17 is Ile or Val
  Variant (19)..(19): Xaa in position 19 is Ile or Val
  Variant (23)..(23): Xaa in position 23 is Ile or Val
  Variant (24)..(24): Xaa in position 24 is any amino acid
  Variant (27)..(29): Xaa in position 27 to 29 is any amino acid
  Variant (31)..(31): Xaa in position 31 is Ala, Ser or Thr
  Variant (32)..(32): Xaa in position 32 is any amino acid
  Variant (33)..(33): Xaa in position 33 is Phe or Leu
  Variant (35)..(36): Xaa in position 35 to 36 is any amino acid
  Variant (37)..(37): Xaa in position 37 is Ser or Thr
  Variant (39)..(40): Xaa in position 39 to 40 is any amino acid
  Variant (41)..(41): Xaa in position 41 is Ile or Val
  Variant (42)..(42): Xaa in position 42 is Phe, Ile, Leu or Val
  Variant (43)..(43): Xaa in position 43 is Ala, Ile, Leu or Val
  Variant (44)..(44): Xaa in position 44 is Ala or Gly
  Variant (45)..(45): Xaa in position 45 is any amino acid
  Variant (47)..(47): Xaa in position 47 is Ile or Val
  Variant (49)..(49): Xaa in position 49 is Ala, Gly, Asn, Ser or Val
  Variant (51)..(51): Xaa in position 51 is Leu or Val
  Variant (52)..(52): Xaa in position 52 is Phe or Leu
  Variant (53)..(53): Xaa in position 53 is Ala or Gly
  Variant (54)..(54): Xaa in position 54 is Ile or Val
SXXXGXWXXXLXXXYXXSXPLGXXKAXXXGXXXDXXXSXXXXXXXAXPXFXXXX

SEQ ID NO: 39116 - protein, 38 aa, Artificial sequence
  protein pattern
  Variant (2)..(2): Xaa in position 2 is any amino acid
  Variant (4)..(5): Xaa in position 4 to 5 is any amino acid
  Variant (6)..(6): Xaa in position 6 is Ile or Val
  Variant (7)..(8): Xaa in position 7 to 8 is any amino acid
  Variant (9)..(9): Xaa in position 9 is Ile, Leu or Val
  Variant (10)..(12): Xaa in position 10 to 12 is any amino acid
  Variant (13)..(13): Xaa in position 13 is Phe or Tyr
  Variant (15)..(15): Xaa in position 15 is Phe or Leu
  Variant (17)..(17): Xaa in position 17 is any amino acid
  Variant (18)..(18): Xaa in position 18 is Pro or Ser
  Variant (19)..(19): Xaa in position 19 is Ala, Ile, Leu, Pro or Val
  Variant (20)..(20): Xaa in position 20 is any amino acid
  Variant (21)..(21): Xaa in position 21 is Glu, Gln or Thr
  Variant (23)..(25): Xaa in position 23 to 25 is any amino acid
  Variant (27)..(29): Xaa in position 27 to 29 is any amino acid
  Variant (30)..(30): Xaa in position 30 is Phe or Tyr
  Variant (31)..(32): Xaa in position 31 to 32 is any amino acid
  Variant (33)..(33): Xaa in position 33 is Phe or Leu
  Variant (35)..(35): Xaa in position 35 is Phe or Leu
  Variant (37)..(37): Xaa in position 37 is any amino acid
LXPXXXXXXXXXXGXDXXXXXRXXXMXXXXXXXDXGXS

SEQ ID NO: 39117 - protein, 42 aa, Artificial sequence
  protein pattern
  Variant (2)..(3): Xaa in position 2 to 3 is any amino acid
  Variant (5)..(6): Xaa in position 5 to 6 is any amino acid
  Variant (7)..(7): Xaa in position 7 is Lys or Arg
  Variant (10)..(10): Xaa in position 10 is any amino acid
  Variant (12)..(12): Xaa in position 12 is any or no amino acid
  Variant (14)..(14): Xaa in position 14 is any or no amino acid
  Variant (16)..(16): Xaa in position 16 is any or no amino acid
  Variant (18)..(18): Xaa in position 18 is Ile or Leu
  Variant (19)..(19): Xaa in position 19 is any amino acid
  Variant (20)..(20): Xaa in position 20 is Ala, Gly or Leu
  Variant (21)..(21): Xaa in position 21 is Ile or Val
  Variant (22)..(22): Xaa in position 22 is Ile, Leu or Met
  Variant (23)..(23): Xaa in position 23 is any amino acid
  Variant (24)..(24): Xaa in position 24 is Ala, Ile, Leu or Val
  Variant (25)..(25): Xaa in position 25 is Asn, Ser or Thr
  Variant (27)..(27): Xaa in position 27 is any amino acid
  Variant (28)..(28): Xaa in position 28 is Ile, Leu or Val
  Variant (29)..(29): Xaa in position 29 is any amino acid
  Variant (31)..(31): Xaa in position 31 is any amino acid
  Variant (32)..(32): Xaa in position 32 is Ala or Val
  Variant (37)..(37): Xaa in position 37 is Ile or Val
  Variant (38)..(38): Xaa in position 38 is Asp or Glu
  Variant (39)..(40): Xaa in position 39 to 40 is any amino acid
  Variant (41)..(41): Xaa in position 41 is Ala, Ile, Leu or Val
  Variant (42)..(42): Xaa in position 42 is Ala, Gln or Ser
MXXYXXXRLXLXIXPXTXXXXXXXXFXXXQXXPGGPXXXXXX

SEQ ID NO: 39118 - protein, 8 aa, Artificial sequence
  protein pattern
  Variant (7)..(7): Xaa in position 7 is Thr or Val
FPLRGLXS

SEQ ID NO: 39119 - protein, 21 aa, Artificial sequence
  protein pattern
  Variant (2)..(4): Xaa in position 2 to 4 is any amino acid
  Variant (5)..(6): Xaa in position 5 to 6 is any or no amino acid
  Variant (8)..(8): Xaa in position 8 is Ala, Glu, Gly or Ser
  Variant (9)..(9): Xaa in position 9 is Ala, Thr or Val
  Variant (10)..(10): Xaa in position 10 is Phe, Ile or Leu
  Variant (11)..(11): Xaa in position 11 is Ile, Leu, Met or Val
  Variant (12)..(13): Xaa in position 12 to 13 is any amino acid
  Variant (16)..(16): Xaa in position 16 is Ala, Gly, Ser, Thr or Val
  Variant (18)..(18): Xaa in position 18 is Ala, Asn or Ser
  Variant (19)..(19): Xaa in position 19 is Phe, Ile, Leu, Met or Val
  Variant (20)..(20): Xaa in position 20 is Phe, Ile or Leu
  Variant (21)..(21): Xaa in position 21 is Ile or Val
IXXXXXPXXXXXXFFXGXXXX

SEQ ID NO: 39120 - DNA, 543 bp, Escherichia coli
  CDS (1)..(543): transl_table=11
atgaccttaaaagaattgttagtaggtttcggcacccaggttcgtagtatctggatgatcggcctgcacgcgttcgccaaacgcgaaacgcgaatgtacccggaagagccggtctatctgccgccccgttatcgtggtcgtatcgttctgacccgcgacccggacggcgaagagcgttgcgtagcctgtaacctctgcgcggtagcctgcccggtcggctgtatctcgctgcaaaaagcagaaaccaaagacggtcgctggtacccggaatttttccgcatcaacttctcacgctgcattttctgtggtctgtgcgaagaagcctgtccgaccacggcgattcagttaaccccggatttcgaaatgggggaatacaagcgccaggatctggtttacgagaaagaggatctgctgatctccggtccgggcaaatacccggaatataacttctaccggatggcaggtatggcaatcgacggcaaagataagggcgaagcagagaacgaagccaagcctatcgacgtcaagagcctgttaccgtaa

SEQ ID NO: 39121 - protein, 180 aa, Escherichia coli
MTLKELLVGFGTQVRSIWMIGLHAFAKRETRMYPEEPVYLPPRYRGRIVLTRDPDGEERCVACNLCAVACPVGCISLQKAETKDGRWYPEFFRINFSRCIFCGLCEEACPTTAIQLTPDFEMGEYKRQDLVYEKEDLLISGPGKYPEYNFYRMAGMAIDGKDKGEAENEAKPIDVKSLLP

SEQ ID NO: 39122 - DNA, 549 bp, Moraxella catarrhalis
  CDS (1)..(549): transl_table=11
atgtttgcaactttaaaaaatacggcggtgggcatgtttaccattgtacgctccatgtggatggtcaacagccacgccctaagacccagagacacgattttataccctgaacagcccgtgcctgtaccgccccgttttcgtggtcgcattgtgctgacccgagaccctgatggtgatgaacgctgtgtggcgtgtaacttgtgtgcggtggcttgccctgtgggttgtattagcctacaaaaggcagagcgagaagatgggcgttggtatcctgagttttttcgcatcaattttagtcgctgtgtgttttgtggcatgtgtgaagaggcatgcccaaccaccgccattcagctcacccctgattttgagcttggtgaatatgaccgccaaaatctggtgtatgaaaaagaacatttgctcatcagtggtgtgggtaaatacccagaatacaactattatagagtaacaggcatggcaacggacgataaacccaaagggtcgcacgagcgtgaagcagagcctgttaatgtgcggagtttgttgccatga

SEQ ID NO: 39123 - protein, 182 aa, Moraxella catarrhalis
MFATLKNTAVGMFTIVRSMWMVNSHALRPRDTILYPEQPVPVPPRFRGRIVLTRDPDGDERCVACNLCAVACPVGCISLQKAEREDGRWYPEFFRINFSRCVFCGMCEEACPTTAIQLTPDFELGEYDRQNLVYEKEHLLISGVGKYPEYNYYRVTGMATDDKPKGSHEREAEPVNVRSLLP

SEQ ID NO: 39124 - DNA, 666 bp, Bombyx mori
  CDS (1)..(666)
atgtctttagcaaagatattttcagtctcatcacgagtacgagcatcaggagttagtggtgtgatagtgaaacgggcacagtacagctcatcatcagaaggaaatgttgagaaggtttacccacagaacatacctggatataaatatgtgaatgcagaggaacaagacatgtctttcagggctatgtcagatagagcagctcagacaatgttctggactgagttagcccgaggatttgctgttactttggctcatattttcaaggaaccagcaacaatcaactatccatttgagaaagggccactgtcgcctcggttcagaggtgaacatgctctacgtcgctacccttcaggagaagaaaggtgcattgcttgtaagctgtgcgaagccatttgtccagcacaggctatcacgattgaagcagaagagcgtaaggacggttcgaggcgaaccactcgatacgatattgacatgacaaagtgtatctattgtggcttctgtcaagaagcctgtccggttgatgcaatcgtggaaggtccgaatttcgagtttacaacagagacacatgaggaacttttatacaataaggagaaacttctgtcgaacggcgataaatgggagagtgagatcgcatccaacatcagagctgatcatttgtaccgttga

SEQ ID NO: 39125 - protein, 221 aa, Bombyx mori
MSLAKIFSVSSRVRASGVSGVIVKRAQYSSSSEGNVEKVYPQNIPGYKYVNAEEQDMSFRAMSDRAAQTMFWTELARGFAVTLAHIFKEPATINYPFEKGPLSPRFRGEHALRRYPSGEERCIACKLCEAICPAQAITIEAEERKDGSRRTTRYDIDMTKCIYCGFCQEACPVDAIVEGPNFEFTTETHEELLYNKEKLLSNGDKWESEIASNIRADHLYR

SEQ ID NO: 39126 - DNA, 672 bp, Oryza sativa (japonica cultivar-group)
  CDS (1)..(672)
atggcggcgctcctcgcccggcaggcagcgcaggcgctccgcgcgcgccagatggcgcagctcgggccgtccgcgacggcgatgcaggggcacatccggacctacatgggcgcagggaagcccacgaggttcaaagaggatgaggagaaagagaagcttgcaaaggagatagcgaaagattggaatgctgtatttgaaaggagcatcaacacattgtttttgactgaaatggtccgcggtttgatgctgacactcaagtacttcttcgagaagaatgttacaatcaactatccatttgagaagggtcctttgagccctcgcttccgaggagagcatgctctcagacgctatccaactggagaagagcgttgcatcgcctgtaaactatgtgaagctatatgcccagctcaggcaatcacaattgaggcagaagaacgtgaagacggtagtcgtagaactacaagatatgatattgatatgaccaaatgcatctattgtggcttctgccaagaagcttgtcctgttgatgccatcgttgagggtcctaactttgagtttgctactgaaacccatgaggaactgctatacgacaaggaaaaattgcttgagaacggcgatcgttgggagactgagattgctgcaaacttggagtccgagagtctttaccgttga

SEQ ID NO: 39127 - protein, 223 aa, Oryza sativa (japonica cultivar-group)
MAALLARQAAQALRARQMAQLGPSATAMQGHIRTYMGAGKPTRFKEDEEKEKLAKEIAKDWNAVFERSINTLFLTEMVRGLMLTLKYFFEKNVTINYPFEKGPLSPRFRGEHALRRYPTGEERCIACKLCEAICPAQAITIEAEEREDGSRRTTRYDIDMTKCIYCGFCQEACPVDAIVEGPNFEFATETHEELLYDKEKLLENGDRWETEIAANLESESLYR

SEQ ID NO: 39128 - DNA, 669 bp, Arabidopsis thaliana
  CDS (1)..(669)
atggcttcgctactagctcgcaggtcgttcagtgctctccgagctcgacatctcgctttttcagggcaaggtttacagggatctcatctctgtgggctacagtcccgtgctatatcttatggaagcaacaaagatgatgaagaagctgagcagcttgctaaagagatctccaaggactggagtactgtctttgaacggagcatgaacaccctatttctcactgaaatggtcaggggtttgtcactgaccctcaagtacttctttgatccaaaagttacaatcaattatccttttgagaagggtccattgagccctcgtttccgtggtgaacacgctcttcgaaggtatccaactggggaagaacgctgcattgcctgcaaactctgcgaagctgtatgtccagctcaagcaatcacaatagaggcagaggagcgggaagatggaagccgcagaaccactaggtatgatatcgacatgacgaaatgcatctattgtggtttctgccaagaagcttgccctgttgatgcaatcgtggaaggaccaaactttgagtttgcaaccgagacacatgaggaacttctgtatgacaaagagaagcttcttgagaatggagataggtgggagacagagattgcagagaatctgaggtcggagagcctctaccgctga

SEQ ID NO: 39129 - protein, 222 aa, Arabidopsis thaliana
MASLLARRSFSALRARHLAFSGQGLQGSHLCGLQSRAISYGSNKDDEEAEQLAKEISKDWSTVFERSMNTLFLTEMVRGLSLTLKYFFDPKVTINYPFEKGPLSPRFRGEHALRRYPTGEERCIACKLCEAVCPAQAITIEAEEREDGSRRTTRYDIDMTKCIYCGFCQEACPVDAIVEGPNFEFATETHEELLYDKEKLLENGDRWETEIAENLRSESLYR

SEQ ID NO: 39130 - DNA, 654 bp, Drosophila melanogaster
  CDS (1)..(654)
atgtcgctaactatgcgaattttcaccgcatcgcgcaacggacagcgcctgtttggcagccatggagcccggctgctggccgcccagcgagcagaacccaaagatatcgtcgaggttcccaagggctatgtgtatgtaaacaacaaggaactgagcatggagtttgccgacatcacggaccgtgctgcatccaccatgttcttcggtgaactcttacgtggatttgccgtcaccctggcgcacatcttcaaggaaccggccactatcaactatccctttgaaaagggaccactgagcccgcgattccgcggagaacatgcccttcgtcgttatcccagtggagaggagcgctgcatcgcttgcaagctatgcgaggctatttgccccgcacaggcgatcaccatcgaagcggaggagcgcgcggatggcagcagacgtaccacacgctacgatatcgacatgaccaagtgcatctactgcggattctgtcaggaagcctgtcccgtggacgccatcgtcgagggacccaacttcgagttctccacggagacgcacgaggagctgctgtacaacaaggagaagcttctctgcaacggcgacaagtgggagtccgagattgcctctaacttgcaggccgaccatctctatcgttaa

SEQ ID NO: 39131 - protein, 217 aa, Drosophila melanogaster
MSLTMRIFTASRNGQRLFGSHGARLLAAQRAEPKDIVEVPKGYVYVNNKELSMEFADITDRAASTMFFGELLRGFAVTLAHIFKEPATINYPFEKGPLSPRFRGEHALRRYPSGEERCIACKLCEAICPAQAITIEAEERADGSRRTTRYDIDMTKCIYCGFCQEACPVDAIVEGPNFEFSTETHEELLYNKEKLLCNGDKWESEIASNLQADHLYR

SEQ ID NO: 39132 - DNA, 606 bp, Nasonia vitripennis
  CDS (1)..(606)
atgtcgatgatgttgccgacaaaaatttattctctgacgcggattgctcccaggatattgagcatacaagctcgcaataaatactattatgtcaataaagatgaaggccaaaaatggggtgacattgcatcgcgggctgtgaatacaatgtttttgcaagaattgtttcgtggaatgggtgtagctttggctcatttctttaaagaaccagcaacgatcaattatccttttgaaaaaggaccattaagtcctagatttcgaggagagcacgctttaagaagatatccatctggtgaggaaagatgcattgcttgcaaactatgtgaagctatttgccctgcacaagctattactattgaagctgaagaaagagctgatggttccaggcgaacaactagatatgatattgacatgacaaaatgtatctactgtggattttgtcaagaagcttgccctgtggatgccatagtcgaagggcccaactttgagttttcaacagagacacacgaggaaatgttgtacaacaaggagaagttattaaataatggagataagtgggaatctgaaatagcttcaaatctacacgcagatcatctgtatcgttaa

SEQ ID NO: 39133 - protein, 201 aa, Nasonia vitripennis
MSMMLPTKIYSLTRIAPRILSIQARNKYYYVNKDEGQKWGDIASRAVNTMFLQELFRGMGVALAHFFKEPATINYPFEKGPLSPRFRGEHALRRYPSGEERCIACKLCEAICPAQAITIEAEERADGSRRTTRYDIDMTKCIYCGFCQEACPVDAIVEGPNFEFSTETHEEMLYNKEKLLNNGDKWESEIASNLHADHLYR

SEQ ID NO: 39134 - DNA, 606 bp, Apis mellifera
  CDS (1)..(606)
atgacatttttaaaaactgtacaaccaggtttaaaattatttcaaacatatccaaaaattttaaatgtacctttacgtcgaactaaatattacactgtttactcagaggaaaataaagaaaaatttcttgacgaggcagtaaatagatcattcttcttagaaatcatacgaggtttaggaattacaatgtcacatttctttactgaacctgcaacaataaactatccttttgaaaaaggccctttaagtccaagatttagaggtgaacatgcattaagaagatatccatcaggagaagaaagatgtattgcatgtaaattatgtgaagctatttgtccagcacaagcaattactattgaagcagaagagagagctgatggatctcgtcgtacaacaagatatgacatagatatgacaaaatgtatatattgtggattttgtcaagaagcttgtccagtggatgcaatcgtagagggtcccaacttcgaattttccacagagacacatgaagagttattatataataaagaaaaactattaaataatggagataaatgggaatcagaaattgctagcaatattcatgctgattatctctatcgataa

SEQ ID NO: 39135 - protein, 201 aa, Apis mellifera
MTFLKTVQPGLKLFQTYPKILNVPLRRTKYYTVYSEENKEKFLDEAVNRSFFLEIIRGLGITMSHFFTEPATINYPFEKGPLSPRFRGEHALRRYPSGEERCIACKLCEAICPAQAITIEAEERADGSRRTTRYDIDMTKCIYCGFCQEACPVDAIVEGPNFEFSTETHEELLYNKEKLLNNGDKWESEIASNIHADYLYR

SEQ ID NO: 39136 - DNA, 639 bp, Tribolium castaneum
  CDS (1)..(639)
atgtccggggcccttaaattgtacagtctgagtagatcagtctcaggtcgcccctcgattttcctgcgagcatgtgggcaaaaccgcttaaaaagcacgtcgaaaggcgactacatcaacgtaaatccgggcgagcctggcatgagtttgaacgaagtaaccgatagggctgctgagaaggtgtttttcactgagctggtccgcgggtttgcggtcactctggcccacattttcaaagaaccggcgaccattaattacccctttgagaagggccccctgagcccccgttttcggggggagcacgccctaaggcggtatccatcaggtgaggaaagatgtattgcttgtaagttgtgcgaagcgatttgtccggctcaggccatcacaattgaagcagaagaacgtgctgatggttcaagacgaaccactcggtatgatatcgatatgactaagtgtatttattgcggattttgccaagaagcgtgtccggtggatgctattgttgaaggccccaattttgagttctcaactgagacgcatgaggagttgttgtataataaggagaagttgttgaataatggggacaagtgggagtcggagattgcggcgaatattcacgccgatcatttgtatcgttga

SEQ ID NO: 39137 - protein, 212 aa, Tribolium castaneum
MSGALKLYSLSRSVSGRPSIFLRACGQNRLKSTSKGDYINVNPGEPGMSLNEVTDRAAEKVFFTELVRGFAVTLAHIFKEPATINYPFEKGPLSPRFRGEHALRRYPSGEERCIACKLCEAICPAQAITIEAEERADGSRRTTRYDIDMTKCIYCGFCQEACPVDAIVEGPNFEFSTETHEELLYNKEKLLNNGDKWESEIAANIHADHLYR

SEQ ID NO: 39138 - DNA, 489 bp, Herminiimonas arsenicoxydans
  CDS (1)..(489): transl_table=11
atggaagcaatcaaggattttttcggtagtttgatgttgcgcgagatgctcaagggcatggccctgaccggacgctatatgttctcgcgcaagattaccgtgcagttcccggaagaaaagacaccgcagtcgccgcgttttcgtggtttgcatgcgctacgtcgttatccgaacggtgaagagcgctgtatcgcctgcaaactgtgtgaagcagtgtgtcctgcaatggcgatcacgatcgaatcggaacagcgtgacgacggcagccgccgcaccacacgttacgacatcgatttgaccaaatgtattttttgcggcttctgcgaagaatcctgcccggtcgattcgattgtggaaacacatattttcgaataccacggcgagaaacgcggtgatctgtactacaccaaggaaatgctgctggcagtaggtgatcgctacgaaaccgaaattgcagctgcacgcaccgccgacgcggcctatcgttga

SEQ ID NO: 39139 - protein, 162 aa, Herminiimonas arsenicoxydans
MEAIKDFFGSLMLREMLKGMALTGRYMFSRKITVQFPEEKTPQSPRFRGLHALRRYPNGEERCIACKLCEAVCPAMAITIESEQRDDGSRRTTRYDIDLTKCIFCGFCEESCPVDSIVETHIFEYHGEKRGDLYYTKEMLLAVGDRYETEIAAARTADAAYR

SEQ ID NO: 39140 - DNA, 567 bp, Rhodococcus sp. RHA1
  CDS (1)..(567): transl_table=11
atgactaaattcctcggccccatagcgggtttcggcgtgaccttctcgacgatgttcaagaaatcgaatacggagttctaccccgaggagaaggtgccgacggcgccccgctaccacggcaggcatcagctcaaccgttacgcggacggactggagaagtgcatcgggtgcgaactgtgtgcctgggcgtgccccgccgacgccatctacgtggagggcgccgacaacaccgacgaggaacgcttctcgcccggcgagcggtacggccaggtgtaccagatcaactacctgcgctgcatcgggtgcgggctgtgcatcgaggcgtgcccgacgcgggcgctgaccatgaccaacgagtacgagatggccgacgacaaccgggccggcctgatctacgagaaggaccggctgctggccccgctcgagcccggcatggtcgagtcgccgcacccgatggccccgggcgccaccgccgaggactattaccgcggcaccgtgaccgggggagcggcggctgcggcgcaggacgagtccgaggtcgacgacacggcgggggacaggccgtga

SEQ ID NO: 39141 - protein, 188 aa, Rhodococcus sp. RHA1
MTKFLGPIAGFGVTFSTMFKKSNTEFYPEEKVPTAPRYHGRHQLNRYADGLEKCIGCELCAWACPADAIYVEGADNTDEERFSPGERYGQVYQINYLRCIGCGLCIEACPTRALTMTNEYEMADDNRAGLIYEKDRLLAPLEPGMVESPHPMAPGATAEDYYRGTVTGGAAAAAQDESEVDDTAGDRP

SEQ ID NO: 39142 - DNA, 534 bp, Photobacterium sp. SKA34
  CDS (1)..(534): transl_table=11
atgaaagttatacagattttacaagaggtcacaggggcttttgcggcaaccattaagcacgtttgggcaccacgcgacacggtttgttatccagaggtaaaaccagacttacctgaacgctggcgcggtcgcattgtattaacgcgcgatcctgacggtgatgaacgttgtgttgcttgttatttatgctcttcagtatgccctgccaatgcaatcactattcaaggtgctgagcgagaagatgagcgtcgatatgccaaaacattcgagcttgatttcagtcgctgcattttctgtggaatgtgtgaagaagcatgtccaaccctatcgattcaatgcaccactgattttgaaatgggtaaatattctcgtgacaagctgctttatgaaaaagaagacttactcattgatggcacaggtaaacacccagactttaattactacaagcaagcaggtgtagcaattacaggtaaagctatcggcgatggtgaaaatgaaaaaccaccaatcgatgtgtactctctgctgccataa

SEQ ID NO: 39143 - protein, 177 aa, Photobacterium sp. SKA34
MKVIQILQEVTGAFAATIKHVWAPRDTVCYPEVKPDLPERWRGRIVLTRDPDGDERCVACYLCSSVCPANAITIQGAEREDERRYAKTFELDFSRCIFCGMCEEACPTLSIQCTTDFEMGKYSRDKLLYEKEDLLIDGTGKHPDFNYYKQAGVAITGKAIGDGENEKPPIDVYSLLP

SEQ ID NO: 39144 - DNA, 540 bp, Marinobacter sp. ELB17
  CDS (1)..(540): transl_table=11
atgtacaagggacttttaaaaggtacctggtcgcaattgcgcaccctgggcatggttttcatgcacggctttcgcaagcgcgaaaccgtcaactatcccgaagaagaggtctatctgtcgccgcgctaccgcgggcgcattgtgctgacccgggatccggacggtgaggagcgctgcgtggcttgcaatctgtgcgccgtagcctgtccagtggcttgtatctcgttggagaagggcgaaagggaagatgggcgctggtaccccgaattctttcgcattaacttttcgcgctgcattttttgcggcatgtgtgaagaagcctgcccgacctcggcgatccagctaacgccagacttcgagatgggtgaatacaaccgccaagagctggtctatgaaaaggaagatctgttgattagcggccctggcaaggaccacaactataatttctacaaggtagcgggcatggccatcgccggcaaagacaagggtaagggcgtggcggaatacgagccgatcaaggtcaccacgctgcttccctga

SEQ ID NO: 39145 - protein, 179 aa, Marinobacter sp. ELB17
MYKGLLKGTWSQLRTLGMVFMHGFRKRETVNYPEEEVYLSPRYRGRIVLTRDPDGEERCVACNLCAVACPVACISLEKGEREDGRWYPEFFRINFSRCIFCGMCEEACPTSAIQLTPDFEMGEYNRQELVYEKEDLLISGPGKDHNYNFYKVAGMAIAGKDKGKGVAEYEPIKVTTLLP

SEQ ID NO: 39146 - DNA, 681 bp, Aspergillus oryzae
  CDS (1)..(681)
atggcctcctcgaagtcggtcgcgaggctggtcacctaccgccggcctgcgccttctctgttgacctcttctttccgtcccttgggttcaaccgcaaacttctcctcctcagtgtgccgggctgcgaccccagctggtccccctccatccggtttccgtctggctccccccaagaaatgggacgagaccaccgagtcctccttggacaaggccagcaaatacttcctcatgtctgagattttccgcggcatgtacgtcgtgttggagcagttcttcagaccaccttacactatcttctaccccttcgagaaaggtcccatctctcctcgtttccgtggcgaacacgctttgcgccgctatcccaccggtgaggagcgttgcatcgcttgcaagctttgcgaagctatctgccctgctcaggctatcaccatcgaggccgaagaacgtgaggacggaagccgtcggacgacccgttatgatattgatatgaccaagtgtatctactgtggctactgccaggagagctgccccgttgatgccattgttgagactgccaatgctgaatatgccaccgagacccgtgaggagctgctgtacaacaaggagaagctcctggccaacggtgacaagtgggagcctgaaattgcagccgctgccagagctgacgctccttaccgttaa

SEQ ID NO: 39147 - protein, 226 aa, Aspergillus oryzae
MASSKSVARLVTYRRPAPSLLTSSFRPLGSTANFSSSVCRAATPAGPPPSGFRLAPPKKWDETTESSLDKASKYFLMSEIFRGMYVVLEQFFRPPYTIFYPFEKGPISPRFRGEHALRRYPTGEERCIACKLCEAICPAQAITIEAEEREDGSRRTTRYDIDMTKCIYCGYCQESCPVDAIVETANAEYATETREELLYNKEKLLANGDKWEPEIAAAARADAPYR

SEQ ID NO: 39148 - DNA, 690 bp, Solanum tuberosum
  CDS (1)..(690)
atggccgctatattagctcgcaaatctttatctgctcttcgttctcgtcagcttgttttggcaggacaagcatggcaagggactaatacacctaatggaactctgcttggtactcgatcatttgctaccaagcattcgttttcaactgacaaagatgatgaagaaagagagcagctagcaaaggaactatcaaaagattggaattcagtctttgagcgaagcataaatacactctttttgactgaaatggttcgaggtctgatgttgacgctcaagtacttctttgaaaagaaagtgactataaactatccttttgaaaaggggcctttaagccctcgtttccgtggagaacacgccctgcgacgttatgccacaggagaggaaagatgcattgcatgtaaactttgtgaagctatttgccctgctcaagctatcacaatcgaggccgaagagcgagaagatggcagtcgtcgaacaactaggtatgatattgatatgacaaagtgcatctactgtggattctgccaagaagcctgccctgttgatgccattgttgaggggcccaattttgagtttgcaactgaaactcatgaggaactcctttatgacaaggagaaacttcttgagaatggagatcgatgggaaactgagattgcagagaatctgagatctgaaagtctctatcgctga

SEQ ID NO: 39149 - protein, 229 aa, Solanum tuberosum
MAAILARKSLSALRSRQLVLAGQAWQGTNTPNGTLLGTRSFATKHSFSTDKDDEEREQLAKELSKDWNSVFERSINTLFLTEMVRGLMLTLKYFFEKKVTINYPFEKGPLSPRFRGEHALRRYATGEERCIACKLCEAICPAQAITIEAEEREDGSRRTTRYDIDMTKCIYCGFCQEACPVDAIVEGPNFEFATETHEELLYDKEKLLENGDRWETEIAENLRSESLYR

SEQ ID NO: 39150 - DNA, 654 bp, Drosophila melanogaster
  CDS (1)..(654)
atgtcgctaactatgcgaattttcaccgcatcgcgcaacggacagcgcctgtttggcagccatggagcccggctgctggccgcccagcgagcagaacccaaagatatcgtcgaggttcccaagggctatgtgtatgtaaacaacaaggaactgagcatggagtttgccgacatcacggaccgtgctgcatccaccatgttcttcggtgaactcttacgtggatttgccgtcaccctggcgcacatcttcaaggaaccggccactatcaactatccctttgaaaagggaccactgagcccgcgattccgcggagaacatgcccttcgtcgttatcccagtggagaggagcgctgcatcgcttgcaagctatgcgaggctatttgccccgcacaggcgatcaccatcgaagcggaggagcgcgcggatggcagcagacgtaccacacgctacgatatcgacatgaccaagtgcatctactgcggattctgtcaggaagcctgtcccgtgggcgccatcgtcgagggacccaacttcgagttctccacggagacgcacgaggagctgctgtacaacaaggagaagcttctctgcaacggcgacaagtgggagtccgagattgcctctaacttgcaggccgaccatctctatcgttaa

SEQ ID NO: 39151 - protein, 217 aa, Drosophila melanogaster
MSLTMRIFTASRNGQRLFGSHGARLLAAQRAEPKDIVEVPKGYVYVNNKELSMEFADITDRAASTMFFGELLRGFAVTLAHIFKEPATINYPFEKGPLSPRFRGEHALRRYPSGEERCIACKLCEAICPAQAITIEAEERADGSRRTTRYDIDMTKCIYCGFCQEACPVGAIVEGPNFEFSTETHEELLYNKEKLLCNGDKWESEIASNLQADHLYR

SEQ ID NO: 39152 - DNA, 633 bp, Rhizobium meliloti
  CDS (1)..(633): transl_table=11
atgccgtcccggaagctctgggcacggacatgcaagacgactctcaggagccgcagcgaggcggccatgtcgcgcgcactggacaaagctggaagatggatcggctgggccttcttcgccgatctggcgaatggtttggctttgaccttcggctacatgttttccagacccgtcaccatgcaatatccggacaaggagaagtggctgccctattcgcgctatcgcgggcatcatttcctcaagcgtgacgatgagggcgagatcaaatgcgtcgcttgcgaactttgcgcgcggatctgtccctgcgactgcatcgaagtggtcccgtacgaggacgagaagggcaatcggcgccctgccaaattcgagatcgacacggcccgctgtctcttctgtgggctctgcgaggacgcctgcccggcggacgcgatcgctcttggccaacaatatgaattttcgagtttctcctcgcgcgacttggtgatcggccgtgacgatctgctcgccaagccgggcaaggcgatgaccggcggcggtgtcgtggctgcgcgcctgaacaccgaacgggatgttctggtcgaggccagcgagccgcgcgggtacaattggtggcggaatattcgacgaaagtga

SEQ ID NO: 39153 - protein, 210 aa, Rhizobium meliloti
MPSRKLWARTCKTTLRSRSEAAMSRALDKAGRWIGWAFFADLANGLALTFGYMFSRPVTMQYPDKEKWLPYSRYRGHHFLKRDDEGEIKCVACELCARICPCDCIEVVPYEDEKGNRRPAKFEIDTARCLFCGLCEDACPADAIALGQQYEFSSFSSRDLVIGRDDLLAKPGKAMTGGGVVAARLNTERDVLVEASEPRGYNWWRNIRRK

SEQ ID NO: 39154 - DNA, 669 bp, Arabidopsis thaliana
  CDS (1)..(669)
atggcttcgattttggctcgcaggtcactgaatactctccgtgctcgacatctcgttttgtcagggcaagctttacagggatctcatctgtctagactgcagtcccgtggtatatcttatggcagcaacaaagatgatgaagaagcagagcaactttctaaggaaatctccaaggactggaatactgtctttgaacggagcataaacaccctgttcctcacagaaatggtccgcggtttgtcgctgaccctcaagtacttctttgatccaaaagttactatcaattatccatttgagaagggtcctctgagccctcgcttccgtggtgaacatgctcttcgaagatatcctaccggggaagaacgctgcattgcctgcaaactctgtgaagctgtatgtccagctcaagcaatcacaatagaggcagaagagagggaagatggaagccgcagaaccactaggtacgatatcgacatgacaaaatgcatctactgtggtttctgccaagaagcttgccccgttgatgcaatcgttgaaggacctaactttgaattcgcaaccgagacacacgaggaacttctctatgacaaagagaagcttcttgagaatggagatcgatgggagacagagattgctgagaatctgaggtcggagagtctctaccgctga

SEQ ID NO: 39155 - protein, 222 aa, Arabidopsis thaliana
MASILARRSLNTLRARHLVLSGQALQGSHLSRLQSRGISYGSNKDDEEAEQLSKEISKDWNTVFERSINTLFLTEMVRGLSLTLKYFFDPKVTINYPFEKGPLSPRFRGEHALRRYPTGEERCIACKLCEAVCPAQAITIEAEEREDGSRRTTRYDIDMTKCIYCGFCQEACPVDAIVEGPNFEFATETHEELLYDKEKLLENGDRWETEIAENLRSESLYR

SEQ ID NO: 39156 - DNA, 660 bp, Neurospora crassa
  CDS (1)..(660)
atgctcaccaccactgcctcttcggctgcggccgtcgcgcgccagctcaccacccgccgagtcatcgccccctccttcgtctctcaggccatccgcacctacgcaacccccgccggtcccccgcccaagggcttccgcattccgacgcccaagacgtgggaccaagaggaggaacacgtgctggataagaacggacggtactttcttttgacggagatgtttaggggcatgtatgtggctatggagcagtttttcaggccgccgtacacaatctattaccccttcgaaaagggtcccatctccccccgcttccgcggcgagcacgcccttcgtcgttacccgtcgggcgaagaacgctgcatcgcctgcaagctctgcgaggccgtctgccctgctcaggccatcaccatcgaagctgaagagcgtgccgatggaagcagaaggacgacccgctacgatatcgacatgaccaagtgcatttactgcggattctgccaggagagctgtcccgtggatgcgattgtggagagtcccaatgcggagtacgcaacggagacgagggaggagttgttgtataacaaggaaaagctactctctaacggagacaagtgggagcctgagcttgcggctgctattcgcgccgattcaccttacagataa

SEQ ID NO: 39157 - protein, 219 aa, Neurospora crassa
MLTTTASSAAAVARQLTTRRVIAPSFVSQAIRTYATPAGPPPKGFRIPTPKTWDQEEEHVLDKNGRYFLLTEMFRGMYVAMEQFFRPPYTIYYPFEKGPISPRFRGEHALRRYPSGEERCIACKLCEAVCPAQAITIEAEERADGSRRTTRYDIDMTKCIYCGFCQESCPVDAIVESPNAEYATETREELLYNKEKLLSNGDKWEPELAAAIRADSPYR

SEQ ID NO: 39158 - DNA, 690 bp, Solanum tuberosum
  CDS (1)..(690)
atggctgccatcttagctcgcaaatctttatctgctttacgttctcgtcagcttgttttggcaggacacacaattgaaggaactaatggctacaacagaactctgcttggcacccgatcatttgctaccaagcattcgttttctactgacaaagatgatgaagaaagagagcagctagcaaaggagttatcaaaagattggaattcagtttttgagcgaagcatcaatacattatttttgactgaaatggttcgaggtctaatgctgaccctgaagtacttctttgagaagaaagtaacgattaactatccatttgagaagggtcctttaagtcctcgttttcgtggagaacatgctcttcgacgttatgcaactggagaggaaagatgcattgcatgtaaactttgtgaagctatttgccctgcccaagccatcaccatcgaggccgaggagcgagaggatggaagtcgtcgcacaactaggtatgatattgacatgacaaaatgcatttactgtggattctgccaagaagcctgccctgttgatgcaatcgttgaagggcccaactttgaatttgcaaccgaaactcatgaggaacttctttacgacaaggagaagcttcttgagaatggtgatcgatgggaaactgagattgccgagaatctgagatccgaaagcctctaccgctga

SEQ ID NO: 39159 - protein, 229 aa, Solanum tuberosum
MAAILARKSLSALRSRQLVLAGHTIEGTNGYNRTLLGTRSFATKHSFSTDKDDEEREQLAKELSKDWNSVFERSINTLFLTEMVRGLMLTLKYFFEKKVTINYPFEKGPLSPRFRGEHALRRYATGEERCIACKLCEAICPAQAITIEAEEREDGSRRTTRYDIDMTKCIYCGFCQEACPVDAIVEGPNFEFATETHEELLYDKEKLLENGDRWETEIAENLRSESLYR

SEQ ID NO: 39160 - DNA, 693 bp, Nicotiana tabacum
  CDS (1)..(693)
atggccgccatattagctcggaaatctctctctgctcttcgctctcgtcagcttgttttggcaggacaagcatggcaacagggggctaatacatctaatggaactctgcttggtactcgaacatttgctaccaacgattcgttttcaactgacaaagatgatgaagaacgagaacagctagcaaaggagttatcaaaagattggaattcagtttttgagcaacagataaatacactatttttgactgaaatggttcgaggtctgatgctgacgctcaagtacttctttgaaaagaaagtgactattaactatccatttgagaagggccctttaagccctcgttttcgtggagaacagcctcttcggcgttatcctactggagaggaaagatgcattgcatgtaaactttgtgaagctatttgccctgctcaagctattactatcgaggctgaagcgcgagaagacgggagtcgtcgaacaactaggtatgatattgatatgacgaagtgcatctactgtggattctgccaagaagcctgccctgttgatgcaattgttgaggggcccaactttgaatttgcaactgaaactcatgaggaactcctttacgacaaggagaagcttcttgagaatggtgatcgatgggaaactgagattgcagagaatttgagatctgaaagcctctaccgttga

SEQ ID NO: 39161 - protein, 230 aa, Nicotiana tabacum
MAAILARKSLSALRSRQLVLAGQAWQQGANTSNGTLLGTRTFATNDSFSTDKDDEEREQLAKELSKDWNSVFEQQINTLFLTEMVRGLMLTLKYFFEKKVTINYPFEKGPLSPRFRGEQPLRRYPTGEERCIACKLCEAICPAQAITIEAEAREDGSRRTTRYDIDMTKCIYCGFCQEACPVDAIVEGPNFEFATETHEELLYDKEKLLENGDRWETEIAENLRSESLYR

SEQ ID NO: 39162 - DNA, 549 bp, Thermus thermophilus
  CDS (1)..(549): transl_table=11
atgaccctgaaggccctcgcccaaagcctcggcatcaccctgaagtacctcttctccaagccggtgaccgtcccctaccccgacgcccccgtggccctgaagccccgcttccacgggcggcacgtcctcacccggcacccgaacgggctagagaagtgcatcggctgctccctctgcgccgccgcctgccccgcctacgccatctacgtggagccggcggagaacgacccggaaaacccggtctccgcgggggagcggtacgccaaggtctacgagatcaacatgctccggtgcatcttctgcggcctctgcgaggaggcctgccccacgggggccatcgtcctggggtacgactttgagatggcggactacgagtactccgacctcgtctacggcaaggaggacatgctggtggacgtggtgggcaccaagccccagcgccgcgaggccaagcggacgggcaagcccgtgaaggtgggctacgtggtgccctacgtgcggcccgagctggaggggttcaaggcccccacggaaggggggaagcgatga

SEQ ID NO: 39163 - protein, 182 aa, Thermus thermophilus
MTLKALAQSLGITLKYLFSKPVTVPYPDAPVALKPRFHGRHVLTRHPNGLEKCIGCSLCAAACPAYAIYVEPAENDPENPVSAGERYAKVYEINMLRCIFCGLCEEACPTGAIVLGYDFEMADYEYSDLVYGKEDMLVDVVGTKPQRREAKRTGKPVKVGYVVPYVRPELEGFKAPTEGGKR

SEQ ID NO: 39164 - DNA, 555 bp, Geobacter metallireducens
  CDS (1)..(555): transl_table=11
atgcctcgcccctctgttgccaccatgcccatcatcaccgacttcaaagcaatcgccaccgggctctttgtcacctggaagcacatcttccgcaggagcgtcacggtggaataccccgaggtgaagcggacccccgctccccgctaccgggcgaggatcgtcctcacccgcgaccccgaggggggagagcggtgcgtggcctgctacctctgctccgccgcctgccccgttgactgcatctccatggaggcgaccgaggacgggaacggccgccggtacgcccggtggttccggatcaacttctcccgctgcatcttctgcggcctctgcgccgaggcctgccccaccctcgccatccagatgacccctgactacgagatctgcgagcgggacatcatggaactggtctacgagaaggaagacctcctcatcgacggctgcggcaaggaccccgcctacaacttctaccgccatgccggcatcggcgtcacccagccacggggcgccggcgagcgggaagaggaaccggttgatgcgcggggactcatgccgtga

SEQ ID NO: 39165 - protein, 184 aa, Geobacter metallireducens
MPRPSVATMPIITDFKAIATGLFVTWKHIFRRSVTVEYPEVKRTPAPRYRARIVLTRDPEGGERCVACYLCSAACPVDCISMEATEDGNGRRYARWFRINFSRCIFCGLCAEACPTLAIQMTPDYEICERDIMELVYEKEDLLIDGCGKDPAYNFYRHAGIGVTQPRGAGEREEEPVDARGLMP

SEQ ID NO: 39166 - DNA, 495 bp, Rhizobium meliloti
  CDS (1)..(495): transl_table=11
atgatggccggtctttcgaacgccgtcagctcgctgttcctcaaggaattcgtcggcgcattccttctgtcgatgcgctatttcttccgtccgaaggcgaccttgaactatcccttcgagaaggggcccgtcagtccgcgcttccgcggcgagcacgcgctgcgccgttatcccaacggcgaagagcgttgcatcgcctgcaagctgtgcgaggcgatctgtcctgcgcaggccatcaccatcgaggccgggccgcgccgcaacgacggcacgcgccgcacggtgcgttacgacatcgatatggtgaagtgcatctattgcggcttctgccaggaagcctgcccggtcgatgcgatcgtcgaggggccgaacttcgagttctccaccgagacgcgcgaagagctctactacgacaaggagaagctgctcgccaacggtgaccggtgggagcgggaaatcgcgcgcaacattgcgatggactcgccctaccgctga

SEQ ID NO: 39167 - protein, 164 aa, Rhizobium meliloti
MMAGLSNAVSSLFLKEFVGAFLLSMRYFFRPKATLNYPFEKGPVSPRFRGEHALRRYPNGEERCIACKLCEAICPAQAITIEAGPRRNDGTRRTVRYDIDMVKCIYCGFCQEACPVDAIVEGPNFEFSTETREELYYDKEKLLANGDRWEREIARNIAMDSPYR

SEQ ID NO: 39168 - DNA, 636 bp, Streptomyces coelicolor
  CDS (1)..(636): transl_table=11
gtggaccacaaggggaccgaccccggattcatgaaccccgtggccggcttcggcgtgaccttcaaggccatgttcaagaagcggctgaccgagcagtacccggagcagcagaagaccaccgctccacgcttccacggacggcaccagctcaaccgccatccggacggcctggagaagtgcgtcggctgcgagctgtgcgcctgggcctgtcccgccgacgccatctacgtggagggcgcggacaacaccgacgaggagcgctactcgccgggcgagcggtacggccgcgtctaccagatcaactacgcccgctgcatcctgtgcggcctgtgcatcgaggcgtgccccacgcgcgcgctgacgatgaccaacgagttcgagctggccgactccagccgcgccaacctcatcttcaccaaggagcagctgctcgccggtctcgaggagggcatggtcgactcgccgcacgccatctacccgggcaccgacgagcaggactactaccggggcctggtcaccgaggccgcgcccggcacggtccagcaggtcgcccactccaagggggaggtcgtccaggagggcgactccaccttcggcgcgaccgagccggcgtcggaggaggtgatccgccgatga

SEQ ID NO: 39169 - protein, 211 aa, Streptomyces coelicolor
MDHKGTDPGFMNPVAGFGVTFKAMFKKRLTEQYPEQQKTTAPRFHGRHQLNRHPDGLEKCVGCELCAWACPADAIYVEGADNTDEERYSPGERYGRVYQINYARCILCGLCIEACPTRALTMTNEFELADSSRANLIFTKEQLLAGLEEGMVDSPHAIYPGTDEQDYYRGLVTEAAPGTVQQVAHSKGEVVQEGDSTFGATEPASEEVIRR

SEQ ID NO: 39170 - DNA, 531 bp, Geobacter sulfurreducens
  CDS (1)..(531): transl_table=11
atgccgatactgaccgatttcaaagccatcgccaccgggcttttcgtgacctggaagcatatcttccgcaggccggtgaccgtggagtacccggaggtgaagcggacgccggcgccccgctaccgggcgcggatcgttctcacccgcgacccggacggcggagagcgctgcgtggcctgctacctctgctccgcggcctgtcccgttgactgcatctccatggaagcggccgaaggggaggagggccgccgctacgcccggtggttccggatcaacttctcccgctgcatcttctgcggcctctgcgccgaggcctgtccgaccctggccatccagatgacccccgactacgagatctgcgaacgggacatcatggaactggtctacgagaaggaggacctcctcatcgatggctgcggcaaggatgccgggtacaacttctaccgtcacgccggcatcggcgtcgcccagccccgcggggctggcgaatgcgaggaagagccggtggacgtgcggggactgatgccctaa

SEQ ID NO: 39171 - protein, 176 aa, Geobacter sulfurreducens
MPILTDFKAIATGLFVTWKHIFRRPVTVEYPEVKRTPAPRYRARIVLTRDPDGGERCVACYLCSAACPVDCISMEAAEGEEGRRYARWFRINFSRCIFCGLCAEACPTLAIQMTPDYEICERDIMELVYEKEDLLIDGCGKDAGYNFYRHAGIGVAQPRGAGECEEEPVDVRGLMP

SEQ ID NO: 39172 - DNA, 567 bp, Rhizobium meliloti
  CDS (1)..(567): transl_table=11
atgtcgcgcgcactggacaaagctggaagatggatcggctgggccttcttcgccgatctggcgaatggtttggctttgaccttcggctacatgttttccagacccgtcaccatgcaatatccggacaaggagaagtggctgccctattcgcgctatcgcgggcatcatttcctcaagcgtgacgatgagggcgagatcaaatgcgtcgcttgcgaactttgcgcgcggatctgtccctgcgactgcatcgaagtggtcccgtacgaggacgagaagggcaatcggcgccctgccaaattcgagatcgacacggcccgctgtctcttctgtgggctctgcgaggacgcctgcccggcggacgcgatcgctcttggccaacaatatgaattttcgagtttctcctcgcgcgacttggtgatcggccgtgacgatctgctcgccaagccgggcaaggcgatgaccggcggcggtgtcgtggctgcgcgcctgaacaccgaacgggatgttctggtcgaggccagcgagccgcgcgggtacaattggtggcggaatattcgacgaaagtga

SEQ ID NO: 39173 - protein, 188 aa, Rhizobium meliloti
MSRALDKAGRWIGWAFFADLANGLALTFGYMFSRPVTMQYPDKEKWLPYSRYRGHHFLKRDDEGEIKCVACELCARICPCDCIEVVPYEDEKGNRRPAKFEIDTARCLFCGLCEDACPADAIALGQQYEFSSFSSRDLVIGRDDLLAKPGKAMTGGGVVAARLNTERDVLVEASEPRGYNWWRNIRRK

SEQ ID NO: 39174 - DNA, 522 bp, Rhodopseudomonas palustris
  CDS (1)..(522): transl_table=11
atgatcggattcggatggctggaagctctgttgcgggtcggccgcaagctgttcgtcaagccggagacccagctctatccggaacagaagccgaaactgtatccgcgcgcccgcggccggatcgtgctgacccgcgatccggacggccaggagcgctgcgtcgcctgtaatctgtgcgcgacggtgtgcccggtcggctgcatcgatctggcgaaagcagtggccgacgacggccgctggtacccggagtatttccgcgtcaacttcgcccgctgcatcttctgcggcttctgcgaagacgcctgcccgaccgcggcgatccaactgacgccggactacgaattgtccgaatggcgccgcgacgcgctggtgtacgagaagcacgacctcttgatctctggtgagggcaaggtgcgcggctatcgctattggtcggtcgccggcaaggcgatccccggcaaggacaagggcgaggctgagcacgaggcgccgccggtgaacctcaaggggctgctgccatga

SEQ ID NO: 39175 - protein, 173 aa, Rhodopseudomonas palustris
MIGFGWLEALLRVGRKLFVKPETQLYPEQKPKLYPRARGRIVLTRDPDGQERCVACNLCATVCPVGCIDLAKAVADDGRWYPEYFRVNFARCIFCGFCEDACPTAAIQLTPDYELSEWRRDALVYEKHDLLISGEGKVRGYRYWSVAGKAIPGKDKGEAEHEAPPVNLKGLLP

SEQ ID NO: 39176 - DNA, 495 bp, Rhodobacter sphaeroides
  CDS (1)..(495): transl_table=11
atgaagggcattctcgacagcatcctgcgcgtggggcggatgatcttcgcgcccacgaagaccgtgcaatatcccgaggagaagctgccgctcgcgccccgcacccgcggccggatcgtgctgacgcgcgaccccgacgggcaggagcgctgcgtggcctgcaatctctgcgccgccgcctgcccggtcgactgcatcgacgtggtcaaggccgagacgccggacgggcgctggtatcccgagagcttccgcatcaatttcgcgcgctgcatcttctgcggctattgcgaggaggcctgccccacctcggcgatccagctcaccccggacgtcgagcttgccgactaccgccgcggcttcctgcaatacgagaaggaggatctgctcatttccggtgaaggcaagcatcccggctaccgctactgggacgtggcgggcaaggccatcgcgggcaaggcgcaggatcccgtcgatccgaaggacctctgcccatga

SEQ ID NO: 39177 - protein, 164 aa, Rhodobacter sphaeroides
MKGILDSILRVGRMIFAPTKTVQYPEEKLPLAPRTRGRIVLTRDPDGQERCVACNLCAAACPVDCIDVVKAETPDGRWYPESFRINFARCIFCGYCEEACPTSAIQLTPDVELADYRRGFLQYEKEDLLISGEGKHPGYRYWDVAGKAIAGKAQDPVDPKDLCP

SEQ ID NO: 39178 - DNA, 594 bp, Streptomyces coelicolor
  CDS (1)..(594): transl_table=11
atggcccccgtccccggcagcggcctggccaagggcctggccgtcacgctgcgcacgatgacgcggaagaccgtcaccgagcagtacccggacgcccagcccgagctgccgccccgtacccgcggcgtgatcggcctgttcgaggagaactgcacggtctgcatgctgtgcgcccgcgagtgccccgactggtgcatctacatcgactcccacaaggagacggtccccgcggccacccccggcggacgcgaccgcagccgcaacgtcctcgaccgcttcgccatcgacttcgccctgtgcatgtactgcggcatctgcatcgaggtctgtcctttcgacgccctgttctggtccccggagttcgagtacgccgagaccgacatccgcgacctcacccacgagcgcgacaagctccgcgagtggatgtggaccgtgccggccccgcccgccctggaccccggcgcggaggagcccaaggagctcgccgccgcccgcaaggccgccgacaagctggccgcccagcagcagccggaccagcccgggcccgaccaccccggacaaccggacgagtccgggcaggagggccggacatga

SEQ ID NO: 39179 - protein, 197 aa, Streptomyces coelicolor
MAPVPGSGLAKGLAVTLRTMTRKTVTEQYPDAQPELPPRTRGVIGLFEENCTVCMLCARECPDWCIYIDSHKETVPAATPGGRDRSRNVLDRFAIDFALCMYCGICIEVCPFDALFWSPEFEYAETDIRDLTHERDKLREWMWTVPAPPALDPGAEEPKELAAARKAADKLAAQQQPDQPGPDHPGQPDESGQEGRT

SEQ ID NO: 39180 - DNA, 492 bp, Agrobacterium tumefaciens
  CDS (1)..(492): transl_table=11
atggcaagcctctcccaagccgtcaactcgctgttcctgaaggaattcgtaggcgcgatcttcctgaccatgcgccatttcttcaagcagaaggcgacgatcaattatccgtttgaaaagggtccggtgtctccgcgcttccgcggcgaacatgcgttgcgccgttatccgaacggtgaagaacgctgcatcgcctgcaagctgtgtgaagcgatctgtcctgctcaggcgatcaccatcgaagccggcccgcgccgcaatgacggcacccgccgcacggtgcgttacgacatcgacatggtgaagtgcatctattgcggtttctgccaggaagcctgcccggtggatgcaatcgtcgagggtccgaacttcgaattcgcgacggaaacccgcgaggagctttatttcgacaagcagaggcttctcgacaatggcgaccgctgggagcgtgaaatcgcacgcaacctcgcactggatgcaccttatcgctga

SEQ ID NO: 39181 - protein, 163 aa, Agrobacterium tumefaciens
MASLSQAVNSLFLKEFVGAIFLTMRHFFKQKATINYPFEKGPVSPRFRGEHALRRYPNGEERCIACKLCEAICPAQAITIEAGPRRNDGTRRTVRYDIDMVKCIYCGFCQEACPVDAIVEGPNFEFATETREELYFDKQRLLDNGDRWEREIARNLALDAPYR

SEQ ID NO: 39182 - DNA, 546 bp, Blochmannia floridanus
  CDS (1)..(546): transl_table=11
atgatgaaattaaaagaattttttataaatattatttctatatttcgtagtgtatatatggttggtatgcaagcatttagtaaacgagaaacatatatgtatcctgatgttgcttgtaaattatcttctagatatcgaggccgtattgtgttgactagggattctgcaggccatgaacgttgtgtagcgtgtaatttatgtgctgtttcttgtccagtaggttgtatttctttaaaaaaatcggaaaattctgagggacgatggtatccagaatttttcaggattaatttttctcgatgtattttttgtggtatgtgtgaggaagcttgtccaactgcagctattcaacttatttctgattttgaaatgagtgattataaacgatctgatttagtatatgagaaatctgatttattaatatcaggaccgggtaagtataaaaactacgatttttatcaaatttctggagtaaaatattcaaataagtataaaaaagaatctagttttgaagaaaaacctataagtgtgaaaactatattaccttag

SEQ ID NO: 39183 - protein, 181 aa, Blochmannia floridanus
MMKLKEFFINIISIFRSVYMVGMQAFSKRETYMYPDVACKLSSRYRGRIVLTRDSAGHERCVACNLCAVSCPVGCISLKKSENSEGRWYPEFFRINFSRCIFCGMCEEACPTAAIQLISDFEMSDYKRSDLVYEKSDLLISGPGKYKNYDFYQISGVKYSNKYKKESSFEEKPISVKTILP

SEQ ID NO: 39184 - DNA, 507 bp, Bradyrhizobium japonicum
  CDS (1)..(507): transl_table=11
gtgagggccgtcatgggtatcaacatcaacgccactgcacgctcgcttctgctgtcggaattcgtctcggcgttcttcctcgccatgcgttatttcttccagccgaagccgacgctgaactatccgttcgagaagggcccgatctcgccgcgcttccgcggcgagcacgcgctgcgccgctatcccaacggcgaggaacgctgcatcgcctgcaagctgtgcgaggccgtgtgcccggcccaggccatcaccatcgaggccggtccgcgccgcaacgacggcacccgccgcaccgtgcgctacgacatcgacatggtgaagtgcatctattgcggcctctgccaggaggcctgtccggtcgacgccatcgtcgaaggtccgaactttgagttcgcgaccgagacccgcgaggaactgttctatgacaaggccaagctgctcgccaacggcgaccgctgggaacgcgagatcgcgaaggcgatcgagctcgatgcgccgtaccggtga

SEQ ID NO: 39185 - protein, 168 aa, Bradyrhizobium japonicum
MRAVMGININATARSLLLSEFVSAFFLAMRYFFQPKPTLNYPFEKGPISPRFRGEHALRRYPNGEERCIACKLCEAVCPAQAITIEAGPRRNDGTRRTVRYDIDMVKCIYCGLCQEACPVDAIVEGPNFEFATETREELFYDKAKLLANGDRWEREIAKAIELDAPYR

SEQ ID NO: 39186 - DNA, 537 bp, Deinococcus radiodurans
  CDS (1)..(537): transl_table=11
atgggcgtccttgacatcgccaaaggcatgggcgtgaccctcggcaagctgtttcaaaagccgctgaccgtcagttaccccgagcagcgggccaccctgcaaccgcgctttcggggccgccacgtcctgacccggcaccccgacaccgggctggaaaagtgcatcggctgctcgctgtgcgccgccgcctgccccgcctacgccatctacgtggaagccgccgagaacgacccgcgtgacccggtcagccccggcgagcgctacgcgaaggtgtacgaaatcaacatgctgcgctgcattttctgcggcctgtgcgaggaagcctgcccgaccggcgcggtggtgctcggcaacgagttcgagatggccgattaccgctcgcgcgacttcgtgtacggcaaggaggacatgctcgtcggcgtcaccggcagccgcccgcaacggcgcgaggcgctgagtgccgggcggcccgtgcgcctcggctttcaggtggagggcggcccgcgcgccgagctcgaaggagtggagtacccatga

SEQ ID NO: 39187 - protein, 178 aa, Deinococcus radiodurans
MGVLDIAKGMGVTLGKLFQKPLTVSYPEQRATLQPRFRGRHVLTRHPDTGLEKCIGCSLCAAACPAYAIYVEAAENDPRDPVSPGERYAKVYEINMLRCIFCGLCEEACPTGAVVLGNEFEMADYRSRDFVYGKEDMLVGVTGSRPQRREALSAGRPVRLGFQVEGGPRAELEGVEYP

SEQ ID NO: 39188 - DNA, 516 bp, Methylococcus capsulatus
  CDS (1)..(516): transl_table=11
atgatcagccagttgcgcaccctgtggatcgtactcaagcacaccttctcccgcgccgacacggtccagtaccccgaacagcggcccaagctctatccgcgctaccgcggccgcatcgtgctcacccgcgaccccgacggcgaggagcgctgcgtcgcctgcaacctctgcgcggcggtgtgtccggtggactgcatcgcgttgcagaagaccgaggacgttgacgggcgctggtatccggaattcttccgtatcaacttttcccgctgcatcctctgcggcctgtgcgaagaagcctgcccgacctacgcgatccagctcacccccgatttcgagctgtgcgagtacgaccgccgcaacctggtatacgaaaaggaacatcttttgatccagggcaccggcaaatatcccggctacagtttctaccgggtggcaggcaaggccatcgccggcaaagacaaaggccaggcggaaaacgaagcgcctccgatcgacgtccacagccttctgccctga

SEQ ID NO: 39189 - protein, 171 aa, Methylococcus capsulatus
MISQLRTLWIVLKHTFSRADTVQYPEQRPKLYPRYRGRIVLTRDPDGEERCVACNLCAAVCPVDCIALQKTEDVDGRWYPEFFRINFSRCILCGLCEEACPTYAIQLTPDFELCEYDRRNLVYEKEHLLIQGTGKYPGYSFYRVAGKAIAGKDKGQAENEAPPIDVHSLLP

SEQ ID NO: 39190 - DNA, 549 bp, Pseudomonas fluorescens
  CDS (1)..(549): transl_table=11
atgttcaaatatattggcgacatcgttaagggtaccggtacccaactgcgaagcctggtcatgatcttcggccatggctttcgcaagcgcgacaccctgcaatacccggaagagccggtctacctggcaccacgctatcgtggccgcatcgtcctgacccgcgaccccgacggcgaagagcgctgcgtggcctgcaacctgtgcgccgtggcgtgcccggtgggttgcatctcgctgcagaaagctgaaaccgaagacggtcgctggtacccggacttcttccgtatcaacttctcgcgctgcattttctgtggcctctgcgaggaagcctgcccgaccaccgcgatccagctcacgccggatttcgaaatggccgagttcaaacgtcaggacctggtgtacgagaaagaagatctgctgatttccggtcccggtaaaaaccctgattacaacttctatcgtgttgcaggtatggccattgccggtaagccaaaaggcgccgcgcagaacgaagccgaaccgatcaacgtgaagagcttgctgccttaa

SEQ ID NO: 39191 - protein, 182 aa, Pseudomonas fluorescens
MFKYIGDIVKGTGTQLRSLVMIFGHGFRKRDTLQYPEEPVYLAPRYRGRIVLTRDPDGEERCVACNLCAVACPVGCISLQKAETEDGRWYPDFFRINFSRCIFCGLCEEACPTTAIQLTPDFEMAEFKRQDLVYEKEDLLISGPGKNPDYNFYRVAGMAIAGKPKGAAQNEAEPINVKSLLP

SEQ ID NO: 39192 - DNA, 549 bp, Pseudomonas putida
  CDS (1)..(549): transl_table=11
atgttcaagtatatcggcgacatcgttaagggcaccggcacccagctgcgcagcctggcaatggtgttctcccacgggttccgcaagcgcgacaccctgcaataccccgaagaacccgtgtacctgccgccgcgctaccgcggccgcatcgtcctcacccgcgaccccgatggcgaggagcgctgcgtagcgtgcaacctctgcgcggtggcctgcccggtgggctgcatttcgctgcagaaggccgagacagaggacggccgctggtacccggagttcttccgcatcaacttctcgcgttgcattttctgcggcctgtgtgaagaagcgtgcccgaccaccgcgatccagctgactccggatttcgaaatggccgagttcaagcgtcaggacctggtgtacgagaaagaagatctgctgatctccggccccggcaagaaccctgactacaacttctaccgtgttgcgggtatggcaatcgctggcaagccgaagggctctgcacagaacgaagccgagccgatcaacgtgaagagcttgctcccataa

SEQ ID NO: 39193 - protein, 182 aa, Pseudomonas putida
MFKYIGDIVKGTGTQLRSLAMVFSHGFRKRDTLQYPEEPVYLPPRYRGRIVLTRDPDGEERCVACNLCAVACPVGCISLQKAETEDGRWYPEFFRINFSRCIFCGLCEEACPTTAIQLTPDFEMAEFKRQDLVYEKEDLLISGPGKNPDYNFYRVAGMAIAGKPKGSAQNEAEPINVKSLLP

SEQ ID NO: 39194 - DNA, 543 bp, Shewanella oneidensis
  CDS (1)..(543): transl_table=11
atgaaaattttacgcattatccagggtgtcggcacccagttacgcagcctgagcatggtgttttcccatgcttggcacccgcgcgaaaccctcaactatccagaagaggcggtttatgccgcaccccgctaccgcgggcgcatcgtactgacccgcgaccccgacggcgacgagcgctgcgtggcctgtaacctctgtgcagttgcctgcccagtcggctgcatctcgctgcaaaagtccgagcgggacgatggccgctggtatccggagttctttcgcatcaacttttctcgctgcatcttctgcggcctgtgtgaagaggcttgccccaccaccgccatccagctgacgccggatttcgagatgggcgagtatcgccgccaggatctggtgtacgagaaggaagatctgctgatcagcggccccggcaaatacccggactacaacttctatcgcatgagcgggatggccatcgacggcaagccgaaaggggatgccgagaacgaagccaaacccatcgatgttaagagccttttgccctga

SEQ ID NO: 39195 - protein, 180 aa, Shewanella oneidensis
MKILRIIQGVGTQLRSLSMVFSHAWHPRETLNYPEEAVYAAPRYRGRIVLTRDPDGDERCVACNLCAVACPVGCISLQKSERDDGRWYPEFFRINFSRCIFCGLCEEACPTTAIQLTPDFEMGEYRRQDLVYEKEDLLISGPGKYPDYNFYRMSGMAIDGKPKGDAENEAKPIDVKSLLP

SEQ ID NO: 39196 - DNA, 603 bp, Streptomyces avermitilis
  CDS (1)..(603): transl_table=11
atggctgaggaacccaaggagaccggtcccggtttccagaaccccgtcgccggcttcggcgtgaccttcaaggccatgttcaagaagcggctgaccgagcagtacccggagcagcagaagaccaccgccccgcggttccacggcaggcatcagctcaaccgccatccggacggcctggagaagtgcgtcggctgcgagctgtgcgcctgggcgtgtcccgccgacgccatctatgtggagggcgccgacaacacggacgaggagcgctactcgccgggcgagcggtacgggcgggtctaccagatcaactacgcccgctgcatcctgtgcggcctgtgcatcgaggcatgccccacgcgcgcgctgacgatgacgaacgagttcgagctggccgactccagccgcgccaacctcatctacaccaaggagcagctgctcgccggactggacgacaacatggtcgacagcccgcacgccatctaccccgggatggacgagcaggactactaccggggtctggtcacggaggccgcccccggcaccgagcgccaggtcgccgtctccaagggcgagaagcctcaggacgagggggtggaggcatga

SEQ ID NO: 39197 - protein, 200 aa, Streptomyces avermitilis
MAEEPKETGPGFQNPVAGFGVTFKAMFKKRLTEQYPEQQKTTAPRFHGRHQLNRHPDGLEKCVGCELCAWACPADAIYVEGADNTDEERYSPGERYGRVYQINYARCILCGLCIEACPTRALTMTNEFELADSSRANLIYTKEQLLAGLDDNMVDSPHAIYPGMDEQDYYRGLVTEAAPGTERQVAVSKGEKPQDEGVEA

SEQ ID NO: 39198 - DNA, 543 bp, Yersinia pseudotuberculosis
  CDS (1)..(543): transl_table=11
atgacgttgaaagagttagtggttggtttcggcacccaagtgcgcagcctgtggatgattggccttcatgccttccacaagcgcgaaaccttaatgtatccagaagaaccggtttacctgccgccgcgttaccgtggtcgtatcgtgctgacgcgcgatccagacggcgaagagcgttgtgtcgcctgtaacctgtgtgcggttgcctgcccggttggctgtatctcattacagaaagcagaacagaaagatggccgctggtatccggagttcttccgtatcaacttctcccgctgcattttctgtggtctgtgtgaagaagcttgcccaacaaccgctatccagctaacgccggatttcgaaatgggtgagtttaagcgccaagacctggtgtatgagaaagaagatctgttgatctcgggtccgggtaaatatccggaatataacttttaccggatggccggtatggcgattgatggcaagcagaaaggcgaagccgaaaatgaagccaaaccgatcgacgttaaaggtctgatgccctag

SEQ ID NO: 39199 - protein, 180 aa, Yersinia pseudotuberculosis
MTLKELVVGFGTQVRSLWMIGLHAFHKRETLMYPEEPVYLPPRYRGRIVLTRDPDGEERCVACNLCAVACPVGCISLQKAEQKDGRWYPEFFRINFSRCIFCGLCEEACPTTAIQLTPDFEMGEFKRQDLVYEKEDLLISGPGKYPEYNFYRMAGMAIDGKQKGEAENEAKPIDVKGLMP

SEQ ID NO: 39200 - DNA, 669 bp, Brassica napus
  CDS (1)..(669)
atggcttcgatgctggctcgcaggtcactgaatactctccgtactcgacatctcgttttgtcagggcaagctttgcagggatctcatctctctgggctgcagtcccgtgctatttcttatggctccaagaaagatgatgaagaagaggagcaacttgctaaggaaatctccaaggactggaatactgtctttgaacggagcataaacacactgtttctcactgaaatggtccgtggtttgtcgttgaccctcaagtacttctttgatcccaaagttactatcaattatccatttgagaagggtccactgagccctcgcttccgtggtgaacatgctcttcgtcgttatcctactggggaggaacgctgcattgcctgcaaactctgtgaagctgtatgtccagctcaagcaatcacaatagaagcagaggagcgtgaagatggtagccgtagaaccactaggtacgacatcgacatgacgaaatgcatctactgtggtttctgccaagaagcttgccccgttgatgcaattgtcgaaggacctaactttgaattcgcaaccgagacacacgaggaacttctctatgacaaagaaaagcttcttgagaatggagatcgatgggagactgagattgctgagaatctgaagtcagagagtctctaccgttaa

SEQ ID NO: 39201 - protein, 222 aa, Brassica napus
MASMLARRSLNTLRTRHLVLSGQALQGSHLSGLQSRAISYGSKKDDEEEEQLAKEISKDWNTVFERSINTLFLTEMVRGLSLTLKYFFDPKVTINYPFEKGPLSPRFRGEHALRRYPTGEERCIACKLCEAVCPAQAITIEAEEREDGSRRTTRYDIDMTKCIYCGFCQEACPVDAIVEGPNFEFATETHEELLYDKEKLLENGDRWETEIAENLKSESLYR

SEQ ID NO: 39202 - DNA, 669 bp, Brassica napus
  CDS (1)..(669)
atggcgtcgatgcttgctcgcaggtctctggatactctccgtgctcgacatctcgttttgtcagggcaagctttgcagggatctcatctttctcggctgcagtcccgtgctatttcttatggctccaagaaagatgatgaagaagaggagcaacttgctaaggaaatctccaaggactggaatactgtctttgaacggagcataaacaccctgtttctcactgaaatggtccgtggtttgtcgttgaccctcaagtacttctttgatcccaaagttactatcaattatccatttgagaagggtccactgagccctcgcttccgtggtgaacatgctcttcgtcgttatcctactggggaggaacgctgcattgcctgcaaactctgtgaagctgtatgtccagctcaagcaatcacaatagaagcagaggagcgtgaagatggtagccgtagaaccactaggtacgacatcgacatgacgaaatgcatctactgtggtttctgccaagaagcctgtcccgttgatgcaattgtggaaggacctaactttgaattcgcaaccgagacacacgaggaacttctctatgacaaagaaaagcttcttgagaatggagatcgatgggagactgagattgctgagaatctgaagtcagagagtctctaccgttaa

SEQ ID NO: 39203 - protein, 222 aa, Brassica napus
MASMLARRSLDTLRARHLVLSGQALQGSHLSRLQSRAISYGSKKDDEEEEQLAKEISKDWNTVFERSINTLFLTEMVRGLSLTLKYFFDPKVTINYPFEKGPLSPRFRGEHALRRYPTGEERCIACKLCEAVCPAQAITIEAEEREDGSRRTTRYDIDMTKCIYCGFCQEACPVDAIVEGPNFEFATETHEELLYDKEKLLENGDRWETEIAENLKSESLYR

SEQ ID NO: 39204 - DNA, 669 bp, Brassica napus
  CDS (1)..(669)
atggcttcattgctagctcgcaggtcgttcaatgctctccgcgcccgacatctcgttttttcggggcaagctttacagggacctcatctctctgcgctacaatcccgtgctatatcgtatggcactaacaaagatgatgaagaagctgagaaacttgctaaggagatctccaaggactggagcactgtctttgagcggagcatgaacaccctatttctcactgaaatggtccggggtttgtctctgaccctcaagtacttctttgatccaaaagttactatcaattatccttttgaaaagggtccactgagccctcgcttccgtggtgagcacgctcttcgaaggtatccaactggggaagaacgttgcattgcttgcaaactctgtgaagctgtatgtccagctcaagcaatcaccatagaggcagaggagagggaagatggaagccgcagaaccactaggtatgatatcgacatgacaaagtgcatctattgtggcttttgccaagaagcttgccctgttgatgcaatcgtcgaaggacccaactttgagtttgcaaccgagacccatgaggaacttttgtatgacaaagagaaacttcttgagaatggagatcggtgggagacagagattgccgagaatctgaagtcggagagcctctaccgctga

SEQ ID NO: 39205 - protein, 222 aa, Brassica napus
MASLLARRSFNALRARHLVFSGQALQGPHLSALQSRAISYGTNKDDEEAEKLAKEISKDWSTVFERSMNTLFLTEMVRGLSLTLKYFFDPKVTINYPFEKGPLSPRFRGEHALRRYPTGEERCIACKLCEAVCPAQAITIEAEEREDGSRRTTRYDIDMTKCIYCGFCQEACPVDAIVEGPNFEFATETHEELLYDKEKLLENGDRWETEIAENLKSESLYR

SEQ ID NO: 39206 - DNA, 669 bp, Glycine max
  CDS (1)..(669)
atggctgcaatcttagctcggaaatcacttcttgctcttcgaacactccaactggctgtaagtggtcaagggctacacaacttccaaaactatggccttcgattaagtgcacactcctactctaccaaaagagaggatgaagaaagggagcaactcgcaaaggaaatttcaaaggattggagttctgtttttgaacgtagcatcaacactctctttctcactgaaatggttcgaggtctaatgctgactctgaaatacttctttgaaacaaaagttacaatcaattatccatttgagaaaggccctttgagcccccgtttccggggtgaacatgcactccgacgatatccaacaggagaggaacgctgcattgcttgcaaactttgtgaagctatatgtcctgcacaagcaatcacaattgaggctgaggagcgagaagatggaagccgcaggacaactcggtatgatattgacatgaccaagtgcatttattgtggattttgtcaagaggcatgccctgttgatgcgattgttgaagggccaaactttgaatttgctacagagactcatgaggagcttttatatgacaaggagaagctgcttgaaaatggggaccgatgggagactgaaattgcagagaacctgagatctgaaagcctttaccgctga

SEQ ID NO: 39207 - protein, 222 aa, Glycine max
MAAILARKSLLALRTLQLAVSGQGLHNFQNYGLRLSAHSYSTKREDEEREQLAKEISKDWSSVFERSINTLFLTEMVRGLMLTLKYFFETKVTINYPFEKGPLSPRFRGEHALRRYPTGEERCIACKLCEAICPAQAITIEAEEREDGSRRTTRYDIDMTKCIYCGFCQEACPVDAIVEGPNFEFATETHEELLYDKEKLLENGDRWETEIAENLRSESLYR

SEQ ID NO: 39208 - DNA, 669 bp, Glycine max
  CDS (1)..(669)
atggctgcaatcttagctcgaaaatcactccttgctcttcgtgcgcgccaattggctgtaagcggtcaagggctgcacagctcccaatactatggccttcggttaagtgcacactccttctctaccaaaagagaggatgaggaaagggagcaactcgcaaaggacatttcaaaggattggagttctgtctttgaacgtagcattaacactctctttctcactgaaatggttcgaggactaatgctgactctgaaatacttctttgaaacaaaagttacaatcaattatccatttgagaaaggccctttgagccctcgtttccggggtgaacatgcactccggcgatatccaacaggggaggaacgctgcattgcttgcaaactttgtgaagctatatgtcctgcacaagcaatcacaattgaggctgaggagcgagaagatggaagccgcaggacaactcggtatgatattgacatgaccaagtgcatctattgtggattttgtcaagaggcatgccctgttgatgcgattgtcgaaggaccaaactttgaatttgctactgagactcatgaggagcttttatatgacaaggagaagctgcttgaaaatggggaccgatgggagactgaaattgcagagaacctgagatctgaaagcctttatcgctga

SEQ ID NO: 39209 - protein, 222 aa, Glycine max
MAAILARKSLLALRARQLAVSGQGLHSSQYYGLRLSAHSFSTKREDEEREQLAKDISKDWSSVFERSINTLFLTEMVRGLMLTLKYFFETKVTINYPFEKGPLSPRFRGEHALRRYPTGEERCIACKLCEAICPAQAITIEAEEREDGSRRTTRYDIDMTKCIYCGFCQEACPVDAIVEGPNFEFATETHEELLYDKEKLLENGDRWETEIAENLRSESLYR

SEQ ID NO: 39210 - DNA, 672 bp, Zea mays
  CDS (1)..(672)
atggcgtcgctcctagcccggcaggcagcgcaggcgctccgcgcgaggcaaacggcgcagctcgggccggccgcgtcggcgatgcaagggcacctccgtacctacatgaacgcggggattcccaagcggttcaaagaggatgaggagaaagaacagcttgcaaaagatctcgcaaaagattggaatgctgtgtttgaaaggagcatcaatacattgtttttgactgaaatggtccgtggcttgatgctaactctcaagtacttctttgatagaaatgtcacaattaactatccgtttgagaagggtcctctgagcccccgcttccgtggtgagcatgctctcagacgttatgaatctggggaagagcgctgcattgcttgtaaactatgcgaagctatatgcccagcgcaggcaattacaattgaggctgaagaacgtgaagatggcagtcgccgaaccacaagatatgatattgacatgaccaaatgcatttactgtgggttctgtcaagaggcttgcccagtcgatgctattgttgaggggcctaactttgagtttgccactgagacacacgaggaactactgtacgacaaggagaaattgcttgagaatggtgatcgctgggagactgagattgctgagaacttgagatctgagagcctctatcgctga

SEQ ID NO: 39211 - protein, 223 aa, Zea mays
MASLLARQAAQALRARQTAQLGPAASAMQGHLRTYMNAGIPKRFKEDEEKEQLAKDLAKDWNAVFERSINTLFLTEMVRGLMLTLKYFFDRNVTINYPFEKGPLSPRFRGEHALRRYESGEERCIACKLCEAICPAQAITIEAEEREDGSRRTTRYDIDMTKCIYCGFCQEACPVDAIVEGPNFEFATETHEELLYDKEKLLENGDRWETEIAENLRSESLYR

SEQ ID NO: 39212 - DNA, 672 bp, Zea mays
  CDS (1)..(672)
atggcggcgctcctagcccggcaggcagcgcaggcgctccgcgcgagacagtcggcgcagctcgggccgacaacgtcggcgatgcaggggcacctccgtacctacatgaacgcggggattcccaagcggttcaaagaggaagaggagaaagaacagcttgcaaaagatatcgcaaaagattggaatgctgtgtttgaaaggagcatcaatacattgtttttgactgaaatggtccgtggcttgatgctaactctcaagtacttcttcgagagaaacgttacaattaactatccgtttgagaagggtcctctgagtccccgcttccgtggtgagcacgctctcagacgttacgaatctggggaagagcgttgcattgcttgtaaactatgcgaagctatatgcccagctcaggcaattacaattgaggctgaagaacgtgaagacggcagtcgccgaaccacaaggtatgatattgacatgaccaaatgcatttactgtgggttctgccaagaggcttgcccagtcgatgctattgttgaggggcctaactttgagtttgctactgagacacacgaggaactactgtacgacaaggagaaattgctcgagaatggtgaccgctgggaaactgagattgctgagaacttgagatctgagagcctttatcgctga

SEQ ID NO: 39213 - protein, 223 aa, Zea mays
MAALLARQAAQALRARQSAQLGPTTSAMQGHLRTYMNAGIPKRFKEEEEKEQLAKDIAKDWNAVFERSINTLFLTEMVRGLMLTLKYFFERNVTINYPFEKGPLSPRFRGEHALRRYESGEERCIACKLCEAICPAQAITIEAEEREDGSRRTTRYDIDMTKCIYCGFCQEACPVDAIVEGPNFEFATETHEELLYDKEKLLENGDRWETEIAENLRSESLYR

SEQ ID NO: 39214 - DNA, 24 bp, Artificial sequence
  primer
atgaccttaaaagaattgttagta

SEQ ID NO: 39215 - DNA, 23 bp, Artificial sequence
  primer
ttacggtaacaggctcttgacgt

SEQ ID NO: 39216 - protein, 142 aa, Artificial sequence
  consensus sequence
  Variant (2)..(5): Xaa in position 2 to 5 is any amino acid
  Variant (7)..(8): Xaa in position 7 to 8 is any amino acid
  Variant (11)..(17): Xaa in position 11 to 17 is any amino acid
  Variant (18)..(18): Xaa in position 18 is any or no amino acid
  Variant (21)..(21): Xaa in position 21 is any amino acid
  Variant (24)..(26): Xaa in position 24 to 26 is any amino acid
  Variant (28)..(28): Xaa in position 28 is any amino acid
  Variant (30)..(30): Xaa in position 30 is any amino acid
  Variant (32)..(32): Xaa in position 32 is any amino acid
  Variant (33)..(33): Xaa in position 33 is any or no amino acid
  Variant (35)..(35): Xaa in position 35 is any amino acid
  Variant (39)..(39): Xaa in position 39 is any amino acid
  Variant (42)..(42): Xaa in position 42 is any amino acid
  Variant (45)..(47): Xaa in position 45 to 47 is any amino acid
  Variant (50)..(52): Xaa in position 50 to 52 is any amino acid
  Variant (54)..(61): Xaa in position 54 to 61 is any amino acid
  Variant (62)..(62): Xaa in position 62 is any or no amino acid
  Variant (64)..(68): Xaa in position 64 to 68 is any amino acid
  Variant (69)..(69): Xaa in position 69 is any or no amino acid
  Variant (71)..(78): Xaa in position 71 to 78 is any amino acid
  Variant (79)..(82): Xaa in position 79 to 82 is any or no amino acid
  Variant (84)..(87): Xaa in position 84 to 87 is any amino acid
  Variant (90)..(90): Xaa in position 90 is any amino acid
  Variant (93)..(93): Xaa in position 93 is any amino acid
  Variant (95)..(95): Xaa in position 95 is any amino acid
  Variant (100)..(101): Xaa in position 100 to 101 is any amino acid
  Variant (104)..(108): Xaa in position 104 to 108 is any amino acid
  Variant (111)..(118): Xaa in position 111 to 118 is any amino acid
  Variant (120)..(120): Xaa in position 120 is any amino acid
  Variant (122)..(122): Xaa in position 122 is any amino acid
  Variant (125)..(125): Xaa in position 125 is any amino acid
  Variant (127)..(138): Xaa in position 127 to 138 is any amino acid
  Variant (140)..(141): Xaa in position 140 to 141 is any amino acid
FXXXXTXXYPXXXXXXXXPRXRGXXXLXRXPXXGXERCXACXLCXXXCPXXXIXXXXXXXXXDXXXXXXGXXXXXXXXXXXXIXXXXCIXCGXCXEACPXXAIXXXXXFEXXXXXXXXLXYXKEXLXXXXXXXXXXXXLXXG

SEQ ID NO: 39217 - protein, 58 aa, Artificial sequence
  protein pattern
  Variant (2)..(2): Xaa in position 2 is any or no amino acid
  Variant (4)..(9): Xaa in position 4 to 9 is any amino acid
  Variant (10)..(10): Xaa in position 10 is any or no amino acid
  Variant (12)..(12): Xaa in position 12 is Asp or Asn
  Variant (13)..(14): Xaa in position 13 to 14 is any amino acid
  Variant (15)..(15): Xaa in position 15 is Lys or Arg
  Variant (18)..(18): Xaa in position 18 is any amino acid
  Variant (21)..(21): Xaa in position 21 is any amino acid
  Variant (23)..(23): Xaa in position 23 is any amino acid
  Variant (28)..(28): Xaa in position 28 is Thr or Val
  Variant (29)..(29): Xaa in position 29 is any amino acid
  Variant (31)..(31): Xaa in position 31 is Ile, Leu or Val
  Variant (32)..(35): Xaa in position 32 to 35 is any amino acid
  Variant (36)..(36): Xaa in position 36 is Asp, Glu or Asn
  Variant (37)..(37): Xaa in position 37 is any amino acid
  Variant (39)..(39): Xaa in position 39 is Phe, Ile, Leu or Met
  Variant (40)..(40): Xaa in position 40 is Ala, Cys, Gly, Ser or Thr
  Variant (41)..(41): Xaa in position 41 is Asp, Glu or Thr
  Variant (42)..(46): Xaa in position 42 to 46 is any amino acid
  Variant (47)..(47): Xaa in position 47 is Phe, Leu or Met
  Variant (48)..(48): Xaa in position 48 is any amino acid
  Variant (49)..(49): Xaa in position 49 is Phe or Tyr
  Variant (50)..(50): Xaa in position 50 is Asp, Glu, Gly, Asn or Thr
  Variant (52)..(52): Xaa in position 52 is Ala, Asp, Glu, Gln or Ser
  Variant (53)..(53): Xaa in position 53 is any amino acid
  Variant (54)..(54): Xaa in position 54 is Leu or Met
  Variant (56)..(57): Xaa in position 56 to 57 is any amino acid
  Variant (58)..(58): Xaa in position 58 is Gly, Leu or Val
GXRXXXXXXXIXXXXCIXCGXCXEACPXXAXXXXXXXEXXXXXXXXXXXXKXXXLXXX

SEQ ID NO: 39218 - protein, 28 aa, Artificial sequence
  protein pattern
  Variant (2)..(2): Xaa in position 2 is any amino acid
  Variant (4)..(5): Xaa in position 4 to 5 is any amino acid
  Variant (6)..(6): Xaa in position 6 is Ala, Asp, Glu, Asn, Ser or Thr
  Variant (8)..(8): Xaa in position 8 is any amino acid
  Variant (12)..(12): Xaa in position 12 is Ile or Val
  Variant (15)..(15): Xaa in position 15 is any amino acid
  Variant (18)..(18): Xaa in position 18 is any or no amino acid
  Variant (20)..(20): Xaa in position 20 is any amino acid
  Variant (21)..(21): Xaa in position 21 is any or no amino acid
  Variant (24)..(24): Xaa in position 24 is Ala or Val
  Variant (25)..(25): Xaa in position 25 is any amino acid
  Variant (26)..(26): Xaa in position 26 is Ala or Cys
  Variant (28)..(28): Xaa in position 28 is Ala, Asp, Ser or Thr
LXRXXXGXERCXACXLCXAXXCPXXXIX

SEQ ID NO: 39219 - DNA, 825 bp, Escherichia coli
  CDS (1)..(825): transl_table=11
atgtctcagaacttagacgcaaccgcaattaatcaaatccatgcccttatttctgctcagggtgttaatgaaattatcagtaagattggtgccgatgctgtggcattgcctgagaatttccgcattcatgatctggaaaaatttaatttaaatcgcttccgtttccgtggtgcgctttccactgccagcatcgatgactttacccgttattctaaagatcttgcagatgaaggcacccgctgctttatcgatgctgataatatgcgtgccgtcagtgtgcttaacctgggtactattgatgaaccaggtcacgcagataacaccgccactctcaaactgaaaaagacagcaccgttctctgccctgttgtctgttaacggcgagcgtaactcccagaaatcactggcagaatggattgaagactgggccgactaccttgtgggctttgatgctaatggtgacgccattcaggcaacaaaagcggctgcggcaatccgtaaaatcacgattgaagcaaaccagaccgctgattttgaagataatgacttcagcggcaaacgctccctgatggaatctgtcgaagcgaagaccaaagacattatgccagtggcatttgaatttaaatgcgttccgtttgaaggtctgaaagaacgtccgtttaaattacgcctcagcattatcactggcgatcgtcctgtactggttctgcgcattattcagctggaagcggtgcaggaagatatggctaacgaatttcgtgatctgcttgttgagaaattcaaagacagcaaagtagaaacctttattggtactttcaccgcctaa

SEQ ID NO: 39220 - protein, 274 aa, Escherichia coli
MSQNLDATAINQIHALISAQGVNEIISKIGADAVALPENFRIHDLEKFNLNRFRFRGALSTASIDDFTRYSKDLADEGTRCFIDADNMRAVSVLNLGTIDEPGHADNTATLKLKKTAPFSALLSVNGERNSQKSLAEWIEDWADYLVGFDANGDAIQATKAAAAIRKITIEANQTADFEDNDFSGKRSLMESVEAKTKDIMPVAFEFKCVPFEGLKERPFKLRLSIITGDRPVLVLRIIQLEAVQEDMANEFRDLLVEKFKDSKVETFIGTFTA

SEQ ID NO: 39221 - DNA, 822 bp, Xylella fastidiosa 9a5c
  CDS (1)..(822): transl_table=11
atggacaaaacagcgatagaacatattcaacaaaccgccattgatgccaatggcttccgtttgcctgctgcattacaagatagagcggtagcgcttcctcttgattatggaatcaaagatcttgaatctctcttccagttgcgctcccgctttcgtggagcaatgcaaacgcaatccatcgtcgacttcgtgcagtacatcaagacgaaaggaaatggcgaaggctttattaatgcagaaaatctcagtgccaagatatttttcaatctcggtacaacagaatcacccggtcatggcgactggacagccacgctcacacttaaccccacagcagcttacaaagcactgctggatattgacggtaaaacactcaatcagcggaagttgattgatttcctggaagattgggcaccgctgctgtcggccacatcacaagaaagccttgatgaactaccactggcgactgcgattaatgccattcgcaaattaactatcaagaaaacctcagagtcagaatcgactcaaggcgagttcaatacatcacgttccaagttcgatgatatccaagccaaatcatctcttggcttaccgattggtttcaccttaacgaccaagccctatcttggattaccggaacgcagattcctgctacggctgtccgtattcaccgacgaagaaaaagaaaagccactcatcacactgcgcctcatacagcgtgaagcacagcaggaaatgatcgcccaggattttaaaagcgtgttgtttcgtgagcttgaagggcacgccacgctgaccattggcacattctccccatccctttaa

SEQ ID NO: 39222 - protein, 273 aa, Xylella fastidiosa 9a5c
MDKTAIEHIQQTAIDANGFRLPAALQDRAVALPLDYGIKDLESLFQLRSRFRGAMQTQSIVDFVQYIKTKGNGEGFINAENLSAKIFFNLGTTESPGHGDWTATLTLNPTAAYKALLDIDGKTLNQRKLIDFLEDWAPLLSATSQESLDELPLATAINAIRKLTIKKTSESESTQGEFNTSRSKFDDIQAKSSLGLPIGFTLTTKPYLGLPERRFLLRLSVFTDEEKEKPLITLRLIQREAQQEMIAQDFKSVLFRELEGHATLTIGTFSPSL

SEQ ID NO: 39223 - DNA, 822 bp, Xylella fastidiosa Temecula1
  CDS (1)..(822): transl_table=11
atggacaaaacagccatagaacatattcaacaaaccgccattgatgctaataaattccgtttaccgcctgcattacaggatatcgcggtagcgattccagataactatgacatcagaaatctcgaatctttctacacattacgctcgcgtttccgtggagaaatgaaaacccaatctattaccgacttcgtgcagtacatcaagacaaaaggaaatggcgaaggttttattaatgcagaaaatctcagtgccaagatatttttcaatctcggtacaacagaatcacccggtcatggcgactggacagccacgctcacacttaacgccacagcagcttacaaagcactgctggatattgacggtaaaacactcaatcagcggaagttgattgatttcctggaagattgggcaccgctgctgtcggccacatcacaagaaagccttgatgaactaccgctgacgaccgcgattaacgcgattcgcaaattaactatcaagaaaacctcagagtcagaatcaactcagggcgaattcaatacatcacgctccaagttcgatgatatcgaagccaaatcagctattggcttaccgattggtttcaccttcaggacccagccgtatcttggattaccggaacgcagattcctgctacggctgtccgtatttaccgacgaagaaaaagaaaagccactcatcacactgcgcctcatacagcgccaagcacagcaggaagcgatcgcccaagattttaaaagcgtgttgtttcgtgcgcttgaaggacacgccacgctgaccattggcacattctccgcatccctttaa

SEQ ID NO: 39224 - protein, 273 aa, Xylella fastidiosa Temecula1
MDKTAIEHIQQTAIDANKFRLPPALQDIAVAIPDNYDIRNLESFYTLRSRFRGEMKTQSITDFVQYIKTKGNGEGFINAENLSAKIFFNLGTTESPGHGDWTATLTLNATAAYKALLDIDGKTLNQRKLIDFLEDWAPLLSATSQESLDELPLTTAINAIRKLTIKKTSESESTQGEFNTSRSKFDDIEAKSAIGLPIGFTFRTQPYLGLPERRFLLRLSVFTDEEKEKPLITLRLIQRQAQQEAIAQDFKSVLFRALEGHATLTIGTFSASL

SEQ ID NO: 39225 - DNA, 813 bp, Pseudomonas syringae pv. syringae B728a
  CDS (1)..(813): transl_table=11
atgtccctcacgaaagaagctattcaactgatcatcgatgacgcgctgatcgcccaaggcaaagagctgggcaccgttacgcccaccatcgtgctgcccgaaggcgcgaaggtcgtgaaccttgagcaattcggcgcaggccgcagtcgcttccgtggcacgttctccaccaactccctggtggacttcgccaagtacgtgtccgaccgcgcagtcgcagacgcaaaaggcttcatcaatcaggacgacatgacctgctcggtgctgttcaacctgggcaacgaggaagtgccaggccacgcagacgaccgcgccgtgctgaaactcaagcccaccgccgcctatcaggccgtgcaggcaatcagtggccgggccatgtcgcagaaggatatgagtgactggattgaagactggcacagcaccctgtcggcggtcggtgatgagctgcagaacatcccgctggccaaagccatcgccgccgtgcgcacgatcacggtcaaggcatcgtcggaaagcgatcacaccgtcagcgagacgcgcgccagccgcagcgcaatggatgccattgaggcgaccagcaaagaaacgctgccaacgtcgccgatcttctcggccattccatttgaaggcctgcagacgcgcgaaatcatcctgcgaatctcagtcatcacgagcggcgcacagccggtgctgaagctgcgctgggttggcgaggacgtgcagcgcgaagagatcgctcaagagttcaagtcggtgctcgaagcgaaggtgggcgatgccgctcagctggcgctgggtagcttctcagcctga

SEQ ID NO: 39226 - protein, 270 aa, Pseudomonas syringae pv. syringae B728a
MSLTKEAIQLIIDDALIAQGKELGTVTPTIVLPEGAKVVNLEQFGAGRSRFRGTFSTNSLVDFAKYVSDRAVADAKGFINQDDMTCSVLFNLGNEEVPGHADDRAVLKLKPTAAYQAVQAISGRAMSQKDMSDWIEDWHSTLSAVGDELQNIPLAKAIAAVRTITVKASSESDHTVSETRASRSAMDAIEATSKETLPTSPIFSAIPFEGLQTREIILRISVITSGAQPVLKLRWVGEDVQREEIAQEFKSVLEAKVGDAAQLALGSFSA

SEQ ID NO: 39227 - DNA, 822 bp, Xylella fastidiosa Dixon
  CDS (1)..(822): transl_table=11
atggacaaaacagccatagaacatattcaacaaaccgccattgatgctaataaattccgtttaccgcctgcattacaggatatcgcggtggcgattccagataactatgaaatcagaaatctcgaatctctctacacattacgctcgcgtttccgtggagaaatgaaaacgcaatctattaccgacttcgtgcagtacatcaagacaaaaggaaatggcgaaggttttattaatgcagaaaatctcagtgccaagatatttttcaatctcggtacaacagaatcacccggtcatggcgactggacagccacgctcacacttaacgccacagcagcttacaaagcactgttggatattgacggtaaaacactcaatcagcggaagttgattgatttcctggaagattgggcaccgctgctgtcggccacatcacaagaaagccttgatgaactaccgttgacgaccgcgattaacgcgattcgcaaattaacgatcaagaaaacctcagagtcagaatcgactcagggcgaattcaatacatcacgctccaagttcgatgatatcgaagccaaatcagctattggcttaccgattggtttcaccttcaggacccagccgtatcttggattaccggaacgcagattcctgctacggctgtcagtattcaccgacgaagaaaaagaaaagccactcatcacactgcgcctcatacagcgccaagcacagcaggaagcgatcgcccaggattttaaaagcgtgttgtttcgtgcgcttgaaggacacgccacgctgacgattggcacattctccccatccctttaa

SEQ ID NO: 39228 - protein, 273 aa, Xylella fastidiosa Dixon
MDKTAIEHIQQTAIDANKFRLPPALQDIAVAIPDNYEIRNLESLYTLRSRFRGEMKTQSITDFVQYIKTKGNGEGFINAENLSAKIFFNLGTTESPGHGDWTATLTLNATAAYKALLDIDGKTLNQRKLIDFLEDWAPLLSATSQESLDELPLTTAINAIRKLTIKKTSESESTQGEFNTSRSKFDDIEAKSAIGLPIGFTFRTQPYLGLPERRFLLRLSVFTDEEKEKPLITLRLIQRQAQQEAIAQDFKSVLFRALEGHATLTIGTFSPSL

SEQ ID NO: 39229 - DNA, 822 bp, Xylella fastidiosa Ann-1
  CDS (1)..(822): transl_table=11
atggacaaaacagccatagaacatattcaacaaaccgccattgatgctaataaattccgtttaccgcctgcattacaggatatcgcggtggcgattccagataactatgacatcagaaatctcgaatctctctacacattacgctcgcgtttccgtggagaaatgaaaacccaatctattaccgacttcgtgcagtacatcaagacaaaaggaaatggcgaaggttttattaatgcagaaaatctcagtgccaagatatttttcaatctcggtacaacagaatcacccggtcatggcgactggacagccacgctcacccttaaccccacagcggcttacaaagcactgctggatattgacggtaaaacactcaatcagcggaagttgattgatttcctggaagattgggcaccgctgctgtcggccacatcacaagaaagccttgatgaactaccgctgacgaccgcgattaacgcgattcgcaaattaacgatcaagaaaacctcagagtcagaatcaactcagggcgaattcaatacatcacgctctaagttcgatgatatcgaagccaaatcatctcttggcttaccgattggttttaccttcaggacccagccgtatcttggattaccggaacgcagattcctgctacggctgtccgtatttaccgacgaagaaaaagaaaagccactcatcgcactgcgccttatacagcgccaagcacagcaggaagcgatcgcccaggattttaaaagcgtgttgtttcgtgcgcttgaaggacacgccacgctgaccattggcacattctccccatccctttaa

SEQ ID NO: 39230 - protein, 273 aa, Xylella fastidiosa Ann-1
MDKTAIEHIQQTAIDANKFRLPPALQDIAVAIPDNYDIRNLESLYTLRSRFRGEMKTQSITDFVQYIKTKGNGEGFINAENLSAKIFFNLGTTESPGHGDWTATLTLNPTAAYKALLDIDGKTLNQRKLIDFLEDWAPLLSATSQESLDELPLTTAINAIRKLTIKKTSESESTQGEFNTSRSKFDDIEAKSSLGLPIGFTFRTQPYLGLPERRFLLRLSVFTDEEKEKPLIALRLIQRQAQQEAIAQDFKSVLFRALEGHATLTIGTFSPSL

SEQ ID NO: 39231 - DNA, 24 bp, Artificial sequence
  primer
atgtctcagaacttagacgcaacc

SEQ ID NO: 39232 - DNA, 26 bp, Artificial sequence
  primer
ttaggcggtgaaagtaccaataaagg

SEQ ID NO: 39233 - protein, 272 aa, Artificial sequence
  consensus sequence
  Variant (6)..(7): Xaa in position 6 to 7 is any amino acid
  Variant (9)..(11): Xaa in position 9 to 11 is any amino acid
  Variant (13)..(14): Xaa in position 13 to 14 is any amino acid
  Variant (16)..(19): Xaa in position 16 to 19 is any amino acid
  Variant (21)..(25): Xaa in position 21 to 25 is any amino acid
  Variant (26)..(27): Xaa in position 26 to 27 is any or no amino acid
  Variant (31)..(31): Xaa in position 31 is any amino acid
  Variant (33)..(36): Xaa in position 33 to 36 is any amino acid
  Variant (38)..(39): Xaa in position 38 to 39 is any amino acid
  Variant (42)..(46): Xaa in position 42 to 46 is any amino acid
  Variant (53)..(55): Xaa in position 53 to 55 is any amino acid
  Variant (57)..(57): Xaa in position 57 is any amino acid
  Variant (60)..(60): Xaa in position 60 is any amino acid
  Variant (63)..(64): Xaa in position 63 to 64 is any amino acid
  Variant (66)..(66): Xaa in position 66 is any amino acid
  Variant (68)..(73): Xaa in position 68 to 73 is any amino acid
  Variant (74)..(75): Xaa in position 74 to 75 is any or no amino acid
  Variant (81)..(81): Xaa in position 81 is any amino acid
  Variant (83)..(84): Xaa in position 83 to 84 is any amino acid
  Variant (86)..(88): Xaa in position 86 to 88 is any amino acid
  Variant (94)..(94): Xaa in position 94 is any amino acid
  Variant (96)..(96): Xaa in position 96 is any amino acid
  Variant (100)..(100): Xaa in position 100 is any amino acid
  Variant (102)..(102): Xaa in position 102 is any amino acid
  Variant (107)..(107): Xaa in position 107 is any amino acid
  Variant (109)..(110): Xaa in position 109 to 110 is any amino acid
  Variant (115)..(115): Xaa in position 115 is any amino acid
  Variant (119)..(119): Xaa in position 119 is any amino acid
  Variant (121)..(121): Xaa in position 121 is any amino acid
  Variant (123)..(126): Xaa in position 123 to 126 is any amino acid
  Variant (128)..(129): Xaa in position 128 to 129 is any amino acid
  Variant (131)..(131): Xaa in position 131 is any amino acid
  Variant (133)..(134): Xaa in position 133 to 134 is any amino acid
  Variant (139)..(140): Xaa in position 139 to 140 is any amino acid
  Variant (144)..(147): Xaa in position 144 to 147 is any amino acid
  Variant (148)..(148): Xaa in position 148 is any or no amino acid
  Variant (151)..(152): Xaa in position 151 to 152 is any amino acid
  Variant (155)..(156): Xaa in position 155 to 156 is any amino acid
  Variant (159)..(159): Xaa in position 159 is any amino acid
  Variant (164)..(164): Xaa in position 164 is any amino acid
  Variant (168)..(169): Xaa in position 168 to 169 is any amino acid
  Variant (173)..(174): Xaa in position 173 to 174 is any amino acid
  Variant (176)..(177): Xaa in position 176 to 177 is any amino acid
  Variant (180)..(181): Xaa in position 180 to 181 is any amino acid
  Variant (185)..(186): Xaa in position 185 to 186 is any amino acid
  Variant (188)..(188): Xaa in position 188 is any amino acid
  Variant (194)..(196): Xaa in position 194 to 196 is any amino acid
  Variant (199)..(200): Xaa in position 199 to 200 is any amino acid
  Variant (202)..(202): Xaa in position 202 is any amino acid
  Variant (204)..(206): Xaa in position 204 to 206 is any amino acid
  Variant (208)..(209): Xaa in position 208 to 209 is any amino acid
  Variant (212)..(212): Xaa in position 212 is any amino acid
  Variant (215)..(215): Xaa in position 215 is any amino acid
  Variant (217)..(217): Xaa in position 217 is any amino acid
  Variant (223)..(223): Xaa in position 223 is any amino acid
  Variant (225)..(227): Xaa in position 225 to 227 is any amino acid
  Variant (228)..(230): Xaa in position 228 to 230 is any or no amino acid
  Variant (232)..(234): Xaa in position 232 to 234 is any amino acid
  Variant (237)..(237): Xaa in position 237 is any amino acid
  Variant (240)..(241): Xaa in position 240 to 241 is any amino acid
  Variant (246)..(246): Xaa in position 246 is any amino acid
  Variant (250)..(250): Xaa in position 250 is any amino acid
  Variant (256)..(262): Xaa in position 256 to 262 is any amino acid
  Variant (263)..(263): Xaa in position 263 is any or no amino acid
  Variant (265)..(265): Xaa in position 265 is any amino acid
  Variant (267)..(267): Xaa in position 267 is any amino acid
DKTAIXXIXXXAXXAXXXXLXXXXXXXAVAXPXXXXIXXLEXXXXXRSRFRGXXXTXSIXDFXXYXKXXXXXXXXGFINAXNXXAXXXFNLGTXEXPGHXDXTATLXLXXTAAYXALLXIXGXXXXQXXLXDXXEDWAXXLSAXXXXXLDXXPLXXAIXAIRKXTIKXXSESXXTXXEFXXSRSXXDXIEAKSXXXLPXXFXFXXXPXXGLXERXFXLRLSVXTXXXXXXPXXXLRXIQXXAQQEXIAQXFKSVLXXXXXXXXAXLXIGTFS

SEQ ID NO: 39234 - protein, 33 aa, Artificial sequence
  protein pattern
  Variant (2)..(3): Xaa in position 2 to 3 is any amino acid
  Variant (6)..(8): Xaa in position 6 to 8 is any amino acid
  Variant (9)..(9): Xaa in position 9 is any or no amino acid
  Variant (11)..(11): Xaa in position 11 is any or no amino acid
  Variant (13)..(13): Xaa in position 13 is any amino acid
  Variant (18)..(18): Xaa in position 18 is Ala or Glu
  Variant (19)..(19): Xaa in position 19 is Leu or Met
  Variant (20)..(20): Xaa in position 20 is any amino acid
  Variant (22)..(22): Xaa in position 22 is Ala or Gln
  Variant (25)..(25): Xaa in position 25 is Asp, Thr or Val
  Variant (28)..(28): Xaa in position 28 is Thr or Val
  Variant (29)..(29): Xaa in position 29 is Gln or Arg
  Variant (31)..(31): Xaa in position 31 is any amino acid
  Variant (33)..(33): Xaa in position 33 is Asp or Thr
IXXLEXXXXLXRXRFRGXXXTXSIXDFXXYXKX

SEQ ID NO: 39235 - protein, 27 aa, Artificial sequence
  protein pattern
  Variant (2)..(2): Xaa in position 2 is Leu or Val
  Variant (3)..(3): Xaa in position 3 is Ile or Leu
  Variant (4)..(4): Xaa in position 4 is Ala, Thr or Val
  Variant (7)..(7): Xaa in position 7 is Ile or Leu
  Variant (10)..(10): Xaa in position 10 is any amino acid
  Variant (11)..(11): Xaa in position 11 is Glu or Gln
  Variant (13)..(13): Xaa in position 13 is any or no amino acid
  Variant (15)..(15): Xaa in position 15 is any or no amino acid
  Variant (17)..(17): Xaa in position 17 is any amino acid
  Variant (18)..(18): Xaa in position 18 is Ile or Met
  Variant (20)..(20): Xaa in position 20 is Asn or Gln
  Variant (21)..(21): Xaa in position 21 is Asp or Glu
  Variant (23)..(23): Xaa in position 23 is Lys or Arg
  Variant (24)..(24): Xaa in position 24 is Asp or Ser
  Variant (25)..(25): Xaa in position 25 is Leu or Val
  Variant (27)..(27): Xaa in position 27 is Phe or Val
PXXXLRXIQXXAXQXEXXAXXFXXXLX

SEQ ID NO: 39236 - protein, 19 aa, Artificial sequence
  protein pattern
  Variant (2)..(2): Xaa in position 2 is any amino acid
  Variant (6)..(6): Xaa in position 6 is any amino acid
  Variant (7)..(8): Xaa in position 7 to 8 is any or no amino acid
  Variant (10)..(11): Xaa in position 10 to 11 is any or no amino acid
  Variant (13)..(13): Xaa in position 13 is Gln or Ser
  Variant (14)..(14): Xaa in position 14 is Ala or Gln
  Variant (15)..(15): Xaa in position 15 is Gln or Thr
  Variant (16)..(16): Xaa in position 16 is Ala or Gly
  Variant (17)..(17): Xaa in position 17 is Ile or Val
  Variant (18)..(18): Xaa in position 18 is Asp or Asn
  Variant (19)..(19): Xaa in position 19 is Ala or Glu
DXTAIXXXHXXIXXXXXXX

SEQ ID NO: 39237 - DNA, 393 bp, Escherichia coli
  CDS (1)..(393): transl_table=11
atgaaaagattacgcaataaaatgaccaccgaagaactggctgaatgcctcggtgtggctaaacaaactgttaaccgttggatcagagaaaaaggctggaaaacggaaaaatttcccggcgtgaaaggcggtcgtgccagacttattctggtcgatacgcaagtttgcgagtttattcagaacacgccagccttccataacacaccaatgttgatggaagctgaagagagaattgctgaatacgctcctggagcacgcgccccggcgtatcgacaaatcatcaacgcgatagataatatgacagacattgagcaggaaaaagtcgcgcaatttttgtcacgtgaaggaattcgcaatttcctcgcccgtctcgatattgacgaatcagcataa

SEQ ID NO: 39238 - protein, 130 aa, Escherichia coli
MKRLRNKMTTEELAECLGVAKQTVNRWIREKGWKTEKFPGVKGGRARLILVDTQVCEFIQNTPAFHNTPMLMEAEERIAEYAPGARAPAYRQIINAIDNMTDIEQEKVAQFLSREGIRNFLARLDIDESA

SEQ ID NO: 39239 - DNA, 393 bp, Escherichia coli O157:H7 EDL933
  CDS (1)..(393): transl_table=11
atgaaaagattacgcaataaaatgaccaccgaagaactggctgaatgcctcggtgtggctaaacaaactgttaaccgttggatcagagaaaaaggctggaaaacggaaaaatttcccggcgtgaaaggcggtcgtgccagacttattctggtcgatacgcaagtttgcgagtttattcagaacacgccagccttccataacacaccgatgcttctggaagccgaagaaccccttgccgaatacgcaccggggattcgcactcctgcttatcggcaaatcatcagtgcaatagacaacatgactcacagtgagcaggaaaaagttgcgcaatttttgtcacgcgaaggaattcgtaatttccttgctcgtctcgacatagatgaatcagcttga

SEQ ID NO: 39240 - protein, 130 aa, Escherichia coli O157:H7 EDL933
MKRLRNKMTTEELAECLGVAKQTVNRWIREKGWKTEKFPGVKGGRARLILVDTQVCEFIQNTPAFHNTPMLLEAEEPLAEYAPGIRTPAYRQIISAIDNMTHSEQEKVAQFLSREGIRNFLARLDIDESA

SEQ ID NO: 39241 - DNA, 378 bp, Shigella flexneri 2a str. 301
  CDS (1)..(378): transl_table=11
atgaccaccgaagaactggctgaatgcctcggtgtggctaaacaaactgttaaccgttggaccagagaaaaaggctggaaaacggaaaaatttcccggcgtgaaaggcggtcgtgccagacttattctggtcgatacgcaagtttgcgagtttattcagaacacgccagccttccataacacaccaatgttgatggaagctgaagagagaattgctgaatacgctcctggagcacgcgccccggcgtatcgacaaatcatcaacgcgatagataatatgacagacattgagcaggaaaaagtcgcgcaatttttgtcacgtgaaggaattataattcgcaatttcctcgcccgtctcgatattgacgaatcagcataa

SEQ ID NO: 39242 - protein, 125 aa, Shigella flexneri 2a str. 301
MTTEELAECLGVAKQTVNRWTREKGWKTEKFPGVKGGRARLILVDTQVCEFIQNTPAFHNTPMLMEAEERIAEYAPGARAPAYRQIINAIDNMTDIEQEKVAQFLSREGIIIRNFLARLDIDESA

SEQ ID NO: 39243 - DNA, 393 bp, Salmonella enterica subsp. enterica serovar Typhi Ty2
  CDS (1)..(393): transl_table=11
atgaaaagattacgcagtaaaatgaccactgaagagctggctgaatgcctcggcgtggccagacaaaccgtcaatcgctggatcagagaacaacactggaaaaccgaaaaatttcccggcgtcaaaggcggacgcgcaagactcatccatattgatgccagcgtgcgggagtttattctcaatattccggcttttcgcaaactgcctgcgttttatcaggcggaagaggctttcgcagaatatgcgaacgcgacgcacagtcacgcttatcgacaaattattgatgccgttgaaaatatgtctgctcaggaacaggaaaaactggcgctgtttttatcgcgggaaggtattcgcggatttctgacgcgtttaggtatcaatgaggcggactaa

SEQ ID NO: 39244 - protein, 130 aa, Salmonella enterica subsp. enterica serovar Typhi Ty2
MKRLRSKMTTEELAECLGVARQTVNRWIREQHWKTEKFPGVKGGRARLIHIDASVREFILNIPAFRKLPAFYQAEEAFAEYANATHSHAYRQIIDAVENMSAQEQEKLALFLSREGIRGFLTRLGINEAD

SEQ ID NO: 39245 - DNA, 372 bp, Shigella flexneri 2a str. 2457T
  CDS (1)..(372): transl_table=11
atgaccaccgaagaactggctgaatgcctcggtgtggctaaacaaactgttaaccgttggaccagagaaaaaggctggaaaacggaaaaatttcccggcgtgaaaggcggtcgtgccagacttattctggtcgatacgcaagtttgcgagtttattcagaacacgccagccttccataacacaccaatgttgatggaagctgaagagagaattgctgaatacgctcctggagcacgcgccccggcgtatcgacaaatcatcaacgcgatagataatatgacagacattgagcaggaaaaagtcgcgcaatttttgtcacgtgaaggaattcgcaatttcctcgcccgtctcgatattgacgaatcagcataa

SEQ ID NO: 39246 - protein, 123 aa, Shigella flexneri 2a str. 2457T
MTTEELAECLGVAKQTVNRWTREKGWKTEKFPGVKGGRARLILVDTQVCEFIQNTPAFHNTPMLMEAEERIAEYAPGARAPAYRQIINAIDNMTDIEQEKVAQFLSREGIRNFLARLDIDESA

SEQ ID NO: 39247 - DNA, 345 bp, Escherichia coli O6
  CDS (1)..(345): transl_table=11
atgacaccagatgaacttgccagactgaccggctatagccgccagaccattaataaatgggtacgcaaggaaggctggacaacgtcaccaaaacctggcgtccagggtggcaaagcccgactggttcacgtcaatgaacaggttcgtgaatatattcgcaatgctgaacgtccagaaggtcagggagaagcgcctgccctttctggtgatgcgccgcttgaagtattgctggtgacactggcgaaagagatgacgccagttgaacaaaaacagtttacatccttgcttctgcgggaagggattatcggattgttacaacgcttagggattcgcgatagcaaataa

SEQ ID NO: 39248 - protein, 114 aa, Escherichia coli O6
MTPDELARLTGYSRQTINKWVRKEGWTTSPKPGVQGGKARLVHVNEQVREYIRNAERPEGQGEAPALSGDAPLEVLLVTLAKEMTPVEQKQFTSLLLREGIIGLLQRLGIRDSK

SEQ ID NO: 39249 - DNA, 27 bp, Artificial sequence
  primer
atgaaaagattacgcaataaaatgacc

SEQ ID NO: 39250 - DNA, 25 bp, Artificial sequence
  primer
ttatgctgattcgtcaatatcgaga

SEQ ID NO: 39251 - protein, 124 aa, Artificial sequence
  consensus sequence
  Variant (14)..(14): Xaa in position 14 is any amino acid
  Variant (21)..(21): Xaa in position 21 is any amino acid
  Variant (24)..(24): Xaa in position 24 is any amino acid
  Variant (43)..(43): Xaa in position 43 is any amino acid
  Variant (46)..(46): Xaa in position 46 is any amino acid
  Variant (49)..(49): Xaa in position 49 is any amino acid
  Variant (53)..(53): Xaa in position 53 is any amino acid
  Variant (55)..(55): Xaa in position 55 is any amino acid
  Variant (59)..(61): Xaa in position 59 to 61 is any amino acid
  Variant (63)..(63): Xaa in position 63 is any amino acid
  Variant (64)..(66): Xaa in position 64 to 66 is any or no amino acid
  Variant (70)..(71): Xaa in position 70 to 71 is any amino acid
  Variant (76)..(80): Xaa in position 76 to 80 is any amino acid
  Variant (88)..(88): Xaa in position 88 is any amino acid
  Variant (90)..(91): Xaa in position 90 to 91 is any amino acid
  Variant (95)..(96): Xaa in position 95 to 96 is any amino acid
  Variant (101)..(101): Xaa in position 101 is any amino acid
  Variant (103)..(103): Xaa in position 103 is any amino acid
  Variant (110)..(111): Xaa in position 110 to 111 is any amino acid
  Variant (114)..(114): Xaa in position 114 is any amino acid
  Variant (117)..(117): Xaa in position 117 is any amino acid
  Variant (120)..(120): Xaa in position 120 is any amino acid
  Variant (122)..(122): Xaa in position 122 is any amino acid
MTTEELAECLGVAXQTVNRWXREXGWKTEKFPGVKGGRARLIXVDXQVXEFIXNXPAFXXXPXXXXAEEXXAEYAXXXXXPAYRQIIXAXXNMTXXEQEKXAXFLSREGXXIRXFLXRLXIXES

SEQ ID NO: 39252 - protein, 58 aa, Artificial sequence
  protein pattern
  Variant (13)..(13): Xaa in position 13 is Lys or Arg
  Variant (20)..(20): Xaa in position 20 is any amino acid
  Variant (23)..(24): Xaa in position 23 to 24 is any amino acid
  Variant (42)..(42): Xaa in position 42 is any amino acid
  Variant (43)..(43): Xaa in position 43 is Ile or Val
  Variant (45)..(45): Xaa in position 45 is Ala or Thr
  Variant (46)..(46): Xaa in position 46 is Gln or Ser
  Variant (48)..(48): Xaa in position 48 is any amino acid
  Variant (52)..(52): Xaa in position 52 is any amino acid
  Variant (54)..(54): Xaa in position 54 is any amino acid
  Variant (58)..(58): Xaa in position 58 is His or Arg
TTEELAECLGVAXQTVNRWXREXXWKTEKFPGVKGGRARLIXXDXXVXEFIXNXPAFX

SEQ ID NO: 39253 - protein, 41 aa, Artificial sequence
  protein pattern
  Variant (3)..(3): Xaa in position 3 is Asn or Pro
  Variant (4)..(4): Xaa in position 4 is Ala or Gly
  Variant (5)..(5): Xaa in position 5 is any amino acid
  Variant (6)..(6): Xaa in position 6 is His or Arg
  Variant (7)..(7): Xaa in position 7 is Ala, Ser or Thr
  Variant (8)..(8): Xaa in position 8 is any amino acid
  Variant (15)..(15): Xaa in position 15 is Asp, Asn or Ser
  Variant (17)..(17): Xaa in position 17 is Ile or Val
  Variant (18)..(18): Xaa in position 18 is Asp or Glu
  Variant (21)..(21): Xaa in position 21 is Ser or Thr
  Variant (22)..(23): Xaa in position 22 to 23 is any amino acid
  Variant (28)..(28): Xaa in position 28 is Leu or Val
  Variant (30)..(30): Xaa in position 30 is any amino acid
  Variant (38)..(39): Xaa in position 38 to 39 is any or no amino acid
  Variant (41)..(41): Xaa in position 41 is Gly or Asn
YAXXXXXXAYRQIIXAXXNMXXXEQEKXAXFLSREGIXXRX

SEQ ID NO: 39254 - protein, 11 aa, Artificial sequence
  protein pattern
  Variant (2)..(2): Xaa in position 2 is any amino acid
  Variant (3)..(3): Xaa in position 3 is Phe or Leu
  Variant (4)..(4): Xaa in position 4 is any amino acid
  Variant (5)..(5): Xaa in position 5 is Glu or Gln
  Variant (9)..(9): Xaa in position 9 is any amino acid
  Variant (10)..(10): Xaa in position 10 is Phe, Ile or Leu
PXXXXAEEXXA

SEQ ID NO: 39255 - DNA, 885 bp, Escherichia coli
  CDS (1)..(885): transl_table=11
atggaacgcgtatacagaacagatcttaagttgctccgttattttcttgccgtagcggaagagttgcattttggccgcgcagcagcgcgtttaaatatgtctcagcctccgctcagcattcatattaaagagctggaaaatcaactcggcacgcagctttttattcgccattcgcgcagcgtcgtactgacacacgcgggcaaaatcttgatggaagaatcgcgtcgattgctggtgaatgctaataatgtattggctcggattgaacaaataggtcggggagaagcagggcggattgaactcggcgtagtgggaacggcaatgtggggacggatgcgcccggttatgcggcgattcctcagggaaaatcctaacgttgacgttctttttcgcgaaaagatgcccgcgatgcaaatggccttgctggaacgccgcgaacttgatgccgggatctggcgaatggcgacagaaccaccgactggttttaccagcttacggttgcatgaatcggcgtttctggtggcgatgcctgaagagcatcatctctcatcattttccaccgtcccgctggaagcgctacgtgacgagtattttgttacaatgccgcccgtttacactgactgggattttttgcagcgagtttgccagcaggtgggattttcaccggttgttattcgcgaagttaatgaaccgcaaacggtactcgctatggtcagtatgggcattggtatcacattgatagcggacagctacgcacaaatgaactggccaggtgtcattttccgtccgctcaaacagcgcatccctgcagatttatatattgtttatgaaacacagcaggtgacgcccgcgatggttaagctgttggctgcattgacacagtaa

SEQ ID NO: 39256 - protein, 294 aa, Escherichia coli
MERVYRTDLKLLRYFLAVAEELHFGRAAARLNMSQPPLSIHIKELENQLGTQLFIRHSRSVVLTHAGKILMEESRRLLVNANNVLARIEQIGRGEAGRIELGVVGTAMWGRMRPVMRRFLRENPNVDVLFREKMPAMQMALLERRELDAGIWRMATEPPTGFTSLRLHESAFLVAMPEEHHLSSFSTVPLEALRDEYFVTMPPVYTDWDFLQRVCQQVGFSPVVIREVNEPQTVLAMVSMGIGITLIADSYAQMNWPGVIFRPLKQRIPADLYIVYETQQVTPAMVKLLAALTQ

SEQ ID NO: 39257 - DNA, 894 bp, Escherichia coli O157:H7 EDL933
  CDS (1)..(894): transl_table=11
atgaatattgaacttcgtcatctgcgttactttgttgctgttgcggaagagctgcatttcgggcgcgccgctgcccgcctgaatatttcgcaaccgccgctaagtcagcagattcaggcgctggagcaacaaattggtgcccgactgctggcacgaaccaatcgcagtgtattgctgacggcagcaggaaaacagtttcttgcagatagtcggcaaatcctgtctatggtggatgacgctgccgctcgcgctgaaagactgcatcagggtgaagcgggggagttgcgcattggttttacttcgtcggctccttttattcgggcggtgtccgatacgttatcgctgtttcgccgagattatcccgatgtccatttacaaacccgcgaaatgaacactcgcgagcaaatcgctccgctcattgaaggaacgctggatatgggattgctgcgtaacacagcgttaccggagacgcttgaacacgcagtcatcgtccatgaaccgcttatggcgatgatcccgcacgatcatcccctggcaaataacccgaatgtaacgctggctgaactggcgaaagaaccctttgtcttttttgatccgcacgtcgggacagggctgtatgacgatattctcgggctgatgcgacgttaccatttgacgcccgtcatcactcaggaggtgggcgaggcaatgaccatcatcggtctggtttccgccggtctgggtgtttcaattttgcctgcgtcatttaaacgtgttcagctcaacgaaatgcgctgggtgccgattgctgaagaggatgcggtttctgaaatgtggttggtctggccgaaacatcatgaacaaagtccagctgcgcgtaactttcgtattcatctgctgaatgctctcaggtga

SEQ ID NO: 39258 - protein, 297 aa, Escherichia coli O157:H7 EDL933
MNIELRHLRYFVAVAEELHFGRAAARLNISQPPLSQQIQALEQQIGARLLARTNRSVLLTAAGKQFLADSRQILSMVDDAAARAERLHQGEAGELRIGFTSSAPFIRAVSDTLSLFRRDYPDVHLQTREMNTREQIAPLIEGTLDMGLLRNTALPETLEHAVIVHEPLMAMIPHDHPLANNPNVTLAELAKEPFVFFDPHVGTGLYDDILGLMRRYHLTPVITQEVGEAMTIIGLVSAGLGVSILPASFKRVQLNEMRWVPIAEEDAVSEMWLVWPKHHEQSPAARNFRIHLLNALR

SEQ ID NO: 39259 - DNA, 930 bp, Agrobacterium tumefaciens str. C58
  CDS (1)..(930): transl_table=11
gtgcggaaggccgcgaagatgggcaggaaaccggcaggtcgtgcggatacattcgagctacggcacctgcgctatttcaccacgctggtggacgagcgcaatttcgagcgtgccgcagctcgccttggcattgcccaacccggcttgagccagcagatcatggcgctcgaagatatcgtcggtatgcctctgctcgaccggacgcgccggtcggtgaagctaacgacatcgggccagctgctctatgaagacgcccgtaaaatccttgccaatgccgaggcggcacttgcctcactcagacgtgttggccgtggcgagactgggcgtatctccatcggttatgtcgcctctgcggcctattccggcctgctgatccagtccatcgccagtttccgcgcctcccatccggatgtggagctgcagctcatcgagatggaaatgcggctgcaactcgcaaagatagctgatggcaatctggatttcgccttcatccgcccgcccgcgccgatcccggaaggcgttgcgacccatgtggttctgcgcgaacccttgatggccgccctgccggaaaaccatcccttggcctatgcgctgcaactcgatctcaagaaccttgccgcggaaaccttcatcacgccgcgacaaccgccggatgtcggctttcactacaatacgatagaggcctgcaacgaggccggttttcagccggtgatcagcccggaaggccgggactacaccaccattaccagcatggtggcgatcggcctcggcgtcgcgctggtgccacgctctctcgactgtctgcgattgcccggcgtgcgctacgtgccgcttgcggcaagcgccaccacctcggacctcgccatagcgcaccggaaaacggaagcctcgcccgccgtcagggccttcattctccacgcgcgcagctaa

SEQ ID NO: 39260 - protein, 309 aa, Agrobacterium tumefaciens str. C58
MRKAAKMGRKPAGRADTFELRHLRYFTTLVDERNFERAAARLGIAQPGLSQQIMALEDIVGMPLLDRTRRSVKLTTSGQLLYEDARKILANAEAALASLRRVGRGETGRISIGYVASAAYSGLLIQSIASFRASHPDVELQLIEMEMRLQLAKIADGNLDFAFIRPPAPIPEGVATHVVLREPLMAALPENHPLAYALQLDLKNLAAETFITPRQPPDVGFHYNTIEACNEAGFQPVISPEGRDYTTITSMVAIGLGVALVPRSLDCLRLPGVRYVPLAASATTSDLAIAHRKTEASPAVRAFILHARS

SEQ ID NO: 39261 - DNA, 885 bp, Salmonella typhimurium LT2
  CDS (1)..(885): transl_table=11
atggaacgagcccatcgtattgatctaaagctattacgttatttcctcgctgttgcagaagaattgcattttggccgggctgctgcccggttaaatatgtcacaacctcccttgagtatccatatcaaagaacttgaacagcaactgggtacattgctgtttattcgtcattcccgcagcgttgcattaacccatgccgggaaagttttaatggaggagtcacgtcgcttgttagccagtgcaaatcaggcgctggcgcgagtggagcagattggtcgcggtgaagcggggcgcattgaactgggtgtggttggtacggcgctgtggggaagaatgcgtcctgcgatgcgtcactttttgaaagcaaatcccaatgttgaagtactttttcgcgaaaagtctcccggtatgcaaatggcgttgttagagcgtcgggaacttgatgcagggatctggcgtatggctatcgaaccagcagtcggttttaccagcatacgtttgcatgaatctgcattcatggttgcagttccggaagatcacgatctggcatccagagattctgtgccgttggcggcgttgcgcaatgaatattttgttacgttgccttccgtacattctgattggggatttttacaacgtgtatgccaacaggcaggcttttcgccaatgattattcgggaagtggttgagccgcaaacggtgttggcgatgatcagtatggggatcgggattacgttgatggctgatggctatgcgcaaatgagctggccgggtgtggtgttccgtccgttagaggaacgtattccggcggatttgtatattgtgtatgaccagcagcaggcaacgccagcactggagaaactggtggcggcgttgacggtataa

SEQ ID NO: 39262 - protein, 294 aa, Salmonella typhimurium LT2
MERAHRIDLKLLRYFLAVAEELHFGRAAARLNMSQPPLSIHIKELEQQLGTLLFIRHSRSVALTHAGKVLMEESRRLLASANQALARVEQIGRGEAGRIELGVVGTALWGRMRPAMRHFLKANPNVEVLFREKSPGMQMALLERRELDAGIWRMAIEPAVGFTSIRLHESAFMVAVPEDHDLASRDSVPLAALRNEYFVTLPSVHSDWGFLQRVCQQAGFSPMIIREVVEPQTVLAMISMGIGITLMADGYAQMSWPGVVFRPLEERIPADLYIVYDQQQATPALEKLVAALTV

SEQ ID NO: 39263 - DNA, 912 bp, Agrobacterium tumefaciens str. C58
  CDS (1)..(912): transl_table=11
atgggcaggaaaccggcaggtcgtgcggatacattcgagctacggcacctgcgctatttcaccacgctggtggacgagcgcaatttcgagcgtgccgcagctcgccttggcattgcccaacccggcttgagccagcagatcatggcgctcgaagatatcgtcggtatgcctctgctcgaccggacgcgccggtcggtgaagctaacgacatcgggccagctgctctatgaagacgcccgtaaaatccttgccaatgccgaggcggcacttgcctcactcagacgtgttggccgtggcgagactgggcgtatctccatcggttatgtcgcctctgcggcctattccggcctgctgatccagtccatcgccagtttccgcgcctcccatccggatgtggagctgcagctcatcgagatggaaatgcggctgcaactcgcaaagatagctgatggcaatctggatttcgccttcatccgcccgcccgcgccgatcccggaaggcgttgcgacccatgtggttctgcgcgaacccttgatggccgccctgccggaaaaccatcccttggcctatgcgctgcaactcgatctcaagaaccttgccgcggaaaccttcatcacgccgcgacaaccgccggatgtcggctttcactacaatacgatagaggcctgcaacgaggccggttttcagccggtgatcagcccggaaggccgggactacaccaccattaccagcatggtggcgatcggcctcggcgtcgcgctggtgccacgctctctcgactgtctgcgattgcccggcgtgcgctacgtgccgcttgcggcaagcgccaccacctcggacctcgccatagcgcaccggaaaacggaagcctcgcccgccgtcagggccttcattctccacgcgcgcagctaa

SEQ ID NO: 39264 - protein, 303 aa, Agrobacterium tumefaciens str. C58
MGRKPAGRADTFELRHLRYFTTLVDERNFERAAARLGIAQPGLSQQIMALEDIVGMPLLDRTRRSVKLTTSGQLLYEDARKILANAEAALASLRRVGRGETGRISIGYVASAAYSGLLIQSIASFRASHPDVELQLIEMEMRLQLAKIADGNLDFAFIRPPAPIPEGVATHVVLREPLMAALPENHPLAYALQLDLKNLAAETFITPRQPPDVGFHYNTIEACNEAGFQPVISPEGRDYTTITSMVAIGLGVALVPRSLDCLRLPGVRYVPLAASATTSDLAIAHRKTEASPAVRAFILHARS

SEQ ID NO: 39265 - DNA, 1038 bp, Streptomyces coelicolor A3(2)
  CDS (1)..(1038): transl_table=11
atgtatccggtcctcgaccatcgcttcgcccctcacgtaagctcgttggctgtggatctcttgcgccacctgcgcatctttgtcgccgttgccgaagagctgcacttcagccgggccgccgaccagcttggcatggcccagccgcctctcagccaggcggtgcgcaggctggagacggagctcggcgccgaactgttcgaccggtcgcgccggcaggtcaaactgacgcccgcaggcgccgtgttgctggatgaggcccgttcactgctgaccggagaaaagcggctgcggacgctggcccgccgcgccggggatggcgaactggggaccctgcgcgcgggcataccccccggcacgatggttgccacgctgtcgctgctgctcggcgcatgtgcggaacactatccgggcatgtccgtcgatctccaggagatcaccaccggcgagcaactgcggctgatcgcgtccggcgggctcgatgtcggcctcgtccaccagcccgtggacatcacagagctccgcattggtccggaggcgtccgtggaactcggcgtcgtcctgccccgcatctcaccgctggcccaactcccggaggtcccactcgcccatctggccggtcaagacctcgtgctccttccccgtgagcaggcccctggctggtacgaccggattctggacacctgccgggccgggggcttcgttcccaccggactgcggcatgcctcacgccccgagcttctgttggccctggtcagcgcggggcacggcatcgccttcggccagggggcggtggccggcaaggagccgcgtgtcgtctggcggccactgtcaggccgccctctcatccagcggaccagcgcggtctggtcggccgtccgatcctcccacccggccgcccctcacttcgccgagctcgcagccgacgtactcgcccgcgaccgtacggcgaccctgcacggcgacgacggcgcgcccgcggagacagggtcgccccggccttgggcagtggtgtacgacgaagcaacgtggcgctggtag

SEQ ID NO: 39266 - protein, 345 aa, Streptomyces coelicolor A3(2)
MYPVLDHRFAPHVSSLAVDLLRHLRIFVAVAEELHFSRAADQLGMAQPPLSQAVRRLETELGAELFDRSRRQVKLTPAGAVLLDEARSLLTGEKRLRTLARRAGDGELGTLRAGIPPGTMVATLSLLLGACAEHYPGMSVDLQEITTGEQLRLIASGGLDVGLVHQPVDITELRIGPEASVELGVVLPRISPLAQLPEVPLAHLAGQDLVLLPREQAPGWYDRILDTCRAGGFVPTGLRHASRPELLLALVSAGHGIAFGQGAVAGKEPRVVWRPLSGRPLIQRTSAVWSAVRSSHPAAPHFAELAADVLARDRTATLHGDDGAPAETGSPRPWAVVYDEATWRW

SEQ ID NO: 39267 - DNA, 972 bp, Streptomyces coelicolor A3(2)
  CDS (1)..(972): transl_table=11
atgcccgcacccgcccacctcgacccgcggctcctgcgcgccttcgtcgccgtcgccgaggaactgcacttcacccgcgccgccgcccgcctctacgtcgcccagcaggcgctcagcagggacgtgcggcgcctggagcgggaattgggcgccgagctgttcgtccgcaccacccggcaggtgacgccgacggccgacggcgagcggctgctgccgtacgcccgccgggtcctccaggcccaggacgacctgctggccgccttcgggcaggcccgcccgctgctggtcgacctcaactccccgggcctggccaccggccgcctggtcctggagcgggcccggtcgctcgcgcccgagcaggagctgatggcgcgttacgagagcggactgacccacgccgccggtgaactggtcgcgggccgcctcgacgcctccttcggccggttcgcggggctgcccgcggcgctgcgggcggggctcggccaccagccggtgcgccacgagcccatggcggtcgtcctgcccgaggaccacccgctggcccggctggaacgggtgccgctctccgctctcgccggagagaccgtgtacgccggggccggcaacccgcgcacgccggagtggaccgacctcgcgcaccgcctgttcgagggacgcggcatccatgtggcgtcccccgtaccgctggcggtcggcgaggaggagttccggcgcatcatggacaagacacgcaatcccatcctcgccgtggagagctttccggccatgccctcgaccgtggtgcgcccgctcgtcgaccccgtgccgctctcgccggtgtcgctcgtctggcgaaagggactggtgcatcccgcgctcgacgcgctgcgccgggcagccgtgcaggtcgcgaccgaaaacggttggctggaggctcccggtgagggatggattccggccgccgacgccgctgtgatgtccgtccacaagtga

SEQ ID NO: 39268 - protein, 323 aa, Streptomyces coelicolor A3(2)
MPAPAHLDPRLLRAFVAVAEELHFTRAAARLYVAQQALSRDVRRLERELGAELFVRTTRQVTPTADGERLLPYARRVLQAQDDLLAAFGQARPLLVDLNSPGLATGRLVLERARSLAPEQELMARYESGLTHAAGELVAGRLDASFGRFAGLPAALRAGLGHQPVRHEPMAVVLPEDHPLARLERVPLSALAGETVYAGAGNPRTPEWTDLAHRLFEGRGIHVASPVPLAVGEEEFRRIMDKTRNPILAVESFPAMPSTVVRPLVDPVPLSPVSLVWRKGLVHPALDALRRAAVQVATENGWLEAPGEGWIPAADAAVMSVHK

SEQ ID NO: 39269 - DNA, 900 bp, Pseudomonas putida KT2440
  CDS (1)..(900): transl_table=11
atgatcgaaacacgcttgctcaggcagttcatcgccgtggccgaagagctgcactttcacaaggccgcacagcgcctgcacatggcgcaaccgccgctgagccaggcgatcaaccggctcgaggaaaagctcggtttcggccttcttctgcgcaacaagcgcggggtgcgcctgaccgcagcgggtgcagcgtttctcgacaccgcctaccgcacgcttgctgaactggaacaagggatcgagtacgcgcgcaacgtgtctgcgggggtcagcggcaaactgaccatcacggccatttccatcgcttattacgattcgctgctcaaccgcttgcgccgctttcgggagacttatccaaacgtacagctgaccatccgcgagatgccatctgcctctcaggccaaggccttgctggccggcgaggcggacatcggcttcatgcgcaggctaccgctgccggtcggcaccctggaggctcgcttgctgcttgacgagcagatcgtcatggcgctgcccgccagccatcccatggcgcgtttcgaggccgtcgacttgcgcgagtttgccgatgaggacttcgtgttcaccccgcaagcgctgggcgggggctaccacgcacagttggttgcgctgtgcgagtcggccgggttctaccccaaggtcgtgcaggaggcggcgcagatccacaccctgctgggtctggtggcctgcggctttggcgtggccctggtgccggcgtccttcgtccgctcaaccccgcgcgaacgcgtgcagttttgccccatccgccctatcgatgaccagccacccccagggcttgggctgtacatgaaatggaacgcccagaatgcttcgccagcgctggccaacttcattgccatgttcgagacacagcaataa

SEQ ID NO: 39270 - protein, 299 aa, Pseudomonas putida KT2440
MIETRLLRQFIAVAEELHFHKAAQRLHMAQPPLSQAINRLEEKLGFGLLLRNKRGVRLTAAGAAFLDTAYRTLAELEQGIEYARNVSAGVSGKLTITAISIAYYDSLLNRLRRFRETYPNVQLTIREMPSASQAKALLAGEADIGFMRRLPLPVGTLEARLLLDEQIVMALPASHPMARFEAVDLREFADEDFVFTPQALGGGYHAQLVALCESAGFYPKVVQEAAQIHTLLGLVACGFGVALVPASFVRSTPRERVQFCPIRPIDDQPPPGLGLYMKWNAQNASPALANFIAMFETQQ

SEQ ID NO: 39271 - DNA, 900 bp, Pseudomonas putida KT2440
  CDS (1)..(900): transl_table=11
atggaactgcgtcatctgcgttacttcattgctgtggccgaagagctgcactttggccgcgccgcccagcagctgggtatttcccaaccgcccttgagtcagcagatccaggctctggagcaggagttgggggcccggttgttcgaccgtaccaatcgtcgtgtcgaactgagcgaggccgggcgattgttcctcgaggaagcgcgccaggtattggcgcaggtggagaaggccgcggatgtcgcccggcgtgcgcagttgggcgagctgggggagatgaaaatcggtttcacctcctcggccccgttcacctcgaaaatccccaaggccattcacgccttccgtcagcgctttccggcggtgcacctgaacctcaaggaaatgagcagccgtgatgttgccgaaggggtattcgacgagtccatcgaggtggggttgatgcggccgatgccgctgccggaggggttggtggccaccgagttgttccgagaaccgttggtggcggtgatcaatgcttcgcatccgctggctgagggcactgagcaaggcgtctacatggcggcgttggcccctgagcccttcgtgttcttcccgcgcagttatggcagcggcttgcatgcacaattgctgagcctggcacggcatgcgggtttcagcccccattttgcgcaagaggcaggggaagcgatgaccatcatcggcctggtctcggcggggctgggggtgtcggtgttgccggcgtcgttccagcgcatgcgcatcgaaggggtggtgtaccgcaccttgctcgatgaagaggcgatgacggcggtgtggctggtgcagcgcgagcgtggtcattcggtcatggccaaggcatttgccgagttgttgacagggcaggtggtcggtcaggcgtga

SEQ ID NO: 39272 - protein, 299 aa, Pseudomonas putida KT2440
MELRHLRYFIAVAEELHFGRAAQQLGISQPPLSQQIQALEQELGARLFDRTNRRVELSEAGRLFLEEARQVLAQVEKAADVARRAQLGELGEMKIGFTSSAPFTSKIPKAIHAFRQRFPAVHLNLKEMSSRDVAEGVFDESIEVGLMRPMPLPEGLVATELFREPLVAVINASHPLAEGTEQGVYMAALAPEPFVFFPRSYGSGLHAQLLSLARHAGFSPHFAQEAGEAMTIIGLVSAGLGVSVLPASFQRMRIEGVVYRTLLDEEAMTAVWLVQRERGHSVMAKAFAELLTGQVVGQA

SEQ ID NO: 39273 - DNA, 900 bp, Escherichia coli CFT073
  CDS (1)..(900): transl_table=11
atggagcacttaattatggaacgcgtatatagaacagatcttaagttgctccgttattttcttgccgtagcggaagagttgcattttggtcgcgcagcagcgcgtttaaatatgtctcagcctccgctcagtattcatattaaagagctggaaaatcaactcggtacgcagctttttattcgccattcgcgcagcgtcgtactgacacacgcgggcaaaatcttgatggaagaatcgcgtcgattgctggtgaatgcaaataatatattggctcgggttgaacaaataggtcggggagaagcagggcggattgaactcggggttgtgggaacggcaatgtggggacggatgcgcccggttatgcggcgattccttagagaaaatcctaacgttgaagttctgtttcgcgaaaagatgccagcgatgcaaatggccttgctggaacgccgcgaacttgatgccgggatctggcgaatggcgacagaaccaccgactggttttaccagcttacggttgcatgaatcggcgtttctggtggcgatgcctgaagagcatcatctctcatcattttccaccgtcccgctggaagcgctacgtgacgagtatttcgttacaatgccgcccgtgtacactgactgggattttttgcagcgagtttgccagcaggtgggattttcaccggttgttattcgcgaagttaatgaaccgcaaacggtactcgccatagtcagtatgggtattggtatcacattgatagcggacagctacgcgcagatgaactggcccggtgtcatattccgtccgctcaaagaacgcatcccggcaggcttatatattgtttatgaaacgcagcaggtgacgcccgcgctggttaaactgctggcggcgttggcgcagtag

SEQ ID NO: 39274 - protein, 299 aa, Escherichia coli CFT073
MEHLIMERVYRTDLKLLRYFLAVAEELHFGRAAARLNMSQPPLSIHIKELENQLGTQLFIRHSRSVVLTHAGKILMEESRRLLVNANNILARVEQIGRGEAGRIELGVVGTAMWGRMRPVMRRFLRENPNVEVLFREKMPAMQMALLERRELDAGIWRMATEPPTGFTSLRLHESAFLVAMPEEHHLSSFSTVPLEALRDEYFVTMPPVYTDWDFLQRVCQQVGFSPVVIREVNEPQTVLAIVSMGIGITLIADSYAQMNWPGVIFRPLKERIPAGLYIVYETQQVTPALVKLLAALAQ

SEQ ID NO: 39275 - DNA, 885 bp, Salmonella enterica subsp. enterica serovar Typhi Ty2
  CDS (1)..(885): transl_table=11
atggaacgagcccatcgtattgatctaaagctattacgttatttcctcgctgttgcagaagaattgcattttggccgggctgctgcccggttaaatatgtcacaacctcccttgagtatccatatcaaagaacttgaacagcaactgggtacattgctgtttattcgtcattcccgcagcgttgcattaacccatgccgggaaagttttaatggaggagtcacgtcgcttgttagccaatgcaaatcaggcgctggcgcgagtggagcagattggtcgcggtgaagcggggcgcattgaactgggtgtggttggtacggcgctgtggggaagaatgcgtcctgcgatgcgtcactttttgaaagcaaatcccaatgttgaagtactttttcgcgaaaagtctccaggtatgcaaatggcgttgttagagcgtcgggaacttgatgcagggatctggcgtatggctatcgaaccagcagtcggttttaccagcatacgtttgcatgaatctgcattcatggttgcagttccggaagatcacgatctggcatccagagattctgtgccgctgtcggcgttgcgcaatgaatattttgttacgttgccttccgtacattctgattggggatttttacaacgtgtatgccaacaggcgggtttctcgccaatgattattcgggaagtggttgagccgcaaacggtgttggcgatgatcagtatggggatcgggattacgttgatggctgatggctatgcgcaaatgagctggccgggtgtggtgttccgtccgttagaggaacgtattccggcggatttgtatattgtgtatgaccagcagcaggcaacgccagcactggagaaactggtggcggcgttgacggtatga

SEQ ID NO: 39276 - protein, 294 aa, Salmonella enterica subsp. enterica serovar Typhi Ty2
MERAHRIDLKLLRYFLAVAEELHFGRAAARLNMSQPPLSIHIKELEQQLGTLLFIRHSRSVALTHAGKVLMEESRRLLANANQALARVEQIGRGEAGRIELGVVGTALWGRMRPAMRHFLKANPNVEVLFREKSPGMQMALLERRELDAGIWRMAIEPAVGFTSIRLHESAFMVAVPEDHDLASRDSVPLSALRNEYFVTLPSVHSDWGFLQRVCQQAGFSPMIIREVVEPQTVLAMISMGIGITLMADGYAQMSWPGVVFRPLEERIPADLYIVYDQQQATPALEKLVAALTV

SEQ ID NO: 39277 - DNA, 900 bp, Pseudomonas putida GB-1
  CDS (1)..(900): transl_table=11
atgatcgaaacacgtttgctgaggcagttcatcgccgtggccgaagagctgcattttcacaaggccgccgagcgcctgcacatggcacaaccgccattgagccaggcaatcaaccggctcgaggaaaagctcggttttggcctgtttctgcgcaacaagcgcggtgttcgtctgacggcggcaggtacagcttttctagatacggcttaccgcacgttggctgagttggaacaggggatcgagtacgcccgcaatgtgtccgcgggggtcagcggcaagctgaccatcacagccatttccatcgcctattatgactcgctgctcagcagcctgcgcagctttcgcgagacctatccaaacgtgcaactgaccatccgcgagatgccatcggcctcgcaggccaaagcgttgctggccggcgaggcggacatcggcttcatgcgcaggttgccgctgccggtgggcacccttgaagcacggttgctgcttgacgagcagatcgtcatggccctgcccgcaagccatccgaaggctcagcacgaagaaatcgacctgcgcgagtttgccgaggaagacttcgtctttaccccgcaagcactgggcggcggctatcacgcgcagttggttgccctgtgcgaggcggcgggtttctacccaaaggtggtacaggaggccgcgcagatccataccctgcttggcctggtggcttgcggttttggcgtggcgctggtgccggaatcgtttgccagttcaacgccgcgcgagcgcgtgcggtttcgcccgatccggccgatcgatgatcaaccggccccaggccttgggctgtacatgaagtggagcgcccagaacgcttcgccggcgctggccaacttcattgccatgttcaacacgcaggcataa

SEQ ID NO: 39278 - protein, 299 aa, Pseudomonas putida GB-1
MIETRLLRQFIAVAEELHFHKAAERLHMAQPPLSQAINRLEEKLGFGLFLRNKRGVRLTAAGTAFLDTAYRTLAELEQGIEYARNVSAGVSGKLTITAISIAYYDSLLSSLRSFRETYPNVQLTIREMPSASQAKALLAGEADIGFMRRLPLPVGTLEARLLLDEQIVMALPASHPKAQHEEIDLREFAEEDFVFTPQALGGGYHAQLVALCEAAGFYPKVVQEAAQIHTLLGLVACGFGVALVPESFASSTPRERVRFRPIRPIDDQPAPGLGLYMKWSAQNASPALANFIAMFNTQA

SEQ ID NO: 39279 - DNA, 900 bp, Pseudomonas putida GB-1
  CDS (1)..(900): transl_table=11
atggaactgcgccatctgcgttacttcatcgccgtggccgaagagctgcactttggccgcgccgcccagcagctgggtatttcacagccacccttgagccagcagatccaggcgctggaacaagagctgggggcgcgtctgttcgaccgtaccaatcgtcgggtcgagctgagcgaggcggggcggctgttccttgaagaggccaggcaggtgctggcgcaggtagaaaaggcggcagatgtggcccggcgtgcgcaactgggagagctgggcgagatgaaaataggcttcacctcgtcggctccgttcacctcgaaaattcccaaggcgatccatgccttccgtcagcgcttcccgtcggtgcacctgaacctcaaggaaatgagcagccgtgatgttgccgaaggggtgttcgatgaatcgatcgaagtggggttgatgcggccgatgccgctaccggaagggctggtggccaccgagttgttccgcgagccgctggtggcggtgatcaatgcctcgcatccgctggccgagggcactgtgcagggtgtttacatggcggcactggcccatgaaccgttcgtgttcttcccgcgcagttatggcagcggcctgcatgcgcaattgctgagcctggcgcgacaggcgggcttcagcccgcacttcgcacaagaggcgggggaggcgatgaccatcattggcctggtgtcggcggggttgggcgtgtcggtgttgccggcgtcgttccagcgcatgcgcattgaaggcgtggtgtaccgcacgctgctggatgaaggggcgatgtcggcggtgtggctggtgcaacgcgagcgcggtaattcggtgatggccaaagcgtttgccgagctgttgacggggcaagtggtcggccagggctga

SEQ ID NO: 39280 - protein, 299 aa, Pseudomonas putida GB-1
MELRHLRYFIAVAEELHFGRAAQQLGISQPPLSQQIQALEQELGARLFDRTNRRVELSEAGRLFLEEARQVLAQVEKAADVARRAQLGELGEMKIGFTSSAPFTSKIPKAIHAFRQRFPSVHLNLKEMSSRDVAEGVFDESIEVGLMRPMPLPEGLVATELFREPLVAVINASHPLAEGTVQGVYMAALAHEPFVFFPRSYGSGLHAQLLSLARQAGFSPHFAQEAGEAMTIIGLVSAGLGVSVLPASFQRMRIEGVVYRTLLDEGAMSAVWLVQRERGNSVMAKAFAELLTGQVVGQG

SEQ ID NO: 39281 - DNA, 912 bp, Pseudomonas putida GB-1
  CDS (1)..(912): transl_table=11
atgcaggatttgcgtcagttgcgctacttcgtggccgtcgccgaatgcgagaatgtcggccgagccgccgagcagctgcatatttcccaatcgcccctcagccggcagatcgcccagctggaggacaaccttggcctggccctgttcgaacggcgcaaccagcggctgtacctgactaacgacgggcgcaccttcctggccgaggcgcgcggcctgctcaagcatgccgagcgcttggagtcgctgggcaagcgcctgggccgtggcgaggaaggcggcttgtgcatcggctacgtcaaccacgccatccacgctggtgtgctgcctggcgcagtgcgggccattcgtggcgaacgcccgaacattcacattgcgctgtacaacatgatccccagcgagcagttcgaaggcctgcgccagcgcagcctggacattgccctggtgtgcgagccgccgccgaagcacgaccccgacttgcgtgcgcagccagtactggatgacccaatgctgctggccatcccagcctcgcaccctctggccagcaaggcggaactgaccccggccgacctgcacgagcaggaatggatcatcaccgggggccagcccgaccaggtgaacaagcgcgacgacttcatcgcccgctgcggtgatgccggttttaccccgcgcttgtcgcttgaagcgaccgacccattgagcgtgctcggcctggtgtccgcgggcctgggcctggccatggtgcagggcagcctgacggccagtgccgggccaaccgtggttttgcgtcagctggattggttccaacccagcgtgcaattgtgggccgcctggcaccaggtcgacctgcggccgatcgtgggcattttccgtgaacgcgtgctggcgcaggcgaataagtccatagaggtctga

SEQ ID NO: 39282 - protein, 303 aa, Pseudomonas putida GB-1
MQDLRQLRYFVAVAECENVGRAAEQLHISQSPLSRQIAQLEDNLGLALFERRNQRLYLTNDGRTFLAEARGLLKHAERLESLGKRLGRGEEGGLCIGYVNHAIHAGVLPGAVRAIRGERPNIHIALYNMIPSEQFEGLRQRSLDIALVCEPPPKHDPDLRAQPVLDDPMLLAIPASHPLASKAELTPADLHEQEWIITGGQPDQVNKRDDFIARCGDAGFTPRLSLEATDPLSVLGLVSAGLGLAMVQGSLTASAGPTVVLRQLDWFQPSVQLWAAWHQVDLRPIVGIFRERVLAQANKSIEV

SEQ ID NO: 39283 - DNA, 900 bp, Streptomyces nodosus
  CDS (1)..(900): transl_table=11
atggcgggcatggagctacggcatgtccgttcttttctggcgctcgtcgaggaacgccacttcgggcgcgcggcggcgcgtctgcatatcgcgcagcccgctctctcccagcagatcaagcagctggagcgcgacctgggcaccgtgctgttcacccggtccacccggcgcgtcgaactcaccgaggccggagccgatctgacggcgtacgcacggtcgatcctcgccgaggtggaacgggcggaggcccatatggccatgctggcctccggccacgccgggcgggtgtccatcggcttcgtggggaccgccacctatgacgtgctgccgcaggtcgcccgcaccgtgcgggccgagctcccggcggtctccctggagctgcacggcgagctgctggcgccacagctggtggaggggctgctcgacggggcgtacgacctcgccctgttccggccgggccccgccggacacagcggggtccgggtcgtcccgctgcgcaccgagcggctggtggccgtcctgccctcgcaccatcccgctcgcgggccgccgcagggtccccgctggcccgcgctcgccgacgagccgttcgtggtgcacccgtccagggagcgctcctccatgcacgaacgggtactggcggcctgcgcccgcgccggtttcgaaccggccacgctggtcgaggtcggcgagacctcgaccctggtcgtcttcgtcgccgcgggccacggggtcgcgctggtccagagtcggtccaagagcctccgcgtcgacggcgtgacctatctgccggtcactgagacggagaccgtcgacctcggcctcggacgccgcaccggccacaacgcgccggcgacggagcgggtcgcggacgtcatcgagagctgtgtgcgccactga

SEQ ID NO: 39284 - protein, 299 aa, Streptomyces nodosus
MAGMELRHVRSFLALVEERHFGRAAARLHIAQPALSQQIKQLERDLGTVLFTRSTRRVELTEAGADLTAYARSILAEVERAEAHMAMLASGHAGRVSIGFVGTATYDVLPQVARTVRAELPAVSLELHGELLAPQLVEGLLDGAYDLALFRPGPAGHSGVRVVPLRTERLVAVLPSHHPARGPPQGPRWPALADEPFVVHPSRERSSMHERVLAACARAGFEPATLVEVGETSTLVVFVAAGHGVALVQSRSKSLRVDGVTYLPVTETETVDLGLGRRTGHNAPATERVADVIESCVRH

SEQ ID NO: 39285 - DNA, 942 bp, Comamonas acidovorans
  CDS (1)..(942): transl_table=11
atgaatgacgcactcgtcgaactgcgcgtatggcgccagttcctggccgtggccgaagaactgcacttcggccgcgcggcccagcgcctgcacatgacgcagccgcccctgacccaggccatcgcgcagctggagcgcacgctgggggtgccgctgttcgagcgcacgagccggcgcgtggccttgagcccggccggccaggcgctactggccgaggtgcgtgcgctgctggcacgggcccaggccttgccgcagcgcgcgcgcgaggcggccggcggcgaggtcggccgcatccggctggcctttgtctccaccgtgggcttcgagcagctgccggcctgggtgcgggcttttcgtgccgtgcatccgcaggtggcgctggaactggtcgaggccacgggcgacgtgcagctgcaggccctggagcgtggcgagatcgacgccggcctgatgctgcattcaccgggctttgcgccgccaggcctggcccatctgcaggtggcgaccgagccgctggtgctggcgctgccggcgcaccacgcactggccgaggccgagcacccggcctggcccgcggtgctggccgagccgctggtgatcttcccgcgccgcatcgtgccttcgctgcacgacgccgtgttcgggctctacccacgcgcaggctgcttgccggtggtgccgcaagaggcgatccagatgcagaccatcgtcaatctggtgtcggccggcatcggcgtggcctgggtgcccgagagcgtgatgcagttccggcgccagggcgtggtctaccgcgtgcccgacacgcgccggcgcaagggccagccccgtgcgacgccggtgtgcgagaccagcctggtgtggcgcgcccagcccgatggctcgggcgtggcgcccgcgctggcccgcttcgtggatttcgtgcgggcgcaggggggaggctag

SEQ ID NO: 39286 - protein, 313 aa, Comamonas acidovorans
MNDALVELRVWRQFLAVAEELHFGRAAQRLHMTQPPLTQAIAQLERTLGVPLFERTSRRVALSPAGQALLAEVRALLARAQALPQRAREAAGGEVGRIRLAFVSTVGFEQLPAWVRAFRAVHPQVALELVEATGDVQLQALERGEIDAGLMLHSPGFAPPGLAHLQVATEPLVLALPAHHALAEAEHPAWPAVLAEPLVIFPRRIVPSLHDAVFGLYPRAGCLPVVPQEAIQMQTIVNLVSAGIGVAWVPESVMQFRRQGVVYRVPDTRRRKGQPRATPVCETSLVWRAQPDGSGVAPALARFVDFVRAQGGG

SEQ ID NO: 39287 - DNA, 903 bp, Streptomyces setonii
  CDS (1)..(903): transl_table=11
atggagctgcgtcacctgcggtacttcaccgccgtcgccgaaacctgccacttcgggaaggccgccgagcgcctgcacatggcgcagccggccctgtcgcacgccatccggcagctggaggccgaactgggcgcgcccctgttcacgcgcacgacccggcaggtgcggctcaccccggcgggtgagttcctgctgggtgaggcgcagcgggtgctggacacggtcgaggacagcgtccgcggggtgcgccgcatcgccgacggccgcctcggcctggtgcgggtcgggttcaccggcacctcggccttctcgcacctgccgcgcatcgcccgcgcggtcaagcgggacctgcccggcgtcgccgtcgaggtgcacgccgacctgctcaccccggcccagtgcgacgggctgcgcaacggcgacctggacctcgccgtcctgcgcccgcccgcgcagggcgaggacatcgacctgcacacgctggaggtcgagccgctgatcctcgccgtgcccgccgaccaccggctcgcggtcgagcccgtcgtgtcggtggccgacctgcgcaccgaggggttcatcagctacgcggccaaggattccgtggtcaacgacgccgtcatgcgcagctgccaggccgccgggttcagcccgcaccgcgagcacgaggcggccggcacggcggtgctgctcgcgctggtggccggtgggctcggcatcgcggtgctgcccgcgtcggcccgcgcgctgccgctggccggggtcgtgttccgcgacctcgccgacgccggcaccgtcgagctcgcgctcgcctggcgccgcgacaacgactccccgctcgtccggtcggtcctcgaggtgctcgaggccgcactcgccccccaaccacacgaggtcagccgatga

SEQ ID NO: 39288 - protein, 300 aa, Streptomyces setonii
MELRHLRYFTAVAETCHFGKAAERLHMAQPALSHAIRQLEAELGAPLFTRTTRQVRLTPAGEFLLGEAQRVLDTVEDSVRGVRRIADGRLGLVRVGFTGTSAFSHLPRIARAVKRDLPGVAVEVHADLLTPAQCDGLRNGDLDLAVLRPPAQGEDIDLHTLEVEPLILAVPADHRLAVEPVVSVADLRTEGFISYAAKDSVVNDAVMRSCQAAGFSPHREHEAAGTAVLLALVAGGLGIAVLPASARALPLAGVVFRDLADAGTVELALAWRRDNDSPLVRSVLEVLEAALAPQPHEVSR

SEQ ID NO: 39289 - DNA, 1599 bp, Pseudomonas putida
  CDS (1)..(1599): transl_table=11
atggatttgcgtgacctgcgccactttcttgccgtggccgaagagggccacattggccgtgcggcggcccgcctgcatttgtcgcagccgccgctgacgcgccacatccaggcgctggaagaaaaaatcggcgtgccgctgtttgtgcgcacccccaaaggcatgcagctcaccgacgccggccacaccttgctgcaggaaacccccaacctgctcgcgctggcacagcaggcgctggagcgcacgcgactggcaggccagggcctgatcgggcagctggatgtggggctgttcggctcgggcgtgctggatgtgatcccacgcatcctggcgcgctttcacgaggagcgccccgaagtcaaaattgttttgcataacctgaccaaagacgcccagctacaggcgctgcgcgagcggcgcatcagcgtgggctttaaccgtctggtgccgcaagaggccgacatcagcatcgaaaccgttctgcacgagccgctggtggtggccctggcggccagccacccgctggcggtgcgcccctcgctgcgcctgtccgacctggagggcatgccgctcatcctctaccccaacgtgcccctgcgcggtctggcacaggaggtgacggacgctttccgcgccgagggcatccccccgcgtgtcgagcaggaggtgcaggacgtagtgaccgccgtggcgctggtggcgggcggctttggctgctgcatcaccacccgctcggccaccagcttgcgcctgcccggcgtgacctatcggccgctgcgctcgcgccacctgagcgacatcgagctcagctgcctgtatcgcagcgatgtgggtgctggcgcccggcccgctgtcttcgctggtctgccactggctgtagcccaccagccccgcctgccaggtgccgaaggacttgcccaccccccactccatcgtgagttgattgcccgggcgcaggcccacttcgttcttgccgttgcgctcgaaacgcatcaaggccgacccggtccaggttttggcgctgtcgaagtaataggtcaggccacccgtgagcatggtgcttttgaagcccttgcccggcgatgcggggtggctggtgctggcgctgtccagccacacgccggcggcggccacggcgtcccattgctggccatgccagcccagcaccagcgggcccagatacacgtcgcccacgcccgagcgggtgtcggagatgcccgccgcgttgatggtgagcgaggtgcgcattaccggcacgatggcctccataccgtagtcggcgcccagcagcttgtattgcgagatccacacaaaacggttggacagcgccgtgacggtgccccggttgtggcccggcaggttgtcgctggtgcccggcgcgcggaaatcgtcaatgttgtagttgacgaggtagcccaggtagtaaaagccgggcggcggcacgctggcgccctgcagcccttccacgcccggcacgtagtgcccctcggcctgcgcgctgctgacggccagaccgcctgccagggcaagcgcggcaatgaccctgtgttttttcatgctgtgttccttgtgcatggatgcgcgcccgatcaggtatag

SEQ ID NO: 39290 - protein, 532 aa, Pseudomonas putida
MDLRDLRHFLAVAEEGHIGRAAARLHLSQPPLTRHIQALEEKIGVPLFVRTPKGMQLTDAGHTLLQETPNLLALAQQALERTRLAGQGLIGQLDVGLFGSGVLDVIPRILARFHEERPEVKIVLHNLTKDAQLQALRERRISVGFNRLVPQEADISIETVLHEPLVVALAASHPLAVRPSLRLSDLEGMPLILYPNVPLRGLAQEVTDAFRAEGIPPRVEQEVQDVVTAVALVAGGFGCCITTRSATSLRLPGVTYRPLRSRHLSDIELSCLYRSDVGAGARPAVFAGLPLAVAHQPRLPGAEGLAHPPLHRELIARAQAHFVLAVALETHQGRPGPGFGAVEVIGQATREHGAFEALARRCGVAGAGAVQPHAGGGHGVPLLAMPAQHQRAQIHVAHARAGVGDARRVDGERGAHYRHDGLHTVVGAQQLVLRDPHKTVGQRRDGAPVVARQVVAGARRAEIVNVVVDEVAQVVKAGRRHAGALQPFHARHVVPLGLRAADGQTACQGKRGNDPVFFHAVFLVHGCAPDQV

SEQ ID NO: 39291 - DNA, 909 bp, Bacillus subtilis
  CDS (1)..(909): transl_table=11
atggagcttcgccatcttcaatactttatcgcagtagccgaagagcttcatttcggaaaggctgcccggcggctgaacatgacgcagcctcctctcagccagcagatcaaacagctggaggaagaagtcggagttacgcttctgaaaaggacaaaacgatttgtcgagcttaccgcagcaggagaaatctttttaaatcattgccgcatggcattgatgcaaatcggacaaggaattgaactggcacagcggacggcccgcggcgagcaaggccttctcgtaatcggttttgtcggatcagctacatatgaatttctgccgccgattgtccgggaatatcgtaaaaaattcccatctgtgaaaatagaactgcgtgaaatatcctcgtctaggcagcaggaggagctactaaagggcaacattgatattggtatacttcatcctcccttacagcatacagctttacatatcgaaaccgcccaaagcagcccttgtgttttagctttgcctaagcaacacccattgacttctaaggaatcaattacgattgaggatttaagagatgaaccaattattactgttgctaaagaagcatggcctactctatacatggattttattcagttctgtgaacaagcgggcttcagacccaacattgtccaggaagccacagaatatcaaatggtgattggtttagtcagtgccggaattggtatgacatttgttccttcctcggccaaaaaattatttaatttggatgttacttatcgaaaaatggaccaaatacagcttaatgcagaatgggttatcgcttaccgcaaagacaatcataatccgcttataaagcattttattcatatttcaaattgtcagcagacaagaactaaagagagtgatgcaggtacatga

SEQ ID NO: 39292 - protein, 302 aa, Bacillus subtilis
MELRHLQYFIAVAEELHFGKAARRLNMTQPPLSQQIKQLEEEVGVTLLKRTKRFVELTAAGEIFLNHCRMALMQIGQGIELAQRTARGEQGLLVIGFVGSATYEFLPPIVREYRKKFPSVKIELREISSSRQQEELLKGNIDIGILHPPLQHTALHIETAQSSPCVLALPKQHPLTSKESITIEDLRDEPIITVAKEAWPTLYMDFIQFCEQAGFRPNIVQEATEYQMVIGLVSAGIGMTFVPSSAKKLFNLDVTYRKMDQIQLNAEWVIAYRKDNHNPLIKHFIHISNCQQTRTKESDAGT

SEQ ID NO: 39293 - DNA, 894 bp, Escherichia coli
  CDS (1)..(894): transl_table=11
atgaatattgaacttcgtcatctgcgttactttgttgctgttgcggaagagctgcatttcgggcgcgccgctgcccgcctgaatatttcgcaaccgccgctaagtcagcagattcaggcgctggagcaacaaattggtgcccgactgctggcacgaaccaatcgcagtgtattgctgacggcagcaggaaaacagtttcttgcagatagtcggcaaatcctgtctatggtggatgacgctgccgctcgcgctgaaaggctgcatcagggtgaagcgggggagttgcgcattggttttacttcgtcggctccttttattcgggcggtgtccgatacgttatcgctgtttcgccgtgattatcctgatgtccatttacaaacccgcgaaatgaacactcgcgagcaaatcgctccgctcattgaaggaacgctggatatgggattgctgcgtaacacagcgttaccggagtcgcttgaacacgcagtcatcgtccatgaaccgcttatggcgatgatcccgcacgatcatcccctggcaaataacccgaatgtaacgctggctgaactggcgaaagaaccctttgtcttttttgatccgcacgtcgggacagggctgtatgacgatattctcgggctgatgcgacgttaccatttgacgcccgtcatcactcaggaggtgggcgaggcaatgaccatcatcggtctggtttccgccggtctgggtgtttcaattttgcctgcgtcatttaaacgtgttcagctcaacgaaatgcgctgggtgccgattgctgaagaggatgcggtttctgaaatgtggttggtctggccgaaacatcatgaacaaagtccggctgcgcgtaactttcgtattcatctgctgaatgctctcaggtga

SEQ ID NO: 39294 - protein, 297 aa, Escherichia coli
MNIELRHLRYFVAVAEELHFGRAAARLNISQPPLSQQIQALEQQIGARLLARTNRSVLLTAAGKQFLADSRQILSMVDDAAARAERLHQGEAGELRIGFTSSAPFIRAVSDTLSLFRRDYPDVHLQTREMNTREQIAPLIEGTLDMGLLRNTALPESLEHAVIVHEPLMAMIPHDHPLANNPNVTLAELAKEPFVFFDPHVGTGLYDDILGLMRRYHLTPVITQEVGEAMTIIGLVSAGLGVSILPASFKRVQLNEMRWVPIAEEDAVSEMWLVWPKHHEQSPAARNFRIHLLNALR

SEQ ID NO: 39295 - DNA, 24 bp, Artificial sequence
  primer
atggaacgcgtatacagaacagat

SEQ ID NO: 39296 - DNA, 24 bp, Artificial sequence
  primer
ttactgtgtcaatgcagccaacag

SEQ ID NO: 39297 - protein, 243 aa, Artificial sequence
  consensus sequence
  Variant (3)..(3): Xaa in position 3 is any amino acid
  Variant (6)..(6): Xaa in position 6 is any amino acid
  Variant (8)..(8): Xaa in position 8 is any amino acid
  Variant (14)..(14): Xaa in position 14 is any amino acid
  Variant (17)..(17): Xaa in position 17 is any amino acid
  Variant (21)..(21): Xaa in position 21 is any amino acid
  Variant (24)..(26): Xaa in position 24 to 26 is any amino acid
  Variant (29)..(29): Xaa in position 29 is any amino acid
  Variant (32)..(33): Xaa in position 32 to 33 is any amino acid
  Variant (35)..(36): Xaa in position 35 to 36 is any amino acid
  Variant (39)..(41): Xaa in position 39 to 41 is any amino acid
  Variant (43)..(44): Xaa in position 43 to 44 is any amino acid
  Variant (46)..(47): Xaa in position 46 to 47 is any amino acid
  Variant (49)..(50): Xaa in position 49 to 50 is any amino acid
  Variant (52)..(52): Xaa in position 52 is any amino acid
  Variant (54)..(54): Xaa in position 54 is any amino acid
  Variant (57)..(57): Xaa in position 57 is any amino acid
  Variant (60)..(66): Xaa in position 60 to 66 is any amino acid
  Variant (68)..(69): Xaa in position 68 to 69 is any amino acid
  Variant (71)..(80): Xaa in position 71 to 80 is any amino acid
  Variant (81)..(85): Xaa in position 81 to 85 is any or no amino acid
  Variant (87)..(88): Xaa in position 87 to 88 is any amino acid
  Variant (90)..(93): Xaa in position 90 to 93 is any amino acid
  Variant (95)..(115): Xaa in position 95 to 115 is any amino acid
  Variant (116)..(116): Xaa in position 116 is any or no amino acid
  Variant (118)..(118): Xaa in position 118 is any amino acid
  Variant (120)..(140): Xaa in position 120 to 140 is any amino acid
  Variant (141)..(141): Xaa in position 141 is any or no amino acid
  Variant (143)..(169): Xaa in position 143 to 169 is any amino acid
  Variant (170)..(171): Xaa in position 170 to 171 is any or no amino acid
  Variant (173)..(174): Xaa in position 173 to 174 is any amino acid
  Variant (176)..(176): Xaa in position 176 is any amino acid
  Variant (179)..(187): Xaa in position 179 to 187 is any amino acid
  Variant (188)..(189): Xaa in position 188 to 189 is any or no amino acid
  Variant (191)..(192): Xaa in position 191 to 192 is any amino acid
  Variant (194)..(215): Xaa in position 194 to 215 is any amino acid
  Variant (216)..(218): Xaa in position 216 to 218 is any or no amino acid
  Variant (220)..(221): Xaa in position 220 to 221 is any amino acid
  Variant (223)..(226): Xaa in position 223 to 226 is any amino acid
  Variant (228)..(237): Xaa in position 228 to 237 is any amino acid
  Variant (239)..(240): Xaa in position 239 to 240 is any amino acid
  Variant (242)..(242): Xaa in position 242 is any amino acid
LRXLRXFXAVAEEXHFXRAAXRLXXXQPXLSXXIXXLEXXXGXXLXXRXXRXVXLTXAGXXXXXXXRXXLXXXXXXXXXXXXXXXGXXGXXXXGXXXXXXXXXXXXXXXXXXXXXXPXVXXXXXXXXXXXXXXXXXXXXXXDXXXXXXXXXXXXXXXXXXXXXXXXXXXXXPXXHXLAXXXXXXXXXXXLXXEXXXXXXXXXXXXXXXXXXXXXXXXXGXXPXXXXEXXXXXXXXXXVXXGXG

SEQ ID NO: 39298 - protein, 58 aa, Artificial sequence
  protein pattern
  Variant (2)..(2): Xaa in position 2 is any amino acid
  Variant (3)..(5): Xaa in position 3 to 5 is any or no amino acid
  Variant (7)..(7): Xaa in position 7 is any amino acid
  Variant (12)..(12): Xaa in position 12 is Glu or Thr
  Variant (13)..(13): Xaa in position 13 is any amino acid
  Variant (15)..(15): Xaa in position 15 is Phe or Ile
  Variant (16)..(16): Xaa in position 16 is any amino acid
  Variant (17)..(17): Xaa in position 17 is Lys or Arg
  Variant (20)..(20): Xaa in position 20 is any amino acid
  Variant (21)..(21): Xaa in position 21 is Gln or Arg
  Variant (23)..(23): Xaa in position 23 is any amino acid
  Variant (24)..(24): Xaa in position 24 is Ile, Leu, Met or Val
  Variant (25)..(25): Xaa in position 25 is Ala, Ser or Thr
  Variant (27)..(27): Xaa in position 27 is Pro or Gln
  Variant (28)..(28): Xaa in position 28 is Ala or Pro
  Variant (30)..(30): Xaa in position 30 is Ser or Thr
  Variant (31)..(32): Xaa in position 31 to 32 is any amino acid
  Variant (33)..(33): Xaa in position 33 is Ile or Val
  Variant (34)..(35): Xaa in position 34 to 35 is any amino acid
  Variant (38)..(39): Xaa in position 38 to 39 is any amino acid
  Variant (40)..(40): Xaa in position 40 is Ile, Leu or Val
  Variant (42)..(43): Xaa in position 42 to 43 is any amino acid
  Variant (45)..(45): Xaa in position 45 is Phe or Leu
  Variant (46)..(46): Xaa in position 46 is any amino acid
  Variant (48)..(49): Xaa in position 48 to 49 is any amino acid
  Variant (50)..(50): Xaa in position 50 is Lys or Arg
  Variant (51)..(51): Xaa in position 51 is any amino acid
  Variant (52)..(52): Xaa in position 52 is Met or Val
  Variant (53)..(53): Xaa in position 53 is any amino acid
  Variant (54)..(54): Xaa in position 54 is Leu or Pro
  Variant (55)..(55): Xaa in position 55 is Ser or Thr
  Variant (56)..(56): Xaa in position 56 is any amino acid
  Variant (57)..(57): Xaa in position 57 is Ala or Asp
RXXXXFXAVAEXXHXXXAAXXLXXXQXXLXXXXXXLEXXXGXXLXXRXXXXXXXXXXG

SEQ ID NO: 39299 - protein, 19 aa, Artificial sequence
  protein pattern
  Variant (2)..(2): Xaa in position 2 is Ala, Gly or Val
  Variant (3)..(3): Xaa in position 3 is any amino acid
  Variant (4)..(4): Xaa in position 4 is Asp, Glu, Gly or Gln
  Variant (5)..(7): Xaa in position 5 to 7 is any amino acid
  Variant (8)..(8): Xaa in position 8 is Ala, Ile, Leu or Val
  Variant (9)..(9): Xaa in position 9 is any amino acid
  Variant (10)..(10): Xaa in position 10 is Ala, Gly, Asn, Ser or Val
  Variant (11)..(11): Xaa in position 11 is Phe, Ile, Leu or Met
  Variant (13)..(13): Xaa in position 13 is Ala or Ser
  Variant (14)..(14): Xaa in position 14 is any amino acid
  Variant (16)..(16): Xaa in position 16 is any amino acid
  Variant (18)..(18): Xaa in position 18 is any amino acid
  Variant (19)..(19): Xaa in position 19 is Ala, Cys, Ser or Thr
EXXXXXXXXXXVXXGXGXX

SEQ ID NO: 39300 - DNA, 972 bp, Escherichia coli
  CDS (1)..(972): transl_table=11
atgagtaagatttttgaagataactcgctgactatcggtcacacgtcgctggttcgcctgaatcgcatcggtaacggacgcattctggcgaaggtggaatctcgtaaccccagcttcagcgttaagtgccgtatcggtgccaacatgatttgggatgccgaaaagcgcggcgtgctgaaaccaggcgttgaactggttgaaccgaccagcggtaataccgggattgcactggcctatgtagctgccgctcgcggttacaaactcaccctgaccatgccagaaaccatgagtattgaacgccgcaagctgctgaaagcgttaggtgcaaacctggtgctgacggaaggtgctaaaggcatgaaaggcgcaatccaaaaagcagaagaaattgtcgccagcaatccagagaaatacctgctgctgcaacaattcagcaatccggcaaaccctgaaattcacgaaaagaccaccggtccggagatatgggaagataccgacggtcaggttgatgtatttattgctggcgttgggactggcggtacgctgactggcgtcagccgctacattaaaggcaccaaaggcaagaccgatcttatctctgtcgccgttgagccaaccgattctccagttatcgcccaggcgctggcaggtgaagagattaaacctggcccgcataaaattcagggtattggcgctggttttatcccggctaacctcgatctcaagctggtcgataaagtcattggcatcaccaatgaagaagcgatttctaccgcgcgtcgtctgatggaagaagaaggtattcttgcaggtatctcttctggagcagctgttgccgcggcgttgaaactacaagaagatgaaagctttaccaacaagaatattgtggttattctaccatcatcgggtgagcgttatttaagcaccgcattgtttgccgatctcttcactgagaaagaattgcaacagtaa

SEQ ID NO: 39301 - protein, 323 aa, Escherichia coli
MSKIFEDNSLTIGHTSLVRLNRIGNGRILAKVESRNPSFSVKCRIGANMIWDAEKRGVLKPGVELVEPTSGNTGIALAYVAAARGYKLTLTMPETMSIERRKLLKALGANLVLTEGAKGMKGAIQKAEEIVASNPEKYLLLQQFSNPANPEIHEKTTGPEIWEDTDGQVDVFIAGVGTGGTLTGVSRYIKGTKGKTDLISVAVEPTDSPVIAQALAGEEIKPGPHKIQGIGAGFIPANLDLKLVDKVIGITNEEAISTARRLMEEEGILAGISSGAAVAAALKLQEDESFTNKNIVVILPSSGERYLSTALFADLFTEKELQQ

SEQ ID NO: 39302 - DNA, 1618 bp, Glycine max
  CDS (163)..(1347)
aactactaaagggataaaatatgactactattagtgatgatcagtgattagtgtgattagtgcgtgcgattcattgtgtttgtgtagtagtgagtgactttgggttgggtttcgtctcaactcaacaaacgtcgtcgttctcccatttccaatctttctccaatggcttcttctgcttccttaatcaactcgttgacttgctcttcgcctgcacccactcagcactgtttcgccttcacccgcaccaccgccaccgctaccgccacgtcactgagacaattcaacagccaccgtccgcccccactcaccacgaggatctcctcgtcgccttccaccgttgtctgcaaagctgtctccgttaagccccaaaccgaaaccgaaggtctcaacattgctgacgatgtcacacagctcatagggaaaacgccgatggtttacctcaacaatatcgtgaagggttctgtggccaatattgctgcgaagcttgagattatggagccctgttgtagtgtcaaggacaggattggttttagtatgataaatgatgctgagcagagaggagctataacacctgggaagagtatattggtggaacctactagtgggaacacaggaattggtcttgcctttatagcagcttcaagaggatataagctaattttgacaatgcctgcttcaatgagtttagaaagacgggttcttttgaaagcatttggggccgagcttgttttgactgatgcagcaaagggcatgaatggagcagtacaaaaagctgaagaaattttaaaaagtacccccaattcatacatgcttcaacaatttgataatccttcaaatcctaaggttcattatgagacaactggcccggagatatgggaagatactagaggaaagatagatattttagttgcaggaattggaaccggtggaactgtttctggagctggccaattcctaaaacaacaaaatccgaaaatacaggttattggcgtagagcctctggaaagcaacatacttacaggtggaaagccaggacctcacaaaattcagggtattggggctggttttgtgcccaggaatttggatcaagatgtgcttgatgaagttatagcgatatcaagtgatgaagcagttgaaactgcaaagcaattagcactccaggaaggcttgctggtgggaatttcttcaggagctgcagctgcagctgctttgaaggttggaaagaggcctgagaatgcaggaaagcttattggggttgtcttcccaagctttggtgaaagatatttgtcaactattcttttccagtcaatacgggaagaatgcgagaaaatgcaacctgagccatgaattgactttgcttgttaatgtttcatactcattttccacaagtatctgtatggaatgacagtgtcagatgtccatgttatgcccgtgtttctcatttttgacactcaagaaattagataactgtgtacaggtcattgatttgacttacaacacagattaatgacccttgattgaagaaattttagatgtaataattattggcattgatgacaacgtagcaaatttctgccttatgttcgctattaaaaaataattgatgaaacagtttatc

SEQ ID NO: 39303 - protein, 394 aa, Glycine max
MASSASLINSLTCSSPAPTQHCFAFTRTTATATATSLRQFNSHRPPPLTTRISSSPSTVVCKAVSVKPQTETEGLNIADDVTQLIGKTPMVYLNNIVKGSVANIAAKLEIMEPCCSVKDRIGFSMINDAEQRGAITPGKSILVEPTSGNTGIGLAFIAASRGYKLILTMPASMSLERRVLLKAFGAELVLTDAAKGMNGAVQKAEEILKSTPNSYMLQQFDNPSNPKVHYETTGPEIWEDTRGKIDILVAGIGTGGTVSGAGQFLKQQNPKIQVIGVEPLESNILTGGKPGPHKIQGIGAGFVPRNLDQDVLDEVIAISSDEAVETAKQLALQEGLLVGISSGAAAAAALKVGKRPENAGKLIGVVFPSFGERYLSTILFQSIREECEKMQPEP

SEQ ID NO: 39304 - DNA, 1190 bp, Helianthus annuus
  CDS (33)..(1010)
tgattgattatctttgaataactgaacaagttatggctgaaggaaagagtgggatcgctaaggatgttacagaattgattggtaacactcctttggtttatctcaacaatgttgtggatggttgtgttggccgtattgcggctaaactggaaatgatggagccttgttctagtgttaaggacaggattggttatagcatgattacggacgccgaagaaaaggggctcataacacctggagagagtgtccttgtcgaaccaacaagcggcaacactggcattgggctagctttcatggctgcggcaaaggggtacaagctcatcattacgatgcctgcttcgatgagccttgagagacgaattgttctccgtgcttttggtgctgagttggtccttactgatcccgctaaaggagtgaaaggtgctctccagaaagctgaggagattatggctaaaacgccaaattcttacatgcttcagcagtttgagaatcctgctaatccaaagatccattacgaaacaactggacctgaagtctggaaaggtacaggtgggaaaatcgatgcttttgtttccggcattggtactggcggtacgattacaggtgcagggaaatatcttaaagagcagaaccctgacataaagctttacggcattgagcctactgaaagtgctattttgtctggaggaacccctggtccacataagatccaagggattggtgctggattcatccctggtgttttagaagttgatcttattgatgaagttattaaagtttcaagtgaagaagcaattgaaactgcaaagcttcttgctcttaaagaaggattacttgtggggatatcatctggtgcagcagccgcagctgcaatcaagattgcaaagaggccagaaagtgctggaaagctgattgttgctgtgttcccgagtttcggggagcggtatctgtcttctgtgctatttgattcggtgcgaaaggaggcagagactatgacttttgatccttgaatacaatgagattgtgttattaagagggatcatgtcaacatatttgaagttcaatttgtaactgatgtctttttttttcatggggcaccttgttctatttttggtcccgttgtatgcttgtttcgaatgttatatcatgtggatgatatctttttctaaaaaagcaaaaaaaaaaaaaaa

SEQ ID NO: 39305 - protein, 325 aa, Helianthus annuus
MAEGKSGIAKDVTELIGNTPLVYLNNVVDGCVGRIAAKLEMMEPCSSVKDRIGYSMITDAEEKGLITPGESVLVEPTSGNTGIGLAFMAAAKGYKLIITMPASMSLERRIVLRAFGAELVLTDPAKGVKGALQKAEEIMAKTPNSYMLQQFENPANPKIHYETTGPEVWKGTGGKIDAFVSGIGTGGTITGAGKYLKEQNPDIKLYGIEPTESAILSGGTPGPHKIQGIGAGFIPGVLEVDLIDEVIKVSSEEAIETAKLLALKEGLLVGISSGAAAAAAIKIAKRPESAGKLIVAVFPSFGERYLSSVLFDSVRKEAETMTFDP

SEQ ID NO: 39306 - DNA, 1432 bp, Spinacia oleracea (spinach)
  CDS (54)..(1205)
atacattgcagattacacacatacaggtacagagaggagagagaaagttggctatggcttcattggtcaacaacgcatacgctgcgcttcgcacctccaaattggagctccgagaagttaagaatcttgccaatttccgagttggacctccatcatcgctcagctgcaacaatttcaagaaggtttcttcttctccaatcacctgcaaagctgtgtctctttcgcctccatccaccattgaaggccttaacattgctgaagatgtttctcagctaattggaaaaaccccaatggtgtatctcaacaatgtatcaaaaggatcagttgcaaacattgctgcgaagcttgagagcatggaaccttgctgcagtgtcaaggacaggattggctacagtatgattgatgatgctgagcagaaaggagttatcacacctggaaagactactctagtggagcctacgagtgggaatactggaataggacttgcctttatagctgctgccagaggatacaagattaccttgacaatgccagcttccatgagtatggaaaggagagttatcttgaaagcatttggagctgagttggtcctgactgatccagctaagggaatgaaaggagcagttgagaaggctgaagaaattttgaagaaaactcctgattcctacatgcttcagcagtttgacaatcctgcaaatcccaagatacattacgagacaacaggtcccgagatctgggaagacacaaaaggcaaagtggacatttttgttgcaggcattggaactggaggaacgatttctggagttggacggtacctcaaagaacgtaaccctggtgtgcaggtaattggtatagaacctacagaaagcaacatactttctggtggaaagcctggtccacacaagattcaaggacttggagctggttttgttcccagcaatttagatttgggtgtgatggatgaagttatagaggtatctagtgaagaagctgtagaaatggcaaagcaattggcaatgaaagaaggcttgttggttggcatttcatctggacgacgagcagctgctgcagtcaggattggtaaaagacctgaaaatgcaggaaaacttattgctgttgtgttcccaagctttggtgagagatacctgtcatccattttgttccagtctattcgagaagagtgtgaaaacatgaagccagaatagtgaggagtcatttcttggatattcttggcgggggcacattgttagatttttcaggttgtgcctcttgcttgcttgtcgcgttctttagagccaagaatggtttatgttttctcaatttatttgttgacatgaaatgagcaataaaattatgcatgtagatcagaacagcacatgatgatttttaacaaattttcctaatattactttggcttactcaaaaaaaaaaa

SEQ ID NO: 39307 - protein, 383 aa, Spinacia oleracea (spinach)
MASLVNNAYAALRTSKLELREVKNLANFRVGPPSSLSCNNFKKVSSSPITCKAVSLSPPSTIEGLNIAEDVSQLIGKTPMVYLNNVSKGSVANIAAKLESMEPCCSVKDRIGYSMIDDAEQKGVITPGKTTLVEPTSGNTGIGLAFIAAARGYKITLTMPASMSMERRVILKAFGAELVLTDPAKGMKGAVEKAEEILKKTPDSYMLQQFDNPANPKIHYETTGPEIWEDTKGKVDIFVAGIGTGGTISGVGRYLKERNPGVQVIGIEPTESNILSGGKPGPHKIQGLGAGFVPSNLDLGVMDEVIEVSSEEAVEMAKQLAMKEGLLVGISSGRRAAAAVRIGKRPENAGKLIAVVFPSFGERYLSSILFQSIREECENMKPE

SEQ ID NO: 39308 - DNA, 1329 bp, Arabidopsis thaliana (mouse-ear cress)
  CDS (1)..(1329)
atggtggcgatgatcatggcttcaaggtttaaccgggaagctaagctcgcatctcaaatcttgtctacacttttgggaaaccgaagctgctacacatccatggccgccacatcttcctctgctttacttcttaatccgttgacttcttcttcttcttcttctactctccgtcgtttcagatgctcgccagagatctcttctctctccttctcctccgcttctgatttctctctagcgatgaagaggcagagtcggagttttgctgatggttcggaacgagatccgtctgttgtgtgtgaggctgttaagcgcgagactggacctgatggactcaacatcgctgacaatgtgtctcagctcattgggaaaactcctatggtgtacttgaacagtatagcaaaaggttgtgtagcaaatattgctgccaaactcgagatcatggagccatgttgcagtgtcaaggataggattgggtacagtatggttactgatgctgagcaaaaaggatttatatcacctggaaagagtgttcttgtggaacctacaagtggaaacacgggtattggcctagcattcatcgctgcttcaaggggctatagacttatcttgacaatgccagcatccatgagtatggaaagaagggttcttttaaaggcatttggagctgagcttgtattaacagatcctgctaaaggcatgactggagcggttcagaaggctgaagagatcttgaaaaacactcctgatgcatacatgctccaacagtttgacaaccctgcaaatccaaagattcattacgagactactggtcctgagatctgggatgatacaaagggcaaggtggatatctttgttgcaggaattggaactggtggaactatcactggtgttggtcgatttattaaagagaaaaatcccaaaacgcaggttattggtgtagaacccaccgaaagcgatatactttctggtggcaaaccgggacctcacaagattcaaggaattggagctggatttatacctaagaatttggatcagaaaattatggatgaagtcatagcgatttcaagtgaggaagctatagaaaccgcaaagcaactagctcttaaggaaggcttgatggttggtatatcatctggagctgcagctgctgctgcaatcaaggtggctaagagacctgagaatgctggaaaactcatagctgtaactgttaatgaatctatgaatgcggtttttcaggttgttttcccgagcttcggggagagatatctatcgaccccgctgttccagtctatccgggaagaggtggagaaaatgcagcctgaggtatga

SEQ ID NO: 39309 - protein, 442 aa, Arabidopsis thaliana (mouse-ear cress)
MVAMIMASRFNREAKLASQILSTLLGNRSCYTSMAATSSSALLLNPLTSSSSSSTLRRFRCSPEISSLSFSSASDFSLAMKRQSRSFADGSERDPSVVCEAVKRETGPDGLNIADNVSQLIGKTPMVYLNSIAKGCVANIAAKLEIMEPCCSVKDRIGYSMVTDAEQKGFISPGKSVLVEPTSGNTGIGLAFIAASRGYRLILTMPASMSMERRVLLKAFGAELVLTDPAKGMTGAVQKAEEILKNTPDAYMLQQFDNPANPKIHYETTGPEIWDDTKGKVDIFVAGIGTGGTITGVGRFIKEKNPKTQVIGVEPTESDILSGGKPGPHKIQGIGAGFIPKNLDQKIMDEVIAISSEEAIETAKQLALKEGLMVGISSGAAAAAAIKVAKRPENAGKLIAVTVNESMNAVFQVVFPSFGERYLSTPLFQSIREEVEKMQPEV

SEQ ID NO: 39310 - DNA, 969 bp, Photobacterium profundum
  CDS (1)..(969): transl_table=11
atgagcaagatttacgaagataattcactaacgattggcaacactcctctagtacgccttaaccgtgttagtaatggtaatgtactggcaaaaattgaagctcgtaaccctagcttcagcgtaaaatgccgtatcggttcaaacatgatttgggatgctgaaaagaaaggcacactaaaggaaggcattgaacttgtagagccaaccagtggtaatactggtattgctttagccttcgttgcagcagcacgcggatataaattaacgttaacgatgcctgaaagcatgagcttagagcgccgtaaactgcttaaagcccttggtgccaacttggtattaaccgaagcaccgaaaggtatgaaaggcgcaatagaaaaagcggaagaaattgttgcatcagacccaagtaaatatctacttctacaacagtttaataacccagccaaccctgaaattcacgagaaaaccacaggacctgaaatttgggacgcaactgatggcgaaatcgatgtctttgtttcaggcgtcggtacaggtggcacactaacgggtgtaagccgattcattaagcatcagaaaggcaaagccattacaacggttgctgtagaacctactgaatcaccagttatcactcaaacactgaatggcgatgacgtaaaaccagcaccacacaaaattcaaggtattggcgcaggcttcatcccaggaaacctagacttaacattgattgatgaagtcgaattagtcagttcagaagatgctatcgcgatgacacgccgcttaatggaagaagaaggtattcttgctggtatttcctctggtgctgctgttgttgctgcaaataaaatagctgcacggcctgagttcgcaggcaaaaagattgttgtagtgttacctagctcaggtgaaaggtacctatcaacagctctttttgctggcatcttcacagaaaaagaaaaccaacagtga

SEQ ID NO: 39311 - protein, 322 aa, Photobacterium profundum
MSKIYEDNSLTIGNTPLVRLNRVSNGNVLAKIEARNPSFSVKCRIGSNMIWDAEKKGTLKEGIELVEPTSGNTGIALAFVAAARGYKLTLTMPESMSLERRKLLKALGANLVLTEAPKGMKGAIEKAEEIVASDPSKYLLLQQFNNPANPEIHEKTTGPEIWDATDGEIDVFVSGVGTGGTLTGVSRFIKHQKGKAITTVAVEPTESPVITQTLNGDDVKPAPHKIQGIGAGFIPGNLDLTLIDEVELVSSEDAIAMTRRLMEEEGILAGISSGAAVVAANKIAARPEFAGKKIVVVLPSSGERYLSTALFAGIFTEKENQQ

SEQ ID NO: 39312 - DNA, 987 bp, Synechococcus sp
  CDS (1)..(987)
atgtcccgcatttacgacgacaacagcctcgccatcggcaacaccccgctggtgaagctgaacagcgtcaccaagaactgcaaagccaccgtgctggcaaaggtcgaaggtcgcaatcccgcttacagcgtgaagtgccggatcggcgccaacatgatctgggacgctgagaagagcggcaagctcaccaaagacaaggtgattgtcgagcccacctccggcaacaccggcatcgccctcgccttcacagcggcggcccgcggctacaagctgatcctgacgatgcccgagtcgatgtcgatcgagcgtcgccggatgatggccgttctcggcgccgagctgatcctcaccgaggccgccaagggcatgcccggtgccatcgccaaggccaaggagatcgccgacagcgatcccggcaaatacttcatgccaggacagttcgacaatcccgccaaccccgaaatccacttcaagaccaccggtccggagatctggaacgactgtgacggtgccatcgatgtgctggtggccggtgtcggcaccggcggcaccatcaccggtgtgtcccgctacatcaagaacgaagccggcaaggcgatcgaatccgtcgccgtggaacccagccacagcccggtgatcacccagaccatcaacggagaaacggtcaagcccggcccccacaagatccagggcatcggcgccggcttcatccccaagaacctggacatgtccatggtcgacaaggtggagcaggtgaccaatgacgagtcgatcgccatggccctgcgcctggcccaggaagagggccttttggttggcatctcctgtggagccgccgccgcggctgccatccgcctggcagagcaggacgcttacgccggcaaaaccatcgtggtggtgctgcccgacctggccgagcgttatctgtcgtcggtgatgttcgccgatgtgcccaccggcatcatcgagcagccggttgccgtctaa

SEQ ID NO: 39313 - protein, 328 aa, Synechococcus sp
MSRIYDDNSLAIGNTPLVKLNSVTKNCKATVLAKVEGRNPAYSVKCRIGANMIWDAEKSGKLTKDKVIVEPTSGNTGIALAFTAAARGYKLILTMPESMSIERRRMMAVLGAELILTEAAKGMPGAIAKAKEIADSDPGKYFMPGQFDNPANPEIHFKTTGPEIWNDCDGAIDVLVAGVGTGGTITGVSRYIKNEAGKAIESVAVEPSHSPVITQTINGETVKPGPHKIQGIGAGFIPKNLDMSMVDKVEQVTNDESIAMALRLAQEEGLLVGISCGAAAAAAIRLAEQDAYAGKTIVVVLPDLAERYLSSVMFADVPTGIIEQPVAV

SEQ ID NO: 39314 - DNA, 987 bp, Prochlorococcus marinus subsp
  CDS (1)..(987)
atggcaaaaatttatgaggacaacagctttgctattggaaacactccattagtaaaattaaaatcagttactaaaaacgctaaagctactgtattagcaaaaattgaaggtagaaatcctgcatatagtgttaaatgcaggattggtgcaaacatgatatgggatgcggagaaaagcggaaaacttacaaaagacaaaactatcgttgaacctacctctggaaatactggaattgccttagcttttacagcttcagcaagaggttacaaactagtccttacaatgccagaatctatgtctattgagaggagaagggtgatggcagtattgggcgccgaaattgttttaacagaggcttctaaaggtatgccaggagcaattgccaaagctaaagagatcgcagaaagtaatccctctaaatatttcatgccaggtcaatttgataatccagcaaacccagaaattcatttcaaaacaactgggcctgaaatttgggatgattgcgatggtgagattgatgtttttgttgcaggggttggaacaggtggaacaattacaggagtttcaagatacatcaaacaagagaagggcaagaatattgtttctgtagcagtagaaccatcacatagccctgttattacacagacaatgaatggcgaagaagttaaatctggaccacacaaaatacaaggaataggcgcaggatttattcctaaaaaccttgatttatcaattgttgataaagttgagcaggttactaatgatgaatcaatcgagatggctcttagattggcaaaagaagaggggcttctcgtgggaatatcttgtggagctgctgctgctgctgctgttagattagctgagcaagatgaatatgcaggaaaaactatagtggttgttttaccagatttagctgagaggtatttatcatcaattatgtttaccgaagttccaaatggaataattgaggagccagttaaagcttaa

SEQ ID NO: 39315 - protein, 328 aa, Prochlorococcus marinus subsp
MAKIYEDNSFAIGNTPLVKLKSVTKNAKATVLAKIEGRNPAYSVKCRIGANMIWDAEKSGKLTKDKTIVEPTSGNTGIALAFTASARGYKLVLTMPESMSIERRRVMAVLGAEIVLTEASKGMPGAIAKAKEIAESNPSKYFMPGQFDNPANPEIHFKTTGPEIWDDCDGEIDVFVAGVGTGGTITGVSRYIKQEKGKNIVSVAVEPSHSPVITQTMNGEEVKSGPHKIQGIGAGFIPKNLDLSIVDKVEQVTNDESIEMALRLAKEEGLLVGISCGAAAAAAVRLAEQDEYAGKTIVVVLPDLAERYLSSIMFTEVPNGIIEEPVKA

SEQ ID NO: 39316 - DNA, 969 bp, Erwinia chrysanthemi
  CDS (1)..(969): transl_table=11
atgagtaagatctacgaagacaattctttcactatcggccatacgccgctggttcgtctgaatcgcatcggcaatgggcgtattctggctaaggtggagtcgcgtaacccgagcttcagcgtgaaatgccgtatcggcgccaatctgatttgggatgccgaaaaacgcggcgtgctgaagcccggcatcgaactcgtagaaccgaccagcggtaataccggtatcgcactggcgtatgtggcggcggcgcgcggttataaactgacgctgaccatgccggaaaccatgagcattgaacgccgcaagctgctcaaggcgctgggcgccaacctggtgctgaccgaaggcgccaaaggcatgaagggcgctatcgccaaagccgaagaaatcgtggccagcgacccgcaacgttacctgctgctgcagcagttcagtaacccggccaacccggaaattcacgaaaaaaccaccggcccggaaatctgggaagacaccgacggcgaagtggacgtgttcatttccggcgtgggcaccggcggtacgctgaccggcgttagccgttacatcaagaacaccaagggtaaagccatcatctccgttgccgttgagccaaccgactcgccggtcatcacccaggcgctggctggtgaagagatcaaacccggtccgcacaagatccaggggatcggcgccggtttcattccagccaacctggacctgaaactggtcgatcgcgttgagcgcgtcaccaacgaagaggctatccacaccgcgcgccgtctgatggaagaagaaggcattctggcggggatctcttcaggcgcagcggtagcggcggccctgaacctgctgaaagaagaggaattcgccaacaagaccatcgtggtgatcctgccctcttccggcgaacgttacctcagtacggcgttgtttgccgatctgttcaccgaacaggaactgcagcagtaa

SEQ ID NO: 39317 - protein, 322 aa, Erwinia chrysanthemi
MSKIYEDNSFTIGHTPLVRLNRIGNGRILAKVESRNPSFSVKCRIGANLIWDAEKRGVLKPGIELVEPTSGNTGIALAYVAAARGYKLTLTMPETMSIERRKLLKALGANLVLTEGAKGMKGAIAKAEEIVASDPQRYLLLQQFSNPANPEIHEKTTGPEIWEDTDGEVDVFISGVGTGGTLTGVSRYIKNTKGKAIISVAVEPTDSPVITQALAGEEIKPGPHKIQGIGAGFIPANLDLKLVDRVERVTNEEAIHTARRLMEEEGILAGISSGAAVAAALNLLKEEEFANKTIVVILPSSGERYLSTALFADLFTEQELQQ

SEQ ID NO: 39318 - DNA, 1515 bp, Apis mellifera
  CDS (1)..(1515)
atggaatttaaacaacctaatcgacctagttattgtacatgggaattaaatgcaacaaattcaccacatacatgtagaacaaaaaatggtgattatactaagataatgcctgatattttaactgctattggacaaacaccacttataaaattaaataatattcctaaatcttatggtataaaatgtgaaatatatgcaaaatgtgaatttcttaatcctggtggttctgtaaaagatagaattgcatatagaatgattcaagatgcagaagataaaggtttgttgaaaccaggatgtaccattattgaaccaacaagtggtaatactggaattggtttggcaatggctgctgcagttagaggatataaatgcattattgttatgccagaaaaaatgtctgatgaaaaaatatcaacactttatgcacttggtgctaaaattatacgaactccaactgaagcaagttggcatagtccagaagcacatatcagtgttgctcaaaaattacaaaaagaaataccaaatagtattattcttgatcagtatactaatcctggaaatccattggctcattatgatcaaactgcaattgaaatttggaaacagtgtgaaggcaaaatagattatttggtagctggtgctggtacaggtggtactatttcaggtattggacgaaaattgaaagaattatcaccaaatataaaaattattgctgtggatcctaaaggaagtattttagatccatcaagtgattcacaaaatgaagttggcttttatgaagtagaaggaattggttatgattttatacctacagtgttagatcgtaatgtaattgataaatggataaagactgaagataatgaatcattaaatgctgctagaatgcttatacgtcaagaaggtttactttgtggtggtagcagtggtgctgctcttatagctgctcttaaaatagctaaagatattcctgaagaaaaacgtatggtaattattttacctgatggaatacgaaactatttaactaaatttgtatcagaatattggatggaaactagaggatttttgcaacctgtttgtcaaaatgaaatgaataaatggtggtggaatatgaaaatttcaaatttatcttttgataaacaatcattgttaaaggaaaatacagtaacatgtcaagaagctatgcatatgctcaaaaatgcagattcacagttattagttattagtgatgataatatacatataaaaggtgttattagtttgaacaaacttacatcatatgtaatatctggtatagtaaaatgtacagattttgtagataaagctatggttaaacaatatgttaaagttaaacattcagcaactcttggttatatatcacgtgttcttgaaaaagaaccatatgtgataattttagatgatgaacatgatgatgcttttatcggaattgtaaatcaatttcatattttgcaatttataaccaaaaatggtacatctaataattatttaataaattaa

SEQ ID NO: 39319 - protein, 504 aa, Apis mellifera
MEFKQPNRPSYCTWELNATNSPHTCRTKNGDYTKIMPDILTAIGQTPLIKLNNIPKSYGIKCEIYAKCEFLNPGGSVKDRIAYRMIQDAEDKGLLKPGCTIIEPTSGNTGIGLAMAAAVRGYKCIIVMPEKMSDEKISTLYALGAKIIRTPTEASWHSPEAHISVAQKLQKEIPNSIILDQYTNPGNPLAHYDQTAIEIWKQCEGKIDYLVAGAGTGGTISGIGRKLKELSPNIKIIAVDPKGSILDPSSDSQNEVGFYEVEGIGYDFIPTVLDRNVIDKWIKTEDNESLNAARMLIRQEGLLCGGSSGAALIAALKIAKDIPEEKRMVIILPDGIRNYLTKFVSEYWMETRGFLQPVCQNEMNKWWWNMKISNLSFDKQSLLKENTVTCQEAMHMLKNADSQLLVISDDNIHIKGVISLNKLTSYVISGIVKCTDFVDKAMVKQYVKVKHSATLGYISRVLEKEPYVIILDDEHDDAFIGIVNQFHILQFITKNGTSNNYLIN

SEQ ID NO: 39320 - DNA, 1179 bp, Oryza sativa (japonica cultivar-group)
  CDS (1)..(1179)
atggccatggcgatggcgtcgccgcccgcttgcccattcctcctctcgctctcggccggcgccaccgccatttccaccgtgtccgccgcctacggttccgtttccgccccgcgcgcgcctctcttcctcctcgcctccccgcgtcccgtcccgcctcgccgacccctcgccgcgggctcctcatctcccaaggccgcggcacccgccgccgtcgagatccccgaggagtacgtggacgatgttgatgcggtgaacattgcgcaggacgtcacccagctgattgggaaaaccccaatggtgtatctgaataatgttgtcgacggatgtgttgctaatatcgctgcaaaacttgagtacatgggaccttgcaggagcgtcaaagacaggattggattaagcatgattaatgatgctgaagagaaaggattaatttttccaaacaagaccattttggttgaaccaactactggaaatactggtataggcctagcttctgtggctgctgctaggggatacaagctaatagcaactgtaccttcatcaatagatgttgagagatgtgttcttctacgtgcatttggagctgagattgtgttaactgatcctaacaagggactaaaaggagctcttgataaagcagaggaaattgtttcgaagacaccaaatgcatacatgtttcagcagtttaacaattccgctaatagtgagatccactttcaaaccacaggcccagaaatatgggaagacaccttgggtactgttgacatactagttgcaagcattggcacaggtggcaccattacaggcactgggcgttatctgaaaatgatgaacaaagatattaaggttattggggtagaacctgctgaaactagtgtaatctctggtgataatgctggttatattccaagcatattagatgttcagctgcttgatgaagttgtgaaggttaccaccacagaggcagtcgatgttgcaagggaacttgcactaaaagagggcctgctggttggcatttcgtcaggtgctgccacagttgctgctattaacgtcgctaaaagacctgaaaatgctggaaaattgattgcggttattttccccagctttggagaaagatatatctctagcattttattccgtccgatatatgactcggtccgaagaatgaggaagagataa

SEQ ID NO: 39321 - protein, 392 aa, Oryza sativa (japonica cultivar-group)
MAMAMASPPACPFLLSLSAGATAISTVSAAYGSVSAPRAPLFLLASPRPVPPRRPLAAGSSSPKAAAPAAVEIPEEYVDDVDAVNIAQDVTQLIGKTPMVYLNNVVDGCVANIAAKLEYMGPCRSVKDRIGLSMINDAEEKGLIFPNKTILVEPTTGNTGIGLASVAAARGYKLIATVPSSIDVERCVLLRAFGAEIVLTDPNKGLKGALDKAEEIVSKTPNAYMFQQFNNSANSEIHFQTTGPEIWEDTLGTVDILVASIGTGGTITGTGRYLKMMNKDIKVIGVEPAETSVISGDNAGYIPSILDVQLLDEVVKVTTTEAVDVARELALKEGLLVGISSGAATVAAINVAKRPENAGKLIAVIFPSFGERYISSILFRPIYDSVRRMRKR

SEQ ID NO: 39322 - DNA, 1020 bp, Oryza sativa (japonica cultivar-group)
  CDS (1)..(1020)
atggaggaaggaggcaggagagggatcccttctctgctaaattcatcgtcatcagatgaacatatcgccactgatatcactcagcttgtaggatggacgccactgatagagctgaaccggatcgtccgaaaagacggggtaaatgcccggattgttggcaaattggagtcataccaacccctctgctctgtcaaggatcgcagtgctctgagaatgattgaggatgcagaggagaaaggtctgatctcaccaggcgttacgacgctagtcgagccgacaagtggtaatcttggaataggtgtggcatacaatgctctgctcaaaggttacaggttcgttgcagtcatgcctgctgagtattcacttgataagcaaatgttgttgacgtatctaggggccgaggttattttaactgatcctacacttggttttcagggacaattagacaaagttgaacagatcaagaatgatatgcctaacgtacatcatcttgatcagtttaaaaatgcagcaaatcctgaagcacactttgtatggacagggcctgagatttggaaggatacggcaggcaaagtagatatctttgtggctggttctggcacaggaggaacaatttcaggtgtagggaaatatttgaagatgaaaaacccagcagttaaagtaatttgtgttgagcctgcggaaagccctgtaatttcaggtggtaagccttcgcggcataaaattcagggaatgggtccaggctttgtaccaaaaaacctggatatctcaatcgtcgatgagatcatcacagtaactgcacaagatgcaatggctaatgcaaagaggctggcaagagaagagggtttacttgtgggcatatcatccggagctaatttggcagcttgtctgaaggtggcatcgaggaaagaatatgagggaaagatgattgtaaccattttccctagtggtggtgaaagatacatgaactctgacctctttgcacaagcaagggaggagtgcagcgccatgaccttttga

SEQ ID NO: 39323 - protein, 339 aa, Oryza sativa (japonica cultivar-group)
MEEGGRRGIPSLLNSSSSDEHIATDITQLVGWTPLIELNRIVRKDGVNARIVGKLESYQPLCSVKDRSALRMIEDAEEKGLISPGVTTLVEPTSGNLGIGVAYNALLKGYRFVAVMPAEYSLDKQMLLTYLGAEVILTDPTLGFQGQLDKVEQIKNDMPNVHHLDQFKNAANPEAHFVWTGPEIWKDTAGKVDIFVAGSGTGGTISGVGKYLKMKNPAVKVICVEPAESPVISGGKPSRHKIQGMGPGFVPKNLDISIVDEIITVTAQDAMANAKRLAREEGLLVGISSGANLAACLKVASRKEYEGKMIVTIFPSGGERYMNSDLFAQAREECSAMTF

SEQ ID NO: 39324 - DNA, 1044 bp, Oryza sativa (japonica cultivar-group)
  CDS (1)..(1044)
atggagggagaggggattgggaggagaggccttccttcactgctcggttcctcttccagcgaaagcggcggaatcgggcaagaacacattgcctctgacatcacgcagctcataggatggacgccactggtcgagctgaagcgaatcgccagcaaggacggaatagatgcccggatcgtcggcaaggtcgaggcctatcagcccctctgctccgtcaaggatcgcagcgctttgagaatgatcgaggatgcagaagagaaagggctgattactcctggtgtcacaactctagtcgagccgacgagtggcaatctgggtttaggattggtgcttgttgctcttcgcaaaggttacaggttcgttgcagttatgccgggccagtattcgtttgataagcagatcttgctgaaatacatgggagctgaattgtttctatcagatccaacactcgggtttcaaggcttagtcgacaaggtcgaacagctcaagaaagaattacccaatgtgcacgttcttaatcaattctcaaatccagcaaatcaggaggcacacatgagattgactggacctgagatttggaaggatactgctggcaaggtagacatatttgttaccggttcgggctcaggaggtacggtatctggcgttggaaagtatctcaagctgcaaaatccagcggtgaagatcatttgtgtggagcctgcagagagcccagtcatttcaggtggggagccaggtaaacataaaattcagggaatagggccaggactcatacctgatatgttggacacctcggtcatcgatgaagtcgtcacggtaaacactgatgaagcaatggtgaatgcaaggaggctggcaatggaagagggcctccttatgggcatttcttctggggcaaacctggcagcttgcttgaaggtcgcgtcgagagaggaaaacaaggggaagatgattgtcaccatgttcccaagcgggggtgagaggtacatgaactctgacctctttgcagctgtgagagaggaatgcaatgccatgacattttaa

SEQ ID NO: 39325 - protein, 347 aa, Oryza sativa (japonica cultivar-group)
MEGEGIGRRGLPSLLGSSSSESGGIGQEHIASDITQLIGWTPLVELKRIASKDGIDARIVGKVEAYQPLCSVKDRSALRMIEDAEEKGLITPGVTTLVEPTSGNLGLGLVLVALRKGYRFVAVMPGQYSFDKQILLKYMGAELFLSDPTLGFQGLVDKVEQLKKELPNVHVLNQFSNPANQEAHMRLTGPEIWKDTAGKVDIFVTGSGSGGTVSGVGKYLKLQNPAVKIICVEPAESPVISGGEPGKHKIQGIGPGLIPDMLDTSVIDEVVTVNTDEAMVNARRLAMEEGLLMGISSGANLAACLKVASREENKGKMIVTMFPSGGERYMNSDLFAAVREECNAMTF

SEQ ID NO: 39326 - DNA, 1074 bp, Oryza sativa (japonica cultivar-group)
  CDS (1)..(1074)
atgggggaagaaatcaagaacggagaggagggaccagacatggctgcaccgggcgaggaggagcaggagcaggggaggaaaggcatcccgtctctgctctcctccagggaggagaacatcgcctctaacatcactcagctgattggatggacaccgcttgttgagatgaagaacatcgcgaagaacgaaggcgtacaggctcgattggttgggaagatggaagcataccagccactctgctctgtcaaggacaggagtgccctcagaatgattgaagatgcagaggagaaagggttgatcacacctggtgttaccacgctgattgagccaacgagtggtaatctcggtatcggtttggtgctggttgctgttcagaaaggctacaggtttattgctgtcatgcctgctaaatattcgcttgacaagcagatgctactgaggtttttgggtgctgaattgatattgacagatcctgcaattgggtttaatggtatgatggacaaggtggaagagctcatgaagagcataccaaattctcattgtctcaatcaagtaacaaacccagcaaatccagaggcacactttatgtggactggacctgaaatatggaaagacacagccggcaaagtggatgtgtttgtggcctctgttggttcaggtggcacattgacaggtgtagggaggtatctgaagatgaaaaatccatctataaatattgtgtgcgtggaaccttcagaaagccctgtaatttcaggtggttcaccagggccacacaagattcaaggcactggggcaggtttcatacctgaaattttggacaaatctgtcatcgatgaagtagtgacagtaaacacagaggaatccatggcaatggcgaggaggctggcgaaggaggaaggattgcttgttggcatatcttctggtgcaaatgtagctgcttgcatcaagattgcagacagagaggagaacaaggggaaaatgattgtgacaatgttcccgagcggcggtgaaagatacatgaactctgatctctttgcacctgttagagaggaatgtgataatatgaccttctga

SEQ ID NO: 39327 - protein, 357 aa, Oryza sativa (japonica cultivar-group)
MGEEIKNGEEGPDMAAPGEEEQEQGRKGIPSLLSSREENIASNITQLIGWTPLVEMKNIAKNEGVQARLVGKMEAYQPLCSVKDRSALRMIEDAEEKGLITPGVTTLIEPTSGNLGIGLVLVAVQKGYRFIAVMPAKYSLDKQMLLRFLGAELILTDPAIGFNGMMDKVEELMKSIPNSHCLNQVTNPANPEAHFMWTGPEIWKDTAGKVDVFVASVGSGGTLTGVGRYLKMKNPSINIVCVEPSESPVISGGSPGPHKIQGTGAGFIPEILDKSVIDEVVTVNTEESMAMARRLAKEEGLLVGISSGANVAACIKIADREENKGKMIVTMFPSGGERYMNSDLFAPVREECDNMTF

SEQ ID NO: 39328 - DNA, 1029 bp, Oryza sativa (japonica cultivar-group)
  CDS (1)..(1029)
atggcggctgaggtggaggaggggaggacgggtatcccgtctctgctctcctccgccgtgggggaggagaccatcgcctccaacatcgcccagctgataggctggacgccactgattgagatgaagaacatccccaagaaagaaggcatccaaactcgtttgatcgggaagatggaaacataccaacccctgttctcggtcaaggacagaactgctctcagtatgattgaagatgcagaggagaaaggcctcattactcccggtgttacgacactgattgaaccaaccagtggcaatcttggtatcggtttggtattggttgctattcagaaaggctacaggtttattgctgttatgcccgctagatattcacctgacaagcagatgctattgaggtttttgggtgctgaactgatattaacagatcctgcaggtgggtacaagggtgcgatggacaaagtggaagatctcatgaagatcatgcctaattatcattgttttaatcaagcaaccaacccagcaaatccagaggcacatttcaaatggactggacctgaaatttggaaggacacagccggcaaagttgatttctttgtaaccgcagctggaacaggaggcacattgtcaggtgtaggaaggtacctgaagatcaaaaatccatctataaatatagtgtgcgtggaaccttcagaaagtgctgtaatttcaggtggttcaccaggatcacacaagattcaaggcactgggccaggtttcataccgaaaactttggacaggtccatcatcgatgaagttgtgaccgtaagctcagaggaatccatggcaatggcaagaaggcttgcaaaggaagaggggcttcttgttggcatatcttctggtgcaaatgtagctgcttgcatcaagattgcagctagagaggagaacaagggtaagatgattgttacgatgttcccgagtggtggtgaaagatacatgagctctgatctctttgcagatgtaagggaggaatgtgctaatatgaccttctaa

SEQ ID NO: 39329 - protein, 342 aa, Oryza sativa (japonica cultivar-group)
MAAEVEEGRTGIPSLLSSAVGEETIASNIAQLIGWTPLIEMKNIPKKEGIQTRLIGKMETYQPLFSVKDRTALSMIEDAEEKGLITPGVTTLIEPTSGNLGIGLVLVAIQKGYRFIAVMPARYSPDKQMLLRFLGAELILTDPAGGYKGAMDKVEDLMKIMPNYHCFNQATNPANPEAHFKWTGPEIWKDTAGKVDFFVTAAGTGGTLSGVGRYLKIKNPSINIVCVEPSESAVISGGSPGSHKIQGTGPGFIPKTLDRSIIDEVVTVSSEESMAMARRLAKEEGLLVGISSGANVAACIKIAAREENKGKMIVTMFPSGGERYMSSDLFADVREECANMTF

SEQ ID NO: 39330 - DNA, 1035 bp, Mesorhizobium loti MAFF303099
  CDS (1)..(1035): transl_table=11
atgccccgttctgtgatcgacgcgatcggcaacacgcctctgatccgccttaacaaagcgtccgaagaaaccggctgcgagatcctgggcaaggccgaattcatgaatccggggcaatcagtcaaggatcgcgccgggcttttcatcatccgcgacgccgaacggcgcggcctattgaagccgggcggcgtcatcgtcgagggaacggcaggcaatacgggcatcgggctgacgctggtcgccaaggcgctgggttatcgcacggtcatcgtcattcccgatacgcagagccaggaaaagaaggacacgatccggctactcggcgccgagctgatcgaggtgccggccgtgccctacaagaaccccaacaattacgtgaaactgtcgggacggctggccgagcagatggcgaggaccgagtccaacggcgccatctgggccaatcagttcgacaatgtcgccaaccgcgatgggcatatccgcaccacggcggaggaaatctgggcacagaccggcggcaaggttgacggtttcgtctcggcggtgggttcaggcggcacgctggccggcgtcgctttcgggctgaaggccaagagcaaggatgtgaaaatcgcgctcgccgacccgcttggtgccgccctctacagcttttacaccagcggcgagttgaagtccgaaggcagctcgatcaccgaaggcatcgggcaggggcgcatcaccgccaatctagaagggttcacgccggatttctcgttccagatcaaggacgaggacgcgcttccgatcgtcttcgacctgatccaggaagagggcctgtgcgtcggcggctcgaccggcatcaacattgccggcgccatccggctcgccagggaattaggccccggccacaccatcgtgaccattctttgcgactacggcacgcgctaccagtcgaagctgttcaatccggaattcctgcgcgagaagaatctcccggtgccggggtggatggaactgcagagcaagatttcggtgcctttcgaaaaggtcgaatga

SEQ ID NO: 39331 - protein, 344 aa, Mesorhizobium loti MAFF303099
MPRSVIDAIGNTPLIRLNKASEETGCEILGKAEFMNPGQSVKDRAGLFIIRDAERRGLLKPGGVIVEGTAGNTGIGLTLVAKALGYRTVIVIPDTQSQEKKDTIRLLGAELIEVPAVPYKNPNNYVKLSGRLAEQMARTESNGAIWANQFDNVANRDGHIRTTAEEIWAQTGGKVDGFVSAVGSGGTLAGVAFGLKAKSKDVKIALADPLGAALYSFYTSGELKSEGSSITEGIGQGRITANLEGFTPDFSFQIKDEDALPIVFDLIQEEGLCVGGSTGINIAGAIRLARELGPGHTIVTILCDYGTRYQSKLFNPEFLREKNLPVPGWMELQSKISVPFEKVE

SEQ ID NO: 39332 - DNA, 1440 bp, Mesorhizobium loti MAFF303099
  CDS (1)..(1440): transl_table=11
atgagcgagcacggaaaagctgcgccaggcagcgccccctcggatggccaatctgcgcgcctgcggccaccttataaatcggttctcgacctgatcggccagacgccggtggtcgagctgaccaagttcgacaccggcaaatgccggctgttcatcaagctcgaaagccagaacccgggcggctcgatcaaggaccgcatcgcgctgtcgatgatcgcggcggccgagagagagggcaagctcaagcgcggcggcaccatcgtcgaggcgaccgccggcaataccggcctcggccttgcccaggtcggcatccccaagggctaccgcatcgtgctggtggtgcccgacaagatgtcgcgcgagaagatccagcatctgcgcgcgctgggcgccgaggtgcgcatgacgcgctccgatgtcggcaagggccacccggaatattaccaggacatggccgagaagatcgccgccgaagtgcccggcgccttctatgccaaccagttcgccaatccggccaacccgctggcgcatgagacgacgaccggcccggaaatcttttcgcagctcgacggcaatgtcgacgcggtggtcgtcggcgtcggctcgggcggcacgctgaccgggcttggccgctatttttcgaaagtctcgcccaagaccgaaatggtgctggccgatccggtcggctcggtgctggcgccgctgatcaagaccggcaagatggaagaggccggcagctggacggtggaaggcatcggcgaggatttcgtgccgcccaatgccgatctgtcgctggtcaagaaggcctattcgatatcagacaagcaaagcatgctggcggtgcgtgatctgctgtcacgcgaaggcattctggctggttcgtcctcgggcacgcttttatcggccgccttgcgctattgccgcgagcagacgacgccgaagcgcgtcgtcaccttcgtctgcgacagcggcaacaagtacctgtccaaggtcttcgacgatttctggctggccgaacagggcctggccgaacacgagcagcatggcgatctgcgcgacctcgtgatgcgctcgcaccgcaccggcgacacggtctatgtcggccccgacgaaagcctgctcaacgcctacggccgcatgcgccgttccgatgtctcgcagctgccggttctggaagatggcaagctgatcggcatcgtcgacgagagcgatattctggccaaggtcgacggaccctatgacggccgctgggagcgcttcaacggtccggtgcgcacggcgatgacctccaatctgcacacgctgcaggccagccagacgctggatgcactgttgccggtgttcgaccgcaacgaggtcgccatcatcttcgacggcgacgagttcgtcggcctgatcacccggatcgacctgatcaaccatttgaggcgcgcacgatga

SEQ ID NO: 39333 - protein, 479 aa, Mesorhizobium loti MAFF303099
MSEHGKAAPGSAPSDGQSARLRPPYKSVLDLIGQTPVVELTKFDTGKCRLFIKLESQNPGGSIKDRIALSMIAAAEREGKLKRGGTIVEATAGNTGLGLAQVGIPKGYRIVLVVPDKMSREKIQHLRALGAEVRMTRSDVGKGHPEYYQDMAEKIAAEVPGAFYANQFANPANPLAHETTTGPEIFSQLDGNVDAVVVGVGSGGTLTGLGRYFSKVSPKTEMVLADPVGSVLAPLIKTGKMEEAGSWTVEGIGEDFVPPNADLSLVKKAYSISDKQSMLAVRDLLSREGILAGSSSGTLLSAALRYCREQTTPKRVVTFVCDSGNKYLSKVFDDFWLAEQGLAEHEQHGDLRDLVMRSHRTGDTVYVGPDESLLNAYGRMRRSDVSQLPVLEDGKLIGIVDESDILAKVDGPYDGRWERFNGPVRTAMTSNLHTLQASQTLDALLPVFDRNEVAIIFDGDEFVGLITRIDLINHLRRAR

SEQ ID NO: 39334 - DNA, 981 bp, Mesorhizobium loti MAFF303099
  CDS (1)..(981): transl_table=11
atgaacaagcccgtcacctccgcccgcgtccccggccgcggccgcatctacagttccatcaccgacacgatcggcgacacgcccctggtccggctcgacaaattcgccaaggagaagggggttgtcgccaatctcgtggccaagctcgaattcttcaacccgatcgcctcggtcaaggaccgcatcggcgtggcgatgatcgaggcgctggaggcggccggcaagatctcgcccggcaagacgacgctgatcgaaccgacctcgggcaacaccggcatcgcgcttgccttcgccgccgccgccaagggctacaagctcatcctgaccatgcccgaaacgatgtcggtcgagcgccgcaagatgctggcgctgctcggcgccgaactggtgctgaccgaagggccgaaaggcatgaagggcgccatcgccaaggccgacgagctggccgcgacaatccccaatgccgttatcccgcagcagttcgaaaaccccgccaacccggaaatccaccgcaagacgacagcgcaggagatctggaacgacacgcagggcgaggtcgacatcttcgtcgccggcatcggcacgggcggcaccatcaccggcgtcggccaggtgctgaagaagctcaagccctcgctgcatgtcgtcgccgtcgagccggaagcctcgccggtgctgtcgggcggccagcccggcccgcacaagatccagggcatcggcgccggcttcgcaccaaaaatcctcgacaccacgatctatgacgagatcatcaaggtttccaacgaggattccgtcgccaatgcccgcctcgtcgcccgtctcgaaggggtgccggtcggcatctcgtcgggtgcggcgctgcaggcggcaatcgtcgtcggctcgcggccggagaacaagggcaagaccctggtcgtggtcatccccgacttcgccgagcgctacctgtcgacgatcttgttcgaggggctgggggcttag

SEQ ID NO: 39335 - protein, 326 aa, Mesorhizobium loti MAFF303099
MNKPVTSARVPGRGRIYSSITDTIGDTPLVRLDKFAKEKGVVANLVAKLEFFNPIASVKDRIGVAMIEALEAAGKISPGKTTLIEPTSGNTGIALAFAAAAKGYKLILTMPETMSVERRKMLALLGAELVLTEGPKGMKGAIAKADELAATIPNAVIPQQFENPANPEIHRKTTAQEIWNDTQGEVDIFVAGIGTGGTITGVGQVLKKLKPSLHVVAVEPEASPVLSGGQPGPHKIQGIGAGFAPKILDTTIYDEIIKVSNEDSVANARLVARLEGVPVGISSGAALQAAIVVGSRPENKGKTLVVVIPDFAERYLSTILFEGLGA

SEQ ID NO: 39336 - DNA, 1089 bp, Mesorhizobium loti MAFF303099
  CDS (1)..(1089): transl_table=11
atgttgaatcgacagaaaatcaggaccaccgccgggcgcggccgcctgttcgacagcattctcgacaccgtcggcgacacgccggtgatccgcgtcaacaatctcgggccggcccatgcgacggtctacgtcaaggccgagttcttcaaccccgccgcctcggtcaaggaccggctggcgctcaacatcatcgaggagggcgagcgcagcggtgcgttgaagcccggccagacggtggtcgaggccaccagtggcaacaccggcattgggctggccatggtctgcgcgcaaaagggctatccgctggtcgtcaccatggccgacagcttttccgtcgagcgccgcaagctgatgcgcatgctgggcgccaaggtggtgctgacgccgcgcgccgaaaagggttttggcatgtacaagaaggcggtggagctggccgaggccaatggctggttcctcgcccgccagttcgagaccgccgccaacgccgccatccacgaggcgaccacggcgcgcgagatcatcaatgatttcgccggctcgcggctcgactgcttcgtcaccggctacggcaccggcggcaccgtcgtcggcgtggcgcgtgtgctgcgccgcgagcggccggacacccgcatcgtgctctccgaaccggccaatgcgcagctcattggcagcggcaaggcacagcagcgcggtgcccatggcgcccctgccgccagccatccggccttcgagccgcatccgatccagggctggacgccggacttcatccccaatgtgctgcaagaggcgatcgacgccagcctctatgacgaggtgatgccgattgccgggcccgaaggcatcaaatgggccaaggcactggctcagaaggagggcatctttaccggaatttccggcggcgccaccttcgccgtggcacggcaggtcgcggaaaaggcgccggccggatcggtgatcctgtgcatgctgcccgacaccggcgagcgctacatgtcgacgccgctgttcgacggcatcgaggccgagatggatgccgaggagatggcgctgtcgcgctcgacgcccggcggccagttcccggcggcttga

SEQ ID NO: 39337 - protein, 362 aa, Mesorhizobium loti MAFF303099
MLNRQKIRTTAGRGRLFDSILDTVGDTPVIRVNNLGPAHATVYVKAEFFNPAASVKDRLALNIIEEGERSGALKPGQTVVEATSGNTGIGLAMVCAQKGYPLVVTMADSFSVERRKLMRMLGAKVVLTPRAEKGFGMYKKAVELAEANGWFLARQFETAANAAIHEATTAREIINDFAGSRLDCFVTGYGTGGTVVGVARVLRRERPDTRIVLSEPANAQLIGSGKAQQRGAHGAPAASHPAFEPHPIQGWTPDFIPNVLQEAIDASLYDEVMPIAGPEGIKWAKALAQKEGIFTGISGGATFAVARQVAEKAPAGSVILCMLPDTGERYMSTPLFDGIEAEMDAEEMALSRSTPGGQFPAA

SEQ ID NO: 39338 - DNA, 930 bp, Thermoplasma volcanium GSS1
  CDS (1)..(930): transl_table=11
atgatgcacgcagaattagggccagatatggtttccaagattcttgaccacatgaaggctgcgcatataggaaatacgcctgtagaagagatcgatgcgaatggcaatatatacgctaagatagaatgggagaataggttcgggtcgatcaaagataggccggcattcttcataatggattatcttaagtccaagggtgtacttgaaggtaaggctatagtagaagcctcatcaggaaatactggccttgcgatatctacaatatcctctatgttgggcttgcagtcctgcattgttttgccagaaaacgcaagtcaggcaacaaagaaaattatagttgaaaatggctctcaactcattcttacgcctcccgatcttggtactgaggggagcatagaaaaagcaaggtcattagcctcttcaggcagtttttattggataaatcagcattcgaacccactcaacagcgatgtacactactacagtacagcacctgaattgctagatcaggaagggatgcctgaagcaatagttgcgggagtaggaacgggtggtacgatcacaggcatagcaagatactttaaggaaagagacccatcagtaaaggtgataggcgttcagccatcgctatattcccacatccctgggctaagggatataaagaagacttctaacaaaggcttgatcgatctttacggcagctacatcgatgatttcctatatgtgaaggaatcagatgccattgcagaagttttcgatcattacgtaaatacaggggagcttatagggatatcttcgggtgcaaatctttacgcgtctaagcagctctcgagcaaatttaagaagatattcacagtattcccagatagcggccgcaagtatttggatattttaaagccatacgataaaaacaacgttttaaattattga

SEQ ID NO: 39339 - protein, 309 aa, Thermoplasma volcanium GSS1
MMHAELGPDMVSKILDHMKAAHIGNTPVEEIDANGNIYAKIEWENRFGSIKDRPAFFIMDYLKSKGVLEGKAIVEASSGNTGLAISTISSMLGLQSCIVLPENASQATKKIIVENGSQLILTPPDLGTEGSIEKARSLASSGSFYWINQHSNPLNSDVHYYSTAPELLDQEGMPEAIVAGVGTGGTITGIARYFKERDPSVKVIGVQPSLYSHIPGLRDIKKTSNKGLIDLYGSYIDDFLYVKESDAIAEVFDHYVNTGELIGISSGANLYASKQLSSKFKKIFTVFPDSGRKYLDILKPYDKNNVLNY

SEQ ID NO: 39340 - DNA, 1107 bp, Arabidopsis thaliana
  CDS (1)..(1107)
atggcctctgtttcaaggaggttactgaggagagagacgatcccctgtttcagccacaccgtgaggaaactcttctccaccgttggatctccttcttttgctcagagactcagagatctccccaaagacttcccctctaccaacgccaaacgtgacgcctctctgcttattgggaaaacgcctcttgtgttcctcaacaaagtcactgaaggttgtgaagcgtatgttgcagccaaacaagaacatttccagccaacttgtagcattaaagacagaccagctatagccatgattgcagatgcagagaagaaaaaactaatcatccctggaaaaacaacactgatagagcctacttcaggaaacatgggaatcagtttggctttcatggctgctatgaaagggtacaggattataatgacgatgccttcgtacactagcttggagaggagagtgacgatgagatcctttggtgctgagcttgttctcactgatccagccaaaggaatgggtggaactgttaagaaagcttatgacctccttgatagtactcctgatgctttcatgtgtcaacagtttgctaatcctgcaaacactcagattcattttgatacaactggtcctgagatttgggaagatacacttggaaatgttgatatatttgtgatgggaattggcagtggaggcacagtctctggtgttggccgataccttaaatctaaaaaccccaatgtcaagatatatggagtggagcctgctgaaagcaacatactcaacggtggcaaaccaggtccacatgctatcacaggcaatggtgttggattcaaaccagaaatcttggatatggatgttatggagagtgttcttgaggttagtagtgaggatgctataaagatggctagagaattggcattgaaagaaggtctcatggttgggatatcgtcgggagctaacaccgtggcagcaattagactggcgaaaatgccagagaataaaggcaaactcattgtgacaattcatgcgagcttcggagaaagatatctgtcgtctgttctgtttgatgagctgaggaaagaagcagaggagatgaagccagtttcagtggattga

SEQ ID NO: 39341 - protein, 368 aa, Arabidopsis thaliana
MASVSRRLLRRETIPCFSHTVRKLFSTVGSPSFAQRLRDLPKDFPSTNAKRDASLLIGKTPLVFLNKVTEGCEAYVAAKQEHFQPTCSIKDRPAIAMIADAEKKKLIIPGKTTLIEPTSGNMGISLAFMAAMKGYRIIMTMPSYTSLERRVTMRSFGAELVLTDPAKGMGGTVKKAYDLLDSTPDAFMCQQFANPANTQIHFDTTGPEIWEDTLGNVDIFVMGIGSGGTVSGVGRYLKSKNPNVKIYGVEPAESNILNGGKPGPHAITGNGVGFKPEILDMDVMESVLEVSSEDAIKMARELALKEGLMVGISSGANTVAAIRLAKMPENKGKLIVTIHASFGERYLSSVLFDELRKEAEEMKPVSVD

SEQ ID NO: 39342 - DNA, 876 bp, Thermotoga maritima MSB8
  CDS (1)..(876): transl_table=11
atgatggaaagactgatagggagcactcctatagtgagactcgattcgatagactcgagaatcttcttgaaactggaaaagaataatcccggtggtagtgtaaaagacagacccgccctcttcatgattctcgacgcagagaaaagaggactcctcaagaacggtatcgtggaaccaacgagcggcaacatgggaatcgccatagcgatgatcggagcaaagagaggacacagggtgatcctcacgatgcccgaaaccatgagcgttgagagaagaaaggtcctgaaaatgctcggagcagaactcgttctcacaccaggggaactgggaatgaaaggtgcggtggaaaaggcgctcgagatatccagagaaaccggcgcgcacatgctcaaccagttcgaaaacccctacaacgtctactctcaccagttcactacaggtccggagatcctcaaacagatggactatcagatagacgccttcgtcgcgggagtgggaacgggaggcacgatcagcggagtgggaagggttttgaaaggcttctttggaaacggagtgaagatagtagcggtagagcccgcaaaatctcccgttctctctggaggccagccgggaaaacacgccatccagggtataggagcgggctttgttccgaagatcctggacagatccgtgatagacgaagtgatcaccgtggaggacgaagaggcctacgagatggcgaggtacctcgcaaaaaaagagggacttctcgtagggatctcttccggtgccaacgtcgcagccgctttgaaagtagcccagaaactcgggccagacgcgagggttgtgaccgttgcaccggaccacgcggaaagatacctgagtatcctatga

SEQ ID NO: 39343 - protein, 291 aa, Thermotoga maritima MSB8
MMERLIGSTPIVRLDSIDSRIFLKLEKNNPGGSVKDRPALFMILDAEKRGLLKNGIVEPTSGNMGIAIAMIGAKRGHRVILTMPETMSVERRKVLKMLGAELVLTPGELGMKGAVEKALEISRETGAHMLNQFENPYNVYSHQFTTGPEILKQMDYQIDAFVAGVGTGGTISGVGRVLKGFFGNGVKIVAVEPAKSPVLSGGQPGKHAIQGIGAGFVPKILDRSVIDEVITVEDEEAYEMARYLAKKEGLLVGISSGANVAAALKVAQKLGPDARVVTVAPDHAERYLSIL

SEQ ID NO: 39344 - DNA, 969 bp, Vibrio cholerae O1 biovar eltor str. N16961
  CDS (1)..(969): transl_table=11
atgagcaaaatctacgaagacaattcactgactattggtaacactccactagtgcgcttaaacaaagtctctaacggcaaagtgctggctaagattgaagcacgcaacccaagcttcagcgtaaaatgccgaatcggagccaatatgatttgggaagctgaaaagcaaggcaaactcaagcctggcgttgaattagtagagccaacaagtggtaatactggtgttgccctagcgtttgttgctgcagctcgtggatacaagttaactctgaccatgcctgaatcgatgagtttagagcgtcgtaagctactcaaagcacttggcgccaatttagaactgactgaagcagcaaaaggcatgaaaggcgcgattgcgaaagcagaagagattgttgccagcaacccagaaaaatatttgctcctccagcaattcaataacccagctaacccgcagatccatgaaaagaccacaggcccagagatttgggatgcaacagatggtcaaattgatgtgtttgttgctggtgtgggtactggcggtacattaacgggtaccagtcgctacatcaaaggcactcaaggtaaagctattctttctgttgcggttgaaccggctgaatcaccggtcattacacaagcgctggcgggagaagaaatcaaacctgctccacataaaattcaaggtatcggtgccggttttatccctggtaacttagatttaagcttgattgatcgtgttgagcgtgtcacctcagatgaagcgattgaaatggcgcgtcgcctaatggaagaagaaggcattctcgcggggatctcttctggtgctgcggttgttgccgctaaccgaatcgcacaattgcctgaatttgaaggaaaaactatagttactgtgttaccaagttcaggtgaacgttacttgagcacagctctattcgcaggcattttcactgataaagaaaaccagcagtaa

SEQ ID NO: 39345 - protein, 322 aa, Vibrio cholerae O1 biovar eltor str. N16961
MSKIYEDNSLTIGNTPLVRLNKVSNGKVLAKIEARNPSFSVKCRIGANMIWEAEKQGKLKPGVELVEPTSGNTGVALAFVAAARGYKLTLTMPESMSLERRKLLKALGANLELTEAAKGMKGAIAKAEEIVASNPEKYLLLQQFNNPANPQIHEKTTGPEIWDATDGQIDVFVAGVGTGGTLTGTSRYIKGTQGKAILSVAVEPAESPVITQALAGEEIKPAPHKIQGIGAGFIPGNLDLSLIDRVERVTSDEAIEMARRLMEEEGILAGISSGAAVVAANRIAQLPEFEGKTIVTVLPSSGERYLSTALFAGIFTDKENQQ

SEQ ID NO: 39346 - DNA, 924 bp, Bacillus halodurans C-125
  CDS (1)..(924): transl_table=11
atgagagtggcaaactccattaccgatttgatcggtcaaacgccgttagtaaaattaaatcgactcgtttctgacaaacatgccgatgtttacttaaagcttgaattttttaaccctggaagcagcgtaaaagatcgtattgcacttgcgatgattgaagctgcagaaaagtctggggctttaaagcctgatgatacaatcgttgagcctacttctggaaatactgggatcggccttgcgatggttgctgcggcaaaagggtataaaacaaaacttgtcatgcctgagacgatgagtttagagcgccggaacttgctgcgtgcatacggtgcagagcttgttctaactcctggccctgaaggaatgggaggagcgattcgtaaagcaacagagcttgcccaagaaaatgggtacttcatgccacaacaatttgaaaatgaagcgaacccagaaattcaccgtgaaacgacaggtcgtgagcttcttgagcaggtggacggtcagcttgatggcttcgtatctggaattggaacaggtggaacgattacaggtgcaggtggattgctaaaagaaaacttcccgaacttgcacattgcagctgttgagcctgcagattctccagtattatctggtggaaacccagggcctcataaaattcaaggaattggtgccggatttgtgccgaaaatccttgatacagacatctatgatgaagtcataaaagtttcaacagaacaagcatttgaatacgctcgtcgtgcagcgaaagaagaaggaatccttggaggaatttcttctggtgcagccatttatgcagcgttgcaagtggctgaaaagcttgggccaggtaaaaaagtagtagccgtcatcccatcaaatggagagcgctacttgagcacacctctttatcaatttgaggactaa

SEQ ID NO: 39347 - protein, 307 aa, Bacillus halodurans C-125
MRVANSITDLIGQTPLVKLNRLVSDKHADVYLKLEFFNPGSSVKDRIALAMIEAAEKSGALKPDDTIVEPTSGNTGIGLAMVAAAKGYKTKLVMPETMSLERRNLLRAYGAELVLTPGPEGMGGAIRKATELAQENGYFMPQQFENEANPEIHRETTGRELLEQVDGQLDGFVSGIGTGGTITGAGGLLKENFPNLHIAAVEPADSPVLSGGNPGPHKIQGIGAGFVPKILDTDIYDEVIKVSTEQAFEYARRAAKEEGILGGISSGAAIYAALQVAEKLGPGKKVVAVIPSNGERYLSTPLYQFED

SEQ ID NO: 39348 - DNA, 939 bp, Bacillus halodurans C-125
  CDS (1)..(939): transl_table=11
atgaagatcgtaaataatattgccgagctcatcggtgacacacctttggttcggcttaatcgcttgccgaacccaaagggagctgccgtttatttgaaaatggagatgtttaacccaagtgggagcgtaaaagatcgagcagcctatcaaatgattgtccaagcggaaaaggacggctatcttaagccaggttccacgatcattgaaccaacaagtggaaacacaggcattggtcttgcaatgaatgctgcggcgagaggctatcgggccattcttaccatgcctgatacaatgtcagaggagcgaatcaacctattaaaggcctacggggcagaggttgtactgaccgaaggagaaaagaaaatgccgggggctatcgaaaaagcccatgaattagtaagagaaatcccgaatagttttatgccgatgcaatttgagaattcggcaaaccctgatgctcaccgtttcacgaccgctgtggaaatcaagaaagcccttgattccatcggtaaaaagttaagcgcctttgttgctgcctctggtacgggtggtacgattacgggaacaggagaagagttgaaaaagttttatccaaacgtagagatccatgtcgttgagccgttcggatcccccgttctctcaggaggaaagccaggtccacataaactagttgggaccagccccggctttgtacctccgattttaaaccaagacgtttatgatgtgattgataaaatcaaggatgaagatgcatatgaagctgcgcgaaatcttgctcgcctggaaggaatcttagtcggtccttcatcaggtgcggcttgctatgcggcgatgaaggtggccgagcgcttagctccagatgaggtcgttgtctgtatcgcgtgtgatactggggaacgttatttatctaccgacctgtttgattttgagagtcaataa

SEQ ID NO: 39349 - protein, 312 aa, Bacillus halodurans C-125
MKIVNNIAELIGDTPLVRLNRLPNPKGAAVYLKMEMFNPSGSVKDRAAYQMIVQAEKDGYLKPGSTIIEPTSGNTGIGLAMNAAARGYRAILTMPDTMSEERINLLKAYGAEVVLTEGEKKMPGAIEKAHELVREIPNSFMPMQFENSANPDAHRFTTAVEIKKALDSIGKKLSAFVAASGTGGTITGTGEELKKFYPNVEIHVVEPFGSPVLSGGKPGPHKLVGTSPGFVPPILNQDVYDVIDKIKDEDAYEAARNLARLEGILVGPSSGAACYAAMKVAERLAPDEVVVCIACDTGERYLSTDLFDFESQ

SEQ ID NO: 39350 - DNA, 948 bp, Pasteurella multocida subsp. multocida str. Pm70
  CDS (1)..(948): transl_table=11
atgaccatttactcagataattcttattcaattggtaatacaccacttgtgcgcttgaaacactttggtcaaggcaatattgtggtcaaagtggaagggcgtaatcccagttttagtgtgaagtgccgtattggggcgaatatggtatggcaagcagaaaaagacggtatcttgacgaaagaaaaagaaattgtcgatgctaccagtgggaatactgggatcgccttagcctatgtggcagctgcacgcggttataaaatcactttaacgatgccagaaaccatgagtgcagaacgtaaacgtttattacgtggattgggcgtcaatttagttttaacggaaggtgcattgggcatgaaaggggctattgccaaagcagaagaaattgtcgcgtctgatccacaacgctatgtaatgttaaagcagtttgaaaatccggctaatccagccattcaccaacaaacaaccggaccggaaatttggcgtgatacggatggtcaaattgatgtgctggttgctggtgttggcaccggcgggacgattacagggattagccgttatattaaacaagataaaggtaaagcgattctctctgtggcagttgaacctgcggaatcaccagtgattagtcaaactttagccggtgaagagatcaagcctgccccacataaaattcaaggcattggcgcgggctttatccctaaaaatttagaccttgcattagtggatcgtgttgaaaccgtgagtagtgaggaagccatgcaaactgcacgtcgattaatggcagaagaaggcattttaggggggatttcatcaggagcggcggtggctgccgcagatcgtttggcaaaattacctgaatttgccgagaaattaatcgtagtgattttaccgtctgcgtcagaacgctatttaagtacggcattatttgaaggcattgaggcttaa

SEQ ID NO: 39351 - protein, 315 aa, Pasteurella multocida subsp. multocida str. Pm70
MTIYSDNSYSIGNTPLVRLKHFGQGNIVVKVEGRNPSFSVKCRIGANMVWQAEKDGILTKEKEIVDATSGNTGIALAYVAAARGYKITLTMPETMSAERKRLLRGLGVNLVLTEGALGMKGAIAKAEEIVASDPQRYVMLKQFENPANPAIHQQTTGPEIWRDTDGQIDVLVAGVGTGGTITGISRYIKQDKGKAILSVAVEPAESPVISQTLAGEEIKPAPHKIQGIGAGFIPKNLDLALVDRVETVSSEEAMQTARRLMAEEGILGGISSGAAVAAADRLAKLPEFAEKLIVVILPSASERYLSTALFEGIEA

SEQ ID NO: 39352 - DNA, 1374 bp, Pseudomonas aeruginosa PAO1
  CDS (1)..(1374): transl_table=11
atgacttccgactcacgtcccgccgtgctcgacctgatcggcaacaccccgctggttcgcgtgacgcgcttcgataccggcccctgcaccctgtacctcaagctcgaatcgcagaaccccggcggctccatcaaggatcgcatcggtgtcgccatgatcgaggccgccgagcgtgacggccgcctgcggcccggtggcaccatcgtcgaggccaccgccggcaacaccggtctcggcctggccctggtcggccgcgcgaagggctaccgggtggtgctggtggtgccggacaagatgtccaccgagaaggtcctgcacctgcgcgccatgggcgccgaggtgcacatcacccgatcggacgtcggcaagggccatccggagtactaccaggacgttgccgcgcgcctggcgcaggatattcccggcgccttcttcgccgaccagttcaacaacccggccaacccgctggcccacgagtgcggcaccggcccggagctctgggcgcagaccggccacgatctcgacgccatcgtcgtcggcgtcggctcctccggtaccctgaccggccttacccggttcttccagaaggtccagccggagctggagatggtgctcgccgatcccgagggctcgatcatggccgagtactcccgctccggcaccctgggtacgccgggttcctgggcggtggagggcatcggcgaggacttcgtaccggccatcgccgacctctccagcgtgcgccatgcctattccatcagcgacgaggaaagcttcgccatggcccgcgaactgttgcgcgtcgagggcattcccggcggctcctccaccggcaccctgctggccgcggcgctgcgcttctgtcgcgagcagaaggagccgaagcgggtggtcagcttcgtctgcgacaccggcacccgctacctgtcgaagatctacaacgaccagtggatgaccgaccagggcctgctgcaacgcaagcactacggcgacctgcgcgacatcatcgcgcggcgcttcgaggagggccgggtgatcagcgtcggtccggacgacaccctgctcaccgccttccagcgcatgcgcctggccgacgtttcgcaattgccggtgctggacgatggaaaactggtcggtgtgatcgacgagtcggatatcctgctcggtgtccacgccgacgcgccacgcttccgcgatgcggtaagcagcgcgatgaacgccgcgccggagaccctcgcgcccggcgccagcctggcccagttgcaggcggtcctggaccgcggcctggtggcgatcgttgccgatgccagcggcttccacggcctgatcacccgtttcgacctgttgaaccatttgcggagaaagctcgcatga

SEQ ID NO: 39353 - protein, 457 aa, Pseudomonas aeruginosa PAO1
MTSDSRPAVLDLIGNTPLVRVTRFDTGPCTLYLKLESQNPGGSIKDRIGVAMIEAAERDGRLRPGGTIVEATAGNTGLGLALVGRAKGYRVVLVVPDKMSTEKVLHLRAMGAEVHITRSDVGKGHPEYYQDVAARLAQDIPGAFFADQFNNPANPLAHECGTGPELWAQTGHDLDAIVVGVGSSGTLTGLTRFFQKVQPELEMVLADPEGSIMAEYSRSGTLGTPGSWAVEGIGEDFVPAIADLSSVRHAYSISDEESFAMARELLRVEGIPGGSSTGTLLAAALRFCREQKEPKRVVSFVCDTGTRYLSKIYNDQWMTDQGLLQRKHYGDLRDIIARRFEEGRVISVGPDDTLLTAFQRMRLADVSQLPVLDDGKLVGVIDESDILLGVHADAPRFRDAVSSAMNAAPETLAPGASLAQLQAVLDRGLVAIVADASGFHGLITRFDLLNHLRRKLA

SEQ ID NO: 39354 - DNA, 918 bp, Pseudomonas aeruginosa PAO1
  CDS (1)..(918): transl_table=11
atgatctacgattcgctactcgatttaattggcgggacgccggtgatacggctgagcaaattgtctgctcgcctgggggtgagcgtattcgccaagctggaatccttcaatccaggaggaagtcataaggcgcgtatcgcgctctggatgattctggatgccgaacgcaaaggaatcctggtgcgcgggaaagggcagaccattctcgagccgagcgggggaaatacggggattggactggcaatggcggggaacatcctggggtaccgcgtgtccctggtggttcccgacaactacagccctgacaagagacaattgctcgagctgtatggcgctcacgtcgtgctgtcggatagcagaaaagggaacaactcgcatggcgagctggcaatccagatactgctggaacatccggagttcgtcatgctcaaccagcagcgcaatccagccaacccgcaagcccatcgcgaagctacagccctggaaatcctgagggactttgcaggccagccacccccggacttcttcttcgctggcattggaactggtggacatatcacgggtgttggagaggtgctgaggaaccactggccggatatggccatctatggcgtgcagccagagcagtgcgacttgctcgacgataggcacgcatcgcatgagattcagggactttccattggtatcgtgccggaagtctgcaacctcggcattgttactggcatggtcggggtgtcgaaatctgcctgcttgtcgatgatccgggaagtcctgcaaaacgactctgtgagcatggggttgtcctccgcagccaacctggtcgcggtgctgaacatggcatctgccatgccgtcaggcgctcgtgtactgacgatgatctacgatggcgtcgagtcatacatggacgcttttcgatga

SEQ ID NO: 39355 - protein, 305 aa, Pseudomonas aeruginosa PAO1
MIYDSLLDLIGGTPVIRLSKLSARLGVSVFAKLESFNPGGSHKARIALWMILDAERKGILVRGKGQTILEPSGGNTGIGLAMAGNILGYRVSLVVPDNYSPDKRQLLELYGAHVVLSDSRKGNNSHGELAIQILLEHPEFVMLNQQRNPANPQAHREATALEILRDFAGQPPPDFFFAGIGTGGHITGVGEVLRNHWPDMAIYGVQPEQCDLLDDRHASHEIQGLSIGIVPEVCNLGIVTGMVGVSKSACLSMIREVLQNDSVSMGLSSAANLVAVLNMASAMPSGARVLTMIYDGVESYMDAFR

SEQ ID NO: 39356 - DNA, 933 bp, Lactococcus lactis subsp. lactis Il1403
  CDS (1)..(933): transl_table=11
atgactaaaatttatgataacattactgaattaatcggacaaactccaattgttaaacttcaacatgttccagcagagagtgctgatgtctatgtcaaacttgaagctttcaatcctggtggttctgtgaaagatcggattgcccttgcaatgattcgggcggctgaggccgatggacatttaaaacctggtggaacaatcgttgaaccgacttctggaaatacaggaattggactcgccttcgttggctctgctttgggttacaaagttgtcattgtcatgccagagtcattctcacttgaacgtcgcaaattgattcaagcttacggggctcaattagttttaacacccgctagtggtggaatgaaagcagcaattgctaaggcaaaagaactctcagaaacagaaggttattttcttgccatgcaatttgaaaatcccgcaaatcctgaaattcatgaaaaaacaacaggagctgagattattgatgcttttgggccaactggacttgatgcctttgtggcaggtgcagggactggtggaacgataacaggagtttcgcatgccctcaaaaaagcaaatccaactatcaaaacttatgttgtcgaagctgatgaatctgctattctctcgggtgaggctgctggcccacataaaatccaaggtatttctgctggttttattcctgggaatcttgacactaaatcttatgatgaaatcattcgggtcaaaggagatgatgccattttaacggctcgtcatcttggaggaaaagaaggatttttagttggaatttcttcgggcgcagccatttatgctgcccttgaagtagctaaaaaattaggtaagggtaaaaaagtgttagcgattgctcctgataatggagaacgctacttatcaacggctctttatgattttgagtctgaaaaataa

SEQ ID NO: 39357 - protein, 310 aa, Lactococcus lactis subsp. lactis Il1403
MTKIYDNITELIGQTPIVKLQHVPAESADVYVKLEAFNPGGSVKDRIALAMIRAAEADGHLKPGGTIVEPTSGNTGIGLAFVGSALGYKVVIVMPESFSLERRKLIQAYGAQLVLTPASGGMKAAIAKAKELSETEGYFLAMQFENPANPEIHEKTTGAEIIDAFGPTGLDAFVAGAGTGGTITGVSHALKKANPTIKTYVVEADESAILSGEAAGPHKIQGISAGFIPGNLDTKSYDEIIRVKGDDAILTARHLGGKEGFLVGISSGAAIYAALEVAKKLGKGKKVLAIAPDNGERYLSTALYDFESEK

SEQ ID NO: 39358 - DNA, 921 bp, Lactococcus lactis subsp. lactis Il1403
  CDS (1)..(921): transl_table=11
atggtaaaaattgttgaaaatattactgaattagttggaaatagtccaattatcaaactaaaaaatggtccagaaaatggagcagaaatttatctaaaacttgaatattttaatcctggaggttcagttaaagaccggattgctttacaaatgattcggcaagccgaagcagatggtcgcttaaaaaagggaggaacgattgttgaacctacctctgggaacacaggaattggacttgccatggctggtgcagctttaggctataatgtggttattatcatgcctgatagttactcaaaagagcgtcgtcagattattcaagcttatggagcagaattgattttgactccagcagctgatggcatcaaagctgccattgatttaggtcaaaaattagttgaagaaaatggttggtttatgccaatgcaatttgaaaatccagctaatttaaaagcccatgaattaacgactggtccagaaataattgaagcatttggtgaaaatggcctggacgcatttgttgcttgtgcaggcactgggggtacaatttctggtgtttctcactatcttaaaagtcaaaattctaaaatcaaaacttttgttgtcgaaccggcagaatcaccaattttaacaggaggtgagagtggtccacaccgcattcaaggaattggtattccatttatgtcaccaaatttagatacgaaagcttatgatggtgtaattgatgtaacaagtgatgaggctttagagaccgcaagaaaaattggcaaaagcgaaggatttttagtaggtatatcttctggcgcagcaatttgggcagcttatgaattggcaaaaaaacttggcaaaggtcaaaaagttctcgcactttgtgctgacaatggtgagcgctatctttcaacagaactctatgattattaa

SEQ ID NO: 39359 - protein, 306 aa, Lactococcus lactis subsp. lactis Il1403
MVKIVENITELVGNSPIIKLKNGPENGAEIYLKLEYFNPGGSVKDRIALQMIRQAEADGRLKKGGTIVEPTSGNTGIGLAMAGAALGYNVVIIMPDSYSKERRQIIQAYGAELILTPAADGIKAAIDLGQKLVEENGWFMPMQFENPANLKAHELTTGPEIIEAFGENGLDAFVACAGTGGTISGVSHYLKSQNSKIKTFVVEPAESPILTGGESGPHRIQGIGIPFMSPNLDTKAYDGVIDVTSDEALETARKIGKSEGFLVGISSGAAIWAAYELAKKLGKGQKVLALCADNGERYLSTELYDY

SEQ ID NO: 39360 - DNA, 933 bp, Neisseria meningitidis MC58
  CDS (1)..(933): transl_table=11
atgaaaattgcaaacagcattaccgaactaatcggcaacacgcctttggtcaaactgaaccgtctgaccgaaggtttgaaggcagaggttgccgtgaaactggaatttttcaatccgggcagcagcgtcaaagaccgcattgccgaagcaatgattgagggtgccgaaaaagcgggcaaaatcaacaaaaacaccgtcattgtcgaagcaaccagcggcaatacgggtgtcggtttggcaatggtatgtgccgcacgcggctacaagctggcgattaccatgccggaaagcatgagtaaggagcgcaaaatgctgttgcgcgcgtttggtgcggagctgattctgacccctgccgccgaaggtatggcgggcgcgattgccaaagcgaaatccttggtggacgcgcatcccgacacttattttatgccgcgccagttcgacaatgaggcaaaccccgaagtccaccgcaaaacaaccgccgaggaaatttggcgggatacggacggcaaagtcgatgtcttcgttgccggcgtcggcacgggcggtacgattaccggcgtgggcgaagtgttgaaaaaatacaaacccgaagttaaagtggttgccgtcgagcctgaagcttcacccgtattgagcggcggcgaaaaaggcccgcacccgattcaaggcatcggcgcaggctttattccgaccgttttgaataccaaaatttacgacagcattaccaaagtgtcgaacgaagcggcttttgaaaccgcccgcgcaatagcggaaaaagaaggcattttggtgggtatttcttccggtgcggcggtttggagtgcgttgcagcttgccaaacagcctgaaaacgaaggcaagctgatagtcgtgctgctgccttcttatggcgaacgctatctctctacgccactttttgcagatttggcataa

SEQ ID NO: 39361 - protein, 310 aa, Neisseria meningitidis MC58
MKIANSITELIGNTPLVKLNRLTEGLKAEVAVKLEFFNPGSSVKDRIAEAMIEGAEKAGKINKNTVIVEATSGNTGVGLAMVCAARGYKLAITMPESMSKERKMLLRAFGAELILTPAAEGMAGAIAKAKSLVDAHPDTYFMPRQFDNEANPEVHRKTTAEEIWRDTDGKVDVFVAGVGTGGTITGVGEVLKKYKPEVKVVAVEPEASPVLSGGEKGPHPIQGIGAGFIPTVLNTKIYDSITKVSNEAAFETARAIAEKEGILVGISSGAAVWSALQLAKQPENEGKLIVVLLPSYGERYLSTPLFADLA

SEQ ID NO: 39362 - DNA, 984 bp, Halobacterium sp. NRC-1
  CDS (1)..(984): transl_table=11
atgaaagacagcatcctggacgccatcgggacgccactcgttcggctcacggcacccgagggtgcgaccatcgcggcgaagctggaggggttcaaccccgccggctcggcgaaagaccggccggccagggagatggtgttggccgccgagcgcgcgggcgagatccagcccggcgaccagttggtcgaggcgaccagcgggaacacggggatcgggctggcgctgaccgccgccgcccgcggctacgacctcacgatcgtgatgccggcgtcgatgtccacggagcgcaagcaactgctgcgcgcgtacggcgcggacctggagctggtggacgccggcatggagaccgcgaaccaggtggccgaccgggtcgccgccgacaccggcgcgttccgggtgggacagttcgagaaccccgcgaacccgcgcgcccactaccggacgaccgccgaggagatcctcgaccaggtcgagggccgcgagatcgacgcgctcgttgcgggcgtcgggaccggcggcacgatcaccgggaccgcaaccaggctccgggaggcccatcccgagatgtccgtggtcgcggtcgagccggaggcgaacgcggtgctgtcgacgggcgaatcgggcgacgacgacttccaggggatggggccggggttcgtcagcgacaacctcgaccgggagctgatcgacaccgtcgaaaccgtggcggtggacgcggcggaagccgagacgcggcggctcgcccgcgaggagggcgtgctcgtgggccagtccagcggcgcggcggcgctggcggccacccggaccgccgagcgcatcgccgacccctcgcttgactgcccggacgtcagcttcgacgccgacgccgtcggcgatccggacgccatcgcggacggtggtgacggacccgacgactgcccgctggtcgtcacgatcctgcccgacaccggcgagcgatacctctcggcgggcgtgttcgactga

SEQ ID NO: 39363 - protein, 327 aa, Halobacterium sp. NRC-1
MKDSILDAIGTPLVRLTAPEGATIAAKLEGFNPAGSAKDRPAREMVLAAERAGEIQPGDQLVEATSGNTGIGLALTAAARGYDLTIVMPASMSTERKQLLRAYGADLELVDAGMETANQVADRVAADTGAFRVGQFENPANPRAHYRTTAEEILDQVEGREIDALVAGVGTGGTITGTATRLREAHPEMSVVAVEPEANAVLSTGESGDDDFQGMGPGFVSDNLDRELIDTVETVAVDAAEAETRRLAREEGVLVGQSSGAAALAATRTAERIADPSLDCPDVSFDADAVGDPDAIADGGDGPDDCPLVVTILPDTGERYLSAGVFD

SEQ ID NO: 39364 - DNA, 954 bp, Deinococcus radiodurans R1
  CDS (1)..(954): transl_table=11
atgatcgagtctttcatcggccacacgcccctggtgcagttgcggcgggtggtcacgcctgacatggccgacgtgtttatcaaactggagggtcagaaccccggcggcagcatcaaggaccgcaccgcgctgggactggtgcaagacgccgagcgccggggcgtcctcaaacccggcgggaccatcgtggagcccaccagcggcaacaccggcatcgggctggcgcaggtggcggcggcgaagggctacaaactcatcctgtgcatgcccgcccagatgagcgaggagcgcaagcgcacgctgagggcctacggcgccgagctgattctcaccgaccccgagcgccggatgctcgccgccatcgaggaagccgagaagattgccgccgaaacgggcgcggtgatgatgaaccagttcgccaaccccgccaaccccgccacccacgaggcgagcaccggccccgagctgtgggagcagatggaaggacgcgtggacgctttcgtgtacggcaccggcaccggcggaaccatcacaggcaccgggcgttacctcaagcggcaggacccgaacattcaggtcatcgcctgcgagcccgcccgctccaacgtcctttcgggcggcgagcgtggcaaccacgggtttcaggggatggggccgggcttcattcccgacaacctcgaccgcagcctgctcgacgacgtgattcaggtctgggaggaagacgcctacccccttgcccgccgactggcgcaggaagaaggcatcttcatcggcatgagcagcggcgcgatggtctggaccgcactcgaagtcgcccggcgcctcggccccggcaagcgcgtggtcaccatcgcctgcgacaccggggcgcgctacttgaccacggcgctcttttccggcgagggcgacaccccggcgggttatctgccgtattcgcgtgagcgggtggagtga

SEQ ID NO: 39365 - protein, 317 aa, Deinococcus radiodurans R1
MIESFIGHTPLVQLRRVVTPDMADVFIKLEGQNPGGSIKDRTALGLVQDAERRGVLKPGGTIVEPTSGNTGIGLAQVAAAKGYKLILCMPAQMSEERKRTLRAYGAELILTDPERRMLAAIEEAEKIAAETGAVMMNQFANPANPATHEASTGPELWEQMEGRVDAFVYGTGTGGTITGTGRYLKRQDPNIQVIACEPARSNVLSGGERGNHGFQGMGPGFIPDNLDRSLLDDVIQVWEEDAYPLARRLAQEEGIFIGMSSGAMVWTALEVARRLGPGKRVVTIACDTGARYLTTALFSGEGDTPAGYLPYSRERVE

SEQ ID NO: 39366 - DNA, 999 bp, Xylella fastidiosa 9a5c
  CDS (1)..(999): transl_table=11
gtgtgtacatcctccctgattacttccacagagaccttcatgactatctacaacactatcctggacacgattggccacacacccgtggttaaactgaaccgtattgctccggcacacgtggatctgtacatcaaggttgaatcattcaatccaagcggctcggtcaaagaccgtctggcactggccattattctcgacgccgaacaacaggggttattgaaacccggcgacaccatcgttgaagccacttcgggaaatactggcgtcgccctggccatgatcgccgctgcccgcggctacacgtttgtcgccaccatggtcgaaaccttttcgatcgagcggcgcaaactgatgcgcgcttacggtgccaaagtcatcctcaccccagccgccgaacgcggtagcggcatggtacgcaaagccaaagaactcgccgaacagcacggctggttcctcgccagtcaattttccaacccagccaacccggcctatcaccgcaacaccaccgccgcggaaatcctacgagactttgccggacgccgcctcgaccacttcgtcagcggatggggcaccggcggcacgcttactggtgttggtgaagtgctgaaaatcgcgcgaccagacatcacgatcaccgccagcgaacccgccagcgcagcactgctccaagggaaggaatggcaaccccacaagattcaaggatggacacccgatttcgtaccggaggtactgaatcgttccgttccacaccacatcctcagtgttaccgacgacgatgcaatcacggtggcccgtcgcctggccgcggaggaaggtgttttctcggggatctccggcggtgccaccgtcgcaacagcactgcagatcgcccaacaggcccaaccgggtgccgtgatcctcgccatgctgccagataccggcgaacgttacttctccaccccactgttcgctgacatcaatgagcattcagacgacgcgtggttagccagtctcggctga

SEQ ID NO: 39367 - protein, 332 aa, Xylella fastidiosa 9a5c
MCTSSLITSTETFMTIYNTILDTIGHTPVVKLNRIAPAHVDLYIKVESFNPSGSVKDRLALAIILDAEQQGLLKPGDTIVEATSGNTGVALAMIAAARGYTFVATMVETFSIERRKLMRAYGAKVILTPAAERGSGMVRKAKELAEQHGWFLASQFSNPANPAYHRNTTAAEILRDFAGRRLDHFVSGWGTGGTLTGVGEVLKIARPDITITASEPASAALLQGKEWQPHKIQGWTPDFVPEVLNRSVPHHILSVTDDDAITVARRLAAEEGVFSGISGGATVATALQIAQQAQPGAVILAMLPDTGERYFSTPLFADINEHSDDAWLASLG

SEQ ID NO: 39368 - DNA, 1395 bp, Mycobacterium leprae TN
  CDS (1)..(1395): transl_table=11
atgcggattgcgcagcacatcagtgacctcatcggcggcacgccactggtccgcctgaattctgtcgtcccggccggtaccggggtcgtagcggcaaaggtcgaatatttcaactccgggggcagctccaaggaccggatcgcggctaaaatgatcgatgcggcagaggccagcggtcagctgaagccgggcggcaccattgtcgaacctacgtcgggtaataccggtgttggtctggctttagtcgcccagcatcgcgggtataagtgtgtgttcgtctgccccgacaaagttagcgaggacaaacggaatgtgctgttggcctacggagccgaggtagtcgtatgtccgacggccgtgccgcccgacgatccggacagctactacagcgtttccgaccggttggtcgccaagatcgacggtgcctggaaaccagaccagtacgccaacccagcaggaccggccagccattacgagaccactggcccggagatttgggccgacaccgacggtagggtaacccatttcgtcgctggcatcggtaccggtgggacaatcaccggcgtgggccgctacctcaaggaggtgtccggcggattggtacgtatcatcggtgccgatccggaagggtcagtgtattcgggcggtaccggacggccatatctggtcgagggggtgggcgaggacttctggccggcggcgtacgacccgatggtgcccgatcagatcatcgcggtgtctgactccgactcgttcaatatgaccaggcggttggcccgcgaagaagcgatgctggtcggcgggtcgtgtggcatggcggtcgtggctgctctgcaagtggccgaagaagccgggccggccgcgctggtcgtggtcttgctgccggacggcggccgtggctacatgtccaagatcttcaatgacgcctggatgtcgtcgtatgggttcctgcgtagccgtctggacgggtctaccgagcagcccatagtgggtgatgtgttgcgtcggaaatcgggcgcgttgcccgacttggtgcacacccatccgtcggagacggtgcgcgatgccattggcattctgcgtgagtacgcggtatcccagatcccggttgtcggcgccgagcctccggtgatggcgggcgaggttgtcggcagcgtctccgaacgggaactactttcggccgtgtttgaaggtcgtgccagcttggccgacgccgtctcggagcacatgggcccgccactacgactaatcggcgacggtgagttggttagtgtggccggtgaggcgctgcgcgactccgatgcgctgatggtggtggagaaaggcaaactggtcggggtcataacgcgatacgacttgttgggtttcctctcggagggcgcaccgctacgttag

SEQ ID NO: 39369 - protein, 464 aa, Mycobacterium leprae TN
MRIAQHISDLIGGTPLVRLNSVVPAGTGVVAAKVEYFNSGGSSKDRIAAKMIDAAEASGQLKPGGTIVEPTSGNTGVGLALVAQHRGYKCVFVCPDKVSEDKRNVLLAYGAEVVVCPTAVPPDDPDSYYSVSDRLVAKIDGAWKPDQYANPAGPASHYETTGPEIWADTDGRVTHFVAGIGTGGTITGVGRYLKEVSGGLVRIIGADPEGSVYSGGTGRPYLVEGVGEDFWPAAYDPMVPDQIIAVSDSDSFNMTRRLAREEAMLVGGSCGMAVVAALQVAEEAGPAALVVVLLPDGGRGYMSKIFNDAWMSSYGFLRSRLDGSTEQPIVGDVLRRKSGALPDLVHTHPSETVRDAIGILREYAVSQIPVVGAEPPVMAGEVVGSVSERELLSAVFEGRASLADAVSEHMGPPLRLIGDGELVSVAGEALRDSDALMVVEKGKLVGVITRYDLLGFLSEGAPLR

SEQ ID NO: 39370 - DNA, 912 bp, Clostridium acetobutylicum ATCC 824
  CDS (1)..(912): transl_table=11
gtgaactatatagacgacattagacaaattataggaaacactcctataataaaaatcaataactttggattaaatagtggagtgaatatttttgctaagcttgaattattgaatccaggaggcagtgtaaaagatagagtaggcgtttatatgatagaggatgcagaaaagaagggaaaactaaaaaaaggttataccatagttgaaggcacagcgggtaatacaggtataggaatagcacttgcagctataaacaaagggtataatgtaatctttgttgtacctgagaagttttctatagaaaagcagacgcttatgaaagcatttggtgcaaaaattataaatacgcctagagaggaaggaatgcagggagcagttaagaaggcaaatgagcttttgagtaccatacctaattctataagtcttggtcaattcgtaaaccaagcaaatccattggcacactatgaaactacaggacctgagatttatagagatcttgaaggcaacattgattatgtagttgcaggtgctggtagtggaggaacctatgctggtgtattaaagtttttaaaagagaaaaaaccaaatataaagggtgtacttgctgatcctgaaggttctaccatgggtggaggagaggaagctagctatgatatcgaaggtataggaaatgattttattccagataccatggatatgaatcttgtagatgaagttattaaggttaatgatgctgaggcttttcatatggtaaggcaacttgcccttaaagaaggactgatagttggaagttcatctggtgcagctatggcagcagcaattaaattaagtaaaaagattaaaagtggtaatatagttactatctttccagatagaggtgacaggtattttagtaaaaatattttaggatag

SEQ ID NO: 39371 - protein, 303 aa, Clostridium acetobutylicum ATCC 824
MNYIDDIRQIIGNTPIIKINNFGLNSGVNIFAKLELLNPGGSVKDRVGVYMIEDAEKKGKLKKGYTIVEGTAGNTGIGIALAAINKGYNVIFVVPEKFSIEKQTLMKAFGAKIINTPREEGMQGAVKKANELLSTIPNSISLGQFVNQANPLAHYETTGPEIYRDLEGNIDYVVAGAGSGGTYAGVLKFLKEKKPNIKGVLADPEGSTMGGGEEASYDIEGIGNDFIPDTMDMNLVDEVIKVNDAEAFHMVRQLALKEGLIVGSSSGAAMAAAIKLSKKIKSGNIVTIFPDRGDRYFSKNILG

SEQ ID NO: 39372 - DNA, 930 bp, Clostridium acetobutylicum ATCC 824
  CDS (1)..(930): transl_table=11
atgggtaaaatctataagaacttaattgaaactattggaagaactccattagtagaactttcaaattacaaagaaaaaaataaaattgagggaaatattctaggaaaggtagagtactttaatccatcaggaagcataaaagatagaattgcatattcaatgataaaaaatgcagaagaacaggggttaataaataaggatacagttataatagaaccaacaagcggaaatactggagttggtcttgcatttatagcagcagcaaagggatataagcttatattaacaatgcctgaaactatgagtgttgaaagaagaaagcttttgacagcatatggagctgaaatagttcttacttcaggagttgaaggaatgacgggagctattaaaaaggcaaatgagcttgcaagtgaaaatcctaattcttttataccacagcagttcaaaaatccatcaaatccagctatacatgaagttacaactggaatagaaatatgggaggatactgatggaaaagttgatgcagtagttgcaggagtaggaacaggtggtactataacaggtattgctaaaactcttagagaaaaaaataaagatataaaaattatagcagtagaaccagcaacttcaccagtactttctggaggaaaagcaggtcctcacaagattcagggaataggagccggatttgttcctgatgtatatgaagcagaattaatagatgagataattcaagttaaaaatgaagatgcatttgcttctgccaaagagcttgctagagaagagggaatacttgcaggaatatcatcaggtgcagcactatttgcggctaaagaggttgcatcaagaccagaattcaagggtaagaatgttgttgtgattcttcctgatagcggtcaaagatatttatcaatgtctgtatttgattaa

SEQ ID NO: 39373 - protein, 309 aa, Clostridium acetobutylicum ATCC 824
MGKIYKNLIETIGRTPLVELSNYKEKNKIEGNILGKVEYFNPSGSIKDRIAYSMIKNAEEQGLINKDTVIIEPTSGNTGVGLAFIAAAKGYKLILTMPETMSVERRKLLTAYGAEIVLTSGVEGMTGAIKKANELASENPNSFIPQQFKNPSNPAIHEVTTGIEIWEDTDGKVDAVVAGVGTGGTITGIAKTLREKNKDIKIIAVEPATSPVLSGGKAGPHKIQGIGAGFVPDVYEAELIDEIIQVKNEDAFASAKELAREEGILAGISSGAALFAAKEVASRPEFKGKNVVVILPDSGQRYLSMSVFD

SEQ ID NO: 39374 - DNA, 969 bp, Agrobacterium tumefaciens str. C58
  CDS (1)..(969): transl_table=11
atgcccgaagccagaaagcccggacgcggacgcgtctattcctcaatcacggaaacaatcggcgacacgccgatcgtgaggctcgacaagctggcgaaggaaaagggcgtgaaggcaaacctgctcgccaagctggagttcttcaaccctatcggttccgtgaaggaccgtatcggcgttgccatgatcgaagcgctggaagcacagggtaagatcactcccggcaagacgacgctggtggagccgacttcaggtaataccggcatcgcgctcgcctttgccgccgccgccaagggttacaagctgatcctcaccatgccggaaaccatgtcggttgaacgcagaaagatgctggcgctgctgggtgccgagctggtgctgaccgaaggcccgaagggcatgaagggcgccattgccaaggctcaggaactggcagagaccctgcccgacgccgtcattccccaacaattcgaaaaccccgccaatccggatattcaccgcaggacaacggcggaagaaatctggaacgacaccgatggcacggtcgatatcctcgtttccgggatcggcaccggcggcacgatcaccggcacgggccaggttctgaaatcccgcaagcccgaagtgaaggtgattgcggtcgagcccgccgacagcccggttctttccggcggcaatcccggcccgcacaagattcagggcatcggcgccggctttgcacccgccattctcgacaccggcgtctatgatgaaatcgtcaccgtgaccaatgacgaggcatttgaaattgcgcgtctggcggcacggctcgaaggcgtgccggtcggcatctcctcgggtgcggcactggccgcggccatcaaggtcggcgcgcgtgaggaaaatgccggcaagaacatcgtcgtcatcattccttctttcgcagaacgttatctttcgaccgcgcttttcgaaggccttgggctttaa

SEQ ID NO: 39375 - protein, 322 aa, Agrobacterium tumefaciens str. C58
MPEARKPGRGRVYSSITETIGDTPIVRLDKLAKEKGVKANLLAKLEFFNPIGSVKDRIGVAMIEALEAQGKITPGKTTLVEPTSGNTGIALAFAAAAKGYKLILTMPETMSVERRKMLALLGAELVLTEGPKGMKGAIAKAQELAETLPDAVIPQQFENPANPDIHRRTTAEEIWNDTDGTVDILVSGIGTGGTITGTGQVLKSRKPEVKVIAVEPADSPVLSGGNPGPHKIQGIGAGFAPAILDTGVYDEIVTVTNDEAFEIARLAARLEGVPVGISSGAALAAAIKVGAREENAGKNIVVIIPSFAERYLSTALFEGLGL

SEQ ID NO: 39376 - DNA, 1038 bp, Agrobacterium tumefaciens str. C58
  CDS (1)..(1038): transl_table=11
atgaccattcattcctctgcgctcagtgcaatcggcaacacgccgctcatccgtctgaaggctgcctctgaagcgacggggtgtgaaatcctcggcaaggcggaattcctcaatcccggccagtcggtgaaggatcgtgcagcgctctacatcatccgcgacgccgaacggcgcggccaattgcgcccgggcggcaccatcgtggaaggcacggccggaaataccggcatcggcctgtcgctggtcgccaatgcgctcggctacaagacggtgatcgtcattcccgagacgcagagccaggagaagaaggacgcgctgaagcttctcggcgccaagctggtcgaagtaccggccgcgccttattccaatccgaacaattacgtaaaggtctccggccggcttgcaaaacagctcgccgccacggatgaaaacggcgcgatctgggccaaccagttcgacaatatcgccaaccgtcaggcgcatatcgagacgaccgcgcctgagatctgggaccagacggacggcaaggtcgatggcttcatatgctcggtcggttccggcggaacactggccggcgtcgccgacggcctgcgcgatttcaatcccgacatcaagatcggtcttgccgaccctgaaggtgccgccctttatgaattttacaaacacggcgtcctgaagtccgaaggctcctccattaccgaaggcatcggacaggggcgcatcaccgccaatctggaagggttcgcaccggatttctcctatcgtatttcggacgcggaagcgctgccggtgctgttcgatctggtcacgaaagaaggcctgtgcctcggcggttcttccggcatcaacattgccggcgcaatccgccttgcccgtgagctcggtccggggcatacaatcgtgacgatactgtgcgactacggtaatcgttatcagtcgaagctcttcaatccggatttcctgcgctccaaggggcttcccgtgccgcagtggctggcgaccaagagcgagattccggttccctacgaaaccgtttga

SEQ ID NO: 39377 - protein, 345 aa, Agrobacterium tumefaciens str. C58
MTIHSSALSAIGNTPLIRLKAASEATGCEILGKAEFLNPGQSVKDRAALYIIRDAERRGQLRPGGTIVEGTAGNTGIGLSLVANALGYKTVIVIPETQSQEKKDALKLLGAKLVEVPAAPYSNPNNYVKVSGRLAKQLAATDENGAIWANQFDNIANRQAHIETTAPEIWDQTDGKVDGFICSVGSGGTLAGVADGLRDFNPDIKIGLADPEGAALYEFYKHGVLKSEGSSITEGIGQGRITANLEGFAPDFSYRISDAEALPVLFDLVTKEGLCLGGSSGINIAGAIRLARELGPGHTIVTILCDYGNRYQSKLFNPDFLRSKGLPVPQWLATKSEIPVPYETV

SEQ ID NO: 39378 - DNA, 921 bp, Streptococcus pneumoniae R6
  CDS (1)..(921): transl_table=11
atgtctatttataacaacattactgaattaatcggtcaaacaccgattgttaaacttaacaacatcgtgccagaaggtgctgcagacgtctatataaagcttgaagcatttaatcctggttcatctgtaaaagaccgtattgcccttagcatgattgaaaaagctgaacaagatggtattctgaaacttggttctactattgttgaagcaacaagtggaaacaccggtattggactttcatgggtaggtgctgctaaagggtataaagtcgtcatcgttatgcctgaaactatgagtgtagaacgacgtaaaattatccaagcttatggtgctgaactcgtcctaactcctggtagcgagggaatgaaaggtgctattgctaaggctcaagaaatcgctgctgaacgtgatggtttccttcctcttcaatttgacaatccagctaatccagaagtacacgaaagaacaacaggagctgagatactagctgctttcggtaaagatggattagatgcctttgttgctggagtaggtactggtggaacgatttctggtgtttctcatgcactcaaatcagaaaattctaacattcaagtttttgcagtagaagcagatgaatctgctattctatctggtgaaaaacctggtcctcacaaaattcaaggtatctcagctggatttattcctgatacacttgatactaaagcctatgatggtatcgttcgtgtaacatcagatgacgctcttgcactcggacgtgaaattggtggaaaagaaggcttccttgtagggatttcctcagctgcagctatctacggagccatcgaggttgccaaaaaattaggtacaggtaaaaaagtccttgccctagcaccagataacggtgaacgttatctctctacagcactttatgaattgtaa

SEQ ID NO: 39379 - protein, 306 aa, Streptococcus pneumoniae R6
MSIYNNITELIGQTPIVKLNNIVPEGAADVYIKLEAFNPGSSVKDRIALSMIEKAEQDGILKLGSTIVEATSGNTGIGLSWVGAAKGYKVVIVMPETMSVERRKIIQAYGAELVLTPGSEGMKGAIAKAQEIAAERDGFLPLQFDNPANPEVHERTTGAEILAAFGKDGLDAFVAGVGTGGTISGVSHALKSENSNIQVFAVEADESAILSGEKPGPHKIQGISAGFIPDTLDTKAYDGIVRVTSDDALALGREIGGKEGFLVGISSAAAIYGAIEVAKKLGTGKKVLALAPDNGERYLSTALYEL

SEQ ID NO: 39380 - DNA, 981 bp, Staphylococcus aureus subsp. aureus N315
  CDS (1)..(981): transl_table=11
ttgattgaaaaaagtcaagcatgtcacgattcattgttagattctgtagggcaaacacctatggttcaacttcatcaactatttccgaaacatgaagtgtttgcaaagttagagtatatgaatcctggaggcagcatgaaagatcgacctgccaagtacatcattgaacatggtattaaacatggtttaatcactgagaatacacatttaattgaaagtacttctggtaatttaggcattgcgttggcaatgatagctaaaatcaagggattaaaactcacgtgtgttgttgatcctaaaatatcaccaacaaatttgaaaattattaaaagttatggtgccaatgtagaaatggttgaagaacctgatgcacatgggggttatttaatgactcgtattgcaaaggtgcaagaactgttagccactattgacgatgcatattggattaatcaatatgcgaatgagttaaattggcaatcccattatcatggtgcaggcacagagattgttgaaacaattaagcaacctatagattattttgtcgcgccagtcagcacgacaggtagcattatgggtatgagtagaaaaataaaagaaggtcatccaaacgcacaaattgttgctgttgatgcgaaagggtcagtcatttttggtgacaaacctattaatagagaattacctggtatcggtgctagtcgtgtacccgaaatattgaatagatcagaaattaatcaagtgatccatgtagatgattatcaatctgctttgggctgtcgaaaactgattgattatgaaggcatatttgccggaggttcaacaggctcgattattgcagcgattgagcagttgataacgtcaattgaagaaggtgcaacaattgtcacgattttaccagatcgaggcgatcgttacttagatttagtttattcagatacatggttagaaaaaatgaaatcaagacaaggagttaaatcagaatga

SEQ ID NO: 39381 - protein, 326 aa, Staphylococcus aureus subsp. aureus N315
MIEKSQACHDSLLDSVGQTPMVQLHQLFPKHEVFAKLEYMNPGGSMKDRPAKYIIEHGIKHGLITENTHLIESTSGNLGIALAMIAKIKGLKLTCVVDPKISPTNLKIIKSYGANVEMVEEPDAHGGYLMTRIAKVQELLATIDDAYWINQYANELNWQSHYHGAGTEIVETIKQPIDYFVAPVSTTGSIMGMSRKIKEGHPNAQIVAVDAKGSVIFGDKPINRELPGIGASRVPEILNRSEINQVIHVDDYQSALGCRKLIDYEGIFAGGSTGSIIAAIEQLITSIEEGATIVTILPDRGDRYLDLVYSDTWLEKMKSRQGVKSE

SEQ ID NO: 39382 - DNA, 969 bp, Sinorhizobium meliloti 1021
  CDS (1)..(969): transl_table=11
atgcctgaagcgcgcaagcccggccgcggccgcgtcttttcctcgatcaccgagacgatcggcgacactcccatcgtgcggctggacaagctcgccaaggaaaagggcgtgaaggcgaacctgctcgccaagctcgaattcttcaacccgatcggctccgtcaaggaccgcatcggcgtcgcgatgatcgaatcgctcgaggcgcaagggaagatcacgcccggccgcacgacgctggtcgagccgacttcgggcaatacgggcatagcactcgccttcgtcgcggccgccaagggctacaggctgatcctcaccatgcccgagacgatgtcggtcgaacgccgcaagatgctgacgcttctcggtgccgaactggtgctgacggaaggcgccaagggcatgaagggcgcaatcgccaaggcccaggaactcaccgagacgctgcccgacgcgatcattccgcagcagttcgagaacccggccaatccggaaatccaccgcacgacgaccgccgaggagatctggaacgacacggaaggcgcagtcgacatcctcgtgtccggcatcggcaccggcggcaccatcaccggtgccggccaggtgctcaaggcccgtaagccatcggtcagggtgatcgccgtcgagcccgaagaatcccctatcctttccggcggcgccccgggtccgcacaagatccagggtatcggcgcgggtttcgcaccagcgatcctcgacacgagcgtctatgacgaagtcgtcacggtaaatgcgggcgaggccatagaggcggcgcggctcgtcgccagactcgaaggcgtgccggtcggcatttccgccggtgccgcgctccaggcggcgatagaggtgggacagcgcgaggaaaacgccggcaggaatatcgtcgtgatcattccgtcctttgccgaacggtatctttcgacggtgctgttcgagggattgggagcctag

SEQ ID NO: 39383 - protein, 322 aa, Sinorhizobium meliloti 1021
MPEARKPGRGRVFSSITETIGDTPIVRLDKLAKEKGVKANLLAKLEFFNPIGSVKDRIGVAMIESLEAQGKITPGRTTLVEPTSGNTGIALAFVAAAKGYRLILTMPETMSVERRKMLTLLGAELVLTEGAKGMKGAIAKAQELTETLPDAIIPQQFENPANPEIHRTTTAEEIWNDTEGAVDILVSGIGTGGTITGAGQVLKARKPSVRVIAVEPEESPILSGGAPGPHKIQGIGAGFAPAILDTSVYDEVVTVNAGEAIEAARLVARLEGVPVGISAGAALQAAIEVGQREENAGRNIVVIIPSFAERYLSTVLFEGLGA

SEQ ID NO: 39384 - DNA, 1086 bp, Sinorhizobium meliloti 1021
  CDS (1)..(1086): transl_table=11
ttggctaatgccggcatccgttccgtccagcgcgaggttttcaatatgcctgttcttccgtccgtgctcgaagcaatcggcaatacgccgctgatccggctcaaggccgtgtccgaagcgaccggctgcaacattctcggcaaagcggagttcctcaatcccgggcagtccgtaaaggaccgggcagcgctctggatcatccgccaggccgaaaagtccggccagttgcggccgggcggcgtgattgtcgaaggtacggccggcaatacggggatcggccttgccgttgtcggcagcgcacttggataccgcaccgtcatcgtcattcccgaaacccagagccaggaaaagaaggacgcgctacgcctgcttggggccgaactggtcgaagttccggctgtgccttacaggaatcccaacaactacgtgaagatctccggccggttggcggcccaactcgccgaaaccgagccgaacggcgccatctgggcgaaccagttcgacaatgtcgccaaccggcaagcgcatgtcgacacgaccgcgcctgaaatctggcgcgacaccgacggcaaggtcgacggcttcatctgcgccgtcggctccggcggcacgcttgccggcgtggcggaaggcttgcgcgcccgcaatgcggcgatcaagatcggcatcgccgaccctgagggggccgcactctacaatttttatgcccatggcgagctcaagtcgagcggcagctcgatcaccgaaggcatcggtcaaggccgaatcaccgccaacctcgaagacttcacgccggacttcgcctaccagattccggatgctgaagcggtgccctacgtcttcgatctcatcgaaaaggaaggtatttgcgtcggcggctcgaccggcatcaacatcgccggcgccgtgcggcttgcacgggacctcgggccgggacacacgatcgtgacgatcctctgcgactatggtaaccgctatcagtcgaagctcttcaatccggacttcctgacctccaagggcctgccggttccggactggctgaagaccgcttcgaacatagcagtgccatacgaacccgctggatag

SEQ ID NO: 39385 - protein, 361 aa, Sinorhizobium meliloti 1021
MANAGIRSVQREVFNMPVLPSVLEAIGNTPLIRLKAVSEATGCNILGKAEFLNPGQSVKDRAALWIIRQAEKSGQLRPGGVIVEGTAGNTGIGLAVVGSALGYRTVIVIPETQSQEKKDALRLLGAELVEVPAVPYRNPNNYVKISGRLAAQLAETEPNGAIWANQFDNVANRQAHVDTTAPEIWRDTDGKVDGFICAVGSGGTLAGVAEGLRARNAAIKIGIADPEGAALYNFYAHGELKSSGSSITEGIGQGRITANLEDFTPDFAYQIPDAEAVPYVFDLIEKEGICVGGSTGINIAGAVRLARDLGPGHTIVTILCDYGNRYQSKLFNPDFLTSKGLPVPDWLKTASNIAVPYEPAG

SEQ ID NO: 39386 - DNA, 924 bp, Bacillus subtilis subsp. subtilis str. 168
  CDS (1)..(924): transl_table=11
atgacagtgattacggacattaccgagctgattgggaatacaccgcttctccgcttgaagaactttgatgttccagaaggagtcgcggtgtatgccaagcttgaaatgatgaatccagggggaagcatcaaagacagactgggagatatgctgattcgtgacgcgctcgattcaggcaaagtgaaacccggcggagtgattatagaagctacggcaggcaatacagggatcggccttgcgttaagtgccagaaaatatgggctgaaagcgattttctgtgtccctgaacatttcagcagagagaaacagcaaattatgcaagcgcttggcgcatcaatcattcatacaccgcgtcaagacggaatgcagggagccattcaaaaagccattcagctggagactgaaattgaaaattcttattgcgttttgcaatttaaaaaccgagtaaatccatcgacttactataagacgcttggacctgaaatgtgggaagcgcttgacgggaatattcatacatttgtcgcaggggcaggatcaggaggcacattcgcagggacagcttccttcttaaaagaaaaaaatccagcagtcaaaacggtgattgttgaaccggtgggctcgattttaaacggaggagagccccacgctcataaaacagagggcatcggcatggagtttatccccgattatatggataagagccattttgacgagatctacaccgtaacagatgagaatgcgtttagacttgtgaaagaagcggcagaaaaagaaggcctgctgatcggaagctcttcaggtgcagcgctttatgcggcattggaggaagcgaaaaaagcatccgctggaactaacattgtcacagtatttcctgacagcagcgatcgatatatcagcaaacaaatatacgaaggaggcatctga

SEQ ID NO: 39387 - protein, 307 aa, Bacillus subtilis subsp. subtilis str. 168
MTVITDITELIGNTPLLRLKNFDVPEGVAVYAKLEMMNPGGSIKDRLGDMLIRDALDSGKVKPGGVIIEATAGNTGIGLALSARKYGLKAIFCVPEHFSREKQQIMQALGASIIHTPRQDGMQGAIQKAIQLETEIENSYCVLQFKNRVNPSTYYKTLGPEMWEALDGNIHTFVAGAGSGGTFAGTASFLKEKNPAVKTVIVEPVGSILNGGEPHAHKTEGIGMEFIPDYMDKSHFDEIYTVTDENAFRLVKEAAEKEGLLIGSSSGAALYAALEEAKKASAGTNIVTVFPDSSDRYISKQIYEGGI

SEQ ID NO: 39388 - DNA, 945 bp, Yersinia pestis CO92
  CDS (1)..(945): transl_table=11
atggaacttaaggatattggtaacaccgagcttattgagctaaaaaacttatcaataaataataattctcttttttctaagtgcgaattcaacaatcctacaggtagccataaagaccgaacatttctgcatatcctcaatatcttggaagaagaaaataaaataattcccggaatgacattgatagactgctcaacagggaatggaggtgcagcactggcttggattggtcaaaaaaaaggctataaaattaaaatatttatgcctgaaggcatgactgaagaacgcaaagaacagatctattcatttggtggagaaattatcgaaacccccaaagaaaacttcttaaagggtgctgtaaaagcagcaactgaatactcaaatcaccaaaaaaacatattctttctcaatcaatctgacaccaccttaaataaagatgcgtggcatagttgtggtgaagaaattgtcagaaaaatgaaagagataaataaaaaacctgattactttatttgttcaatcggaacgggaggtacattttcgggtattgcggaaattttgaagaaagcctacccacgaatccatacggtgggtattgaagttgatcaatcggccccgatctattcacagcgacatggtcttaactttcatcataaacatcataatcttatggggctaggtgctggtgttatttcagtgaatacccttttagatttgatcgatgaggtaagggttgttaatggcaaagcggcttgggaaaggatgaaaagcttcatcgaaaaggagcgcttaggaattgggccaacatgtggagctaacttgttgattacggaagatataatgcaagaagttaacgggaaagtgattgtcactctattctttgatagtgcatggaaatataaaagttgctgggatggagtttaccctggatataaggaaacccaatga

SEQ ID NO: 39389 - protein, 314 aa, Yersinia pestis CO92
MELKDIGNTELIELKNLSINNNSLFSKCEFNNPTGSHKDRTFLHILNILEEENKIIPGMTLIDCSTGNGGAALAWIGQKKGYKIKIFMPEGMTEERKEQIYSFGGEIIETPKENFLKGAVKAATEYSNHQKNIFFLNQSDTTLNKDAWHSCGEEIVRKMKEINKKPDYFICSIGTGGTFSGIAEILKKAYPRIHTVGIEVDQSAPIYSQRHGLNFHHKHHNLMGLGAGVISVNTLLDLIDEVRVVNGKAAWERMKSFIEKERLGIGPTCGANLLITEDIMQEVNGKVIVTLFFDSAWKYKSCWDGVYPGYKETQ

SEQ ID NO: 39390 - DNA, 999 bp, Caulobacter crescentus CB15
  CDS (1)..(999): transl_table=11
atgtccgctctgcccagcgtccttgacgcgatcggaaacacgcccctgatccgcctggcccgcgccagcgaagccacgggctgcgagatcctaggcaaggccgagttcatgaacccgggccaatcggtcaaggaccgcgccgcgctggccatcattcgcgacgccgaggccaagggtttgctgcgccccggcggtcggatcgtcgaaggcacggcgggcaacaccggcatcggcctggccatggtcgcctcggcgctgggctacaagacgaccatcgtcatcccgcgcacccagagccaggaaaagaaggacgccatccgcctgctgggcgccgaactggtcgaggtggacgccgtcccctattccaaccccgacaattacgtccgctattccgggcgcttggctgaggaacttgccaggacggaaccccacggcgtgatctgggccaaccagttcgacaacaccgccaaccgcgacgcgcactatcacacgacggggccggaaatcttcgatcagacaagtggtaaggtcgacggcttcatctgcgccgtcggctcgggcggcaccctggccggcgtggccgcagcgctgcgcgaacgcaagccgggcgtgaggatcggtctggccgatccctacggcgcggcgctttacgcctggtacaaggacggcgaactcaaatcggaaggctcctcgatcagcgagggcatcggccagggtcggatcacggccaatctcgagggcctggcgatcgacgatccgttccgggtgtccgaccaagagatgctggaagtgctctatgacctggtgcagcacgaaggcctttgcctgggcggatcggccgggatcaatgtcgccggcgcgatcaagctggcgacggcgatgggccctggccacaccatcgtgacggtgctgtgcgaccacggctcgcgctaccagtccaagctcttcaatcccgtcttccttaaggaaaagggcctgccgacgccgccctggatgtag

SEQ ID NO: 39391 - protein, 332 aa, Caulobacter crescentus CB15
MSALPSVLDAIGNTPLIRLARASEATGCEILGKAEFMNPGQSVKDRAALAIIRDAEAKGLLRPGGRIVEGTAGNTGIGLAMVASALGYKTTIVIPRTQSQEKKDAIRLLGAELVEVDAVPYSNPDNYVRYSGRLAEELARTEPHGVIWANQFDNTANRDAHYHTTGPEIFDQTSGKVDGFICAVGSGGTLAGVAAALRERKPGVRIGLADPYGAALYAWYKDGELKSEGSSISEGIGQGRITANLEGLAIDDPFRVSDQEMLEVLYDLVQHEGLCLGGSAGINVAGAIKLATAMGPGHTIVTVLCDHGSRYQSKLFNPVFLKEKGLPTPPWM

SEQ ID NO: 39392 - DNA, 987 bp, Caulobacter crescentus CB15
  CDS (1)..(987): transl_table=11
atggacgacgcttcctccctctatgacgccgcccgcttcaagcgcgctggccgtggcaagatctatgactcgatcatcgacacgatcggtgacaccccgctggtgcgcctgccgcgtctgtccgccgagctgaaccccaaggccgaggtcctggccaagctggagttcttcaacccgatcgcctcggtgaaggaccggatcggcgtctcgatgatcgagtcgctggaggctcagggcgtcttgaagccgggcgcgacgattatcgagccgacctcgggcaacaccggcatcgccctggccttcgtcgcggcggccaagggctacaagctgaccctggtcatgcccgagagcatgtcgatcgagcgccgcaagatgctgctgctgctcggcgccaagctggaactgaccccggccgagaagggcatgcgcggcgcggtcacccgggcccaggagctgatcgaggcgaccccgggcgcggtgatgccgcaacagttcgaaaacagcgccaatccgctgatccatcgcgtctcgaccgccgaggagatctggaacgacaccgccggcgcggtcgacgcggtggtctcgggcgtcgggaccggcggcaccatcacgggcgttggccaggcgctgaaggcgcgcaagccctcgctgaagatggtggcggtggagcccgaggcctcgccggtgctgtcgggcggcgcgccgggtccgcacaagatccaggggatcggcgcgggcttcgtgcccggcgtgctggatcgcggcgtcatcgacgacatcgtccaggtcagcaatgacgacgccttcgccatggcccgccgcgcggcggccaccgaagggttgccggtcggcatcagctccggcgcggccctgacggccgcgttcgatctggccctgcgcgatgcgtacaagggcaagacgatcgtggtgatcatccccagcttcgccgagcgctacctgtcgacggctttgttcgacgggctctag

SEQ ID NO: 39393 - protein, 328 aa, Caulobacter crescentus CB15
MDDASSLYDAARFKRAGRGKIYDSIIDTIGDTPLVRLPRLSAELNPKAEVLAKLEFFNPIASVKDRIGVSMIESLEAQGVLKPGATIIEPTSGNTGIALAFVAAAKGYKLTLVMPESMSIERRKMLLLLGAKLELTPAEKGMRGAVTRAQELIEATPGAVMPQQFENSANPLIHRVSTAEEIWNDTAGAVDAVVSGVGTGGTITGVGQALKARKPSLKMVAVEPEASPVLSGGAPGPHKIQGIGAGFVPGVLDRGVIDDIVQVSNDDAFAMARRAAATEGLPVGISSGAALTAAFDLALRDAYKGKTIVVIIPSFAERYLSTALFDGL

SEQ ID NO: 39394 - DNA, 978 bp, Synechocystis sp. PCC 6803
  CDS (1)..(978): transl_table=11
atggatattaagcacggctttgtggactccattggccacacccccttgattcgccttaacagtttcagtgacgaaaccggctgtgaaattttaggcaaagcagaatttatgaaccctggtggttctgtcaaagaccgggccgccctgggcatcatcgaaaccgccgaaaaggaagggaagctcaaacccggtggcactgtggtggaaggcacagcgggtaatacgggcattggtctcgcccacatttgcaacgccaagggttataaatgcttaattgtcattcccgacacccaatcccaggaaaaaattgatttgctccgcaccctgggggcagaagtcaggaccgtgcccgccgtgccctaccgggatcccaacaattacgtcaaactctccggacgcattgccgcagaattagataacgccatttgggccaatcaatttgataatttggccaaccgtgatgcccactaccacaccaccggccccgaaatttggcaacaaacggacggcaaagtagatgcttgggtggcagccactggcaccggaggaacctatgcaggggtagccctgtatcttaaagaacagtctgaggccgtgcaatgcgtggtggcggaccccatgggtagtgggctgtatagcttcatcaaaactggggagattaaccccagcggcaactccatcaccgaaggcattggcaacagtcgcatcaccgccaacatggaaaatgtgcccattgacgatgcggtgcaaattgacgatccagaagcgttgcgggtggtgtaccaacttctgcggcgggatggcctatttatgggcggttccgtgggcattaatgtgggagcggcttaccaattggccaaaaaacttgggccggggcataccattgttaccgtactttgtgacggaggagcccgttaccaatcccgtctttacaatcaggaatggttgaccagtaaaggtttaacaattcccgattaa

SEQ ID NO: 39395 - protein, 325 aa, Synechocystis sp. PCC 6803
MDIKHGFVDSIGHTPLIRLNSFSDETGCEILGKAEFMNPGGSVKDRAALGIIETAEKEGKLKPGGTVVEGTAGNTGIGLAHICNAKGYKCLIVIPDTQSQEKIDLLRTLGAEVRTVPAVPYRDPNNYVKLSGRIAAELDNAIWANQFDNLANRDAHYHTTGPEIWQQTDGKVDAWVAATGTGGTYAGVALYLKEQSEAVQCVVADPMGSGLYSFIKTGEINPSGNSITEGIGNSRITANMENVPIDDAVQIDDPEALRVVYQLLRRDGLFMGGSVGINVGAAYQLAKKLGPGHTIVTVLCDGGARYQSRLYNQEWLTSKGLTIPD

SEQ ID NO: 39396 - DNA, 996 bp, Synechocystis sp. PCC 6803
  CDS (1)..(996): transl_table=11
gtggggtttttcgttgtaagatgcaggcagatttcccttcttggtgggcccttacctatgaaaattgccagtaatattacagagctaattggtcgtactcctctggttcgcctcaatcgcattcccctattggagggatgtggggccaagattgtagtcaagttggaggggatgaatccagcggcttcggtaaaggaccgcattggcattaatatgattaaccgggcagaacaagagggattaattgaaccagggaagactctgctgattgagcccacttctggtaatacgggcattgcccttgccatggtggccgcagccaagggttaccaattaattttgacgatgcctgaaaccatgagccaagaacggcgggcgatgttaaaagcctatggagcaaaactagaactgaccccggggagtgaagggatggggggatgtattagaagagcccaagaattggctgagagtttgccaaatgcctatatgttgcaacagtttgataatccggctaatcctcaaattcatcaacagactacggcattggaaatttggcaagataccgatggagccattgatttcctcgtggcgggggttggcactggtgggactattaccggggtggcttctgtgttaaaagaaaaaaaacctagctttcaggcgatcgccgtagaaccccaaaatagcccagtcttatcagggggtaagccggggccgcataaaattcaaggtattggggcgggctttattcccgaagtgttagatgtaaacctgattgacgaagtgattgccgtgaccgatgaagaggcgatcgcctacggtcgtagattagccagggaagaaggaatattatcggggatttccactggagcagctctggcggcggccatcaaagtggcaaaaagacctgccaataaagataaattgattgtcatgatccaacccagttttggggaaagatacctcagcacccccctatttcaggatttggagtaa

SEQ ID NO: 39397 - protein, 331 aa, Synechocystis sp. PCC 6803
MGFFVVRCRQISLLGGPLPMKIASNITELIGRTPLVRLNRIPLLEGCGAKIVVKLEGMNPAASVKDRIGINMINRAEQEGLIEPGKTLLIEPTSGNTGIALAMVAAAKGYQLILTMPETMSQERRAMLKAYGAKLELTPGSEGMGGCIRRAQELAESLPNAYMLQQFDNPANPQIHQQTTALEIWQDTDGAIDFLVAGVGTGGTITGVASVLKEKKPSFQAIAVEPQNSPVLSGGKPGPHKIQGIGAGFIPEVLDVNLIDEVIAVTDEEAIAYGRRLAREEGILSGISTGAALAAAIKVAKRPANKDKLIVMIQPSFGERYLSTPLFQDLE

SEQ ID NO: 39398 - DNA, 927 bp, Listeria monocytogenes EGD-e
  CDS (1)..(927): transl_table=11
atgacaattgcaaattcaatcactgatttaattggaaagacacctattgtgaaacttaatcgtttgccagaagcaggaagcgcggatgtatacgtaaaattagaatttcaaaatccgggtggtagcgtaaaagaccgtattgctaatgcaatgatcgaaagcgctgaaaaatctggtgcattaaaaccgggtgacacaattattgagccaactagcggaaatacaggtatcggcctagcaatggtagcagcagccaaaggttaccaagcaattttcgtaatgccagaaacaatgagcttagaacgtcgtaaattacttcaagcttacggtgcgaaattagttttaacaccgggaccagatggcatgaaaggtgcaattgctaaagcggaggaacttgcaaaagaaaacaactattttgttccacaacaattccacaacccagcaaacccagctgttcatgaagaaacaactggaccagaaatcgttgaagctttcggtaaagatggcttagatgctttcatcgcgggagtgggaacaggcggaacagtaactggtgtaggacacgtacttaaaaagaactacccagacgttaaaatctatgcccttgaaccagaagaatccccagtacttagtggcggttctccatctccacataaaattcaaggtatcggtgctggcttcgttccagatacgttagatacaaaagtatatgacggcattctaaaagtttcaagcgaagatgccctagaaacagcgcgtgaagtagcgaaaaaagaaggtattttagtgggtatttcttccggagcaactattaaagcagctctagaccttgcgaaagaacttggtgctggcaaaaaagtactcgcaatcgttgcaagtaatggcgaacgctacttaagcacgccgctttataattttgaagattaa

SEQ ID NO: 39399 - protein, 308 aa, Listeria monocytogenes EGD-e
MTIANSITDLIGKTPIVKLNRLPEAGSADVYVKLEFQNPGGSVKDRIANAMIESAEKSGALKPGDTIIEPTSGNTGIGLAMVAAAKGYQAIFVMPETMSLERRKLLQAYGAKLVLTPGPDGMKGAIAKAEELAKENNYFVPQQFHNPANPAVHEETTGPEIVEAFGKDGLDAFIAGVGTGGTVTGVGHVLKKNYPDVKIYALEPEESPVLSGGSPSPHKIQGIGAGFVPDTLDTKVYDGILKVSSEDALETAREVAKKEGILVGISSGATIKAALDLAKELGAGKKVLAIVASNGERYLSTPLYNFED

SEQ ID NO: 39400 - DNA, 927 bp, Listeria innocua Clip11262
  CDS (1)..(927): transl_table=11
atgacaattgtaaattcgatcactgatttaattggaaagacacctattgtgaaacttaatcgtttaccagaagcaggtagcgccgacgtatatgtgaaattagaattccaaaatccgggtggtagcgtaaaagatcgtattgctaatgcgatgatcgaaagcgctgaaaaatcaggtgcattaaaaccaggagatacaattatcgaaccaactagtggtaacactggtatcggactagcaatggtagcagcggcaaaaggttaccaagcaatcttcgtaatgccagaaacaatgagtatagaacgtcgtaaattacttcaagcttatggtgcgaaattagtgttaactccagggccagatggcatgaaaggcgcaattgctaaagcagaagagcttgcaaaagaaaataattatttcgttcctcaacaattccacaatccagcaaacccagctgtccatgaagaaacaactggaccagaaatcgttgaagctttcggtaaagacggcttagatgctttcattgcaggagtaggaacaggcggaacagtaactggtgtaggacacgtacttaaaaagaactacccagatgttaaaatctatgctcttgaaccagaagaatccccagtacttagcggtggttctccatcgcctcataaaatccaaggtatcggagctggttttgtaccagatacattagatacaaaagtttatgatggcattttgaaagtttcgagtgaagatgcgcttgaaacagcacgcgaagtagcgaaaaaagaaggtatcttagtaggtatttcttccggagcaactattaaagccgctctagaccttgcaaaagaacttggtgctggtaaaaaagtgctcgcaatcgttgcaagtaacggcgaacgctacttaagtacaccgctttataattttgaagattag

SEQ ID NO: 39401 - protein, 308 aa, Listeria innocua Clip11262
MTIVNSITDLIGKTPIVKLNRLPEAGSADVYVKLEFQNPGGSVKDRIANAMIESAEKSGALKPGDTIIEPTSGNTGIGLAMVAAAKGYQAIFVMPETMSIERRKLLQAYGAKLVLTPGPDGMKGAIAKAEELAKENNYFVPQQFHNPANPAVHEETTGPEIVEAFGKDGLDAFIAGVGTGGTVTGVGHVLKKNYPDVKIYALEPEESPVLSGGSPSPHKIQGIGAGFVPDTLDTKVYDGILKVSSEDALETAREVAKKEGILVGISSGATIKAALDLAKELGAGKKVLAIVASNGERYLSTPLYNFED

SEQ ID NO: 39402 - DNA, 960 bp, Nostoc sp. PCC 7120
  CDS (1)..(960): transl_table=11
atgcgaattgctaatgatgtaacagaacttattggaggtacacctttagttaagcttaataagattccgcaagcggaaggagtagttgccagaatagttgtcaaactagaaggaatgaatccagcctcttccgtaaaagaccggattggggtgagtatgattaacgcagcagaagcggaaggtttaatcataccgggaaaaactattttagtagaaccaacttccggtaacacaggaattgccctggcgatggtagccgccgcccgtggctatcggttaattttgactatgccagagactatgagccaagaaagacgggctatgttgcgggcttatggtgcaactctagagttgactccaggtacagaaggtatgcggggagccattcgcaaagccgaagaaattgtggctagtacccctgatactcatatgctgcaacagtttcgcaacccagctaaccccaaaatccaccgtgaaactaccgccgaagaaatttggaatgataccgatggtgaagttgatattgtgattgctggggtgggtactggaggaacaattactgggattgcagaggtattgaaacaacgcaaacctagctttcaggcgatcgcagttgaacctagcaatagtcctatcctttccggtggacaagccgggccacacaaaatccaaggtatcggtgcaggctttgttcccgatgtcctccgtctagaattggtggatgaagtcatcagagttagcgatgatcaagcgatgagctacgggcggcgtttagccagagaagaaggtttgctatctggtatttcctctggtgcggctttgtgtgcagctttacaggtggggaaacgtccagaaaatgccggcaagttaattgtgatgattcaaccttccttcggcgaacgctacctcagcacccctttgtttcaggatttgacgaatgaaactgctggtgtcagttag

SEQ ID NO: 39403 - protein, 319 aa, Nostoc sp. PCC 7120
MRIANDVTELIGGTPLVKLNKIPQAEGVVARIVVKLEGMNPASSVKDRIGVSMINAAEAEGLIIPGKTILVEPTSGNTGIALAMVAAARGYRLILTMPETMSQERRAMLRAYGATLELTPGTEGMRGAIRKAEEIVASTPDTHMLQQFRNPANPKIHRETTAEEIWNDTDGEVDIVIAGVGTGGTITGIAEVLKQRKPSFQAIAVEPSNSPILSGGQAGPHKIQGIGAGFVPDVLRLELVDEVIRVSDDQAMSYGRRLAREEGLLSGISSGAALCAALQVGKRPENAGKLIVMIQPSFGERYLSTPLFQDLTNETAGVS

SEQ ID NO: 39404 - DNA, 975 bp, Nostoc sp. PCC 7120
  CDS (1)..(975): transl_table=11
atggatatcaaaaatggctttataggaactgttggcaacacaccactaattcgtttaaacagttttagtgaagaaacaggatgtgaaattctcgctaaagcagaatttctcaatcctggtggttcagtcaaagaccgcgccgcactttacatcatccaagatgcagaagaaaaaggactcctcaaagcaggcggaactgttgtagaaggaactgctggtaatactggcattggattagcgcatatttgcaatgccaaaggctacaaatgcctgataattattcctaacacccaatcacaggaaaagattgatgcactcacagctttgggtgcagaagtccgtcccgttcctgctgtaccttacaaagacccaaacaattacgtcaaactatctgggagaattgctgcggagttagacaacgcaatttgggcaaatcagtttgataatttagctaaccgccgcgctcattacgagactaccggcccagaaatctggacacaaaccgatggtaaagttgatgcttgggtagcttccactggtactggtggcacatttgccggtgtagccatgtatctgaaaaaccaaaatcccgccattaaatgcgtagtagctgacccactaggtagcggactatatagttacatcaaaactggtgacatcaagatagaaggaaattctatcaccgaaggtattggtaacagccgcgtcacagctaatatggaaggcgcaccaactgatgatgccatccaaatagatgaccatgaagctttgcgggtagtttaccaactgttgcggaaagatggtttattcatgggtggttcgacaggtattaatgttgccggtgctgtagctttggcgaagcaattggggcctggtcacaggattgtcaccatattatgtgatagtggttcccgctaccaatcgcgtatattcaaccgtgattggcttgcatccaaaggactaacggtagattag

SEQ ID NO: 39405 - protein, 324 aa, Nostoc sp. PCC 7120
MDIKNGFIGTVGNTPLIRLNSFSEETGCEILAKAEFLNPGGSVKDRAALYIIQDAEEKGLLKAGGTVVEGTAGNTGIGLAHICNAKGYKCLIIIPNTQSQEKIDALTALGAEVRPVPAVPYKDPNNYVKLSGRIAAELDNAIWANQFDNLANRRAHYETTGPEIWTQTDGKVDAWVASTGTGGTFAGVAMYLKNQNPAIKCVVADPLGSGLYSYIKTGDIKIEGNSITEGIGNSRVTANMEGAPTDDAIQIDDHEALRVVYQLLRKDGLFMGGSTGINVAGAVALAKQLGPGHRIVTILCDSGSRYQSRIFNRDWLASKGLTVD

SEQ ID NO: 39406 - DNA, 963 bp, Nostoc sp. PCC 7120
  CDS (1)..(963): transl_table=11
atgcgggttgctcgtaacattacagaacttgttggtcgtacacctttagtacagctaaatcgtattccccaagaggaaggatgtgtagctcagattcttgtgaagatggaaagtatgaacccatcatcatcagtgaaagaccgaattggggtgagtatgattaatgcagctgaacaggaggggttgattgctcctgggaagactgtattagtagaacccacatcgggaaatacagggattgctttagcaatggcagcagcagccaagggttatcgcttaattttaacgatgccagaaaccatgagtggtgagcgtcgggctatgttgcgggcttatggagcggagttagaattgacaccgggaatggagggaatgagtggagcgattcgccgggcgcaggagatagtgaatactacccctcatgcttatatgttgcagcagttccgcaacccagcgaacgtgaaaatacatcgagagactaccgccgaggaaatctgggaagataccgatggtcaggtagatatgattgtcgcaggggtaggtacaggtggtacgatcacaggtgtagcggaagtgctgaaagcccgtaaaccaagttttcaggcgatcgcagttgagcctgccaatagtccagttttatctggaggtaaaccaggcccccataaaattcagggaattggtgcgggattcgttccccaagttctaaaaacacaattgattgatgaagtgattacggtcacagatgaagaagcgatcgcttacggtcggcgtttagctagagaagaagggctactatctgggatttccagtggtgctgctttgtttgctgccattcgcgtagctcaacgtccagaaaacgccggacgcttaattgtattgattcagcctagttttggagaaaggtatcttagtacaccattgttccaagacctagaaacaaaggcaacagctagcattagctaa

SEQ ID NO: 39407 - protein, 320 aa, Nostoc sp. PCC 7120
MRVARNITELVGRTPLVQLNRIPQEEGCVAQILVKMESMNPSSSVKDRIGVSMINAAEQEGLIAPGKTVLVEPTSGNTGIALAMAAAAKGYRLILTMPETMSGERRAMLRAYGAELELTPGMEGMSGAIRRAQEIVNTTPHAYMLQQFRNPANVKIHRETTAEEIWEDTDGQVDMIVAGVGTGGTITGVAEVLKARKPSFQAIAVEPANSPVLSGGKPGPHKIQGIGAGFVPQVLKTQLIDEVITVTDEEAIAYGRRLAREEGLLSGISSGAALFAAIRVAQRPENAGRLIVLIQPSFGERYLSTPLFQDLETKATASIS

SEQ ID NO: 39408 - DNA, 903 bp, Ralstonia solanacearum GMI1000
  CDS (1)..(903): transl_table=11
atggcttatcccaccatcgaagacaccatcggcaatacgccgctggtcaggctccagcgcattcccggcgaggacaacgcgcgacgcggcaacgtgatcctcggcaagctcgagggcaacaatccggccggctcggtcaaggatcgtccggcgctttcgatgatcaagcatgccgagacgcgcggccgcatcaagccgggcgacacgctgatcgaagccacctcgggcaataccggtatcgcgctggcgatggctgctgccatccgcggttacaagatggtactgatcatgccggaggacttgtcggtcgagcgccgccagagcatggcggcgtacggcgcggagatcgtcctgacgccggtcaagggcggcatggagtacgcccgcgatctggccgacgcgatggagcgggacggcaagggcgtcatcctcgaccagttcgccaatcctgacaatccgctggcgcactatgaaggcaccggcccggaaatctggcgcgacaccgaagggcgcattacccatttcgtctcggcgatgggcacgaccggcaccatcaccggcgtctcgcggttcctgaaggagaagaatcccgccatccagatcgtcggcgcgcagccggcggaaggctcgcgcattcccggcatccgcaagtggccggaggcgtatatgccgaagatctacgatcccaagcacatcgatcgtaccgagtcggtctcgcagtccgatgccgagcacatggcgcgtcgcatggcgcgcgaggaagggatcttctgcggcatctcggcggcgggcgcgctgtgcgtggcgctgcgggtggcggaggcggtcgagaacgcgaccatcgtctttgtcgtttgcgaccggggcgaccgctacctgtccaccggcgtgtttccggcctga

SEQ ID NO: 39409 - protein, 300 aa, Ralstonia solanacearum GMI1000
MAYPTIEDTIGNTPLVRLQRIPGEDNARRGNVILGKLEGNNPAGSVKDRPALSMIKHAETRGRIKPGDTLIEATSGNTGIALAMAAAIRGYKMVLIMPEDLSVERRQSMAAYGAEIVLTPVKGGMEYARDLADAMERDGKGVILDQFANPDNPLAHYEGTGPEIWRDTEGRITHFVSAMGTTGTITGVSRFLKEKNPAIQIVGAQPAEGSRIPGIRKWPEAYMPKIYDPKHIDRTESVSQSDAEHMARRMAREEGIFCGISAAGALCVALRVAEAVENATIVFVVCDRGDRYLSTGVFPA

SEQ ID NO: 39410 - DNA, 975 bp, Ralstonia solanacearum GMI1000
  CDS (1)..(975): transl_table=11
atggccatacgggacgggttttccggcagcatcggcaatacgccgctgatccggctggcgaggctgagcgaggaaaccggctgcgagatcctcggcaaggccgaattcctgaacccgggcggatcggtcaaggaccgcgcggccctctatatcatccgggacgccgagcggcgcggcacgctcagggccggcggcacggtggtcgagggcaccgccggcaacacgggcatcgggctggcccatctctgcgcggcgcgcggctaccgctgcgtgatcgtcatccccgagacacaatcgcccgaaaaaatggacctgctgcgcgcgctcggcgccgaagtgcgcccggtgccggccgtaccgtacaaagaccccaacaactaccagaagatcgccggccgcctcgcgcaagaaaccgccaacgcgatctgggccaaccagttcgacaacctcgtcaaccggcaggcccactacgaaaccaccggcccggaaatctggcgcgacaccgccggccgcgtggatgccttcgtctgcgcgaccggcaccggcggcacgctggcgggcgtcgcccgctacctcaaggaacagaacccggccgtgcggaccgtgctggccgatccgcacggcagcggcctgtacagcttcgtgaagaccggcagcatccaggccgaaggcagctccatcaccgagggcatcggctccacccgcgtcaccgccaacctcgaaggcacgcccatcgacgacgccgtgcgcatcgatgaccagacctgcgtcacgatggtctaccggctgctgcgggaagaaggcctgttcgtgggcggctcgaccggcatcaacgtcgccgcggcggtgcagctggcgcgcgaactggggccgggtcataccatcgtcacgctgctgtgcgatcggggcaatctgtactttgcgcggttgttcaatggggcgtggctggcgcagaaggggttggtggcgggatga

SEQ ID NO: 39411 - protein, 324 aa, Ralstonia solanacearum GMI1000
MAIRDGFSGSIGNTPLIRLARLSEETGCEILGKAEFLNPGGSVKDRAALYIIRDAERRGTLRAGGTVVEGTAGNTGIGLAHLCAARGYRCVIVIPETQSPEKMDLLRALGAEVRPVPAVPYKDPNNYQKIAGRLAQETANAIWANQFDNLVNRQAHYETTGPEIWRDTAGRVDAFVCATGTGGTLAGVARYLKEQNPAVRTVLADPHGSGLYSFVKTGSIQAEGSSITEGIGSTRVTANLEGTPIDDAVRIDDQTCVTMVYRLLREEGLFVGGSTGINVAAAVQLARELGPGHTIVTLLCDRGNLYFARLFNGAWLAQKGLVAG

SEQ ID NO: 39412 - DNA, 1011 bp, Brucella melitensis 16M
  CDS (1)..(1011): transl_table=11
ttgcgcgacagcaacggagaatatgccatgaacaagccccttggctccaaagacgccgaagccgcaggtcgcggacgcatttatgattccattctcgatacgatcggcaatacgccgcttgtgcgtatcgacaagtttgccagggaaaacggtgtgaaggccaatcttctggtaaagcttgaattcttcaatccgctggcaagcgtgaaggatcgtatcgggcttgccatgatcgaggctttggaaaagcagggcaaggctgtccccggcaagaccgttttcgtggagccgacctccggcaataccggcatcgcgctggcctttgccgcagccgccaaaggctatcgcctcattctcaccatgccggaaaccatgtccatggagcgccgcaagctcctgaggctgcttggcgcggaactggtgctgaccgaaggcgcgaaaggcatgaaaggtgcgattgcggaagccgaagccattgccgaaggcaaccccaatgccatcatcccgcaacagtttgaaaaccccgccaacccggaaatccatcgcctcacgacggccgaggaaatctggaacgataccaatggcgaagctgatatcctgatctccggtatcggcaccggcggcacgatcacaggcgtcggtcaggtcatcaaggcgcgcaagccatccttcaaggtcgtcgctgtcgaaccgaaggactcacctgttctttccggcggcgcgcccggcccgcacaagattcaagggcttggtgcgggctttgcaccaaagacgcttgataccggcatttatgacgaaatcgtgcagatttccaacgaagatgctttcaccaatgcccgtctggttgcacggcttgagggcattcccgttggcatctcgtcgggcgctgctcttgcggctgcgatcgaagtcggcaagcgctcggaaaatgcaggcaagaatatcgtggtggtgatcccgtcctttgccgaacggtacctctcgaccgcgctgttcgaggggctggaataa

SEQ ID NO: 39413 - protein, 336 aa, Brucella melitensis 16M
MRDSNGEYAMNKPLGSKDAEAAGRGRIYDSILDTIGNTPLVRIDKFARENGVKANLLVKLEFFNPLASVKDRIGLAMIEALEKQGKAVPGKTVFVEPTSGNTGIALAFAAAAKGYRLILTMPETMSMERRKLLRLLGAELVLTEGAKGMKGAIAEAEAIAEGNPNAIIPQQFENPANPEIHRLTTAEEIWNDTNGEADILISGIGTGGTITGVGQVIKARKPSFKVVAVEPKDSPVLSGGAPGPHKIQGLGAGFAPKTLDTGIYDEIVQISNEDAFTNARLVARLEGIPVGISSGAALAAAIEVGKRSENAGKNIVVVIPSFAERYLSTALFEGLE

SEQ ID NO: 39414 - DNA, 1029 bp, Brucella melitensis 16M
  CDS (1)..(1029): transl_table=11
atgttcaattcggtactcgacacaatcggcaacacgccgttgatccgcctcagcaaggcttccgagctcacaggatgcgatatttacgggaaagcagagtttctcaatccgggccagtcggtcaaggaccgtgcggcgctctacattatccgcgatgcggaaaaacgcgggcttttgcggcccggaggcgtgattgtggaaggaaccgcgggcaataccggcattggcctcacgatggtcgccaaggcattgggctaccgcacggcgatcgtgattcctgaaacgcagagccaggaaaaaaaggaagtcttgcgcctgctcggtgcagagctgatcgaggttcccgccgccccctatcgcaacccgaacaattatgtgcgcctttcagggcgtcttgccgagcaactggccaaaaccgagccgaatggcgcaatatgggccaatcagttcgacaatacggtcaaccggcaagcccatatcgagaccacggcgcaggaaatctggcgcgatacaagcgaccagatcgatggttttgtggccgctgtgggatctggcggtacgcttgccggaacggcgattggcctgaaggaacggaaccacaatatcaaaattgctctggcggacccgcatggcgcggcgcttcacgccttctatacgaccggcgaattgaaggcagaaggcgattcgatcaccgaaggcatcgggcaggggcgcatcaccgccaatcttgaaggcttcacccctgatttttcctaccagattcccgatgcggaggcgctcgatatcctgtttgccctcgtggaagaggaggggctttgcctcggcggctcgtccggcatcaacattgccggtgcaatccggcttgcaaaagatctcgggccgggccacacaattgtgaccgtgctttgtgactacggtaatcgttaccagtcaaagctgttcaatcccgccttcctccgcggcaagagcctgcccgtgccgcgctggctggagaagaaaaccgaaatagacataccgttcgaggggtaa

SEQ ID NO: 39415 - protein, 342 aa, Brucella melitensis 16M
MFNSVLDTIGNTPLIRLSKASELTGCDIYGKAEFLNPGQSVKDRAALYIIRDAEKRGLLRPGGVIVEGTAGNTGIGLTMVAKALGYRTAIVIPETQSQEKKEVLRLLGAELIEVPAAPYRNPNNYVRLSGRLAEQLAKTEPNGAIWANQFDNTVNRQAHIETTAQEIWRDTSDQIDGFVAAVGSGGTLAGTAIGLKERNHNIKIALADPHGAALHAFYTTGELKAEGDSITEGIGQGRITANLEGFTPDFSYQIPDAEALDILFALVEEEGLCLGGSSGINIAGAIRLAKDLGPGHTIVTVLCDYGNRYQSKLFNPAFLRGKSLPVPRWLEKKTEIDIPFEG

SEQ ID NO: 39416 - DNA, 909 bp, Clostridium perfringens str. 13
  CDS (1)..(909): transl_table=11
atgaaatattataatgatataagagatttaataggaaatactccaatattaaaactaaataatataagtacaaaagaaggagtaaatatttatgccaaaatagaaggtactagtccagggggaagttgtaaagatagagtcggaatatatatggtagaaaaagctgagaaagaaggaaaacttaaacctggaagcactattatagaggctactgccggaaatacaggtattggcatagctttagcagctattaataaaggttataaaataatatttatagttcctgataaattttctatagagaagcaaaagataatgaaagctttaggtgctgaaataataaatactcctaaagaagaggggatggaaggtgctataaatttagcaaattcattattaagtgagattcctaattcattatcattaaatcaattcaaaaatgaggcaaatccattagctcattacgagactactggtagagaattatatgatggattagatggagaaattgattattttgttgctggagcaggaagcggaggaacaatttctggtgtattaaaattcttaaaagaaaatatttcagaagtaaaaggaatattagctgatccagtaggttctattattggtggtggacaatgtggaacttataaaatagaaggaataggaaacaattttattccagaaactatggatatgagcttagtagatgatgttataaaagtaaatgatgaggaagcttttgatgcagtaaaattattagctaaaaaagaaggattaatagttggttcctcttcaggagcagcatttgcagcagtattaaaattagctgagaaaatagagaagggcaatatagtaacaatatttccagatagaggagataggtattttagtacagatcttttttaa

SEQ ID NO: 39417 - protein, 302 aa, Clostridium perfringens str. 13
MKYYNDIRDLIGNTPILKLNNISTKEGVNIYAKIEGTSPGGSCKDRVGIYMVEKAEKEGKLKPGSTIIEATAGNTGIGIALAAINKGYKIIFIVPDKFSIEKQKIMKALGAEIINTPKEEGMEGAINLANSLLSEIPNSLSLNQFKNEANPLAHYETTGRELYDGLDGEIDYFVAGAGSGGTISGVLKFLKENISEVKGILADPVGSIIGGGQCGTYKIEGIGNNFIPETMDMSLVDDVIKVNDEEAFDAVKLLAKKEGLIVGSSSGAAFAAVLKLAEKIEKGNIVTIFPDRGDRYFSTDLF

SEQ ID NO: 39418 - DNA, 903 bp, Clostridium perfringens str. 13
  CDS (1)..(903): transl_table=11
atggtttttaacagtcttttaagtttaataggaaacacaccaatattaaaagcaaataatttatttgaagggaataatgtatttgttaagcttgaaaaatttaatccaggaggaagtataaaagatagagcagctttaggaatgatagaagaagctgaaaaaaatggattattaaaagaaaatggagttatagtagaaccaactagtggaaatacaggaattgccatagctatgattggtaaaattaaagggtataaagttattataactatgccagagacaatgagtaaagaaagaagagatatgatcaaagcttatggtgcagagataattttaactgaaggaagcaaaggaatgaagggagctattgaagaagcagagaggttagctagtacaaagggatatttcatgcctcaacagtttttaaatgaagctaatgctaaaaaacattatgaaactactgcggaagaaataataagagatattccagacttagatgtatttattgcaggggtaggaactggaggaactattacaggagtaggaagaaaattaaaggaatataatcctaatataaaaatagttgctgtagaacctagtgattcagctgtattatcaggagaaaattctggtcctcataaaattcaaggaataggtgctggattcataccaaagatatatgactcatcagtagttgatgaaataataaaggttaaaaatgaagatgcatacactatggcaaaaaactttgctgataaagaaggagttttagtaggtatatcttctggagctgcactaaaaggggcaaaggatattttagaaaatatagcaaaagataaaaaagtgttagttatagcacctgatggaggagaaaaatatttttcaacagggctatatgagtaa

SEQ ID NO: 39419 - protein, 300 aa, Clostridium perfringens str. 13
MVFNSLLSLIGNTPILKANNLFEGNNVFVKLEKFNPGGSIKDRAALGMIEEAEKNGLLKENGVIVEPTSGNTGIAIAMIGKIKGYKVIITMPETMSKERRDMIKAYGAEIILTEGSKGMKGAIEEAERLASTKGYFMPQQFLNEANAKKHYETTAEEIIRDIPDLDVFIAGVGTGGTITGVGRKLKEYNPNIKIVAVEPSDSAVLSGENSGPHKIQGIGAGFIPKIYDSSVVDEIIKVKNEDAYTMAKNFADKEGVLVGISSGAALKGAKDILENIAKDKKVLVIAPDGGEKYFSTGLYE

SEQ ID NO: 39420 - DNA, 975 bp, Arabidopsis thaliana
  CDS (1)..(975)
atggaggaggaccggtgttcgatcaaggatgatgcaactcaattgataggtaacaccccaatggtatatctgaacaacattgtggatggttgtgtagctcgtattgcagctaagcttgaaatgatggagccttgctctagtgtcaaggagcgaattgcttatggtatgattaaagatgcagaagacaagggattgattactcctgggaagagcacactgattgaggctacctctggtaacaccgggattggtttagccttcatcggtgcagctaaaggttacaaagtggtcctcacaatgccctcatcaatgagccttgagagaaaaatcattcttttagcattaggtgcggaggttcacctcacagatcctagtaaaggcgttcaaggaataatcgacaaagctgaagagatatgtagcaaaaatccagatagtatcatgctagaacagttcaaaaatccttcaaacccgcaaactcattatcgaaccacgggtccagagatatggagagactctgcaggggaagtagacatattggttgccggtgttggaactggtggaacgctttccggatcaggaagattcctcaaggagaagaataaagactttaaggtttatggtgtggaacctacagaaagtgcggtaataagtggaggcaaaccgggtacacatttgatccaaggtattggggctggactcatcccagacaatttggatttcaacgttcttgatgaagtcatccaagtgacaagtgtggaagcaattgaaacagccaaacttcttgccctgaaagaaggattactggtgggaatatcttctggagctgctgcagccgctgcgataaaggtggcaaagcggccagaaaacgccggcaaactcatagttgtgattttccctagcggtggggaacgttacctatcgacctcattgttcgaatcagtcagacatgaagcagagaatttgccaattcaatga

SEQ ID NO: 39421 - protein, 324 aa, Arabidopsis thaliana
MEEDRCSIKDDATQLIGNTPMVYLNNIVDGCVARIAAKLEMMEPCSSVKERIAYGMIKDAEDKGLITPGKSTLIEATSGNTGIGLAFIGAAKGYKVVLTMPSSMSLERKIILLALGAEVHLTDPSKGVQGIIDKAEEICSKNPDSIMLEQFKNPSNPQTHYRTTGPEIWRDSAGEVDILVAGVGTGGTLSGSGRFLKEKNKDFKVYGVEPTESAVISGGKPGTHLIQGIGAGLIPDNLDFNVLDEVIQVTSVEAIETAKLLALKEGLLVGISSGAAAAAAIKVAKRPENAGKLIVVIFPSGGERYLSTSLFESVRHEAENLPIQ

SEQ ID NO: 39422 - DNA, 954 bp, Corynebacterium glutamicum ATCC 13032
  CDS (1)..(954): transl_table=11
atgaacagggactcatttcaaagcatcgatgagttgatcggaaaaacccctctcgttaggttgggccgattcaatgcaaacacgagtatcaatttgtgggcgaagatggagtcctataacccaggtgggagtgctaaagaccgtacggctcatgcaatggtactggccagcgatctccgcccgggtgacaccgtagtggaatcaagttctggcaatctaggaattgccttgtctcgagaagcggtcctaggtggctggacttttcattgcgttgtagattcgcgtgctaaccgcaacacaatagcgcacatgaaggcactaggaaccatagtgcatgagattacagaaccagattacgaaactggagattggctggtagcacgaagaaaacgtgtggcgcagctacgtgctcagatgtctgaagcgatctgtcttgaccaatattcaaacacagcggcttttcaggcacacgaacaaggaacaatgactgaaatcgtcgaacagcttggcggtgcccctgattatcttctagtggcggtaagcaccacgggaacgattgggggttgtttagggtacgtagctgcacacgggttgtccactcaagttatagcagttgatgcggtgggatcagttctgtttgatggaaatgctggcccacgccatttaccaggtttcggtgctggcatggtcccggaattatcgaaacacttatcgccccacagggtttttcgtattgatgataggacttcagtagaagcagcccgaaagatggctcagacagaagccatcttgcccggagcgtctggtggggccgtcctcgctgctatggagatattacgccccgacatccctgcgggtagcaatgtagtagtaattcttcatgatgacggaaataagtatttagatacgatttataacgacgaatgggtggaggaaaacctttgttcaaggtag

SEQ ID NO: 39423 - protein, 317 aa, Corynebacterium glutamicum ATCC 13032
MNRDSFQSIDELIGKTPLVRLGRFNANTSINLWAKMESYNPGGSAKDRTAHAMVLASDLRPGDTVVESSSGNLGIALSREAVLGGWTFHCVVDSRANRNTIAHMKALGTIVHEITEPDYETGDWLVARRKRVAQLRAQMSEAICLDQYSNTAAFQAHEQGTMTEIVEQLGGAPDYLLVAVSTTGTIGGCLGYVAAHGLSTQVIAVDAVGSVLFDGNAGPRHLPGFGAGMVPELSKHLSPHRVFRIDDRTSVEAARKMAQTEAILPGASGGAVLAAMEILRPDIPAGSNVVVILHDDGNKYLDTIYNDEWVEENLCSR

SEQ ID NO: 39424 - DNA, 957 bp, Corynebacterium glutamicum ATCC 13032
  CDS (1)..(957): transl_table=11
atgattggagcaccacccgacatgggcaatgtgtacaacaacatcaccgaaaccatcggccacaccccactggtaaagctgaacaagctcaccgaaggcctcgacgcaactgtcctggtcaagcttgagtcattcaacccagcaaactccgtcaaggaccgtatcggtctggccatcgttgaagatgcagagaagtccggtgcactgaagccaggcggcaccatcgttgaagcaacctccggcaacaccggtatcgcactggcaatggtcggcgctgcacgcggatacaacgttgttctcaccatgccggagaccatgtccaacgagcgtcgcgttctcctccgcgcttacggtgcagagatcgttcttaccccaggtgcagcaggcatgcagggtgcaaaggacaaggcagacgaaatcgtcgctgaacgcgaaaacgcagtccttgctcgccagttcgagaacgaggcaaacccacgcgtccaccgcgacaccaccgcgaaggaaatcctcgaagacaccgacggcaacgttgatatcttcgttgcaagcttcggcaccggcggaaccgtcaccggcgttggccaggtcctgaaggaaaacaacgcagacgtacaggtctacaccgtcgagccagaagcgtccccacttctgaccgctggcaaggctggtccacacaagatccagggcatcggcgcaaacttcatccccgaggtcctggaccgcaaggttctcgacgacgtgctgaccgtctccaacgaagacgcaatcgcattctcccgcaagctcgctaccgaagagggcatcctcggcggtatctccaccggcgcaaacatcaaggcagctcttgaccttgcagcaaagccagagaacgctggcaaaaccatcgtcaccgttgtcaccgacttcggcgagcgctacgtctccaccgttctttacgaagacatccgcgactaa

SEQ ID NO: 39425 - protein, 318 aa, Corynebacterium glutamicum ATCC 13032
MIGAPPDMGNVYNNITETIGHTPLVKLNKLTEGLDATVLVKLESFNPANSVKDRIGLAIVEDAEKSGALKPGGTIVEATSGNTGIALAMVGAARGYNVVLTMPETMSNERRVLLRAYGAEIVLTPGAAGMQGAKDKADEIVAERENAVLARQFENEANPRVHRDTTAKEILEDTDGNVDIFVASFGTGGTVTGVGQVLKENNADVQVYTVEPEASPLLTAGKAGPHKIQGIGANFIPEVLDRKVLDDVLTVSNEDAIAFSRKLATEEGILGGISTGANIKAALDLAAKPENAGKTIVTVVTDFGERYVSTVLYEDIRD

SEQ ID NO: 39426 - DNA, 951 bp, Fusobacterium nucleatum subsp. nucleatum ATCC 25586
  CDS (1)..(951): transl_table=11
ttgagaataaagtttgataggaggatttttatgttagcaaattctgtaattgatttaattgggaacactccattggtaaagattaataatattgatacttttggaaatgaaatttatgtaaaattggaaggttcaaatcctggtagaagtacaaaagacagaattgccttaaaaatgattgaggaagctgaaaaggaaggtttaattgataaagatactgttattatagaagctacaagcggaaacactggaattggacttgctatgatatgtgcagttaaaaactataaattaaaaattgttatgcctgatactatgagtatagaaagaatacagcttatgagagcttatggaactgaggttatattaactgatggttctcttggaatgaaagcctgtttagaaaaattagaagaacttaaaaagaatgaaaaaaaatattttgttcctaaccaattcactaatgtgaataatccaaaagcccactatgaaactactgctgaagaaattttaaaagatttaaataacaaagtggatgtatttatttgtggaacagggacaggaggtagtttttctggaactgctaaaaagctaaaagaaaaattgcctaatataaaaactttccctgttgaacctgcttcatctccattgctttcaaaaggttatataggtcctcataaaattcaaggtatgggaatgagtataggtggtattccagcagtttatgatggaagtttagcagatgatattttagtttgtgaagatgatgatgcttttgaaatgatgagagaattaagttttaaagaaggtattttaggtggaatttctactggtgctacttttaaagcggctcttgactattcaaaagaaaatgctgataaaggtttgaaaatagttgtcctttctactgactcaggtgaaaaatatttatctaatatttgtgatttataa

SEQ ID NO: 39427 - protein, 316 aa, Fusobacterium nucleatum subsp. nucleatum ATCC 25586
MRIKFDRRIFMLANSVIDLIGNTPLVKINNIDTFGNEIYVKLEGSNPGRSTKDRIALKMIEEAEKEGLIDKDTVIIEATSGNTGIGLAMICAVKNYKLKIVMPDTMSIERIQLMRAYGTEVILTDGSLGMKACLEKLEELKKNEKKYFVPNQFTNVNNPKAHYETTAEEILKDLNNKVDVFICGTGTGGSFSGTAKKLKEKLPNIKTFPVEPASSPLLSKGYIGPHKIQGMGMSIGGIPAVYDGSLADDILVCEDDDAFEMMRELSFKEGILGGISTGATFKAALDYSKENADKGLKIVVLSTDSGEKYLSNICDL

SEQ ID NO: 39428 - DNA, 942 bp, Streptococcus pyogenes MGAS8232
  CDS (1)..(942): transl_table=11
atgactaaaatttacaaaactataacagaattagtaggtcaaacacctattatcaaacttaaccgtttaattccaaacgaagctgctgacgtttatgtaaaattagaagcttttaacccaggatcttctgttaaagatcgtattgctttatcgatgattgaagctgctgaagctaaaggtctgataagtcctggtgacgttattatcgaaccaacaagtggtaatacaggtattggtcttgcatgggtaggtgctgctaaagggtatcgagtcattattgttatgcccgaaactatgagcttggaaagacggcaaatcattcaggcttatggtgcagagcttgtcttaacacctggagcagaaggtatgaaaggggctattgcaaaagctgaaactttagcaatagaactaggtgcttggatgcctatgcaatttaataaccctgccaatccaagcatccatgaaaaaacaacagctcaagaaattttggaagcttttaaggagatttctttagatgcattcgtatctggtgttggtactggaggaacactttctggtgtttcacatgtcttgaaaaaagctagccctgaaactgttatctatgctgttgaagctgaagaatctgctgtcttatctggtcaagagcctggaccacataaaattcaaggtatatcagctggatttatcccaaacacgttagataccaaagcctatgaccaaattatccgtgttaaatcgaaagatgctttagaaactgctcgactaacaggagctaaggaaggcttcctggttgggatttcttctggagctgctctttacgccgctattgaagtcgctaaacagttaggaaaaggcaaacatgtgttaactattttaccagataatggcgaacgctatttatcgactgaactctatgatgtaccagtaattaagacgaaataa

SEQ ID NO: 39429 - protein, 313 aa, Streptococcus pyogenes MGAS8232
MTKIYKTITELVGQTPIIKLNRLIPNEAADVYVKLEAFNPGSSVKDRIALSMIEAAEAKGLISPGDVIIEPTSGNTGIGLAWVGAAKGYRVIIVMPETMSLERRQIIQAYGAELVLTPGAEGMKGAIAKAETLAIELGAWMPMQFNNPANPSIHEKTTAQEILEAFKEISLDAFVSGVGTGGTLSGVSHVLKKASPETVIYAVEAEESAVLSGQEPGPHKIQGISAGFIPNTLDTKAYDQIIRVKSKDALETARLTGAKEGFLVGISSGAALYAAIEVAKQLGKGKHVLTILPDNGERYLSTELYDVPVIKTK

SEQ ID NO: 39430 - DNA, 1569 bp, Drosophila melanogaster
  CDS (1)..(1569)
atgccacaaccgaagccatacgagaggcccgcggacttcatcgatcccggcaagccgtccaagtgcaaatggcatctgggtacagccgagaagtcgccccacatccatcggggcatcgcccaccgccagcagattacgcccaacatcctcgaggtgatcggatgcacgccactggtcaagttgaacaacattcccgccagcgacggcatcgaatgcgagatgtatgccaagtgcgagttccttaatccgggtggatcagtgaaggaccgcattgggtaccgcatggtgcaggacgccgaggagcagggcctgctcaagccaggctacaccatcatcgaaccaacgtctggaaacacgggcattggactggcaatggcctgtgccgttaagggatacaagtgcattatcgtgatgccggagaagatgtccaacgagaaggtgtccgcgctgcgaaccctcggggccaagatcatacgtactccaacggaggcagcctacgattcgccggagggactgatctacgttgctcagcagctgcagcgggaaacgcccaactcgattgtcttggatcagtatcgcaacgctggcaatccgctggctcactacgatggcactgccgccgagattctgtggcagctggacaacaaggtcgatatgatagtggtctcggcgggaacggcgggaactatcagtggtattgggcgtaagatcaaggagcaggttcccagttgccagatagtcggcgtggatccctatggctcgatccttgcccgccctgctgagctcaacaagaccgatgtgcaattctacgaggtggagggcatcggctacgactttccgcccaccgtattcgatgacaccgtcgtggatgtgtggacgaaaatcggcgactcagactgtttccccatgagcagacgcctgaacgcggaggagggtctgttgtgcggcgggtccagtggcggagcgatgcacgctgccctcgagcatgcccgcaaattgaagaaaggccagcggtgcgtggtcattctgcccgatggcatacgcaactacatgaccaagttcgtgtcggacaactggatggaggcgcgcaacttcaaggagccggtaaacgagcacggtcactggtggtggagcctggccatcgcggagttggagctacccgctcccccggtcattctcaagtcggatgcaactgttggtgaggctattgccctgatgaagaaacaccgcgtggaccagctgcccgtcgtggatcaggatgatggttctgtcctgggcgtcgtgggtcaggagacgctgatcacgcagatcgtgagcatgaaccgccagcagtccgatcccgcaatcaaggcgctcaacaaacgagtaatccgactgaacgaatccgagattctgggcaagttggcccgcgtcctcgaagtggaccccagcgtgctcatcctgggcaagaacccggccggcaaggtggagctcaaagctctggccaccaagctggacgtgaccactttcattgccgccggcaagcagaagcccaaggccaatggcaccaccaacggcggcagccactaa

SEQ ID NO: 39431 - protein, 522 aa, Drosophila melanogaster
MPQPKPYERPADFIDPGKPSKCKWHLGTAEKSPHIHRGIAHRQQITPNILEVIGCTPLVKLNNIPASDGIECEMYAKCEFLNPGGSVKDRIGYRMVQDAEEQGLLKPGYTIIEPTSGNTGIGLAMACAVKGYKCIIVMPEKMSNEKVSALRTLGAKIIRTPTEAAYDSPEGLIYVAQQLQRETPNSIVLDQYRNAGNPLAHYDGTAAEILWQLDNKVDMIVVSAGTAGTISGIGRKIKEQVPSCQIVGVDPYGSILARPAELNKTDVQFYEVEGIGYDFPPTVFDDTVVDVWTKIGDSDCFPMSRRLNAEEGLLCGGSSGGAMHAALEHARKLKKGQRCVVILPDGIRNYMTKFVSDNWMEARNFKEPVNEHGHWWWSLAIAELELPAPPVILKSDATVGEAIALMKKHRVDQLPVVDQDDGSVLGVVGQETLITQIVSMNRQQSDPAIKALNKRVIRLNESEILGKLARVLEVDPSVLILGKNPAGKVELKALATKLDVTTFIAAGKQKPKANGTTNGGSH

SEQ ID NO: 39432 - DNA, 927 bp, Methanosarcina acetivorans C2A
  CDS (1)..(927): transl_table=11
atgggtcaaatctattcagacataacatggacaatcggaaacacaccgcttgtccgtttaaaccacatcacgaagggtcttcatacggatgtgctggttaaggtagagtcctttaacccgatggggagtgtaaaggacagaatcggactggcaatgcttgaggaagccgaacgtgagggaaaaatcaaagaaggcaccacaattgttgaagccacaagcgggaacaccggaatagcccttgcaggagtgtgtgctgcccgtggctataaactcatccttgttatgcctgagacgatgagcatagaacgaagaaagctgctgaaagctctgggcgcagaactcgtcctgaccccgggccccgaagggatgaaaggggcagtcaataaagcggaacagatggcttcagcagaccccactctttactatatgccccagcaatttcagaaccctgcaaaccctgaggcccaccgcaggacaactgccgaggagatctggagagatacggatgggaaagcggatgttctcgtagcaggcgtggggaccggagggacaatcacaggtattgccggagtcctcaagaaaaggaaaaccggtttcagggctattgcagtcgaacctaccgaatctcccgtactcagcggcggaagcccgggcccacacaggatccagggaataggtgcaggttttatcccggatgtccttcagcttggtcttgttgatgaaattatcaaagtatctgcagatgaagctatttccacgggaagaaggctggcaagggaagaaggcattcttgcaggcatatcttcaggagcggctacatgcgcagccctgcaggtagcatccaggaaagagatgagcggaaagacaattgttgtcatcctgccggataccggagagcgttatctgagcaccgatctgtttagctga

SEQ ID NO: 39433 - protein, 308 aa, Methanosarcina acetivorans C2A
MGQIYSDITWTIGNTPLVRLNHITKGLHTDVLVKVESFNPMGSVKDRIGLAMLEEAEREGKIKEGTTIVEATSGNTGIALAGVCAARGYKLILVMPETMSIERRKLLKALGAELVLTPGPEGMKGAVNKAEQMASADPTLYYMPQQFQNPANPEAHRRTTAEEIWRDTDGKADVLVAGVGTGGTITGIAGVLKKRKTGFRAIAVEPTESPVLSGGSPGPHRIQGIGAGFIPDVLQLGLVDEIIKVSADEAISTGRRLAREEGILAGISSGAATCAALQVASRKEMSGKTIVVILPDTGERYLSTDLFS

SEQ ID NO: 39434 - DNA, 921 bp, Thermoanaerobacter tengcongensis MB4
  CDS (1)..(921): transl_table=11
atggtggcgaacaatattcttgatttgatagggaaaacccctgtggtaaagttaaataaggtgcctgataaaaatagcgctgaagtgtacttgaaacttgagttttttaaccctgccggcagcgtcaaagacagaattgcacttgctatgatagaaaaggcagaaaaagaagggatattaaaaaaaggcagtgtgattgtggaacccaccagtggaaatacaggaatagggctggcaatggtgggggctgcaaaaggatataaagttataatagtcatgcctgacaccatgagcatggaaaggcggatgcttttggctgcttacggggcagaggtgattttgactcctggaaaactgggcatggagggagctattagaaaagcggaagagttagttaagcagaacaagaactatttcatgccccagcagtttgagaatttagcaaatcctctcattcatgaagagactactgcaaaggaaataatagaggattttaaggaaggtttagatgcttttgtagccggtataggtacaggagggactattacgggagttggtagggtccttaaaaaagtttttccagatataaagattgtgggggtagaaccttactctgccgcagttttatctggaagagaaccgggtccccacaagattcagggaattggagcaggctttatacccaaagtcttggatagagaagtgctaaatgaagtgataccagtgaaagatgaagatgcctttgaaatgactagaattttggccaaaaaagaaggtattttggcagggatttctactggtgcttctttgtgggcagcgcttaatgtagctaagaaattaggaaaagggaagaaagtccttgcgatagcgccagacagtggagaaaggtatttaagcactcagattttcagagaacattga

SEQ ID NO: 39435 - protein, 306 aa, Thermoanaerobacter tengcongensis MB4
MVANNILDLIGKTPVVKLNKVPDKNSAEVYLKLEFFNPAGSVKDRIALAMIEKAEKEGILKKGSVIVEPTSGNTGIGLAMVGAAKGYKVIIVMPDTMSMERRMLLAAYGAEVILTPGKLGMEGAIRKAEELVKQNKNYFMPQQFENLANPLIHEETTAKEIIEDFKEGLDAFVAGIGTGGTITGVGRVLKKVFPDIKIVGVEPYSAAVLSGREPGPHKIQGIGAGFIPKVLDREVLNEVIPVKDEDAFEMTRILAKKEGILAGISTGASLWAALNVAKKLGKGKKVLAIAPDSGERYLSTQIFREH

SEQ ID NO: 39436 - DNA, 939 bp, Thermoanaerobacter tengcongensis MB4
  CDS (1)..(939): transl_table=11
atgtcgggaagagaaaataaaatttatgaggatataactcagcttataggcaatacacctatgattaggttgaataaagttgttcctgaaaattcagcggaggtcatagtaaaattagagtcttttaacccaggtggaagtgttaaggacagaattgcattaaatatgataaaaagagctgaggaagaaggaagattaaaacctggtgggacaattgttgaacctaccagtggaaatacaggcattggtcttgcgatggttagtgctgtaaaagggtataagttgattcttgtaatgcctgatacgatgagtatagaacgacgaaatttacttttgtcatatggagcagagcttgttttaacacccggtgcagagggtatgaaaggagccataaaaaaggcacaagaaattttggaattaaatcctgattatataatgttagatcagtttaaaaatcctgcgaatccagaaatacatgaacttacaacggcaaaagaaatattaaaagatacaaatggaatagtagatgcatttgtagcaggtgtaggcacagggggaacaatatccggagtagggaaagttttaaagcaatataacaaagatataaaaatttttgcagtagaaccagaggaatctcctgtattgtcaggcggcaaacctggacctcataagatacaaggaataggagctggatttattcctgacacattaaatcttgacgttatcgatgaaattataaaggtaaaagagagagatgcttttgaaatgtcaatgaaacttgcaaaacaagaagggattctttgtggtatttcttcaggcgcaaatgtttttgcggcagttgaagttgcaaatcgcctcgggaaaggaaaacgagttgtaacagtactacctgatactggggaaagatatttaagtatgcacaaattttttgaatattga

SEQ ID NO: 39437 - protein, 312 aa, Thermoanaerobacter tengcongensis MB4
MSGRENKIYEDITQLIGNTPMIRLNKVVPENSAEVIVKLESFNPGGSVKDRIALNMIKRAEEEGRLKPGGTIVEPTSGNTGIGLAMVSAVKGYKLILVMPDTMSIERRNLLLSYGAELVLTPGAEGMKGAIKKAQEILELNPDYIMLDQFKNPANPEIHELTTAKEILKDTNGIVDAFVAGVGTGGTISGVGKVLKQYNKDIKIFAVEPEESPVLSGGKPGPHKIQGIGAGFIPDTLNLDVIDEIIKVKERDAFEMSMKLAKQEGILCGISSGANVFAAVEVANRLGKGKRVVTVLPDTGERYLSMHKFFEY

SEQ ID NO: 39438 - DNA, 951 bp, Streptomyces coelicolor A3(2)
  CDS (1)..(951): transl_table=11
atgcgctacgactccccgctggccgcggtgggcaacacccccctggtgcgcctgccgcggctgtcgccgtccgacgacgtccgcatctgggccaagctggaggaccgcaacccgaccggctcgatcaaggatcgccccgcgctccacatgatcgagcaggccgagaaggacggccgcctcacccagggctgcaccatcctggagccgaccagcggaaacaccggcatctccctggccatggccgccaggctcaagggctaccgcatcgtctgcgtcatgcccgagaacacctcccaggaacgccgggacctgctcaccatgtggggcgcggagatcatctcctccccggccgcgggcggctccaacaccgccgtacgcgtcgccaaggaactctccgccgaacacccggactgggtgatgctctaccagtacggcaacccggacaacgcgggcgcccactacgccggcaccggccccgagatcctcgccgacctgccgtcggtcacgcacttcgtcgcgggcctgggaacgacggggacgctgatgggcgtcggccgctacctgcgcgagcacaagccggacgtgaagatcgtcgccgccgaaccgcgctacgacgacctggtctacggcctgcgcaacctcgacgagggcttcgtccccgagctgtacgacgcctccgtcctcaccacccgcttctcggtgggctccgccgacgcggtcacccgcacccgcgagctgctccagcaggagggcatcttcgcgggcgtctccaccggcgccgccctgcacgccgcgatcggcgtcgggaagaaggcggtcaaggcgggggagagcgcggacatcgtgttcgtcgtcgccgacggcggctggaagtacctgtcgaccggcgtctacaccgccgagacgaccgaggcggccatcgagaccctgcacggccagctctgggcctga

SEQ ID NO: 39439 - protein, 316 aa, Streptomyces coelicolor A3(2)
MRYDSPLAAVGNTPLVRLPRLSPSDDVRIWAKLEDRNPTGSIKDRPALHMIEQAEKDGRLTQGCTILEPTSGNTGISLAMAARLKGYRIVCVMPENTSQERRDLLTMWGAEIISSPAAGGSNTAVRVAKELSAEHPDWVMLYQYGNPDNAGAHYAGTGPEILADLPSVTHFVAGLGTTGTLMGVGRYLREHKPDVKIVAAEPRYDDLVYGLRNLDEGFVPELYDASVLTTRFSVGSADAVTRTRELLQQEGIFAGVSTGAALHAAIGVGKKAVKAGESADIVFVVADGGWKYLSTGVYTAETTEAAIETLHGQLWA

SEQ ID NO: 39440 - DNA, 1386 bp, Streptomyces coelicolor A3(2)
  CDS (1)..(1386): transl_table=11
gtgcaattccacgactcgatgatcagcctcgtcggcaacaccccgctggtgcggctcaacagcgtgagcaaggggatcagggcgaccgtcctggccaaggtggagtacttcaacccgggcggctcggtgaaggaccgcatcgccctgcgcatgatcgaggccgcggagaagagcggtgagctgcagccgggcggcacgatcgtcgagccgaccagcggcaacaccggcgtcggcctcgccatcgtggcccagcagaagggctacaagtgcatcttcgtctgccccgacaaggtgtccaccgacaagatcaacgtgctgcgcgcgtacggcgccgaggtcgtcgtctgcccgaccgccgtcgacccggagcaccccgactcctactacaacgtctccgaccggctggtccgcgagacgccgggcgcctggaagccggaccagtactccaacccgaacaacccgctctcccactaccactccacgggccccgagctgtgggagcagaccgaggggaagatcacccacttcgtggccggggtcggcaccggcggcaccatctccggcaccggccggtacctgaaggacgccagtgacggcgcggtcacggtgatcggcgccgaccccgagggctccgtctactccggcggctccgggcgcccctacctggtcgagggcgtcggcgaggacttctggccgacggcgtacgaccgcgaggtcgccgacgagatcgtcgccgtctccgacaaggactccttccagatgacccgccgcctcgccaaggaggagggcctgctggtgggcggctcctgcggcatggcggtcgtcgcggcgctggaagtggcggcgcggctcggcgaggacgacgtggtggtcgtcctgctgccggacagcggacgcggctatctcagcaagatcttcaacgacgagtggatggccgactacggcttcctggaggacacgggccccagcgcccgcgtcgcggaggtcctgaaccacaaggagggcggccacatcccctccctcgtccacatgcacccggacgaaaccgtcggccaggccatcgaggtgctgcgcgagtacggcgtctcgcagatgccgatcgtcaagcccggcgccggtcacccggacgtgatggccgccgaggtcgtcggctcggtggtggagcgcgagctgctggacgcgctgttcgccaagcgcgcctcgctggaggacccgctggagaagcacatgtccgccccgctgccccaggtcggctccggagagccggtcgcggacctgatgtcggtgctcggcggcgccgacgcggcgatcgtcctcgtcgagggcaagccgaccggtgtggtgagccggcaggacctgctgtccttcctcgccaaggtcaagtag

SEQ ID NO: 39441 - protein, 461 aa, Streptomyces coelicolor A3(2)
MQFHDSMISLVGNTPLVRLNSVSKGIRATVLAKVEYFNPGGSVKDRIALRMIEAAEKSGELQPGGTIVEPTSGNTGVGLAIVAQQKGYKCIFVCPDKVSTDKINVLRAYGAEVVVCPTAVDPEHPDSYYNVSDRLVRETPGAWKPDQYSNPNNPLSHYHSTGPELWEQTEGKITHFVAGVGTGGTISGTGRYLKDASDGAVTVIGADPEGSVYSGGSGRPYLVEGVGEDFWPTAYDREVADEIVAVSDKDSFQMTRRLAKEEGLLVGGSCGMAVVAALEVAARLGEDDVVVVLLPDSGRGYLSKIFNDEWMADYGFLEDTGPSARVAEVLNHKEGGHIPSLVHMHPDETVGQAIEVLREYGVSQMPIVKPGAGHPDVMAAEVVGSVVERELLDALFAKRASLEDPLEKHMSAPLPQVGSGEPVADLMSVLGGADAAIVLVEGKPTGVVSRQDLLSFLAKVK

SEQ ID NO: 39442 - DNA, 1371 bp, Xanthomonas campestris pv. campestris str. ATCC 33913
  CDS (1)..(1371): transl_table=11
atggcgatccattcctccgtactcgaactgattggcaatacgccgatcgtcaaggcccagcgcctggacaccggtgtctgcgaactgttcctcaagctggaggcatccaatccgggcggctcgatcaaggaccgtatcggcttgtcgatgatcgaagcggccgagcagcgcggcgacctgaagcccggcgccaccctggtggaaggcacggccggcaacaccggtcttggcctggcgctggtcgcgcagcagaagggctaccgcctgatcctggtggtgccggacaagatgagccgcgagaagatcttcaatctcaaggcgatgggcgctgatgtggtgctgacccgctcggacgtggccaaggggcacccggagtattaccaggacctggccgccaagatcgcctcggagaccccgggcgcctacttcatcaaccagttcggcaacccggacaacccggccgcgcatgagttcggtaccgggccggaaatcctggcgcagatggatggccagctggacgcgatcgtgttcggctgcggcagctcaggcaccatgaccggcctgtcgcgcgccttcgccaccgcttcgccgcagaccgaactggtgctggcagacccggtgggctcgatcctcacccagtacatcgaagagggtacggtgagcgagaagtccggcagctggctggtcgaaggcatcggtgaggatttcctgccggatatctccgatttctcgcgggtcaagaaagcctattcgatcagcgatgcggaaagcttccacaccgcgcgcgagctgctggccaaggagggcatcctcggcggctcgtccaccggcacgctgctggccgcagcgctgaagtactgccgcgagcagaccacgcccaagcgcgtgctggtgttcgtctgcgataccggcaacaagtacctgtcgaagatgtacaacgactattggatgctggacaacggcttcctggagcgcgaacagcacggcgacctgcgtgacctgatcctgcgcccgtacaacaagcgcgacaccgtggtggtcgggccgaaagatctgctgactaccgcctaccagcgcatgaagctctacgacgtctcgcagttgccggtgatcgataatggcgagctggtcggcatcgtcgatgagagcgatgtgctgctgcatgtgtatggcgacgaagcacggttccgcgacccgatctccactgcaatggtcagcaagctcgaccgtctggacgtggcctcgccgatcgaagcgctgctgccggtgttcgatcgcggccaggtcgccatcgtcatggacggcaaccagttcctgggcctgatcacccgtatcgacctgctcaactacctgcgccgccgcgtgcagtaa

SEQ ID NO: 39443 - protein, 456 aa, Xanthomonas campestris pv. campestris str. ATCC 33913
MAIHSSVLELIGNTPIVKAQRLDTGVCELFLKLEASNPGGSIKDRIGLSMIEAAEQRGDLKPGATLVEGTAGNTGLGLALVAQQKGYRLILVVPDKMSREKIFNLKAMGADVVLTRSDVAKGHPEYYQDLAAKIASETPGAYFINQFGNPDNPAAHEFGTGPEILAQMDGQLDAIVFGCGSSGTMTGLSRAFATASPQTELVLADPVGSILTQYIEEGTVSEKSGSWLVEGIGEDFLPDISDFSRVKKAYSISDAESFHTARELLAKEGILGGSSTGTLLAAALKYCREQTTPKRVLVFVCDTGNKYLSKMYNDYWMLDNGFLEREQHGDLRDLILRPYNKRDTVVVGPKDLLTTAYQRMKLYDVSQLPVIDNGELVGIVDESDVLLHVYGDEARFRDPISTAMVSKLDRLDVASPIEALLPVFDRGQVAIVMDGNQFLGLITRIDLLNYLRRRVQ

SEQ ID NO: 39444 - DNA, 960 bp, Xanthomonas campestris pv. campestris str. ATCC 33913
  CDS (1)..(960): transl_table=11
atggccctgtacgacaacatcctcgacaccatcggccgcaccccggtggtcaaactcaaccgcctcgccccggaccacgtgtccctgtacgtcaaggtcgagtcgttcaacccgggcggatcggtcaaggaccggctggcgctggccatcatcctggacgccgaacaacgcggcctgctcaagcccggcgacaccatcgtggaagccacctccggcaacaccggcgtggcgctggccatggtcgctgccgcgcgtggctacaagttcgtcgccaccatggtggaaaccttctcgatcgagcgccgcaagctcatgcgcgcctacggcgccaaggtgatcctgaccccggccgccgagcgcggcagcggcatggtgcgcaaggccaaggaactggccgaacaacacggctggttcctggccagccagttcgccaaccccgccaatccggcctaccaccgcaacaccaccgccgccgagatcctgcgcgacttcgccggccaccggctggaccatttcgtcaccggctggggcaccggcggcaccctcaccggcgtgggcgaagtactgcgcgtggcccgcccggaagtgcgcatcaccgccaccgagccggccggcgctgcgctgctgcaaggccaggactggaagccgcacaagatccagggctggacgccggacttcgtgccggaggtgctcaaccgcgaggtcgcccacgaaatcctcagcgtggaagacaccgacgcgatcagcgtggctcggcggcttgccgcggaagaaggcatcttcaccggcatctccggcggcggcaccgtctccactgccctgcgggtggccgaaaccgcggtgccgggcgcggtgatccttgcgatgctgccggataccggcgagcgctacttctccacgccattgttcgccgacatcaacgaaggctcggacgacgattggctggccggcctgccctga

SEQ ID NO: 39445 - protein, 319 aa, Xanthomonas campestris pv. campestris str. ATCC 33913
MALYDNILDTIGRTPVVKLNRLAPDHVSLYVKVESFNPGGSVKDRLALAIILDAEQRGLLKPGDTIVEATSGNTGVALAMVAAARGYKFVATMVETFSIERRKLMRAYGAKVILTPAAERGSGMVRKAKELAEQHGWFLASQFANPANPAYHRNTTAAEILRDFAGHRLDHFVTGWGTGGTLTGVGEVLRVARPEVRITATEPAGAALLQGQDWKPHKIQGWTPDFVPEVLNREVAHEILSVEDTDAISVARRLAAEEGIFTGISGGGTVSTALRVAETAVPGAVILAMLPDTGERYFSTPLFADINEGSDDDWLAGLP

SEQ ID NO: 39446 - DNA, 960 bp, Xanthomonas axonopodis pv. citri str. 306
  CDS (1)..(960): transl_table=11
atggccctgtacgacaacattctcgacaccatcggccgcaccccggtggtcaagctccaacgcctcgccccggataacgtgaccttgtacgtcaaggtcgaatcgttcaatcccggcggctcggtcaaggaccggctggcgctggcgatcatcctggacgccgaacagcgcggcctgctcaagcccggcgacaccatcgtcgaagccacctccggcaacaccggcgtggcactggccatggtggccgcagcacgcggctacaagttcgtcgccaccatggtggaaaccttctccatcgaacgccgcaagctgatgcgtgcctatggcgccaaggtcatcctgacgccggctgccgagcgcggcagcggcatggtgcgcaaagcgaaggagctggccgaacagcacggctggttcctggccagccagttcgccaatccggccaacccggcctaccaccgcaacaccaccgctgccgagatcctgcgcgatttcgccggccaccggctggaccatttcgtcaccggctggggcaccggcggcaccctcaccggcgtgggcgaggtcctgagcgttgcgcgcccggaagtgcgcatcaccgcctcggagccggctggcgccgccttgctgcaaggccaggactggaaaccgcacaagatccagggctggaccccggacttcatacccgaggtgctcaaccgcgaggtcgcccatgaggtgctgagcgtggaagacaccgacgccatcaccgtggcgcggcgcctggccgccgaagaaggcatcttcaccggcatctccggcggtgccaccgtcgccaccgcgctgcgcgtggcagaaggcgcggtgcctggcgccgtcatcctggcgatgctgcccgacactggcgagcgctacttctcgaccccgctcttcgccgacatcaacgaaggctccgacgacgactggctggccgggctgccctga

SEQ ID NO: 39447 - protein, 319 aa, Xanthomonas axonopodis pv. citri str. 306
MALYDNILDTIGRTPVVKLQRLAPDNVTLYVKVESFNPGGSVKDRLALAIILDAEQRGLLKPGDTIVEATSGNTGVALAMVAAARGYKFVATMVETFSIERRKLMRAYGAKVILTPAAERGSGMVRKAKELAEQHGWFLASQFANPANPAYHRNTTAAEILRDFAGHRLDHFVTGWGTGGTLTGVGEVLSVARPEVRITASEPAGAALLQGQDWKPHKIQGWTPDFIPEVLNREVAHEVLSVEDTDAITVARRLAAEEGIFTGISGGATVATALRVAEGAVPGAVILAMLPDTGERYFSTPLFADINEGSDDDWLAGLP

SEQ ID NO: 39448 - DNA, 1371 bp, Xanthomonas axonopodis pv. citri str. 306
  CDS (1)..(1371): transl_table=11
atggcgattcattcctccgtactcgagctgattggcaacacgccgatcgtcaaggcccagcgcctggacaccggcgtctgcgagctgttcctcaagctggaggcgaataatcccggtggatcgatcaaggaccgcatcggtctgtcgatgatcgaagcggccgagcggcgcggcgatctcaagcccggcgctaccctggtcgagggaactgccggcaacaccggcctgggcttggccctggtggcgcagcagaagggctaccagttgatcctggtggtgccggacaagatgagtcgcgagaagatcttcaatctcaaggccatgggcgccaacgtggtgctgacccgctcggatgtagccaagggccatcccgagtactaccaggacctggctgccaggatcgcagccgagactcctggcgcctacttcatcaaccagttcggcaacccggacaacccggccgcgcacgaattcggcaccggcccggaaatcctggcgcagatggacggccagctggacgccatcgtgttcggctgcggcagctccggcaccatgaccggcctgtcgcgcgccttcgccagcgcctcgccgcacaccgaactggtattggccgacccggtcggctcgatcctgacccagtacatcgaagaaggcacggtcagcgaaaagtccggcagctggttggtcgaaggcatcggcgaggatttcctcccggatatctccgacttttcgcgggtcaagaaggcctactccatcagcgacgcggaaagcttccataccgcgcgcgagctgctggccaaggagggcatcctcggcggctcgtccaccggcaccctgctggccgccgcattgaagtattgccgcgaacaaaccacgcccaagcgcgtgctggtgttcgtctgcgataccggcaacaagtacctgtcgaagatgtacaacgactactggatgctcgacaacggcttcctggagcgcccgcaacacggcgatctgcgcgacctgatcctgcgcccgtacaacaagcgcgacaccgtggtggtgggctcgaaggatctgctgactactgcctaccagcgcatgaagttgtacgacgtgtcgcagttgccggtgatcgacgacggcgaactggtgggcatcgtggacgaaagcgacgtgttgctgcatgtgtatggcgacgaagcccgcttccgcgacccgatttccacggccatggtcagcaagctggatcgtctggacgtggcttcgccgatcgaagcgctgctgccggtgttcgaccgtggccaggtcgccatcgtcatggacggcacgcaattccttggcctgatcacccgcatcgacctgctcaactacctgcgccgccgcgtgcagtga

SEQ ID NO: 39449 - protein, 456 aa, Xanthomonas axonopodis pv. citri str. 306
MAIHSSVLELIGNTPIVKAQRLDTGVCELFLKLEANNPGGSIKDRIGLSMIEAAERRGDLKPGATLVEGTAGNTGLGLALVAQQKGYQLILVVPDKMSREKIFNLKAMGANVVLTRSDVAKGHPEYYQDLAARIAAETPGAYFINQFGNPDNPAAHEFGTGPEILAQMDGQLDAIVFGCGSSGTMTGLSRAFASASPHTELVLADPVGSILTQYIEEGTVSEKSGSWLVEGIGEDFLPDISDFSRVKKAYSISDAESFHTARELLAKEGILGGSSTGTLLAAALKYCREQTTPKRVLVFVCDTGNKYLSKMYNDYWMLDNGFLERPQHGDLRDLILRPYNKRDTVVVGSKDLLTTAYQRMKLYDVSQLPVIDDGELVGIVDESDVLLHVYGDEARFRDPISTAMVSKLDRLDVASPIEALLPVFDRGQVAIVMDGTQFLGLITRIDLLNYLRRRVQ

SEQ ID NO: 39450 - DNA, 906 bp, Staphylococcus aureus subsp. aureus MW2
  CDS (1)..(906): transl_table=11
atgattacttatgatttaattggcaatacaccattagtactgttagaacattatagtgatgataaagttaaaatttatgccaagcttgaacaatggaatcctggaggcagtgttaaagacagactcgggaaatatttagtagagaaggcaattcaagaagggcgtgtgcgtgcaggtcaaactattgttgaagcgactgctggtaatacaggcatagggttagctattgcagcgaatagacatcatttaaaatgtaagatctttgcgccgtatggtttttcagaagaaaagattaatattatgatagcgcttggtgcagatgtttcaaggacgagtcagtctgaaggtatgcatggggcacaattagctgcacgttcctatgctgaaaaatatggtgccgtttatatgaatcaatttgaatccgaacataatccggatacatattttcatacattgggacccgaattgacttcagcattacagcaaattgattattttgtggctggtattggctctggcggtacatttacaggtaccgcacgttatttaaagcaacatcacgtgcaatgttatgccgttgagccagaagggtccgtgttaaatggagggccagctcatgcacatgacactgaaggtatcggttctgagaaatggccgatatttttagagagacgtcttgtagatgggatatttacgattaaagatcaagatgcctttcgaaatgtcaaaagtttggctataaatgaagggttgttagtaggcagttcttcaggtgcagcattacaaggtgcattgaatttaaaagcgcaattatctgaaggtacgattgttgtcgtatttccagatggtagcgatcgatatatgtctaagcaaatatttaattatgaggagaatgattatgaataa

SEQ ID NO: 39451 - protein, 301 aa, Staphylococcus aureus subsp. aureus MW2
MITYDLIGNTPLVLLEHYSDDKVKIYAKLEQWNPGGSVKDRLGKYLVEKAIQEGRVRAGQTIVEATAGNTGIGLAIAANRHHLKCKIFAPYGFSEEKINIMIALGADVSRTSQSEGMHGAQLAARSYAEKYGAVYMNQFESEHNPDTYFHTLGPELTSALQQIDYFVAGIGSGGTFTGTARYLKQHHVQCYAVEPEGSVLNGGPAHAHDTEGIGSEKWPIFLERRLVDGIFTIKDQDAFRNVKSLAINEGLLVGSSSGAALQGALNLKAQLSEGTIVVVFPDGSDRYMSKQIFNYEENDYE

SEQ ID NO: 39452 - DNA, 933 bp, Chlorobium tepidum TLS
  CDS (1)..(933): transl_table=11
atggccaccatcgcaaatatcacgaacaccatcggacgcacgccgctggtgcggctcaacaagctcgccaagggcctcgacgccgatattctcctcaagcttgaatacttcaacccgctcggcagcgtgaaggatcgcatcgggcgcgccatgatcgaagctgccgaagccgaggggaaaatcgacgcccggacgctcatcgtcgagccgaccagcggcaacaccggcatcgcgctcgccttcgtctgcgcccagcgcggctaccggctgctgctcacgatgcccgaaaccatgagcatcgagcgccgcaaactgctgcgctacctcggcgcggagctggtgctcactcccggagcgcaggggatgaaaggggcgattgaagaggcggcgcggatcgtcgaggcggagaaaaacagcttcaaccccggccagttccgcaacccggccaaccccctgattcaccaggcgaccaccggccccgaaatctggaacgacaccgaagggcgcgttgacatgcttgtttcaggcgtcggcacgggcggcaccatcaccggcacatcacgtttcatcaaggcgctgaagcccaacttcaaaagcatcgccgtggagcccaaagattcagctgtgctctccggcgggcagccggggcctcacaaaatccagggcatcggcgcgggcttcgtgcccgatgtgctcgacgtctcgctgctcgacgaggtggtgacggtgagcaacgacgacgcgatctcgaccgcgcgggcactcgcttcgcaggagggcatcctctgcggtatctcctccggcgcggcggttcacgcagccatcgaagtggcgaaacgctcgtcatccgcaggcaaaaccatcgtcgccatcatcccgagcaccggcgaacgctacctcagcactgcgctgtttgaagacatcgaagcgtga

SEQ ID NO: 39453 - protein, 310 aa, Chlorobium tepidum TLS
MATIANITNTIGRTPLVRLNKLAKGLDADILLKLEYFNPLGSVKDRIGRAMIEAAEAEGKIDARTLIVEPTSGNTGIALAFVCAQRGYRLLLTMPETMSIERRKLLRYLGAELVLTPGAQGMKGAIEEAARIVEAEKNSFNPGQFRNPANPLIHQATTGPEIWNDTEGRVDMLVSGVGTGGTITGTSRFIKALKPNFKSIAVEPKDSAVLSGGQPGPHKIQGIGAGFVPDVLDVSLLDEVVTVSNDDAISTARALASQEGILCGISSGAAVHAAIEVAKRSSSAGKTIVAIIPSTGERYLSTALFEDIEA

SEQ ID NO: 39454 - DNA, 879 bp, Yersinia pestis KIM
  CDS (1)..(879): transl_table=11
gtgacaaccctggaacactgcatcggccatacaccattggtgaaactacaacgcttaagccaagggctaaatgcggagatttgggtcaaactggaagggaacaatccggccggttcggttaaagatagagccgcgctggcgatgatccagcaggcagagttacgtggtgatattgcccccggtgatgtcctgattgaagcgaccagtggaaataccgggattgccttggcgatgattgccgccatgaaaggctatcacttgaagttactgatgccagaaaacatgagtcaggagcgtcaggcggcgatgcgggcttacggcgcggaactgattctggttagccgtgaacagggcatggaaggggcgcgtgatctggcgttaaccatgcaggagaacggcgaaggtaacgtgctggatcaatttaataatgcggataatccctatgcgcattttacggggaccgggccggaaatttggcagcaaacggcgggtaaagtgagccactttgtctccagtatggggaccaccggtacgatcaccggtgtcagccagtatctaaaaagccaaaatccgcaggtgaaggttatcggcctgcaaccagcagaaggcagcagtattccggggatccgccggtggtcagcggaatatataccgggtattttccgccccgagctggtggatcaggtgttggatatcacgcagagtgttgcagagcaaaccatgcggcggctggcgaaagaagaggggatattctgtggcgtcagttctggtggtgcggtggctggggcgctgcggatcgcggcagataaccctgatgcggtgattgtggcgattatctgtgaccgtggtgaccgctatttatcaactggggttttttaa

SEQ ID NO: 39455 - protein, 292 aa, Yersinia pestis KIM
MTTLEHCIGHTPLVKLQRLSQGLNAEIWVKLEGNNPAGSVKDRAALAMIQQAELRGDIAPGDVLIEATSGNTGIALAMIAAMKGYHLKLLMPENMSQERQAAMRAYGAELILVSREQGMEGARDLALTMQENGEGNVLDQFNNADNPYAHFTGTGPEIWQQTAGKVSHFVSSMGTTGTITGVSQYLKSQNPQVKVIGLQPAEGSSIPGIRRWSAEYIPGIFRPELVDQVLDITQSVAEQTMRRLAKEEGIFCGVSSGGAVAGALRIAADNPDAVIVAIICDRGDRYLSTGVF

SEQ ID NO: 39456 - DNA, 969 bp, Yersinia pestis KIM
  CDS (1)..(969): transl_table=11
atgagcaagatatatgaagacaactctttaacaatcggccatacgccgctggttcgtctgaaccgtatcggcaacggacgtattttggcgaaagttgaatcgcgtaacccaagtttcagtgtgaagtgccgtatcggcgccaacatgatttgggatgctgaaaaacggggtattctgaccgcaggcaaagagctggttgaaccaaccagcgggaatacaggtgttgccctggcatttgtcgccgctgcacgtggctataaattaacccttaccatgcctgaaactatgagcattgagcgccgcaagttgctgaaagcactgggggcaaatttggtgcttaccgaaggtgccaaagggatgaaaggcgcgattgccaaagcggaagaaattcaagcaaccgatccagaacgctaccttatcttgcaacaattcagtaacccggctaaccctgaaattcatgaaaaaaccaccggccctgaaatttgggaagataccgatggtgatgtagatgtctttgtctccggggtaggtaccggtggtaccctaaccggtgtcagccgctatattaaaaacacccaaggcaaagccatcacgactgtggccgtcgaacccactgactcccccgtgattacccaagcgctggccggtcaagagatcaaacctggtccgcataaaattcaaggtattggtgcgggttttatccccggtaacctcgacttgagtctggttgatcgtgtagcgctggtcaccaatgaagaagctatttcgatggcccgccgtttgatggatgaagaaggcattctggcgggtatttcttcaggtgcagccgttgctgccgccgttaagctttcagaagaggaaggctttactgacaaaacaattgtggttatccttccctcctcgggtgaacggtatttaagtacagcattgttcgcagatttgttcacagagcaagagctgcaacagtag

SEQ ID NO: 39457 - protein, 322 aa, Yersinia pestis KIM
MSKIYEDNSLTIGHTPLVRLNRIGNGRILAKVESRNPSFSVKCRIGANMIWDAEKRGILTAGKELVEPTSGNTGVALAFVAAARGYKLTLTMPETMSIERRKLLKALGANLVLTEGAKGMKGAIAKAEEIQATDPERYLILQQFSNPANPEIHEKTTGPEIWEDTDGDVDVFVSGVGTGGTLTGVSRYIKNTQGKAITTVAVEPTDSPVITQALAGQEIKPGPHKIQGIGAGFIPGNLDLSLVDRVALVTNEEAISMARRLMDEEGILAGISSGAAVAAAVKLSEEEGFTDKTIVVILPSSGERYLSTALFADLFTEQELQQ

SEQ ID NO: 39458 - DNA, 966 bp, Thermosynechococcus elongatus BP-1
  CDS (1)..(966): transl_table=11
atgaatattgcccccgatattactgccctcattggtcggacgccccttgtacgcctgaaccgcattccccaagcggagggctgcgttgccgaaattgtcgtcaagctagagagcatgaatcctgcggcctcagttaaggatcgcattggcctaagtatgattcaggaggcagaagcagcgggtctcattacccctggtaaaacggttttggtggagccgacatcgggaaatactgggattgccttggccatggtcgcggcggcaaagggctatcggctgattctcaccatgccagaaaccatgagtgcagagcgccgagccatgctgcgtgcctatggcgcagagctggatttgacccccggcaccgaggggatgagtggcgccattcgtcgtgctgaagagattgctgcctcccttgaagatgctttcatgttgcagcagttcaaaaatcccgccaatccaaagattcaccgtgaaaccactgcgcttgaaatttggcaagatacagacggtcaagttgatattttggtggctggcgttggtacggggggcacgattacgggggtagcagaagtgatcaaagcaaagaagcctacctttcaagcgatcgccgtcgaacccagcaatagtccagtcctttcaggaggcaaaccgggaccccacaaaattcaaggcattggtgctggctttgtgccccccgttctcaaacgagaactcattgatgaagtcatccctgtctccgatgatcaagccatccattttggtcgccgcttagcccgtgaagaaggcctgctctcaggtatttccagtggggctgccctttgtgctgccattcaggtggctcaacgtcctgaaaatgccggcaagttaattgtcatggtgcagcccagttttggcgaacgctacttgagcacccccctcttccaagaggccctgcccttggtgccaagctacttgcaaacttag

SEQ ID NO: 39459 - protein, 321 aa, Thermosynechococcus elongatus BP-1
MNIAPDITALIGRTPLVRLNRIPQAEGCVAEIVVKLESMNPAASVKDRIGLSMIQEAEAAGLITPGKTVLVEPTSGNTGIALAMVAAAKGYRLILTMPETMSAERRAMLRAYGAELDLTPGTEGMSGAIRRAEEIAASLEDAFMLQQFKNPANPKIHRETTALEIWQDTDGQVDILVAGVGTGGTITGVAEVIKAKKPTFQAIAVEPSNSPVLSGGKPGPHKIQGIGAGFVPPVLKRELIDEVIPVSDDQAIHFGRRLAREEGLLSGISSGAALCAAIQVAQRPENAGKLIVMVQPSFGERYLSTPLFQEALPLVPSYLQT

SEQ ID NO: 39460 - DNA, 927 bp, Oceanobacillus iheyensis HTE831
  CDS (1)..(927): transl_table=11
atgagggtctctgataatattacaggtttaattggcggaacaccgattgttaaattacacaatgttacagatgaaggtagtgcagatgtatacgcaaaggtagagtttatgaatcctggtagctctgtgaaagaccgtattgctatcgcgatgattgaagcagcagaacaaggtggaaagctaaaagaaggcgatactattattgagccgactagtggaaatactggtattggccttgcaatggtagcagctgcaaaaggataccgtgcagttctagtaatgccagatacgatgagtcaggaacgcaggaatctccttcgtgcttatggtgctgaacttgtactgacacctggtgctgaagggatgaaaggtgcaattgcgaaagcggtagaattgcaagaagagaatgattactttatgccgcaacaatttagcaaccctgcaaatcctgatattcacgaaaaaacgactggtaaagaaattgtggagcagatgaaagatggtcttgatggattcgtatctggtattggtactggtggaacaattaccggtgcaggtaaggtgctaaaaaatcattttcaagatattaaattatacgcagtagagccggctgattctccaatactttcaggaggaagtcctgggccgcataaaatacaaggaattggagccggctttaaaccggatgtgttagacaccgcaatctatgatgaagttttaacaattagtaatgaggaagcatatgaagcagctagaaaagttgcaacgaccaatggcatattgggaggtatttcttccggtgctgcagttgctgctgcagttaaagttgctaaacaattaggcgcaggtaagaaagttcttgctatattaccagataatggtgagcgctatctatcaacaccgttatatcaatttgataaagagtaa

SEQ ID NO: 39461 - protein, 308 aa, Oceanobacillus iheyensis HTE831
MRVSDNITGLIGGTPIVKLHNVTDEGSADVYAKVEFMNPGSSVKDRIAIAMIEAAEQGGKLKEGDTIIEPTSGNTGIGLAMVAAAKGYRAVLVMPDTMSQERRNLLRAYGAELVLTPGAEGMKGAIAKAVELQEENDYFMPQQFSNPANPDIHEKTTGKEIVEQMKDGLDGFVSGIGTGGTITGAGKVLKNHFQDIKLYAVEPADSPILSGGSPGPHKIQGIGAGFKPDVLDTAIYDEVLTISNEEAYEAARKVATTNGILGGISSGAAVAAAVKVAKQLGAGKKVLAILPDNGERYLSTPLYQFDKE

SEQ ID NO: 39462 - DNA, 930 bp, Oceanobacillus iheyensis HTE831
  CDS (1)..(930): transl_table=11
ttggcaatttatgaatcgatacaacaattgattggcaatacacctttattaagaattaatgagatggacattccaaataatgttcatctctatgcaaaattagaatttttaaatcctggcggaagtgtaaaagatcgtttaggacaatatttaattgataaagcttgggagcaaggctttcttcgagagggaagtacaataatcgaaccaacagctggaaatactggtattggtttagctttagctgctagaacgaaaaagttgtcggttattttttgtgtacctgagcaatttagtgtcgaaaagcaacaaatcatgagagctttaggtgcaactatcattcatactccaaaagaaaaagggatgatgggtgcaatagaaaaagctgaacaattagttgaagaaatcccaaatagctattctccacagcagttttcaaataaatttaatcctatgacctattatgagacgatggcaccggaaatttggagtgatttacaaggagatattgatatctttgtagcgggtgcgggatcgggaggtacttttacaggttgtgcgagttattttaaggaaagaaaaaactcgattcataatgttatcgttgagcccgttggttcaattttagggggaggagaagctggtccacatttaaccgaaggaattggaatggaatttatccctgagtacatgaatcaaagctttatggatgaggtacaaactatttcggataaagaagctttttcgatggtagaagaacttgctagaaaagaaggattgttagtgggtagttcttctggttcagcgatggtagctgctttaaacaaagcaagagaagctagatcaggaacgacaattgttactattcttcctgatggaagtgatcgctatttaagtaaacagatttataatgtgtcaaagcaattgtaa

SEQ ID NO: 39463 - protein, 309 aa, Oceanobacillus iheyensis HTE831
MAIYESIQQLIGNTPLLRINEMDIPNNVHLYAKLEFLNPGGSVKDRLGQYLIDKAWEQGFLREGSTIIEPTAGNTGIGLALAARTKKLSVIFCVPEQFSVEKQQIMRALGATIIHTPKEKGMMGAIEKAEQLVEEIPNSYSPQQFSNKFNPMTYYETMAPEIWSDLQGDIDIFVAGAGSGGTFTGCASYFKERKNSIHNVIVEPVGSILGGGEAGPHLTEGIGMEFIPEYMNQSFMDEVQTISDKEAFSMVEELARKEGLLVGSSSGSAMVAALNKAREARSGTTIVTILPDGSDRYLSKQIYNVSKQL

SEQ ID NO: 39464 - DNA, 924 bp, Oceanobacillus iheyensis HTE831
  CDS (1)..(924): transl_table=11
atgcgtgtagtcaatgatgtaactgaattaattggtcaaacaccaatggttaagttaaatcgtctccaaccagaaaatgcagctgacatatatgtaaagttagagatgtttaatccgagcggtagtgtaaaagaccgagctgcatcccatatgatacgtgtagcagaagaacaagggttaataaaacaaggagccactattatagaacctacaagtggaaatacaggcatcggtttggcaatggcggcatctgctaaaggatataaagcaattatgattatgccggataatagtacgatggaacgtcgaaatatattaaaggcgtatggagcagaagtcgtacttacgccaagtgaggaaaaaatgcctggatccatacgtaaagcgctagaacttcaaaaatccattcctaacagttttatacctcaacaatttgaaaatgtagctaacccagatgttcatcgtattagcactgctttagaaatcttggaacagatggataatcaattagatgcgtttgtctgtactgcaggaactggtggtacggtaacaggtacaggagaaacattaaaggaaaagttaccacatgtgcatgtggcggttgtggaaccagaaggatcacccgtcttatcaggaggaaagccgggaccgcataaactcgttggcacaagtccgggattcgtacctgatattttaaatacggatgtatacgatgaaatcattcaaattaaagatgaacaagctgtcactttattaaaagaccttgctcaaaaagaagggatttttcttggtccatctggagcagctgctgtatatgcggcaatggaagtagcgaagaagcttggcccaaacaaaaagcttgtatgtatagcaccagatacaggagaacgttatctatccatggatatgtttgatgaaaagtaa

SEQ ID NO: 39465 - protein, 307 aa, Oceanobacillus iheyensis HTE831
MRVVNDVTELIGQTPMVKLNRLQPENAADIYVKLEMFNPSGSVKDRAASHMIRVAEEQGLIKQGATIIEPTSGNTGIGLAMAASAKGYKAIMIMPDNSTMERRNILKAYGAEVVLTPSEEKMPGSIRKALELQKSIPNSFIPQQFENVANPDVHRISTALEILEQMDNQLDAFVCTAGTGGTVTGTGETLKEKLPHVHVAVVEPEGSPVLSGGKPGPHKLVGTSPGFVPDILNTDVYDEIIQIKDEQAVTLLKDLAQKEGIFLGPSGAAAVYAAMEVAKKLGPNKKLVCIAPDTGERYLSMDMFDEK

SEQ ID NO: 39466 - DNA, 1227 bp, Bifidobacterium longum NCC2705
  CDS (1)..(1227): transl_table=11
gtggttaacatgaaaaaccgattcacttttcggattcaccgtacagtgagcgggaatactcgattttcaaaccaaagccacagtccattcgtctgggaacgtcggttcacgaacgcaacgcagcaaaacccccacaaccccagcaacgaaggacttcacatgaccatccacaacagcctcgcagaactcatcggcaacaccccgctcgtcaagctcaaccacattccgcaggcggccggcgtcaaagccaccatcgccgtcaaagtcgaatacttcaaccccggtggatcttccaaggaccgcattgccgaacgcatcatcgacgccgccgaacagtccggccaactgaagcccggcggcgtgatcgtcgaacccacctccggcaacaccggcgtcggcctggccctggtcgcccagcagcgcggctaccgcacgattttcaccctgccggacaaggtctccgaatccaagcgcgcggtgctgcgcgcctacggtgccgaagtcatcgtcacgccaaccgacgccggcccggacgacccgcgctcctactatcaggtcgccgaacgactggccaatacgattcccggcggcttccgcccgaaccagtacgacaatccgaacggcccgctgagccactactacaccaccggacctgagatctgggaggccacggaccacaaggtcacgcacttcgtggccggcatcggcaccggcggcaccatctccggcaccggcaagtacctcaaggaagcctccaacggcgcggtcaaggtcatcggctccgacccggaaggctccatctactccgcttcctcacgcgacgaagtccaccagtacgatatcgagggcgtaggggaggacttctatcccaaggccttcgaccggaacatcaccgacgacatcgtgcgcgtgtccgacgccgaagcctttgaaatgacccgccgtctggccggcgaggaggcgctgctggtcggcggctcgtccggcatggctgtggccagcgccatcaagtacgcgcttgccaatgatttggacgagaaccagatcgtggtggtgctcgcccctgattccggccgcagctacttggagaagatcttcaacgacgactggatgcgtgccaacggctacggcgacatcgtggagcgcaccagcaagccctccctcgccgagcagtaccttaacggagctccctctgatgagggagctggggacggactccataactag

SEQ ID NO: 39467 - protein, 408 aa, Bifidobacterium longum NCC2705
MVNMKNRFTFRIHRTVSGNTRFSNQSHSPFVWERRFTNATQQNPHNPSNEGLHMTIHNSLAELIGNTPLVKLNHIPQAAGVKATIAVKVEYFNPGGSSKDRIAERIIDAAEQSGQLKPGGVIVEPTSGNTGVGLALVAQQRGYRTIFTLPDKVSESKRAVLRAYGAEVIVTPTDAGPDDPRSYYQVAERLANTIPGGFRPNQYDNPNGPLSHYYTTGPEIWEATDHKVTHFVAGIGTGGTISGTGKYLKEASNGAVKVIGSDPEGSIYSASSRDEVHQYDIEGVGEDFYPKAFDRNITDDIVRVSDAEAFEMTRRLAGEEALLVGGSSGMAVASAIKYALANDLDENQIVVVLAPDSGRSYLEKIFNDDWMRANGYGDIVERTSKPSLAEQYLNGAPSDEGAGDGLHN

SEQ ID NO: 39468 - DNA, 972 bp, Shigella flexneri 2a str. 301
  CDS (1)..(972): transl_table=11
atgagtaagatttttgaagataactcgctgactatcggtcacacgccgctggttcgcctgaatcgcatcggtaacggacgcattctggcgaaggtggaatctcgtaaccccagcttcagcgttaagtgccgtatcggtgccaacatgatttgggatgccgaaaagcgcggcgtgctgaaaccaggcgttgaactggttgaaccgaccagcggtaataccgggattgcactggcctatgtagctgccgctcgcggttacaaactcaccctgaccatgccagaaaccatgagtattgaacgccgcaagctgctgaaagcgttaggtgcaaacctggtgctgacggaaggtgctaaaggcatgaaaggcgcaatccaaaaagcagaagaaattgtcgccagcaatccagagaaatacctgctgctgcaacaattcagcaatccggcaaaccctgaaattcacgaaaaaaccaccggtccggagatctgggaagataccgacggtcaggttgatgtatttattgctggcgttgggactggcggtacgctgactggcgtcagccgctacattaaaggcaccaaaggcaagaccgatcttatctctgtcgccgttgagccaaccgattctccagttatcgcccaggtgctggcaggtgaagagattaaacctggcccgcataaaattcagggtattggcgctggttttatcccggctaacctcgatctcaagctggtcgataaagtcattggcatcaccaatgaagaagccatttctaccgcccgtcgtctaatggaagaagaaggtattcttgcaggtatctcttctggagcagctgttgccgcagcgttgaaactacaagaagatgaaagctttaccaacaagaatattgtggttattctaccatcatcgggtgagcgttatttaagcaccgcattgtttgccgatctcttcactgagaaagaattgcaacagtaa

SEQ ID NO: 39469 - protein, 323 aa, Shigella flexneri 2a str. 301
MSKIFEDNSLTIGHTPLVRLNRIGNGRILAKVESRNPSFSVKCRIGANMIWDAEKRGVLKPGVELVEPTSGNTGIALAYVAAARGYKLTLTMPETMSIERRKLLKALGANLVLTEGAKGMKGAIQKAEEIVASNPEKYLLLQQFSNPANPEIHEKTTGPEIWEDTDGQVDVFIAGVGTGGTLTGVSRYIKGTKGKTDLISVAVEPTDSPVIAQVLAGEEIKPGPHKIQGIGAGFIPANLDLKLVDKVIGITNEEAISTARRLMEEEGILAGISSGAAVAAALKLQEDESFTNKNIVVILPSSGERYLSTALFADLFTEKELQQ

SEQ ID NO: 39470 - DNA, 912 bp, Shigella flexneri 2a str. 301
  CDS (1)..(912): transl_table=11
gtgagtacattagaacaaacaataggcaatacgcctctggtgaagttgcagcgaatggggccggataacggcagtgaagtgtggttaaaactggaaggcaataacccggcaggttcggtgaaagatcgtgcggcactttcgatgatcgtcgaggcggaaaagcgcggggaaattaaaccgggtgatgtcttaatcgaagccaccagtggtaacaccggcattgcgctggcaatgattgccgcgctgaaaggctatcgcatgaaattgctgatgcccgacaacatgagccaggaacgccgtgcggcgatgcgtgcttatggtgcggaactgattcttgtcaccaaagagcagggcatggaaggtgcgcgcgatctggcgctggagatggcgaatcgtggcgaaggaaagctgctcgatcagttcaataatcccgataacccttatgcgcattacaccaccaccgggccggaaatctggcagcaaaccggcgggcgcatcactcattttgtctccagcatggggacgaccggcactatcaccggcgtttcatgctttatgcgcgaacaatccaaaccggtgaccattgttggcctgcaaccggaagaaggcagcagtattccgggcattcgccgctggcctgcggaatatctgccggggattttcaacgctgcgctggtggatgaggtgctggatattcatcagcgcgatgcggaaaacaccatgcgcgaactggcggtgcgggaaggaatattctgtggcgtcagctcaggcggcgcggttgctggagcactgcgggtggcaaaagctaaccctggtgcggtggtggtagcgatcatctgcgatcgtggcgatcgctacctctccaccggagtgtttggggaagagcattttagtcagggggcagggatttaa

SEQ ID NO: 39471 - protein, 303 aa, Shigella flexneri 2a str. 301
MSTLEQTIGNTPLVKLQRMGPDNGSEVWLKLEGNNPAGSVKDRAALSMIVEAEKRGEIKPGDVLIEATSGNTGIALAMIAALKGYRMKLLMPDNMSQERRAAMRAYGAELILVTKEQGMEGARDLALEMANRGEGKLLDQFNNPDNPYAHYTTTGPEIWQQTGGRITHFVSSMGTTGTITGVSCFMREQSKPVTIVGLQPEEGSSIPGIRRWPAEYLPGIFNAALVDEVLDIHQRDAENTMRELAVREGIFCGVSSGGAVAGALRVAKANPGAVVVAIICDRGDRYLSTGVFGEEHFSQGAGI

SEQ ID NO: 39472 - DNA, 969 bp, Shewanella oneidensis MR-1
  CDS (1)..(969): transl_table=11
atgagcaaaattttcgaagacaattcatatactattggcaacaccccgttagtgcgtttaaaccgagtaagccaaggtaaagtgctggcgaaagtcgaatcacgcaatcccagtttcagtgtcaaatgccgtatcggtgccaatatgatttgggatgccgagaaaaaaggactgctcaccaaagatcatgagctgattgagccaacatccggtaacacgggtatcgctttagcctatgtagcagcagctcgtggttacaagctgaccctgaccatgccaaatactatgagcttagagcgtcgtaagttgcttaaagctttaggtgcaaatctggtgctgaccgaaggcgccaaaggcatgaaaggcgcgattgataaagcggaagagatccgtcaatcggcgcctgaaaaatatattttgttgcagcagtttaataaccctgccaaccccgagatccacgaaaaaaccacaggtccagaaatttggaatgacactgatggcgctgtcgatgtgtttgttgctggtgtgggtactggcggtactatcacgggtgtcagccgttacttgaaaaaagtggcaggcaaagcgattacctcggtggcggtagaacctgccgactcaccagttatcactcaaaccttagcgggattacctgtacaacctggcccacataaaattcaagggattggcgcaggttttatcccaggtaaccttgatatcgagcttatcgatcgcgttgagacagtcaccaacgatgaagcaattgaaatggcgcgccgcttgatgcaggaggaaggtattttagtgggtatttcttcaggagctgccgtggttgccgctaaccgtatcgctgctctgcctgagtttgcggataaaaccattgtggtagtactgccttcagctgcagagcgttacttatcttcagtattgttccaaggccaatttggcgacgaagaaaatatccagtaa

SEQ ID NO: 39473 - protein, 322 aa, Shewanella oneidensis MR-1
MSKIFEDNSYTIGNTPLVRLNRVSQGKVLAKVESRNPSFSVKCRIGANMIWDAEKKGLLTKDHELIEPTSGNTGIALAYVAAARGYKLTLTMPNTMSLERRKLLKALGANLVLTEGAKGMKGAIDKAEEIRQSAPEKYILLQQFNNPANPEIHEKTTGPEIWNDTDGAVDVFVAGVGTGGTITGVSRYLKKVAGKAITSVAVEPADSPVITQTLAGLPVQPGPHKIQGIGAGFIPGNLDIELIDRVETVTNDEAIEMARRLMQEEGILVGISSGAAVVAANRIAALPEFADKTIVVVLPSAAERYLSSVLFQGQFGDEENIQ

SEQ ID NO: 39474 - DNA, 867 bp, Shewanella oneidensis MR-1
  CDS (1)..(867): transl_table=11
atgactattgaagcctgtatcgggcaaacgccgctagttcgcctgcagcggcttgattgcggtagctcaaccgtgttgttaaagctggaggggaataatcctgctggctcggtaaaggatcgcgccgcactgaatatgattaatcaggcggagcttcgccaagaaatcgccccaggtgataccttgattgaagccacaagtggtaatacaggaattgccttagcgatggctgcggccattaaaggttacaagatgatcctgattatgccgtccaattcgacccaagagcgtaaagatgccatgcaggcttatggtgccgagctgctgctggtggacaacatggaagccgcgcgggatttggccttagcgcttcaggctgaagggaagggcaaggtactggatcagtttaataatcaagataatgctaacgcgcattttctcactactggccccgaaatttggcagcagagccaaggtaagatcacccattttgtttctagcatggggaccactggtactattatgggcgtgtcgaaatacctaaagagtcgcaatcccgatattaccattgtcggtcttcaacccgccgatggcagttcgattccgggcattcgccgttggccgcaggaatatttaccaggcatctttgatgccgcccgtgtcgatttaatgatggatatcgaagagcaagacgccaaagccatggctcgagccttagcgcgagaagagggcatttgtgctggtgtgagttctggcggcgcggtatatgcagcacttgagttagcaaggcagtatccaggctctgtagtggtcgcgattgtgtgtgataggggcgatcgttatctgtcatctgggttattttcttaa

SEQ ID NO: 39475 - protein, 288 aa, Shewanella oneidensis MR-1
MTIEACIGQTPLVRLQRLDCGSSTVLLKLEGNNPAGSVKDRAALNMINQAELRQEIAPGDTLIEATSGNTGIALAMAAAIKGYKMILIMPSNSTQERKDAMQAYGAELLLVDNMEAARDLALALQAEGKGKVLDQFNNQDNANAHFLTTGPEIWQQSQGKITHFVSSMGTTGTIMGVSKYLKSRNPDITIVGLQPADGSSIPGIRRWPQEYLPGIFDAARVDLMMDIEEQDAKAMARALAREEGICAGVSSGGAVYAALELARQYPGSVVVAIVCDRGDRYLSSGLFS

SEQ ID NO: 39476 - DNA, 927 bp, Streptococcus mutans UA159
  CDS (1)..(927): transl_table=11
atggcaaaaatttataacaacattactgaattaattggcaatacacctattgtaaaactcaacaatgttgttcctgaagatgcagctgatgtttatgttaaacttgaagctttcaatcctggttcttccgttaaagatcggattgctttaagcatgattgaagatgctgaaaaacgtggtctcatcaaacctggagataccattgtcgaaccgacaagtggtaatacaggtattggactttcatgggtcggcgctgccaaaggttacaatgtcattattacaatgcctgaaacaatgagcgttgaacgccgcaaaattatacaagcttacggtgccaaactcgtattgacaccaggaagtgctggtactaagggtgccattgacaaagctcacgagattgccaaagaagttggtggttgggtgcctctgcaatttgacaatccagctaatccaaaaattcacgaattgacaacaggtcctgagattctggaagcatttggttcacatggacttgatgctgtcgttgctggtattggtactggtggtacgattactgggatttcacgtgcccttaaaaaagacaatcctgacattaaaatctatggattggaagctgatgaatctgctgttttgtcaggtgacaaaccggggccccataaaatccaaggtatctcaacaggctttatcccagctgcattagatactcattcttatgatgaagttatccgtgttaaatctgatgatgctttggctactggtcgctacttcggcggtaaggaaggattcctacttggcatctccgcttctgctgctgtctgggccgcacttgaagtcgctaaaaaactcggtaagggtaaaaaagtcttggctattgcacctgataatggtgagcgttatctttcaaccgcactttatgaatttaactaa

SEQ ID NO: 39477 - protein, 308 aa, Streptococcus mutans UA159
MAKIYNNITELIGNTPIVKLNNVVPEDAADVYVKLEAFNPGSSVKDRIALSMIEDAEKRGLIKPGDTIVEPTSGNTGIGLSWVGAAKGYNVIITMPETMSVERRKIIQAYGAKLVLTPGSAGTKGAIDKAHEIAKEVGGWVPLQFDNPANPKIHELTTGPEILEAFGSHGLDAVVAGIGTGGTITGISRALKKDNPDIKIYGLEADESAVLSGDKPGPHKIQGISTGFIPAALDTHSYDEVIRVKSDDALATGRYFGGKEGFLLGISASAAVWAALEVAKKLGKGKKVLAIAPDNGERYLSTALYEFN

SEQ ID NO: 39478 - DNA, 927 bp, Streptococcus agalactiae NEM316
  CDS (1)..(927): transl_table=11
atgtcaaaaatttataattctattacagacttaatcggaaatacacccattattcaattacatcatattgttccagaaggagctgcagaggtgtacgttaagttagaatcctttaacccaggttcatctgtcaaagatcgtatcgctctagctatgattgaagatgcagagcaaaaagggattcttaaagccggagatacaatcgtagaacctacatctggtaatacaggtatcggtttggcttgggtaggaaaagctaaagggtataatgttattattgttatgccagaaaccatgtcaattgaacgtcgtaaaatcattcaagcctatggtgctcaattagtactaacacctggtagtgaagggatgaagggagctattgctaaggcaaaagaaatttctgcagagcaaaatgcttggctacccctgcaatttaataatcaagccaatccagaaatccacgaaaaaacgactggtagggaaattatcgagacttttggtgaaaaaggtttagatgcttttatcgcaggtgtgggaactggtgggacaattactggtgtctctcgtgcattaaaaaaagtcaatcctgatgtcgctatttatgctgtagaagctgatgaatctgcaatcctttctggtgagcaacctgggcctcataaaatacaagggatttctgcaggtttcattccagaaacattggctacagattcttatgatcatatcattcgcgttacatctgacgatgctattgaaacaggacgtatcatcggcgggctagaaggtttcctcgcaggaatttctgcttcagctgctatttatgctgctattgaagtggccaaacaactaggaaaagggaaaaaggttttagctcttctccctgataatggcgaacgttacttatcaacaagcctgtatgattttgaataa

SEQ ID NO: 39479 - protein, 308 aa, Streptococcus agalactiae NEM316
MSKIYNSITDLIGNTPIIQLHHIVPEGAAEVYVKLESFNPGSSVKDRIALAMIEDAEQKGILKAGDTIVEPTSGNTGIGLAWVGKAKGYNVIIVMPETMSIERRKIIQAYGAQLVLTPGSEGMKGAIAKAKEISAEQNAWLPLQFNNQANPEIHEKTTGREIIETFGEKGLDAFIAGVGTGGTITGVSRALKKVNPDVAIYAVEADESAILSGEQPGPHKIQGISAGFIPETLATDSYDHIIRVTSDDAIETGRIIGGLEGFLAGISASAAIYAAIEVAKQLGKGKKVLALLPDNGERYLSTSLYDFE

SEQ ID NO: 39480 - DNA, 936 bp, Corynebacterium efficiens YS-314
  CDS (1)..(936): transl_table=11
atgggcaacgtgtacaacaacatcactgagaccatcggccgcacccccctggtcaaactcaaccgcctcaccgagggcctggacgccaccgtcctggtgaagctcgagtccttcaaccccgcgaactccgtcaaggaccgcatcggtctagccatcatcgacgccgctgaggcctccggtgaactgaagccgggtggcaccatcgtcgaggcaacctccggcaacaccggtatcgccctggccatggtcggcgcagcccgcggttacaaggttgtcctgaccatgccggagaccatgtccaccgagcgtcgcgtcctgctgcgcgcctacggcgcggaaatcgtcctcaccccgggtgcagccggtatgcagggcgccaaggacaaggccgatgagatcgtcgccgagcgcgagaacgccatcctggcccgccagttcgagaaccccgccaacccggagatccaccgcgagaccaccgccaaggagctcatggaggacaccgacggtaacttcgacatcttcgtcgcaggtttcggcaccggcggcaccatcaccggtgtcggtggcgtgctcaaggagcacaacccggaggcccaggtctacgcagttgagcctgaggcatccccgctgctgacctctggcaaggccggcccgcacaagatccagggcatcggcgccaacttcatcccggaaaacctcgaccgtaagatcctcgatgatgtcatcaccatctccaacgaggatgccgtcacctggtcccgcaagctggccaccgaggagggcatcctgggtggtatctccaccggtgccaacatcaaggccgctctggacctggctgccaagccggagaacgccggcaagaccatcgtcaccaccgtctgtgacttcggtgagcgctacgtctccaccgtcctctacgaggacatccgcgactaa

SEQ ID NO: 39481 - protein, 311 aa, Corynebacterium efficiens YS-314
MGNVYNNITETIGRTPLVKLNRLTEGLDATVLVKLESFNPANSVKDRIGLAIIDAAEASGELKPGGTIVEATSGNTGIALAMVGAARGYKVVLTMPETMSTERRVLLRAYGAEIVLTPGAAGMQGAKDKADEIVAERENAILARQFENPANPEIHRETTAKELMEDTDGNFDIFVAGFGTGGTITGVGGVLKEHNPEAQVYAVEPEASPLLTSGKAGPHKIQGIGANFIPENLDRKILDDVITISNEDAVTWSRKLATEEGILGGISTGANIKAALDLAAKPENAGKTIVTTVCDFGERYVSTVLYEDIRD

SEQ ID NO: 39482 - DNA, 975 bp, Pseudomonas putida KT2440
  CDS (1)..(975): transl_table=11
atgagccgtatcttcgcagacaacgcccactccatcggtaacacgccgctggtgcagatcaaccgcatcgctccgcgcggtgtgaccatcctggccaagatcgaagggcgcaaccccgggtactcggtcaaatgccgcattggcgcgaacatggtctgggacgccgagagcagcggcaagctcaaaccgggcatgaccattgtcgagcccacctcgggcaacaccggcatcggcctggccttcgtcgccgccgcccgcggctacaagctgatgctgaccatgcccgcttcgatgagcctggagcgccgcaaggtgctgaaggcactgggcgccgaactggtattgaccgatccggccaagggcatgaagggcgcgatcgagaaggccaacgaaatcgtcgcctccgacccggagcagtacttcctgccgggccagttcgaaaacccggccaacccggccattcacgagaaaaccaccggtcctgagatctggaacgacacggacggcgccatcgacgtgctggtggcaggcgtgggcactggcgggaccatcaccggcgtgtcgcgctacatcaaacatacccagggcaaggccatcctgtcggtggcagtggaacccgtggcatcgccactgatcagccagaccctggccggcgaagaactcaagccaagcccgcacaaaatccagggcatcggcgccggtttcgtgccgaaaaacctcgacctgtcgattgtcgaccaagtggagacggtgaccgacgaagagtccaaggccatggcgattcgcctgatgcaggaagagggcatcctttgtggtatttcctgcggtgcggcaatggcggcagcggtgcgtctggccgaaaaaccggaaatgcagggtaagaccatcgtcgtaatcctgcccgattcgggcgagcgatacttgtcgagcatgctgttcagcgacatgttcagcgagcaggaaacccagcagtaa

SEQ ID NO: 39483 - protein, 324 aa, Pseudomonas putida KT2440
MSRIFADNAHSIGNTPLVQINRIAPRGVTILAKIEGRNPGYSVKCRIGANMVWDAESSGKLKPGMTIVEPTSGNTGIGLAFVAAARGYKLMLTMPASMSLERRKVLKALGAELVLTDPAKGMKGAIEKANEIVASDPEQYFLPGQFENPANPAIHEKTTGPEIWNDTDGAIDVLVAGVGTGGTITGVSRYIKHTQGKAILSVAVEPVASPLISQTLAGEELKPSPHKIQGIGAGFVPKNLDLSIVDQVETVTDEESKAMAIRLMQEEGILCGISCGAAMAAAVRLAEKPEMQGKTIVVILPDSGERYLSSMLFSDMFSEQETQQ

SEQ ID NO: 39484 - DNA, 984 bp, Escherichia coli CFT073
  CDS (1)..(984): transl_table=11
  misc_feature (887)..(887): n is a, g, c or t
atgagtaagatttttgaagataactcgctgactatcggtcacacgccgctggttcgcctgaatcgcatcggtaacggacgcattctggcgaaggtggaatctcgtaaccccagcttcagcgttaagtgccgtatcggtgccaacatgatttgggatgccgaaaagcgcggcgtgctgaaaccaggcgttgaactggttgaaccaaccagcggtaataccgggattgcactggcctatgtagctgccgctcgcggttacaaacttaccctgaccatgccagaaaccatgagtattgaacgccgcaagctgctgaaagcgttaggtgcaaacctggtgctgaccgaaggtgctaaaggcatgaaaggcgcaatccaaaaagcagaagaaattgtcgccagcaatccagagaaatacctgctgctgcaacaattcagcaatccggcaaaccctgaaattcatgaaaaaaccaccggtccggagatctgggaagataccgacggtcaggttgatgtatttattgctggcgttgggactggcggtacgctgactggcgtcagccgctacattaaaggcaccaaaggcaagaccgatcttatctctgtcgccgttgagccaaccgattctccagttatcgcccaggcgctggcaggtgaagagattaaacctggtccgcataaaattcagggtattggcgctggttttatcccggctaaccttgatctcaagctggtcgacaaagtcattggcatcaccaatgaagaagccatttctaccgcacgtcgtctgatggaagaagaaggcattcttgctggtatctcttctggagcagctgttgctgcggcgttgaaactacaagaagatgaaagctttaccaataagaatattgnggttattctgccgtcatcgggtgagcgttatttaagcactgcattgtttgccgatcttttcactgagaaagaactgcaacagaatgccagcttgtaa

SEQ ID NO: 39485 - protein, 327 aa, Escherichia coli CFT073
  misc_feature (296)..(296): The Xaa at location 296 stands for Ala, Glu, Gly, or Val.
MSKIFEDNSLTIGHTPLVRLNRIGNGRILAKVESRNPSFSVKCRIGANMIWDAEKRGVLKPGVELVEPTSGNTGIALAYVAAARGYKLTLTMPETMSIERRKLLKALGANLVLTEGAKGMKGAIQKAEEIVASNPEKYLLLQQFSNPANPEIHEKTTGPEIWEDTDGQVDVFIAGVGTGGTLTGVSRYIKGTKGKTDLISVAVEPTDSPVIAQALAGEEIKPGPHKIQGIGAGFIPANLDLKLVDKVIGITNEEAISTARRLMEEEGILAGISSGAAVAAALKLQEDESFTNKNIXVILPSSGERYLSTALFADLFTEKELQQNASL

SEQ ID NO: 39486 - DNA, 1035 bp, Bradyrhizobium japonicum USDA 110
  CDS (1)..(1035): transl_table=11
atgaccattcgaaacgacgtagtcgaagccattggcaacaccccgctgatcaagctcaagcgcgcctcggaggcgaccggctgcaccattctgggcaaggccgaattcatgaatcccggccagtcggtgaaggaccgcgccggcaagtggatgatcttggaggccgagaagcgcggcgagctcaagcccggcggcctcgtggtggaagcgaccgccggcaataccggcatcgggctcgcggtcgtggcgagtgcgcgcggctatcgcacgctgatcgtgatcccggagacgcagagccaggagaagaaggactttctcaagctgtgcggcgccgagctgatcgaggtgccggcgcttccttacgccaatcccaacaactaccagcatgtcggccgccggctcgccgacgagctgcgcaagaccgagcctaacggcgtgctgttcgccgaccagtggaacaatctcgacaatgcgaaagcgcattacgagtccacggggccggagatctgggagcagaccggcggcaaggtcgacgggttcgtctgctcggtcggcagcggcggcacgctcgccggcgtcagccgccttctgaaggaaaagaacaagaacgtccggatcgcctgcgccgacccgcatggtgccgggatgttcgattatttcaggaccggcgaagccaaggcgacgccgggcggttcgatcaccgaaggtatcggcctcaaccgggcgaccgcgatcgtcgagagcgcgaaggtcgatgacgcctatctcattcccgacactgacgccgtcacggagatctacgacctgctccagcacgagggcctgtgcctcggcggctcgaccggcatcaacatcgccggcgcgatacgcctcgccaagcagctcggccccggcaagaccatcgtcaccgtgctctgcgattccggcagccgctatcagtcaaaactgttcaatgcggacttcatgcgcgccaagaaccttccggtgccggaatggttggagaagcgcagcaacatcaagccgcccttcgtttga

SEQ ID NO: 39487 - protein, 344 aa, Bradyrhizobium japonicum USDA 110
MTIRNDVVEAIGNTPLIKLKRASEATGCTILGKAEFMNPGQSVKDRAGKWMILEAEKRGELKPGGLVVEATAGNTGIGLAVVASARGYRTLIVIPETQSQEKKDFLKLCGAELIEVPALPYANPNNYQHVGRRLADELRKTEPNGVLFADQWNNLDNAKAHYESTGPEIWEQTGGKVDGFVCSVGSGGTLAGVSRLLKEKNKNVRIACADPHGAGMFDYFRTGEAKATPGGSITEGIGLNRATAIVESAKVDDAYLIPDTDAVTEIYDLLQHEGLCLGGSTGINIAGAIRLAKQLGPGKTIVTVLCDSGSRYQSKLFNADFMRAKNLPVPEWLEKRSNIKPPFV

SEQ ID NO: 39488 - DNA, 978 bp, Bradyrhizobium japonicum USDA 110
  CDS (1)..(978): transl_table=11
atggacgcatcgtccgccacgcgtgcagcgcatcaacccggccgcggccggatctatgactcgattgtcgaagcttttggcgacacgccgatcgtgcgattgcgacggctgccgggcatgcacggtgtgaacgcgacgattttggcaaaacttgaatatttcaatccggccgcgagcgtgaaggaccgcatcggcgctgccatgatcatcgccatggagaaggccggtatcgtcaagccggataccgtgctgatcgaaccgacctccggcaataccggcatcgcactcgccttcgtcgccgcctcgcgcggctaccggctcaagctcgtgatgccggaatcgatgtcgatcgaacggcgcaagatgctggcctttctcggcgcggagctggtgctgacgccggccgcacaaggcatgaagggcgcgatcgccgccgccgaggagctggtgaagacgacgccgaactcggtgatgccgcagcagttcaagaacctcgccaatcccgaggtgcaccgccgcaccaccgcggaggagatctggaacgacaccgacggcaacatcgatttcttcgttgcaggcgtcggcaccggcggcacgatcaccggcgtcggccaggtgctcaagccgcgcaaggcctcgttgcgggtggtggcggtcgagccggaggagagcccggtgctatcagggggacagcatacgccgcacaagatccagggcatcggcgcgggcttcgtccctgatatcctcgatcgctccgtgatcgacgagatcgtcaaaatcaactcgaccacggcgatcgagacctcgcgcgcattggcgcggcacgagggcattccgggcggtatctcctcgggtgctgcgatcgccgccgcgctccagatcggccagcggccggaagctgcgggaaaaaccatcctggcggtggtaccgtccttctccgagcggtatctttcgacggctctgtttgagggaatctag

SEQ ID NO: 39489 - protein, 325 aa, Bradyrhizobium japonicum USDA 110
MDASSATRAAHQPGRGRIYDSIVEAFGDTPIVRLRRLPGMHGVNATILAKLEYFNPAASVKDRIGAAMIIAMEKAGIVKPDTVLIEPTSGNTGIALAFVAASRGYRLKLVMPESMSIERRKMLAFLGAELVLTPAAQGMKGAIAAAEELVKTTPNSVMPQQFKNLANPEVHRRTTAEEIWNDTDGNIDFFVAGVGTGGTITGVGQVLKPRKASLRVVAVEPEESPVLSGGQHTPHKIQGIGAGFVPDILDRSVIDEIVKINSTTAIETSRALARHEGIPGGISSGAAIAAALQIGQRPEAAGKTILAVVPSFSERYLSTALFEGI

SEQ ID NO: 39490 - DNA, 960 bp, Xylella fastidiosa Temecula1
  CDS (1)..(960): transl_table=11
atgactatctacaacactatcctggacacgattggccacacacccgtggttaaactgaaccgcattgctccggcacacgtggatctatacatcaaggttgaatcattcaatccaagcggctcggtcaaagaccgtctggcactggccatcattctcgacgccgaacaacaggggttattgaaacccggcgacaccatcgtcgaagccacttcgggaaataccggcgtcgccctggccatgatcgccgctgcccgcggctacacgttcgtcgccaccatggtcgaaaccttttcgatcgagcggcgcaaactgatgcgcgcttacggtgccaaagtcatcctcaccccagccgccgaacgcggtagcggcatggtacgcaaagccaaagaactcgcccaacagcacggctggttcctcgccagccaattttccaacccagccaaccctgcctatcaccgcaacaccaccgccgcggaaatcctacgagactttgccggacgccgcctcgaccacttcgtcagtggatggggcaccggcggcacgcttactggcgttggtgaagtactgaaaatcgcgcgaccagacatcaaaatcaccgccagcgaacctgccagcgcagcactgctccaagggaaggaatggcaaccccacaagattcagggatggacacccgatttcgtaccggaggtactgaatcgttccgttccacaccacatcctcagtgttaccgacgacgatgcaatcacggtagcccgtcgcctggccgcggaggaaggtgttttctcggggatctccggcggtgcctccgtcgcaacagcactgcagatcgcacaacaggccgaaccgggtgccgtgatcctcgccatgctcccagataccggcgaacgttacttctccacccctctgttcgctgacatcaatgagcattcagacgacgcgtggttagccagtctcggctga

SEQ ID NO: 39491 - protein, 319 aa, Xylella fastidiosa Temecula1
MTIYNTILDTIGHTPVVKLNRIAPAHVDLYIKVESFNPSGSVKDRLALAIILDAEQQGLLKPGDTIVEATSGNTGVALAMIAAARGYTFVATMVETFSIERRKLMRAYGAKVILTPAAERGSGMVRKAKELAQQHGWFLASQFSNPANPAYHRNTTAAEILRDFAGRRLDHFVSGWGTGGTLTGVGEVLKIARPDIKITASEPASAALLQGKEWQPHKIQGWTPDFVPEVLNRSVPHHILSVTDDDAITVARRLAAEEGVFSGISGGASVATALQIAQQAEPGAVILAMLPDTGERYFSTPLFADINEHSDDAWLASLG

SEQ ID NO: 39492 - DNA, 918 bp, Clostridium tetani E88
  CDS (1)..(918): transl_table=11
atgaaaatatacaataatctaatagagcttataggaaagacaccacttgtaaacctaaataaatttgaaaagaaaaatggattagattcaaatataattgcaaaggtggaatattttaatccatcaggtagtgtaaaggatagagcagcattatctatgatagaagaagctgagaggactaatctaataaataaagatactgtaataattgagccaactagtggaaatacaggtataggcttagctttaatttgtgcaattaaaggatatagattgattttgactatgccagagactatgagtatagaaagaagaaatatactaaaggcttatggggcagaagtagttttaactcctggaaacaagggaatgaatggttctatacaaaaagcagaagaattagcaaaggaaatgggaaatgtttttattccacaacaatttaataacccttccaactcagctattcataaaataacaacagcaaaagaaataataaatgatttggatggaaaggtagatatatttattgcgggagttggaactggtggtacagtaacaggtgttggagaaggattaaaagaatataataaaaatataaaaattgtagcagtggagcctgaaaattcacctattttgtctggtgggaaaccggggccacacaaaatacagggtataggagcaggctttattccagaaatattagatatgaatataatagatgagatatttaaagctcctaatgaagaatccatagaaattatgaagaaaatagttaaattagaaggattgtttgtaggaatatcttcaggagctgcattatatgcggcaaaagaaataggtaaaagagaagagaataaaggtaaaaatatagtggtgttattaccagacacaggtatgagatatttatcaagttattag

SEQ ID NO: 39493 - protein, 305 aa, Clostridium tetani E88
MKIYNNLIELIGKTPLVNLNKFEKKNGLDSNIIAKVEYFNPSGSVKDRAALSMIEEAERTNLINKDTVIIEPTSGNTGIGLALICAIKGYRLILTMPETMSIERRNILKAYGAEVVLTPGNKGMNGSIQKAEELAKEMGNVFIPQQFNNPSNSAIHKITTAKEIINDLDGKVDIFIAGVGTGGTVTGVGEGLKEYNKNIKIVAVEPENSPILSGGKPGPHKIQGIGAGFIPEILDMNIIDEIFKAPNEESIEIMKKIVKLEGLFVGISSGAALYAAKEIGKREENKGKNIVVLLPDTGMRYLSSY

SEQ ID NO: 39494 - DNA, 912 bp, Lactobacillus plantarum WCFS1
  CDS (1)..(912): transl_table=11
atgctcattcagcacgttcaagaacttatcggccacacccccctgatggcgttacccatcgaggttccaaatcacagtcacatctatgccaagcttgaaatgttcaaccccggcggcagtattaaggaccggctgggagcctatctgattgaagacggcttgcaacggggccgggttaacgccaagacaacgattattgaaccaactgctggtaacaccggaattggtttagccttagcaactcaagcgcaccacctacgtaccatcttagtcgtcccagaaaagttcagtatggaaaaacaagttttaatgcaagcattgggtgctgaaattgttcatacacctagcgaggaaggaatcaaaggtgccattcgcaaagctgaggcactagccgcaacgatttccaacagttacgtccccatgcaattcaagaatccggctaatcccgcggcttattaccacacactggcaccagaaattctggcggacatgcctgcacctataaccgccttcgtcgctggagccggtagcggtgggacatttgccggagtagcggcttatcttcaagcccaagattcagcaaccaaagccgtagtcgttgagccagaaggttccattttaaatggtggaccagctcacgcacatcgtaccgagggaatcggcgtcgaattcatcccaccatttttcgatcaggttcgcatcgatcagacactgaccatcgcggacaatgatgcctttgcccaagttcgacacctagcccgtgaccacggtttactgattggcagttctagcggcgctgcgctagccgctagtttacaacttgccaccaacctgcctgccaatagtcatatcgtgaccatctttccagacagtagtgagcgttatctgagccaaaaaatctatacgaaatga

SEQ ID NO: 39495 - protein, 303 aa, Lactobacillus plantarum WCFS1
MLIQHVQELIGHTPLMALPIEVPNHSHIYAKLEMFNPGGSIKDRLGAYLIEDGLQRGRVNAKTTIIEPTAGNTGIGLALATQAHHLRTILVVPEKFSMEKQVLMQALGAEIVHTPSEEGIKGAIRKAEALAATISNSYVPMQFKNPANPAAYYHTLAPEILADMPAPITAFVAGAGSGGTFAGVAAYLQAQDSATKAVVVEPEGSILNGGPAHAHRTEGIGVEFIPPFFDQVRIDQTLTIADNDAFAQVRHLARDHGLLIGSSSGAALAASLQLATNLPANSHIVTIFPDSSERYLSQKIYTK

SEQ ID NO: 39496 - DNA, 903 bp, Pseudomonas syringae pv. tomato str. DC3000
  CDS (1)..(903): transl_table=11
atgaccctgcagtatcaaaccatcgccgattgcgtcggcaacaccccgcttgtgcgtctgcaacgcatgatgggcactaccagcaataccatcctgttgaaactggaaggtaacaaccctgctggttcggtaaaagaccgcccggcgttgtcgatgatcacccgtgccgagctgcgcggccagatcgtccccggcgacacgctgatcgaagccacctccggcaacaccggcattgcgctggccatggcggcggcgatcaagggttaccgcatgattctgatcatgccggacaactccagtgccgaacgcaaggcggcaatgaccgcctatggcgccgagctgattctggtcagcaaggacgaaggcatggaaggcgcgcgtgatctggctgatcgcatgcaggcagagggtcgcggcaaagtgctcgatcagttcgccaacggcgacaatcccgaggcgcattacacgtccaccggtccggaaatctggcaacaaacggcgggcaccgttacccacttcgtcagttcgatgggcaccaccggcaccatcatgggcacttcgcgctacctcaaggagcagaaccccgacgtgcagatcgtcggtctgcaaccgatggaaggcgcgtcaatccctggtattcgccgctggccttatgagtacctgccgaaaatctatcagtcggatcgcgtcgatcgcatcatcgacatggggcagaccgaggccgaagaaaccatgcgcaggctggctcgtgaagagggcattttctgtggcgtttcgtccggcggttcggtggccggtgcgctgcgtattgcccgcgaagtcgaaaacgccaccattgtggcaatcatctgtgaccgaggcgaccgctacctgtcgaccggtatctacgacatgcccaactga

SEQ ID NO: 39497 - protein, 300 aa, Pseudomonas syringae pv. tomato str. DC3000
MTLQYQTIADCVGNTPLVRLQRMMGTTSNTILLKLEGNNPAGSVKDRPALSMITRAELRGQIVPGDTLIEATSGNTGIALAMAAAIKGYRMILIMPDNSSAERKAAMTAYGAELILVSKDEGMEGARDLADRMQAEGRGKVLDQFANGDNPEAHYTSTGPEIWQQTAGTVTHFVSSMGTTGTIMGTSRYLKEQNPDVQIVGLQPMEGASIPGIRRWPYEYLPKIYQSDRVDRIIDMGQTEAEETMRRLAREEGIFCGVSSGGSVAGALRIAREVENATIVAIICDRGDRYLSTGIYDMPN

SEQ ID NO: 39498 - DNA, 984 bp, Pseudomonas syringae pv. tomato str. DC3000
  CDS (1)..(984): transl_table=11
ttgattttatttttaaatttcaggtatgaaaacatgaattctatcgagctggccataggcaatacgcccatggtggaactgaaaagttttgatctgccaccaggcataaggatttttgcaaagctggagtttttgaatcctggtggaagtatcaaggatcgtgtcgtaaaccatatatttaacgacgctgaagcccgcggactattgtgccgcggttcgacagtaatagaaaacacatcgggcaataccggtgccgctatcgcaatgctggcggccgctagaggttatcgcgttattctcaccatgccggataaagtcagcaaagaaaaacaagatacactcagggctttgggcgctgaagtcattatgtgcccaacgtcagccgctccggattcacctgagcattatgttcaggtagcgaagtctttacacgccgatacgcccaactcgttcatgctgcatcaatatgataaccctctaaatccggaagctcacaagctcacgactggtccagagatttggcgagacttgaaggggggtatctccgtatttgtggctgctggcagcacgggcggtacaatatcaggcatttcacgttatctgaaaagtcaggacaaaactatcagatcggtgctcctggatcccaaaggatctatttattataaatacttttacgagggcgtgattgatccactagtgataggcccttaccaggttgaaggtgtgggagaagatcatttggccaagtgtatggattttgaaatgatcgacgacgttattcagtttgatgatgctgctgcctttggaacatgtaggttgctcgctcaaaaggaagggttgctgtgtgggggaagttcaggggcgaatgtctggggatgccttcaagttgcaaagcgtctttcgtcccctgcaaatatcgtcactgtgttgccagacagcggagttaagtacctgtcaaaaatatataactcgccgtttacgtga

SEQ ID NO: 39499 - protein, 327 aa, Pseudomonas syringae pv. tomato str. DC3000
MILFLNFRYENMNSIELAIGNTPMVELKSFDLPPGIRIFAKLEFLNPGGSIKDRVVNHIFNDAEARGLLCRGSTVIENTSGNTGAAIAMLAAARGYRVILTMPDKVSKEKQDTLRALGAEVIMCPTSAAPDSPEHYVQVAKSLHADTPNSFMLHQYDNPLNPEAHKLTTGPEIWRDLKGGISVFVAAGSTGGTISGISRYLKSQDKTIRSVLLDPKGSIYYKYFYEGVIDPLVIGPYQVEGVGEDHLAKCMDFEMIDDVIQFDDAAAFGTCRLLAQKEGLLCGGSSGANVWGCLQVAKRLSSPANIVTVLPDSGVKYLSKIYNSPFT

SEQ ID NO: 39500 - DNA, 975 bp, Pseudomonas syringae pv. tomato str. DC3000
  CDS (1)..(975): transl_table=11
atgagccgtatctacgctgataacgcccattccatcgggaacacaccgctggtgcagatcaaccgtatcgcgccgcgcggtgtcaccattctggccaagatcgaagggcgtaatccgggctattccgtcaagtgtcggatcggcgccaacatgatctgggacgctgaagccagcggcaggctcaagcccggcatgaccattgtcgaacccacctctggcaacaccgggatcggtctggcattcgttgccgccgctcgcggttacaaactgatgctgaccatgcccgcttccatgagcatagaacgtcgcaaggtgctcaaggcgctgggggctgaattggtgttgaccgagccagccaaggggatgaaaggcgcgattgccaaggccgaagagttgctggctggcgatcccgagacatttttcatgcctgcccaattcgacaacccggccaacccggccatccacgagaaaacgaccggccccgaaatctgggctgataccgacggcaccatcgacgtgctggtagccggcgtcgggacgggcgggactatcaccggtatttcccgatatatcaagcacacagcgggtaagccgatcctgtcggtcgcggtagaacccgacagttcgccgatcatcacccaagccatggccggtgaagaaatcacgcctgctccgcacaagattcagggcatcggcgcgggcttcattccgaaaaacctcgacctgtcgattgttgaccgggtagaacgcgtcaccgacgatgagtccaaggcgatggccaggcgcttgatgcaggaagagggcatcctgtgcggaatctcctgcggcgcagcaatggcggctgccgttcgtctggctgaaaagccggaaatgcagggcaagactatcgtcgttattctcccagactccggcgagcgttacctgtcgagcatgctgttcagcgatcttttcactgaccaggagctatcgcagtaa

SEQ ID NO: 39501 - protein, 324 aa, Pseudomonas syringae pv. tomato str. DC3000
MSRIYADNAHSIGNTPLVQINRIAPRGVTILAKIEGRNPGYSVKCRIGANMIWDAEASGRLKPGMTIVEPTSGNTGIGLAFVAAARGYKLMLTMPASMSIERRKVLKALGAELVLTEPAKGMKGAIAKAEELLAGDPETFFMPAQFDNPANPAIHEKTTGPEIWADTDGTIDVLVAGVGTGGTITGISRYIKHTAGKPILSVAVEPDSSPIITQAMAGEEITPAPHKIQGIGAGFIPKNLDLSIVDRVERVTDDESKAMARRLMQEEGILCGISCGAAMAAAVRLAEKPEMQGKTIVVILPDSGERYLSSMLFSDLFTDQELSQ

SEQ ID NO: 39502 - DNA, 969 bp, Vibrio parahaemolyticus RIMD 2210633
  CDS (1)..(969): transl_table=11
atgagcaaaatctacgaagataactctcttaccattggtaatacgcccctagttcgcctaaacaaagtgagcaaaggtaacgttctagcgaaaattgaagcacgcaacccaagcttcagcgttaagtgccgtatcggtgcaaacatgatttgggaagcagaaaaagctggcactttaaagccaggagtagaactagtagaaccaaccagtggtaacacaggtatcgcattagcgttcgtagcagccgctcgcggttacaaattgactctaactatgcctgaatcaatgagccttgagcgccgcaagctacttaaagcactaggcgcaaaccttgagctaactgaagcagcgaaaggcatgaaaggcgcaattgctaaagcagaagagatcgtagcaagcaatcctgaaaaataccttcttctacaacagttcaacaaccctgctaacccgcaaattcacgagaaaaccactggccctgaaatctgggatgcgacagacggtgaaatcgatgtgctagtagcaggcgttggtacaggcggtacaatcacaggtacaagccgttacattaaaggtgagaaaggtaaagcgatcacttctgttgctgtagaacctgcagaatcaccagtaatcgcgcaagcgctagcaggcgaagaaattcaaccagcgccacataaaatccaaggtatcggtgcaggtttcattcctggaaacctagatttggacattatcgaccgagttgagccagtgacttctgaagaagcaattgagatggctcgtcgactaatggaagaggaaggcatccttgcgggtatctcttcaggcgctgctgtcgttgctgcgaaccgaattgcagaactacctgaatttgaaggaaaaaccatcgtgacaattctgccaagctcaggtgaacgttacctaagtacggcactatttgctggtatctttaccgaaaaagagaaccaacaataa

SEQ ID NO: 39503 - protein, 322 aa, Vibrio parahaemolyticus RIMD 2210633
MSKIYEDNSLTIGNTPLVRLNKVSKGNVLAKIEARNPSFSVKCRIGANMIWEAEKAGTLKPGVELVEPTSGNTGIALAFVAAARGYKLTLTMPESMSLERRKLLKALGANLELTEAAKGMKGAIAKAEEIVASNPEKYLLLQQFNNPANPQIHEKTTGPEIWDATDGEIDVLVAGVGTGGTITGTSRYIKGEKGKAITSVAVEPAESPVIAQALAGEEIQPAPHKIQGIGAGFIPGNLDLDIIDRVEPVTSEEAIEMARRLMEEEGILAGISSGAAVVAANRIAELPEFEGKTIVTILPSSGERYLSTALFAGIFTEKENQQ

SEQ ID NO: 39504 - DNA, 942 bp, Streptococcus pyogenes SSI-1
  CDS (1)..(942): transl_table=11
atgactaaaatttacaaaactataacagaattagtaggtcaaacacctattatcaaacttaaccgtttaattccaaacgaagctgctgacgtttatgtaaaattagaagcttttaacccaggatcttctgttaaagatcgtattgctttatcgatgattgaagctgctgaagctgaaggtctgataagtcctggtgacgttattatcgaaccaacaagtggtaatacaggtattggtcttgcatgggtaggtgctgctaaagggtatcgagtcattattgttatgcccgaaacgatgagcttggaaagacggcaaatcattcaggcttatggtgcagagcttgtcttaacacctggagcagaaggtatgaaaggggctattgcaaaagctgaaactttagcaatagaactaggtgcttggatgcctatgcaatttaataaccctgccaatccaagcatccatgaaaaaacaacagctcaagaaattttggaagcttttaaggagatttctttagatgcattcgtatctggtgttggtactggaggaacactttctggtgtttcacatgtcttgaaaaaagctaaccctgaaactgttatctatgctgttgaagctgaagaatctgctgtcttatctggtcaagagcctggaccacataaaattcaaggtatatcagctggatttatcccaaacacgttagataccaaagcctatgaccaaattatccgtgttaaatcgaaagatgctttagaaactgctcgactaacaggagctaaggaaggcttcctggctgggatttcttctggagctgctctttacgccgctattgaagtcgctaaacagttaggaaaaggcaaacatgtgttaactattttaccagataatggcgaacgctatttatcgactgaactctatgatgtaccagtaattaagacgaaataa

SEQ ID NO: 39505 - protein, 313 aa, Streptococcus pyogenes SSI-1
MTKIYKTITELVGQTPIIKLNRLIPNEAADVYVKLEAFNPGSSVKDRIALSMIEAAEAEGLISPGDVIIEPTSGNTGIGLAWVGAAKGYRVIIVMPETMSLERRQIIQAYGAELVLTPGAEGMKGAIAKAETLAIELGAWMPMQFNNPANPSIHEKTTAQEILEAFKEISLDAFVSGVGTGGTLSGVSHVLKKANPETVIYAVEAEESAVLSGQEPGPHKIQGISAGFIPNTLDTKAYDQIIRVKSKDALETARLTGAKEGFLAGISSGAALYAAIEVAKQLGKGKHVLTILPDNGERYLSTELYDVPVIKTK

SEQ ID NO: 39506 - DNA, 954 bp, Bacteroides thetaiotaomicron VPI-5482
  CDS (1)..(954): transl_table=11
atgatggcaaaaattgcgaataaattaacagatttagtgggtaatacacctctaatggaactttccggatatagtggaaagtatggtcttaatcagaatattatcgctaaactggaggcttttaatccggcgggaagcgtaaaagacagagtcgctctttctatgattgaagatgcggaggcccgcggggcactgaaacccggtgccaccattatcgaaccgaccagcggaaatacgggagtcggactggcgatggtagctaccattaaagggtatcacttgatattgactatgcccgaaacgatgagcttggaacggcgaaacctgttgaaagcactgggggcgcagattgtgctaacagatggcttgggcgggatggctgcttctattgccaaggcgcaggagttgcgcgatagtatccccggatctgtgatcctgcaacagtttgaaaatccttcgaatgctgctgtccatgagcggacaacaggagaggaaatctggcgggatacggatggtgaagtggcagtgttcgttgccggagtaggaaccggaggtacgatttgcggcgtggcacgcgccttaaaaaaacataatccggatgttcatatcgttgcggttgaacctgcgtcgtctcccatattggcaggaggtcaggcagcatcacaccgcatacagggaatcggggcgaattttattccgaaactttatgatgcttctgtagtggatgaagtgataggtgtgcccgatgacgaagccattcgtgcggggcgagagctggctgcgacagaaggtttgctggccggaatctcttcgggagcggccgtatatgcagcccgacagttggcacagcgtccggagttcaggaacaaaaaaatcgttgcgttgttacctgatacgggagaacgctatctgtcgaccgagttgttcgcttttgatgcctatcctttggattaa

SEQ ID NO: 39507 - protein, 317 aa, Bacteroides thetaiotaomicron VPI-5482
MMAKIANKLTDLVGNTPLMELSGYSGKYGLNQNIIAKLEAFNPAGSVKDRVALSMIEDAEARGALKPGATIIEPTSGNTGVGLAMVATIKGYHLILTMPETMSLERRNLLKALGAQIVLTDGLGGMAASIAKAQELRDSIPGSVILQQFENPSNAAVHERTTGEEIWRDTDGEVAVFVAGVGTGGTICGVARALKKHNPDVHIVAVEPASSPILAGGQAASHRIQGIGANFIPKLYDASVVDEVIGVPDDEAIRAGRELAATEGLLAGISSGAAVYAARQLAQRPEFRNKKIVALLPDTGERYLSTELFAFDAYPLD

SEQ ID NO: 39508 - DNA, 948 bp, Bacteroides thetaiotaomicron VPI-5482
  CDS (1)..(948): transl_table=11
atggaaaagattgcaaggaaattgacggatttggtaggtaacactccgttgttggaactaagtaattataataagagtaacggcttgaaggctcgtctgatcgtgaaaatcgaatcattcaatcccgcgggcagtgtaaaagaccgcgtggcattggcaatgattgaagatgccgaaatgaaaggcgtcttgactcccggcgcaacgatcatcgagcctaccagtggaaatacgggagtaggattggcattcgttgctgccgccaaggggtacaaactgattttgacgatgcccgatacgatgagcgtcgaacgtcgtaaccttttgaaagctctgggagcggaacttgtgctcactcccggtgccgacggaatgaaaggggcgattgccaaagcggaagagttgaaagctgccactccgggcagcgttatcttacagcaatttgaaaatcctgctaatcccgctatgcatctacgcactaccggactggaaatatggagagataccgaggggaaagtcgatatcttcgttgccggtgtaggtactggcgggacaattagcggagtaggagaagcattgaagatgcgcgatcccagtgtgaaggcggtggcggtagaacctgccgactctccggtactgtccggcggaaagcccggacctcacaagattcagggaatcggcgccggtttcgtaccgaagacttataatgcttctgtcgtagatgaaattattcaggtgcagaatgacgacgctatccgtaccagtcgtgcgctggcggaggaagaagggctgttggtcggcatatcttcgggagcagccgtctatgcggctaccgaactggcgaaacgtcccgaaaacgaagggaagatgatcgtagccttattgcccgatacgggagagcgttatttatctactatcctgtacgcgtttgaagagtatcctttgtaa

SEQ ID NO: 39509 - protein, 315 aa, Bacteroides thetaiotaomicron VPI-5482
MEKIARKLTDLVGNTPLLELSNYNKSNGLKARLIVKIESFNPAGSVKDRVALAMIEDAEMKGVLTPGATIIEPTSGNTGVGLAFVAAAKGYKLILTMPDTMSVERRNLLKALGAELVLTPGADGMKGAIAKAEELKAATPGSVILQQFENPANPAMHLRTTGLEIWRDTEGKVDIFVAGVGTGGTISGVGEALKMRDPSVKAVAVEPADSPVLSGGKPGPHKIQGIGAGFVPKTYNASVVDEIIQVQNDDAIRTSRALAEEEGLLVGISSGAAVYAATELAKRPENEGKMIVALLPDTGERYLSTILYAFEEYPL

SEQ ID NO: 39510 - DNA, 918 bp, Enterococcus faecalis V583
  CDS (1)..(918): transl_table=11
atgattgttcagtcaattttagacacaatcggagcaacaccattatttgaatttacaagtgaacaatatcctatgccagaaggcactaaaatttatgcgaaactagaatatttgaatccaggtggcagcgtcaaagatcggcttggtgtgcatcttctcaaagaagcaatgaaaacgggaaagataaatcaagccacaacaattattgaaccgacagcggggaatacagggattggacttggattagctgccagtcaactgggcctcaagacaatctttgttgtgccagaaaaatttagtcaggaaaaacaacagctgatgcaagcgttaggtgctaaaattgtcccttcgccaacagagcaagggattgtcggagcgataactagtgcccaagacttagccaaggaaattcctaatagttacgtgccgttacaatttgaaaatccggataaccctgctgcttactacgaaggattaggacctgaaattgttcaagacttaggcggaaagattactagctttgtcgcaggtttaggcagtggtggaacgtttgcaggtgttggcagatatctcaaagaacaaaatagtaagacgcaattatggggcgtggagccagaaggttcaattttaaatggcggacctgcacacggacatgaaatcgaaggcattggcgtggagttcgtgccgccttttcttaaacagattcctgtggacggcttttataccatttcagacgaggatggttttttctgggtcaaacaattagccaagaaaagcgctttgctggtgggaagctccagcggcgcagcatttgcggcggcattaagagaggcgcgccgcttaccagcaggcagcacaattgtaactatttttcctgacggtagtgatcgttatttatcaaaaaatatttattcttag

SEQ ID NO: 39511 - protein, 305 aa, Enterococcus faecalis V583
MIVQSILDTIGATPLFEFTSEQYPMPEGTKIYAKLEYLNPGGSVKDRLGVHLLKEAMKTGKINQATTIIEPTAGNTGIGLGLAASQLGLKTIFVVPEKFSQEKQQLMQALGAKIVPSPTEQGIVGAITSAQDLAKEIPNSYVPLQFENPDNPAAYYEGLGPEIVQDLGGKITSFVAGLGSGGTFAGVGRYLKEQNSKTQLWGVEPEGSILNGGPAHGHEIEGIGVEFVPPFLKQIPVDGFYTISDEDGFFWVKQLAKKSALLVGSSSGAAFAAALREARRLPAGSTIVTIFPDGSDRYLSKNIYS

SEQ ID NO: 39512 - DNA, 933 bp, Enterococcus faecalis V583
  CDS (1)..(933): transl_table=11
atgactaaaggttatgtaaaatcagtaacagagttaattggtcaaagcccagttgtgaaattaaaacggatggtaccagaaggagctgcagatgtttttgttaaactagagttctttaatcctggtggcagtgtgaaagatcgaattgctttaagcatgatccaacaagccgaagcagatggtcgcctaaaacctggacaaacgattattgagccgactagtggtaatacaggcattgggttagcaatggtaggtgctgcgttgggatatccagttaagattgtgatgccagatactatgagtattgaacgccgcaaattaatgcaagcatatggggctgatctattattaacccctggtgccgaaggaatgaaaggggcaattgcaaaagctacagcattagcagaagaacacgggtacttcatgcctttgcaatttaataatccagctaatccaatggtacatgaacaaaaaacaggaaaagaaattgttgatgtctttggtaaacgtggcttagatgcgtttgtttctggtgttggcactggaggaaccgttacaggagttggccatgaattgaaacggatttttccagatattgaaattgttgcagtagaaccaacagagtcgcctgttttagaaggtggcgaaccaggtccacataaaatccaaggaataggcgctggttttgtcccagaagttttagacaccaccgtttatcaaaaagttgccgctgtttctagtgaagacgcattagaaactgctcgtttaatggggccaaaagaaggtatccttgtggggatttcagcaggggcagcaattaaagctgccattgatttggcagtcgaattaggcgcaggcaaacgtgtcttagcgctggttccggataacggtgaacgttatctttcgacagctctttacgaatttccagaataa

SEQ ID NO: 39513 - protein, 310 aa, Enterococcus faecalis V583
MTKGYVKSVTELIGQSPVVKLKRMVPEGAADVFVKLEFFNPGGSVKDRIALSMIQQAEADGRLKPGQTIIEPTSGNTGIGLAMVGAALGYPVKIVMPDTMSIERRKLMQAYGADLLLTPGAEGMKGAIAKATALAEEHGYFMPLQFNNPANPMVHEQKTGKEIVDVFGKRGLDAFVSGVGTGGTVTGVGHELKRIFPDIEIVAVEPTESPVLEGGEPGPHKIQGIGAGFVPEVLDTTVYQKVAAVSSEDALETARLMGPKEGILVGISAGAAIKAAIDLAVELGAGKRVLALVPDNGERYLSTALYEFPE

SEQ ID NO: 39514 - DNA, 951 bp, Coxiella burnetii RSA 493
  CDS (1)..(951): transl_table=11
atggttctcgacaatatacttcaagttatcggcaaaacgccggttgtgcgcttgcatcgaattggccaatcccttccttgcgaactctatggcaaatgcgaatttctcaatccaggcggttccgttaaagaccgaattggcgctgccatgattgaatcggcggaaaaacagggaaaaattaaaccgggcgatacgctcatcgaaccaacctctggcaatacggggatcggtattgctttagccggagccgtcaaaggctatcgagttattatcacgatgccagaaaaaatgagccacgaaaaacaagtggttttggaagcgctgggcgcaaccatttatcgaacccctacagaagcagcctatgatgatcccgaaagccatatttcactcgctaaacgtctaaaccaggaaattcctaattcttacattctcgatcaatacagcaatgcggaaaatcccgatatccattaccaaaccacaggccaagagattttggacgacatgggggaaaacctttccatggttgtaatgggcgttggtacaggcgggaccatcatcggtgttgcaaaaaaactaaaagaagtgaatccttcgattcagattatcggcgtcgatcctattggatctattctcgggggcggggatgaaattaaaccttaccttgtagaaggcatcggttatgattttattcccgaagtgctcgataacaacctcatcgatgagtacatcaaaattaacgacaaagattcttttttaatggcgcgtcgtttaattcgtgaagaggggctcttagtgggcggctcttccggatcagctgtttgggcggcttgccaagcggctcaacgattgaaagaaggcgaacgatgtctggttattttgccggatgctattcgaaattatttgactaaatttgtagacgacgcctggatgaaggcgcaagggtttttgtaa

SEQ ID NO: 39515 - protein, 316 aa, Coxiella burnetii RSA 493
MVLDNILQVIGKTPVVRLHRIGQSLPCELYGKCEFLNPGGSVKDRIGAAMIESAEKQGKIKPGDTLIEPTSGNTGIGIALAGAVKGYRVIITMPEKMSHEKQVVLEALGATIYRTPTEAAYDDPESHISLAKRLNQEIPNSYILDQYSNAENPDIHYQTTGQEILDDMGENLSMVVMGVGTGGTIIGVAKKLKEVNPSIQIIGVDPIGSILGGGDEIKPYLVEGIGYDFIPEVLDNNLIDEYIKINDKDSFLMARRLIREEGLLVGGSSGSAVWAACQAAQRLKEGERCLVILPDAIRNYLTKFVDDAWMKAQGFL

SEQ ID NO: 39516 - DNA, 1395 bp, Streptomyces avermitilis MA-4680
  CDS (1)..(1395): transl_table=11
gtgcaattccacgactcgatgatcagtctcgtcggcaacaccccgctggtgaggctcaacagcgtgaccgcgggcattcaggcgaccgtcctcgcgaaggtcgagtacttcaacccgggcggttccgtgaaggaccgcatcgccctgcggatgatcgaggccgcggaggagagcggcgctttgcagcccggtggcacgatcgtcgagccgaccagcggaaacaccggtgtcgggctcgccatcgtcgcgcagcagaaggggtacaagtgcatcttcgtgtgccccgacaaggtgagcactgacaagatcaatgtgctgcgtgcctacggggccgaggtggtggtctgcccgaccgccgtcgaccccgagcaccccgactcctactacaacgtctcggaccggctcgtgcgcgagacgcccggtgcgtggaagccggaccagtactccaacccgaacaaccccctttcgcactatcactccaccggccccgagctgtgggagcagacggaggggaagatcacccacttcgtcgcgggcgtgggcaccggcgggaccatttccggtaccgggcgttacctgaaggacgccagtgagggccgcgtccaggtcgtcggcgccgaccccgagggctccgtgtactccggcggctccgggcgcccgtacctcgtcgagggcgtcggcgaggacttctggccgaccgcgtacgaccgcacggtcgcggacgagatcgtcgccgtgtccgacaaggactccttccagatgacgcggcggctcgccaaggaggaggggctgctcgtcggcggttcctgcggcatggccgtcgtcgccgcgctgcgggtcgccgagcggctcgggccggacgacgtggtcgtggtgctgctgcccgacagcgggcgcgggtacctcagtaaaatcttcaacgacgaatggatggccgactacggcttcctcgaggactccgggcccagcgcccgcgtcgccgacgtcctcagcgacaaggcgggcggctccatcccctccctcgtccacatgcaccccgacgagaccgtcggcgaggcgatcgaggtgctgcgcgagtacggcgtctcgcagatgccgatcgtgaagccgggcgccggccacccggacgtcatggccgccgaggtcgtcggctcggtcgtcgaacgcgagctgctcgacgcgctgttcacgcagcgcgcctccttgcaggacccgctggagaagcacatgtccgcgccgctgccgcaggtcggttcaggcgagcccgtcggggacctgatgtccgtcctcggcacggccgacgcggcgatcgtcctcgtcgagggcaagccgaccggtgtggtcagccgccaggacctgctgtcgttcctggccaagggcggcggcaagcagtag

SEQ ID NO: 39517 - protein, 464 aa, Streptomyces avermitilis MA-4680
MQFHDSMISLVGNTPLVRLNSVTAGIQATVLAKVEYFNPGGSVKDRIALRMIEAAEESGALQPGGTIVEPTSGNTGVGLAIVAQQKGYKCIFVCPDKVSTDKINVLRAYGAEVVVCPTAVDPEHPDSYYNVSDRLVRETPGAWKPDQYSNPNNPLSHYHSTGPELWEQTEGKITHFVAGVGTGGTISGTGRYLKDASEGRVQVVGADPEGSVYSGGSGRPYLVEGVGEDFWPTAYDRTVADEIVAVSDKDSFQMTRRLAKEEGLLVGGSCGMAVVAALRVAERLGPDDVVVVLLPDSGRGYLSKIFNDEWMADYGFLEDSGPSARVADVLSDKAGGSIPSLVHMHPDETVGEAIEVLREYGVSQMPIVKPGAGHPDVMAAEVVGSVVERELLDALFTQRASLQDPLEKHMSAPLPQVGSGEPVGDLMSVLGTADAAIVLVEGKPTGVVSRQDLLSFLAKGGGKQ

SEQ ID NO: 39518 - DNA, 912 bp, Bacillus cereus ATCC 14579
  CDS (1)..(912): transl_table=11
ttgtgtgaaaacgttacggaattaataggagatacacctgtcgtccgattatctaaatttattccagaagacgcagcagatgtgtatgtgaaactagaaatgtttaatccatcgcgcagtgtgaaagaccgtgctgcttataatttacttcacgttgcagaagaaaatggtctcatcaaaccaggagatacaattattgaaccgacaagcgggaatacagggattggtttagcgatgaatgcagcagctaaagggtataaagcgattttaattatgccagataatatgtcaaaagagcgtattaatttattgaaagcatacggagcagaagtagttttaacaccagcagaacaaagaatgccaggagcaattgcgaaggcgttagaactgcaaaaacaaataccgaatagttttatcccgcaacaatttgaaaatccagctaatccgaatattcaccgttatacgactgcacttgaaatttacgaacaaatggatggagagcttgatgcttttgttgcaacggcaggaacaggcggaacgattacagggactggtgaaacgttaaaagagaaattgccaaacttatatattgcagtagtggaaccgaaaggatctcccgttttatccggtggtgtaccaggtcctcataaactagtaggaacaagcccaggatttattccgaaaaacttaaatacagaagtgtataacgaaattattcaaattgcagatgaagaggctttaacgacaatgagaaacttagctagacaagaaggattattagttgggccatcttctggagcatctgtttacgctgcaatcatgatagcgaaacgcctaggcgttggtaaaaaagttttatgtattgcgcctgatacaggtgaacgttatttaagcatggggttatttgaataa

SEQ ID NO: 39519 - protein, 303 aa, Bacillus cereus ATCC 14579
MCENVTELIGDTPVVRLSKFIPEDAADVYVKLEMFNPSRSVKDRAAYNLLHVAEENGLIKPGDTIIEPTSGNTGIGLAMNAAAKGYKAILIMPDNMSKERINLLKAYGAEVVLTPAEQRMPGAIAKALELQKQIPNSFIPQQFENPANPNIHRYTTALEIYEQMDGELDAFVATAGTGGTITGTGETLKEKLPNLYIAVVEPKGSPVLSGGVPGPHKLVGTSPGFIPKNLNTEVYNEIIQIADEEALTTMRNLARQEGLLVGPSSGASVYAAIMIAKRLGVGKKVLCIAPDTGERYLSMGLFE

SEQ ID NO: 39520 - DNA, 924 bp, Bacillus cereus ATCC 14579
  CDS (1)..(924): transl_table=11
atgaatgtatatcgtggagttcatgagttaattggtcatacaccaattgtagaaattactcgtttttcacttccaataggggtccgtttatttgcaaagcttgaattttataatccaggcggaagcgttaaggatcgtttaggaagagaattaatcgaagatgcgctagaaaaagggcttgttacccagggtggaacaattattgaaccgactgctgggaatactggtattggactggcacttgcagcattagaacatgatttacgtgttattgtttgtgtaccagagaaatttagtattgaaaaacaagaattaatgaaagcactaggtgcaactgtcgtgcatacaccgactgagcaaggaatgaccggtgcaattgctaaagcaaaagagttagtaaatgaaataccgaattcatactctccaagtcagttcgcaaatgaggcaaatcctcgtgcatattttaaaacattaggacctgaactgtgggacgcattgaatggagagattaacatatttgttgctggagcaggaactggcggtacgtttatggggactgcatcttacttgaaagaaaaaaatatagatattaaaacagttatcgtagagccagaaggatctattttaaatggtggtaaggctggttcacatgagaccgaaggaattggactggaatttatccccccatttttgaagacatcttattttgatgaaattcatacgatttctgatcgaaatgcatttttacgagtgaaagaattagcgcaaaaagaaggacttctcgttggaagctcttcaggagcagcatttcatgcgagcttacttgaggcagagaaggcagcaccaggtacaaatattgtaaccatttttccagatagcagtgagcgctatttaagtaaagacatatacaaaggatgggaataa

SEQ ID NO: 39521 - protein, 307 aa, Bacillus cereus ATCC 14579
MNVYRGVHELIGHTPIVEITRFSLPIGVRLFAKLEFYNPGGSVKDRLGRELIEDALEKGLVTQGGTIIEPTAGNTGIGLALAALEHDLRVIVCVPEKFSIEKQELMKALGATVVHTPTEQGMTGAIAKAKELVNEIPNSYSPSQFANEANPRAYFKTLGPELWDALNGEINIFVAGAGTGGTFMGTASYLKEKNIDIKTVIVEPEGSILNGGKAGSHETEGIGLEFIPPFLKTSYFDEIHTISDRNAFLRVKELAQKEGLLVGSSSGAAFHASLLEAEKAAPGTNIVTIFPDSSERYLSKDIYKGWE

SEQ ID NO: 39522 - DNA, 972 bp, Shigella flexneri 2a str. 2457T
  CDS (1)..(972): transl_table=11
atgagtaagatttttgaagataactcgctgactatcggtcacacgccgctggttcgcctgaatcgcatcggtaacggacgcattctggcgaaggtggaatctcgtaaccccagcttcagcgttaagtgccgtatcggtgccaacatgatttgggatgccgaaaagcgcggcgtgctgaaaccaggcgttgaactggttgaaccgaccagcggtaataccgggattgcactggcctatgtagctgccgctcgcggttacaaactcaccctgaccatgccagaaaccatgagtattgaacgccgcaagctgctgaaagcgttaggtgcaaacctggtgctgacggaaggtgctaaaggcatgaaaggcgcaatccaaaaagcagaagaaattgtcgccagcaatccagagaaatacctgctgctgcaacaattcagcaatccggcaaaccctgaaattcacgaaaaaaccaccggtccggagatctgggaagataccgacggtcaggttgatgtatttattgctggcgttgggactggcggtacgctgactggcgtcagccgctacattaaaggcaccaaaggcaagaccgatcttatctctgtcgccgttgagccaaccgattctccagttatcgcccaggtgctggcaggtgaagagattaaacctggcccgcataaaattcagggtattggcgctggttttatcccggctaacctcgatctcaagctggtcgataaagtcattggcatcaccaatgaagaagccatttctaccgcccgtcgtctaatggaagaagaaggtattcttgcaggtatctcttctggagcagctgttgccgcagcgttgaaactacaagaagatgaaagccttaccaacaagaatattgtggttattctaccatcatcgggtgagcgttatttaagcaccgcattgtttgccgatctcttcactgagaaagaattgcaacagtaa

SEQ ID NO: 39523 - protein, 323 aa, Shigella flexneri 2a str. 2457T
MSKIFEDNSLTIGHTPLVRLNRIGNGRILAKVESRNPSFSVKCRIGANMIWDAEKRGVLKPGVELVEPTSGNTGIALAYVAAARGYKLTLTMPETMSIERRKLLKALGANLVLTEGAKGMKGAIQKAEEIVASNPEKYLLLQQFSNPANPEIHEKTTGPEIWEDTDGQVDVFIAGVGTGGTLTGVSRYIKGTKGKTDLISVAVEPTDSPVIAQVLAGEEIKPGPHKIQGIGAGFIPANLDLKLVDKVIGITNEEAISTARRLMEEEGILAGISSGAAVAAALKLQEDESLTNKNIVVILPSSGERYLSTALFADLFTEKELQQ

SEQ ID NO: 39524 - DNA, 888 bp, Nitrosomonas europaea ATCC 19718
  CDS (1)..(888): transl_table=11
atgcataacaccatcgaaaatttcatcggccatactcccctggttcggctcaagcgtattccgagtgaaaccagtaataccattctggcaaagctggaaggcaataacccggctggttcagtcaaggatcggccagcctattccatgatcatgcgtgcacagcaacgcggcgacatccggccgggagatacgctgatcgaagcaaccagtggcaataccggtattgcactggccatggcagcggcgattctgggttatcgcatgattctggtcatgccggagaatctgagcctggagcgccgtcaggtaatgtctgcatatggtgccgagattgttctgactcccaaagagggaagcatggagctggccagagatactgctgagcaactgtgcaatgccggcaagggcatcattctcgatcaattttccaatcccgataatccgctggcgcattatgaaactacagcccccgagatctggcaggatacggcgggaacggtcacacatttcgtaagcagtatgggaacgaccggcacgatcatgggctgtgcccgctatttccgcgaacaggagcagaaggtggaaattatcggtgtgcaaccacaggagaatgcacagattcccggaatccgtaaatggccggaagcttatctgcccaaaatatatcagccggagctggttgaccgtattttgctggtatcccagcaggaagccgaggaaatggctcgccgtctggcgcgtgaggaaggattgtttaccggtatttcttctggaggggctctggcagccgctctgaaggtttccgcgcaggtgcagaacgcagtgattgtttttatcgtatgcgatcgcggggatcgctacttatcgaccggggtttttccttcctga

SEQ ID NO: 39525 - protein, 295 aa, Nitrosomonas europaea ATCC 19718
MHNTIENFIGHTPLVRLKRIPSETSNTILAKLEGNNPAGSVKDRPAYSMIMRAQQRGDIRPGDTLIEATSGNTGIALAMAAAILGYRMILVMPENLSLERRQVMSAYGAEIVLTPKEGSMELARDTAEQLCNAGKGIILDQFSNPDNPLAHYETTAPEIWQDTAGTVTHFVSSMGTTGTIMGCARYFREQEQKVEIIGVQPQENAQIPGIRKWPEAYLPKIYQPELVDRILLVSQQEAEEMARRLAREEGLFTGISSGGALAAALKVSAQVQNAVIVFIVCDRGDRYLSTGVFPS

SEQ ID NO: 39526 - DNA, 1302 bp, Arabidopsis thaliana
  CDS (1)..(1302)
atggtggcgatgatcatggcttcaaggtttaaccgggaagctaagctcgcatctcaaatcttgtctacacttttgggaaaccgaagctgctacacatccatggccgccacatcttcctctgctttacttcttaatccgttgacttcttcttcttcttcttctactctccgtcgtttcagatgctcgccagagatctcttctctctccttctcctccgcttctgatttctctctagcgatgaagaggcagagtcggagttttgctgatggttcggaacgagatccgtctgttgtgtgtgaggctgttaagcgcgagactggacctgatggactcaacatcgctgacaatgtgtctcagctcattgggaaaactcctatggtgtacttgaacagtatagcaaaaggttgtgtagcaaatattgctgccaaactcgagatcatggagccatgttgcagtgtcaaggataggattgggtacagtatggttactgatgctgagcaaaaaggatttatatcacctggaaagagtgttcttgtggaacctacaagtggaaacacgggtattggcctagcattcatcgctgcttcaaggggctatagacttatcttgacaatgccagcatccatgagtatggaaagaagggttcttttaaaggcatttggagctgagcttgtattaacagatcctgctaaaggcatgactggagcggttcagaaggctgaagagatcttgaaaaacactcctgatgcatacatgctccaacagtttgacaaccctgcaaatccaaagattcattacgagactactggtcctgagatctgggatgatacaaagggcaaggtggatatctttgttgcaggaattggaactggtggaactatcactggtgttggtcgatttattaaagagaaaaatcccaaaacgcaggttattggtgtagaacccaccgaaagcgatatactttctggtggcaaaccgggacctcacaagattcaaggaattggagctggatttatacctaagaatttggatcagaaaattatggatgaagtcatagcgatttcaagtgaggaagctatagaaaccgcaaagcaactagctcttaaggaaggcttgatggttggtatatcatctggagctgcagctgctgctgcaatcaaggtggctaagagacctgagaatgctggaaaactcatagctgttgttttcccgagcttcggggagagatatctatcgaccccgctgttccagtctatccgggaagaggtggagaaaatgcagcctgagagagtcagcggttaa

SEQ ID NO: 39527 - protein, 433 aa, Arabidopsis thaliana
MVAMIMASRFNREAKLASQILSTLLGNRSCYTSMAATSSSALLLNPLTSSSSSSTLRRFRCSPEISSLSFSSASDFSLAMKRQSRSFADGSERDPSVVCEAVKRETGPDGLNIADNVSQLIGKTPMVYLNSIAKGCVANIAAKLEIMEPCCSVKDRIGYSMVTDAEQKGFISPGKSVLVEPTSGNTGIGLAFIAASRGYRLILTMPASMSMERRVLLKAFGAELVLTDPAKGMTGAVQKAEEILKNTPDAYMLQQFDNPANPKIHYETTGPEIWDDTKGKVDIFVAGIGTGGTITGVGRFIKEKNPKTQVIGVEPTESDILSGGKPGPHKIQGIGAGFIPKNLDQKIMDEVIAISSEEAIETAKQLALKEGLMVGISSGAAAAAAIKVAKRPENAGKLIAVVFPSFGERYLSTPLFQSIREEVEKMQPERVSG

SEQ ID NO: 39528 - DNA, 1299 bp, Arabidopsis thaliana
  CDS (1)..(1299)
atggtggcgatgatcatggcttcaaggtttaaccgggaagctaagctcgcatctcaaatcttgtctacacttttgggaaaccgaagctgctacacatccatggccgccacatcttcctctgctttacttcttaatccgttgacttcttcttcttcttcttctactctccgtcgtttcagatgctcgccagagatctcttctctctccttctcctccgcttctgatttctctctagcgatgaagaggcagagtcggagttttgctgatggttcggaacgagatccgtctgttgtgtgtgaggctgttaagcgcgagactggacctgatggactcaacatcgctgacaatgtgtctcagctcattgggaaaactcctatggtgtacttgaacagtatagcaaaaggttgtgtagcaaatattgctgccaaactcgagatcatggagccatgttgcagtgtcaaggataggattgggtacagtatggttactgatgctgagcaaaaaggatttatatcacctggaaagagtgttcttgtggaacctacaagtggaaacacgggtattggcctagcattcatcgctgcttcaaggggctatagacttatcttgacaatgccagcatccatgagtatggaaagaagggttcttttaaaggcatttggagctgagcttgtattaacagatcctgctaaaggcatgactggagcggttcagaaggctgaagagatcttgaaaaacactcctgatgcatacatgctccaacagtttgacaaccctgcaaatccaaagattcattacgagactactggtcctgagatctgggatgatacaaagggcaaggtggatatctttgttgcaggaattggaactggtggaactatcactggtgttggtcgatttattaaagagaaaaatcccaaaacgcaggttattggtgtagaacccaccgaaagcgatatactttctggtggcaaaccgggacctcacaagattcaaggaattggagctggatttatacctaagaatttggatcagaaaattatggatgaagtcatagcgatttcaagtgaggaagctatagaaaccgcaaagcaactagctcttaaggaaggcttgatggttggtatatcatctggagctgcagctgctgctgcaatcaaggtggctaagagacctgagaatgctggaaaactcatagctgtaagtcttttcgcttcggggagagatatctatcgaccccgctgttccagtctatccgggaagaggtggagaaaatgcagcctgaggtatgaacattag

SEQ ID NO: 39529 - protein, 432 aa, Arabidopsis thaliana
MVAMIMASRFNREAKLASQILSTLLGNRSCYTSMAATSSSALLLNPLTSSSSSSTLRRFRCSPEISSLSFSSASDFSLAMKRQSRSFADGSERDPSVVCEAVKRETGPDGLNIADNVSQLIGKTPMVYLNSIAKGCVANIAAKLEIMEPCCSVKDRIGYSMVTDAEQKGFISPGKSVLVEPTSGNTGIGLAFIAASRGYRLILTMPASMSMERRVLLKAFGAELVLTDPAKGMTGAVQKAEEILKNTPDAYMLQQFDNPANPKIHYETTGPEIWDDTKGKVDIFVAGIGTGGTITGVGRFIKEKNPKTQVIGVEPTESDILSGGKPGPHKIQGIGAGFIPKNLDQKIMDEVIAISSEEAIETAKQLALKEGLMVGISSGAAAAAAIKVAKRPENAGKLIAVSLFASGRDIYRPRCSSLSGKRWRKCSLRYEH

SEQ ID NO: 39530 - DNA, 972 bp, Arabidopsis thaliana
  CDS (1)..(972)
atggaagatcggtgcttgatcaagaacgatatcactgaattgattggtaacacaccaatggtgtatctgaacaatgttgttgatggttgcgtggctcgtatcgctgcgaagcttgagatgatggagccttgttctagcgtcaaagacagaatcgcgtatagtatgatcaaagatgcagaagacaaaggattgattactcccggaaagagtacattgatagagccaactgctggtaacaccgggattggtttagcttgcatgggagctgcaagaggctataaagtgatccttgtgatgccttcaactatgagcttagagagaagaatcattctgagggcactaggtgcagagcttcatctctcggaccagcgcataggccttaaaggaatgttggagaaaactgaagcgattttaagcaaaactcctggtggttacattccacaacaatttgaaaatcctgcaaaccccgagattcattaccgaaccacgggaccggaaatatggagagattcagccgggaaagtagatatattggtcgctggcgtagggactggtggaactgctactggagtagggaagttcctcaaggagcagaacaaagacatcaaggtttgtgtggtggaaccagtagaaagtccggtacttagcggaggtcaaccaggtccacatttgattcagggaattggctctggtatcgtcccattcaatttggacttaaccattgttgatgaaattattcaagtggcaggtgaagaggctattgaaacagccaagcttcttgccctcaaagaaggattactggtgggaatatcctctggagccgcagcagcggctgcgttaaaggttgcaaagcggccagaaaacgcggggaaactcattgtggtggtttttcctagtggaggagaacgttatttatcgactaaactgttcgattcgattagatatgaagcagagaatttgcctattgaatga

SEQ ID NO: 39531 - protein, 323 aa, Arabidopsis thaliana
MEDRCLIKNDITELIGNTPMVYLNNVVDGCVARIAAKLEMMEPCSSVKDRIAYSMIKDAEDKGLITPGKSTLIEPTAGNTGIGLACMGAARGYKVILVMPSTMSLERRIILRALGAELHLSDQRIGLKGMLEKTEAILSKTPGGYIPQQFENPANPEIHYRTTGPEIWRDSAGKVDILVAGVGTGGTATGVGKFLKEQNKDIKVCVVEPVESPVLSGGQPGPHLIQGIGSGIVPFNLDLTIVDEIIQVAGEEAIETAKLLALKEGLLVGISSGAAAAAALKVAKRPENAGKLIVVVFPSGGERYLSTKLFDSIRYEAENLPIE

SEQ ID NO: 39532 - DNA, 903 bp, Helicobacter hepaticus ATCC 51449
  CDS (1)..(903): transl_table=11
atgatagctcaaaatattaccgaactcattggcaacactccgattttacaacttcagcaatttgctccaaatctttatggcaaatgcgagtttttaaacccaagccattctgttaaagaccgccccgcatatgcaatgatagatgaggctctaaagacaggcaaaatcacaaaagatacaactattgtagaatgcacaagcggcaatatgggcatatctctcgctatgatttgtgcttctcttggattaaaaatcatcatcactatgccagaatctatgagcatagaaagacgcaagatgatagctttgtttggtgcgaatcttgtgcttactcctgcaagtgagggtatgcaaggtgcgctcaataaggctcaagaaattttagattccacaccaaactcatttatgccaagtcaatttgataatctcgctaacaaagaaatgcacaaacgcactactgcactagagatttataaaagctttgagggaagtttggattattttgtggcaggatttggcacaggtgggacaattagcggtgtaggcgaagtgcttaaagagaagattccatctattaaaattattggtgtagagcctgctgcttcaccactgcttagcaaaggacaagcgggaccacataagattcaaggcattggcgcgaactttatccctaaaatccttaatcgcgatgtgatagattctattgaagttgtagaaaatgaagtcgctattaaaatggctcaaaatttaggcaaaatcggcgtaatggttggaatttctagtggcgcaaatgtcgcagctgcacttgaaattgccaaaaacaatccaaataaaaaagtgcttactatgcttaatgacacagcagagcgatacctttcaacggatttatttaatacgctttaa

SEQ ID NO: 39533 - protein, 300 aa, Helicobacter hepaticus ATCC 51449
MIAQNITELIGNTPILQLQQFAPNLYGKCEFLNPSHSVKDRPAYAMIDEALKTGKITKDTTIVECTSGNMGISLAMICASLGLKIIITMPESMSIERRKMIALFGANLVLTPASEGMQGALNKAQEILDSTPNSFMPSQFDNLANKEMHKRTTALEIYKSFEGSLDYFVAGFGTGGTISGVGEVLKEKIPSIKIIGVEPAASPLLSKGQAGPHKIQGIGANFIPKILNRDVIDSIEVVENEVAIKMAQNLGKIGVMVGISSGANVAAALEIAKNNPNKKVLTMLNDTAERYLSTDLFNTL

SEQ ID NO: 39534 - DNA, 1050 bp, Rhodopirellula baltica SH 1
  CDS (1)..(1050): transl_table=11
ttgctcctgagccaaccatccatgaaccaactttcctcgcgagtttgcaatggcgtcctcgatgcaatcggcggcacaccattggttcgactcaaccgatttttggaccgacctgatattgagttgattgtgaaatgggaggcggcgaatccgggcggaagtgccaaggatcgtccagccgcgaagatgctgtccgaggcactcaaacgcggtgagatcggccccgaaaccacgatcgtcgaatcgacgtctgggaacatgggcatcggtctggctcaagtgtgccggtaccacggattgaaattcatctgcgtcgtcgatcctcgagcacagaagcaaaacctctcgatcatcgaagcactcggtggcacgattgagctagtcacccagccgctgaaaggtgatttcctggctgcacgcatcgcgaaagtttgcgagctgatcgagacaacaccgaacagttattggcccaatcagtacgccaacaccgacaaccctcgatcacactttaaaggaaccatccgcgaaatcgatgagacgctcaatggtgaattcgatgtcttgttcgtggcgacgagcagcacggggaccgctcaaggttgtcgtgattttttgaagtcgcgaggacgcgacgttcaggtcgtcgcggtcgattcagtgggcagtgttttgttcggcgggtcgtctggtcctcgcaagatccctggtttgggtgcggggaaggaacctcgattggcggcgggccaatcattcgatcatctcgttcgcgtctcggatttggaatgtgtcgttggatgtcgcagggcggcgcagcgagaggcgatgttgattggtggttcggccggtggcgttctgatgagcgtcggacgaatgcaagaacaattcgctggcaagcgttgcgtcgcggtgctccatgattccggcacgcgatatctcgaaacagtctttagcgatgaatgggtttcggagtcgctgggttgtaccagcgaggaactcaactatctggtcggttcttcctcgtttgagttttttgaaggagtgagcgcatga

SEQ ID NO: 39535 - protein, 349 aa, Rhodopirellula baltica SH 1
MLLSQPSMNQLSSRVCNGVLDAIGGTPLVRLNRFLDRPDIELIVKWEAANPGGSAKDRPAAKMLSEALKRGEIGPETTIVESTSGNMGIGLAQVCRYHGLKFICVVDPRAQKQNLSIIEALGGTIELVTQPLKGDFLAARIAKVCELIETTPNSYWPNQYANTDNPRSHFKGTIREIDETLNGEFDVLFVATSSTGTAQGCRDFLKSRGRDVQVVAVDSVGSVLFGGSSGPRKIPGLGAGKEPRLAAGQSFDHLVRVSDLECVVGCRRAAQREAMLIGGSAGGVLMSVGRMQEQFAGKRCVAVLHDSGTRYLETVFSDEWVSESLGCTSEELNYLVGSSSFEFFEGVSA

SEQ ID NO: 39536 - DNA, 960 bp, Rhodopirellula baltica SH 1
  CDS (1)..(960): transl_table=11
atgggaggttacagcctgatgtctcgaggaaaaactttcgacaacattgcccgcgcgatcggtgacacgccgatggtgcagatcaatcgcttggtgccttcgggtgatgcgactgtcttcgccaagtgcgagttctttcagccgctcaatagcgtgaaagaccgtatcggcgttgcgatgatcgaagctggggaacgcgatggaagcatcaaccccgatacgcacatcatcgaacccaccagtggcaacaccggaattgctctcgcgtttgtttgtgccgcgaaaggctacaagctgacgctcacgatgcctgaatcgatgtcggtcgaacgccgtgcgttgcttcgagcgatgggggccaacttggtgttgacgcctgctggtgacgggatgaagggggcaatcacaacggctcaagagttggtcgaccaaaccgacaactcgttcatgccgcagcaatttgagaacccatctaaccctgcgatccacgaagcgaccaccggccctgaaatttgggccgacacggacgggaagatcgacgcgatcgtggcgggcgttggaacgggcggaacgatcactggtgtggctcgctacttgaagaaacaaaacccagacttcaaagcattcgcggtcgaaccaaagcattcgcccgtgatcagtggcggatcacctggcaaacaccgcattcaaggaattggcgcaggcttcattcccggaaatttggacacgtcgatcattgatgacgtcgttcaggtcgatgacgaagatgcgttcgagtgggggcgtcagcttgccaagcaagaaggcatcgtcgcggggatcagcagcggtgcaaacatgtgggcggctgctcagattgctgcgcgacccgagatgaagggcaagcgtattgtcaccgtgatgtgcagcttaggtgaacgttatctcagcacgccgctgtttggtgacctaggtttgtaa

SEQ ID NO: 39537 - protein, 319 aa, Rhodopirellula baltica SH 1
MGGYSLMSRGKTFDNIARAIGDTPMVQINRLVPSGDATVFAKCEFFQPLNSVKDRIGVAMIEAGERDGSINPDTHIIEPTSGNTGIALAFVCAAKGYKLTLTMPESMSVERRALLRAMGANLVLTPAGDGMKGAITTAQELVDQTDNSFMPQQFENPSNPAIHEATTGPEIWADTDGKIDAIVAGVGTGGTITGVARYLKKQNPDFKAFAVEPKHSPVISGGSPGKHRIQGIGAGFIPGNLDTSIIDDVVQVDDEDAFEWGRQLAKQEGIVAGISSGANMWAAAQIAARPEMKGKRIVTVMCSLGERYLSTPLFGDLGL

SEQ ID NO: 39538 - DNA, 972 bp, Rhodopirellula baltica SH 1
  CDS (1)..(972): transl_table=11
atgacgaatcatccggcttcgtacagctatgcgaccgaagcgatcacgactccgattgcgccggtgaaactgtccgatgatgggccagtcatttggtgcaagctggaatatcacaacccgagtggctccaccaaagatcggatcgctcgtttcatcttgggaaaggcaatccgaagcgggttgctgggccgtggtgatgcggtggtcgaagcatcgagcgggtcgaccagcatttcgcttgcattgatgtgcgcccagtttggtttgcgattcactgcggtcatgccgcgcggggtgagttccgaacggatcaagatgattcgagcgtttggagccgaagtgatcctgacaccggcggaagaaggtgtgggcggagcgatggcattagcagatgagatcgccggtcgaggagaagcgttcgcaagcaagcagtttgagaacccagacaacccggcggcacatcgctatcaaaccgccgcagaaatcatcgctcaagttccttctcgctcggtggatgcggtcgtcagtggggtcggaacgggtggcaccttggtcgggctgtaccagggattctgcgattttggatgcatcactcggccggtgctggctcggccggtctgctccgatggcctgtatgagctggagtgttccagtttcagcaagaagataccgggtgtggtggaaagtgcttcggcaatcttccgcgatgcccatctgcccggactcagacaagtcgatgtgaaagacagcgtggctttggcgtgttgtcgccaactgatccggcgtggatttcccgtcgggccaagttcagggttgaacttcgccgcggccctggaagccgcacgcgatctcccgcccgattcaacgatcgtcacggtctttcccgaccgcatggaacgctacttctcgacgccgttgttcagcgactcagtggaagagttggaatgcgatccggcccagacatgttgctga

SEQ ID NO: 39539 - protein, 323 aa, Rhodopirellula baltica SH 1
MTNHPASYSYATEAITTPIAPVKLSDDGPVIWCKLEYHNPSGSTKDRIARFILGKAIRSGLLGRGDAVVEASSGSTSISLALMCAQFGLRFTAVMPRGVSSERIKMIRAFGAEVILTPAEEGVGGAMALADEIAGRGEAFASKQFENPDNPAAHRYQTAAEIIAQVPSRSVDAVVSGVGTGGTLVGLYQGFCDFGCITRPVLARPVCSDGLYELECSSFSKKIPGVVESASAIFRDAHLPGLRQVDVKDSVALACCRQLIRRGFPVGPSSGLNFAAALEAARDLPPDSTIVTVFPDRMERYFSTPLFSDSVEELECDPAQTCC

SEQ ID NO: 39540 - DNA, 951 bp, Haemophilus ducreyi 35000HP
  CDS (1)..(951): transl_table=11
atgacaattttcgcagataattcatataccattggcaatacccccattgtgcgtttaaaacattttggtcaaaatggcaatttactagtgaaaattgaagcccgtaatccaagctttagtgttaaatgtcgtattggtgccaatatggtatggcaagcggaaaaagacggtattctaactaaagataaagaaattgtggatgcaacaagcggcaatacaggcattgcgttagcctatgttgcggcagctcgtggctataaaatcaccttaacaatgccagaaaccatgagcgatgaacgtaaacgtctattacgtggcttaggcgcaaatttagtgcttactgaaagcacattaggtatgaaaggcgctattgctaaagctgaagagattttcgctagcgatccaaaccgttacataatgctaaaacagtttgaaaatccagcaaatccagccattcaccaacaaacgacaggtcctgagatttggcaggcgactgaaggcaaaattgatgttatcgtagcaggcgtaggcactggcggtacaatcacaggcgtttcacgctatataaaacaagacaaaggcaaacaaattatctctgttgcagtggaaccaaaagaatccccggtaataacacaaacattaaatggcgaggaagtgcaacctggtccacataaaattcaaggtattggtgcgggctttattcctaaaaacttagatttaacgttaattgaccgcgttgaacaagtatcgagcgaagaagcccttaaaatagcacatcaacttatggctaaagaaggtattctagtcggcatttcatctggtgccgcagtcgcagcagcagatcgtttagctaaattacctgaatttgcggataaacaaattgtggcagtcttaccttctgcatcagaacgttacttaagtaccttattatttgaaggaattgaaatttaa

SEQ ID NO: 39541 - protein, 316 aa, Haemophilus ducreyi 35000HP
MTIFADNSYTIGNTPIVRLKHFGQNGNLLVKIEARNPSFSVKCRIGANMVWQAEKDGILTKDKEIVDATSGNTGIALAYVAAARGYKITLTMPETMSDERKRLLRGLGANLVLTESTLGMKGAIAKAEEIFASDPNRYIMLKQFENPANPAIHQQTTGPEIWQATEGKIDVIVAGVGTGGTITGVSRYIKQDKGKQIISVAVEPKESPVITQTLNGEEVQPGPHKIQGIGAGFIPKNLDLTLIDRVEQVSSEEALKIAHQLMAKEGILVGISSGAAVAAADRLAKLPEFADKQIVAVLPSASERYLSTLLFEGIEI

SEQ ID NO: 39542 - DNA, 969 bp, Prochlorococcus marinus subsp. marinus str. CCMP1375
  CDS (1)..(969): transl_table=11
atgccaatagcaaatgacataacaagcttagtggggcaaacaccactagtaagactaaatcgcctcccaaaagcgtttggatgtaaagcggaggtattagcaaaacttgaaagttttaatcccacagcatctgtaaaagaccgtatagcaggcgccatggtggttgaagctgaaaaacaaggaactattaaacctggtgaaactgtcttaatagaaccaacaagtggtaatacaggaatcgctctcgcaatggttgcagcagcgaaaggctatcgattaattcttacaatgcctgacacgatgagtaccgaaaggaggtcaatgcttcgagcttatggagcagaacttcaactaaccccagggaaagatggaatacaaggggctatcaacttggccaaagaattagtagcttcaatttcgcattcttacctattacaacaatttgataatccagctaatccgcagattcatgaagcgacaaccgctgaagaaatttggtcagattgcgaaggaaaacttgatggcttaatagctggaataggcactggcggaacaattactggttgcgcaagagttctaaaagctcgtaatcctgcgctaaagatttatgcaattgagccctcatcaagtgcagtactttcagggaaagagcctggccctcatagcattcaaggaatcggtgctggttttattccaaaagtacttgatatatcactaattgatgaagtaatagagattaatgatcaagaagcaatggaagctgggaggaaacttgcaaaagaagaaggtctccttagcggaattagtagtggcgcagctctagcggctgctctaaaaatagggaaaaggcccgaaatggaaaataaaaggttagtggttgtttttcctagttttggcgagagatatttatctacttctatgtttaacaatctttcaaccagccaaccaaagaaagatggatacatttag

SEQ ID NO: 39543 - protein, 322 aa, Prochlorococcus marinus subsp. marinus str. CCMP1375
MPIANDITSLVGQTPLVRLNRLPKAFGCKAEVLAKLESFNPTASVKDRIAGAMVVEAEKQGTIKPGETVLIEPTSGNTGIALAMVAAAKGYRLILTMPDTMSTERRSMLRAYGAELQLTPGKDGIQGAINLAKELVASISHSYLLQQFDNPANPQIHEATTAEEIWSDCEGKLDGLIAGIGTGGTITGCARVLKARNPALKIYAIEPSSSAVLSGKEPGPHSIQGIGAGFIPKVLDISLIDEVIEINDQEAMEAGRKLAKEEGLLSGISSGAALAAALKIGKRPEMENKRLVVVFPSFGERYLSTSMFNNLSTSQPKKDGYI

SEQ ID NO: 39544 - DNA, 987 bp, Prochlorococcus marinus subsp. marinus str. CCMP1375
  CDS (1)..(987): transl_table=11
atgaccccaatatacgaagacaacagccttgcaataggcaacaccccgctagtaaaacttcactctgttaccaaaaactgtaaagcaacagttttggcaaaaatcgaaggtcgcaatcctgcatatagcgtcaaatgcagaattggagcgaacatgatttgggatgcagaaaagaaaggtctcctcaataaacagcaaaccattattgaacccacttcaggtaatactggtattgcccttgcttttactgctgctgcaaagggttacaaactaacactcacaatgcctgagtcaatgtccttggaaaggaggagggtaatggcagtccttggtgctgaactaattcttactgaagctgcaaaaggtatgcctggcgctattgcaaaagcaaaagagattgcagaaagtgatcctaataaatatttcatgcctggacaatttgacaaccctgccaatccagagattcacttcaaaacaacaggtccagaaatctggaatgactgcaatgggaacattgatgtacttgttgcaggagtaggcactggaggaactattactggtgtatcaaaatttttaaagcaagagaaaaggaaacaagttctttccgtagcagtagaaccatcccatagccctgtgatttcccaaaccatcaatggccaagaagtaaagccaggacctcataaaatacaaggcatcggagctggatttatccctaaaaatttagacctctcattagttgaccaagttgagcaagtcagtaatgaagaatcaatcgcaatggctcttcgcttggcaaaagaagaaggcttactagttggtatatcttgcggagctgcagcaacagctgcaattcgattggccgaacaagaacaatttgctggcaaaacaattgttgttgttttaccagaccttgctgagcgctatctctcatcagtaatgttcgcagaagtcccaacaggtattatcgaacaacccaaaaccaactaa

SEQ ID NO: 39545 - protein, 328 aa, Prochlorococcus marinus subsp. marinus str. CCMP1375
MTPIYEDNSLAIGNTPLVKLHSVTKNCKATVLAKIEGRNPAYSVKCRIGANMIWDAEKKGLLNKQQTIIEPTSGNTGIALAFTAAAKGYKLTLTMPESMSLERRRVMAVLGAELILTEAAKGMPGAIAKAKEIAESDPNKYFMPGQFDNPANPEIHFKTTGPEIWNDCNGNIDVLVAGVGTGGTITGVSKFLKQEKRKQVLSVAVEPSHSPVISQTINGQEVKPGPHKIQGIGAGFIPKNLDLSLVDQVEQVSNEESIAMALRLAKEEGLLVGISCGAAATAAIRLAEQEQFAGKTIVVVLPDLAERYLSSVMFAEVPTGIIEQPKTN

SEQ ID NO: 39546 - DNA, 945 bp, Candidatus Blochmannia floridanus
  CDS (1)..(945): transl_table=11
atgaataaaatttatcaagataattcttatactattggtcatactccattagtacgacttaataaaattggtaatcaatttattatggccaaaattgaatcaagaaatcccagttttagcgttaaatgtcgcattggatctaacatgatatgggacgcagaaaaaaaaaatatattaaacccaaatatcactattatagaagcaactagcggaaatactggtatagctttagcatatgtaactgcagcacgaaactacaaattactcttaactatgcctgaaactatgagtattgaacgacaaaaactaatacgagctttaggtgcagatataatcttaacagaaggacatcttggtatgaaaggagcgatcaatcgcgcaaccgaaattgcaaacgataacccaagcaaatatttattactacaacaatttagtaatccagcaaatcctaatattcacgaacgcaccacaggaccagaaatttggtatgatactcatggaaatatagatatatttgttgctggagttggaactggaggtaccatcacaggagtaggaagattttttaaacaaatacaaaacaaaaaaatcactatagtagcggttgaaccaaaagattctccagtcattactcaaaccttgtctggacaaagtataaaaccagccccacataaaatccaaggaattggagcaggattcatccccaaaaatttagatttaaatttaattgatcaagtagtaactgtcgaaacagatgcagcaatttcttatgctaaattcttaatgcaaaaagaaggaattttagcaggtatttcctcaggagctgctttagcagcagcagtacaattacaacaacaggaaaaacatactaataaaaatatagttataatacttccgtcatctggagaaagatatttaagcaccatactattttcggattcatga

SEQ ID NO: 39547 - protein, 314 aa, Candidatus Blochmannia floridanus
MNKIYQDNSYTIGHTPLVRLNKIGNQFIMAKIESRNPSFSVKCRIGSNMIWDAEKKNILNPNITIIEATSGNTGIALAYVTAARNYKLLLTMPETMSIERQKLIRALGADIILTEGHLGMKGAINRATEIANDNPSKYLLLQQFSNPANPNIHERTTGPEIWYDTHGNIDIFVAGVGTGGTITGVGRFFKQIQNKKITIVAVEPKDSPVITQTLSGQSIKPAPHKIQGIGAGFIPKNLDLNLIDQVVTVETDAAISYAKFLMQKEGILAGISSGAALAAAVQLQQQEKHTNKNIVIILPSSGERYLSTILFSDS

SEQ ID NO: 39548 - DNA, 912 bp, Bordetella bronchiseptica RB50
  CDS (1)..(912): transl_table=11
atgagcactcctacctaccccactatcgagcaaaccgtcggcaatacgccgctcgtgcgcctgcagcgcattcccggcgcggccgggcaggcgcgcggcaacgtgatcctggccaagctggagggcaacaaccctgccggctcggtcaaggaccgtcctgccctgtccatgatcctgcgcgccgaagagcgcggcgaaatccatccgggcgataccctgatcgaggccaccagcggcaataccggcatcgcgctggccatgacggcggccatgcgcgggtaccggatggtcctcatcatgcccgacaacctgtcgctcgagcggcgggccgccatgaccgcctatggcgccgaactgatcctcacgcctgccgccaagggcggcatggaatacgcccgcgacctggccacggccatgcaggccgaaggcaagggcaaggtgctggaccaattcggcaacccggacaacccgcgcgcccatatcgagggcaccggcccggaaatctggaaccagacggatggccgcgtcacgcatttcgtcagcgcgatgggcaccaccggcaccatcatgggcgtgtccacctacctgaagtcgcgcaacgcggcggtgcaggtggttggcgcgcagccggccgaaggctcgcagatcccgggcatccgcaagtggcccgaggcctacatgccgaagatcttcgaccgttcgctggtcgacgcctatgagtccatcgcgcaggccgaggcggagaccatggcgcgccggctggccgccgaagaaggcatattcgccggcatttcgtcggcgggcgccctggtggcggcgttgcgcgtggccgagcgggtcgagaacgccaccattgtcttcatcgtgtgcgaccgcggcgaccgctacctgtcgaccggcgtcttcaactga

SEQ ID NO: 39549 - protein, 303 aa, Bordetella bronchiseptica RB50
MSTPTYPTIEQTVGNTPLVRLQRIPGAAGQARGNVILAKLEGNNPAGSVKDRPALSMILRAEERGEIHPGDTLIEATSGNTGIALAMTAAMRGYRMVLIMPDNLSLERRAAMTAYGAELILTPAAKGGMEYARDLATAMQAEGKGKVLDQFGNPDNPRAHIEGTGPEIWNQTDGRVTHFVSAMGTTGTIMGVSTYLKSRNAAVQVVGAQPAEGSQIPGIRKWPEAYMPKIFDRSLVDAYESIAQAEAETMARRLAAEEGIFAGISSAGALVAALRVAERVENATIVFIVCDRGDRYLSTGVFN

SEQ ID NO: 39550 - DNA, 969 bp, Prochlorococcus marinus subsp. pastoris str. CCMP1986
  CDS (1)..(969): transl_table=11
atggaaatagcaggtgatattacttctttagttggcaaaacaccattagtaaaattagatcgcataaaaaaatactgtaattgtcatccagaaataatagcgaaacttgaaagttttaatccatcagcatctgtcaaagatcgtattgcttattcgatgttaaattcagccgaaaaagatggtttaattttacctgggaaaacaacattaattgaggcaacaagtggaaatactggaattgctttagcaatggttgcagcagctaaaggttatagattgatattaactatgccagatactatgagtattgagagaagggcaatgctaagagcatatggggcagaattacaactcactcctggcaaagaaggaatgaacggtgctctagatttagcaagtgaattatcttcaagtattccaaatagctttcagtttaaccagtttgaaaatcttgcaaatccagaaattcatgaaaggaccacagctaaagaaatttgggatcaatctaatcaaactattgatggattagtttctggagttggtactggaggaaccataactggatgttctcgatttctaaaaaaagttaatccaaattgcaaaatatatgcagtagagcccgcaaaaagcgctgtaatttcaggagaaaaagctggttctcattctatccaggggattggtgcaggcttcgttcctaaggtacttgacactcatttaatagatgaaatttttaagatagatgatgaagaagcattttattatgggaggttattagctcgattagagggtcttttatcaggaattagtagcggagctgctttggcagcaacaatcaaaataggtcaaaggaaagagcttattaatcaaagattaatagtgattcttccgagttttggtgaaagatacttatctacagcaatgtttgaatcaaacactgcaataaaagctagaaaagacggttatctatag

SEQ ID NO: 39551 - protein, 322 aa, Prochlorococcus marinus subsp. pastoris str. CCMP1986
MEIAGDITSLVGKTPLVKLDRIKKYCNCHPEIIAKLESFNPSASVKDRIAYSMLNSAEKDGLILPGKTTLIEATSGNTGIALAMVAAAKGYRLILTMPDTMSIERRAMLRAYGAELQLTPGKEGMNGALDLASELSSSIPNSFQFNQFENLANPEIHERTTAKEIWDQSNQTIDGLVSGVGTGGTITGCSRFLKKVNPNCKIYAVEPAKSAVISGEKAGSHSIQGIGAGFVPKVLDTHLIDEIFKIDDEEAFYYGRLLARLEGLLSGISSGAALAATIKIGQRKELINQRLIVILPSFGERYLSTAMFESNTAIKARKDGYL

SEQ ID NO: 39552 - DNA, 969 bp, Synechococcus sp. WH 8102
  CDS (1)..(969): transl_table=11
atggccattgcctccgatatcaccagcctgatcggaggcacacccctggttcgtctcaaccgcctgccgttgcagtccggctgcggggcagatgtgatcgccaagttggaaagcttcaacccttcggcgtcggtgaaggatcgaatcgccagcgccatggtgctggcggcggagcaggagggaacgattcaaccggggcgaacggtgctggtggagcccaccagcggcaacaccggcattgcgctggcaatggtcgcggctgcccggggctaccggctcatcctcaccatgccggacacgatgagcacggaacgccgttcgatgctgcgtgcctacggagctgagctgcagctcaccgacggtgctcagggcatggccggagcgattgctctcgccaatgaattggttgaggaaatcccggaggcttatctgctgcagcagttcgacaaccccgccaatcctgcggtgcatgaacgcaccaccgctgaagagatctggcacgactgcgacggccacctggacgccctggtggctggcgtcggcaccggcggcaccatcaccggctgtgctcgtttgctgaagcagcgcaatcctcaactgcaggtggtggcggtggagccggcgggtagtgctgtgctgtcgggcaggccgccgggtgcgcatcgcattcagggcatcggtgcggggttcgttcccgctgtgcttgagcgtgatctgatcgatgaggtgatgaccgtttcggatgaggaggcgatggatgtgggccgtcgtctggcgcggcaggagggtctgctttgcggcgtcagcagcggtgctgcggtggctgcggctctgcggcttggtcaacgctccgagtggcaggggcggcgcgtgctggtgatgctggccagttacggcgagcggtatctgtccacaccgatgttcagtggcgttgcgtcttcgccggcacgtcaggacccgatgctgtga

SEQ ID NO: 39553 - protein, 322 aa, Synechococcus sp. WH 8102
MAIASDITSLIGGTPLVRLNRLPLQSGCGADVIAKLESFNPSASVKDRIASAMVLAAEQEGTIQPGRTVLVEPTSGNTGIALAMVAAARGYRLILTMPDTMSTERRSMLRAYGAELQLTDGAQGMAGAIALANELVEEIPEAYLLQQFDNPANPAVHERTTAEEIWHDCDGHLDALVAGVGTGGTITGCARLLKQRNPQLQVVAVEPAGSAVLSGRPPGAHRIQGIGAGFVPAVLERDLIDEVMTVSDEEAMDVGRRLARQEGLLCGVSSGAAVAAALRLGQRSEWQGRRVLVMLASYGERYLSTPMFSGVASSPARQDPML

SEQ ID NO: 39554 - DNA, 891 bp, Chromobacterium violaceum ATCC 12472
  CDS (1)..(891): transl_table=11
gtgtacaaacatctggaagatttcgtcggcggcacgccgctggtgcggctcaaacgcctgccgggcgacaacggcaacgtggtgctgctgaagctggagggcaacaatccggcaggatcggtgaaggaccggccggcgctgtcgatgatccgccgcgccgaggcgcgcggcgacatccggcccggcgacacgctgatcgagccgaccagcggcaacaccggcatcgcgctggcgatggcggcggcgatgatgggctaccgcatggtgctgatcatgccggagaattccagcgccgagcgggtgcaggcgatgcgcgcctacggcgccgaggtgatcctgacgccggcggccggttcgatgccggcggcgatagacctggcgcgcagcatggaggcggcaggcgagggccgcatcctggatcaattctccaatccggacaatccccaggcgcattacgagggcaccggcccggaaatctgggcggagaccgaaggcaggatcacccatttcgtgtccagcatgggcaccactggcaccatcatgggcaccggccgcttcctgaaggagaagaatccggccatccgcatcgtcggcgtccacccggagccgggcagccagatcgccggcatccgcaagtgggaagacccgtacgtgcccaagatctgcgatttttcccgcatcgacgagatcctgcacgtcggacagaaggaggcggaagacactgcccggctgctggcgaggcgcgagggcatcctggccgggccgtcgtctggcggcgcgttggcggtggctcttaggctggacgcgcaactgagggacgcggtgatcgtgtccgtggtgtgcgaccgcggcgaccgctacctgtccactggattgttcgatcctgcttga

SEQ ID NO: 39555 - protein, 296 aa, Chromobacterium violaceum ATCC 12472
MYKHLEDFVGGTPLVRLKRLPGDNGNVVLLKLEGNNPAGSVKDRPALSMIRRAEARGDIRPGDTLIEPTSGNTGIALAMAAAMMGYRMVLIMPENSSAERVQAMRAYGAEVILTPAAGSMPAAIDLARSMEAAGEGRILDQFSNPDNPQAHYEGTGPEIWAETEGRITHFVSSMGTTGTIMGTGRFLKEKNPAIRIVGVHPEPGSQIAGIRKWEDPYVPKICDFSRIDEILHVGQKEAEDTARLLARREGILAGPSSGGALAVALRLDAQLRDAVIVSVVCDRGDRYLSTGLFDPA

SEQ ID NO: 39556 - DNA, 1371 bp, Chromobacterium violaceum ATCC 12472
  CDS (1)..(1371): transl_table=11
atgcaggacaatagcgtcttatcgctgatcggcaacacgccattggttcgcgtcagccatctggataccgggccgtgcgagctgtacctgaagctggaaagccacaatccgggcggctccatcaaggatcggatcgccttgaccatgatcgaggcggccgagcgggacggcaagttgaaaccgggcggggccatcatcgaggccaccgccggcaataccgggctgggtctcgcgctggtggccgcgcagaagggctacccgctgacgctggtggtgccggacaagatgagccgggagaagattttgcatctgcaggcgctgggcgcccaggtggtgctgacccgctccgacgtcggcaagggccatccggagtactaccaggacctggcggcgcgcatcgccagcgagacgcccggcgcctactacatcgaccagttcaacaacccggccaatccgctggcgcatgaaaccaccaccgggccggaaatctggcgccagatgaacggcgaggtggacgcggtggtggtcggcgtcggctccagcggcacgctgaccggcctgacccgcttcttccgcgccaaggcgccggccaccgccttcgtgctggccgatccggtggggtctgtgttggccgattatgtcgaaaccggcagcttcggccaggccggcagctggctgatcgagggcataggcgaggacttcatcccgccgcagaccgatctgtcgatggtgaagcgcgccttccgcgtcagcgatcaggaaagcttcgacaccgcccagcaactgctgcgcagcgagggcattctggccggttcgtcgtccggcgcgttgcttgccgccgcgttgcgctactgccgcgagcaaaccgagcccaagcgggtggtgacgctggtgtgcgacagcggcaacaagtacctgtccaagatgtacaaccgcgactggctggtcgaccagggcatgctgcgcctgcccgaggtgggcggactgaccgatctgatcgtccgccgccaccaggacggcagcacggtgtcttgccatccggacgagccgctcaatgtggcttaccagcggatgcgcctgcacgacgtgtcgcagatgccggtgctggacgacgacaaggtggtcggcgtgctggacgaatgggacctgctgctgtcggtgcacggcgagccggaaaacttccgccagaccgtggccacggcgatgagcagccatgtgcgcacgctgtcgccgcaggcctcgttgcaggatctgctgcaggtgttcaacgacggccacatcgcgctgatcgtcgacaagggccgctatctggggctgatcacccaggccgacctgctgtcgttctggcgccgccagccgcgcgccgcttaa

SEQ ID NO: 39557 - protein, 456 aa, Chromobacterium violaceum ATCC 12472
MQDNSVLSLIGNTPLVRVSHLDTGPCELYLKLESHNPGGSIKDRIALTMIEAAERDGKLKPGGAIIEATAGNTGLGLALVAAQKGYPLTLVVPDKMSREKILHLQALGAQVVLTRSDVGKGHPEYYQDLAARIASETPGAYYIDQFNNPANPLAHETTTGPEIWRQMNGEVDAVVVGVGSSGTLTGLTRFFRAKAPATAFVLADPVGSVLADYVETGSFGQAGSWLIEGIGEDFIPPQTDLSMVKRAFRVSDQESFDTAQQLLRSEGILAGSSSGALLAAALRYCREQTEPKRVVTLVCDSGNKYLSKMYNRDWLVDQGMLRLPEVGGLTDLIVRRHQDGSTVSCHPDEPLNVAYQRMRLHDVSQMPVLDDDKVVGVLDEWDLLLSVHGEPENFRQTVATAMSSHVRTLSPQASLQDLLQVFNDGHIALIVDKGRYLGLITQADLLSFWRRQPRAA

SEQ ID NO: 39558 - DNA, 933 bp, Chromobacterium violaceum ATCC 12472
  CDS (1)..(933): transl_table=11
atgcgcatcgccaacaccatcaccgatctgatcggcaacaccccgctggtcaagctcaaccgcgtcaccgagggcgtcggcgccaccgtcgtcgccaagctggagttcttcaatccggcgcacagcgtcaaggaccgcatcgcggtggcgatgctggacgcggcggagcaagccggcaagatcggtccgaacaccgtcatcgtcgaacccacctcgggcaataccggcatcggcctggcgatggtgtgcgcggcgcgcggctacaagctggtgatcaccatgccggaaaccatgagcaaggagcgccgccagctgttgaaggcctacggcgccgaactgatcctgaccccggggccggacggcatgggcggcgccatcgccaaggcgaaggcgctggtcgacgaatttcccgacacctacttcatgccgcagcagtttgaaaacccggccaacccggaaatccaccgccacaccaccgcggaagaggtgtggaacgacaccgacggcaaggtggacatcttcgtggccggggtcggcaccggcggcaccatcaccggggtcggcgaggtgttgaaggcgcgcaagccgggcgtgcagatcgtcgcggtggagccggacgcgtcggcggtgctgtccggcagccccaagggcccgcacccgatccagggcataggcgcgggcttcgtgccagccatcctcaataccggcatttacgacgagatcatccgcgtcaagaacgaggacgcgctgcagaccgcgcgcgaggtggccaccaaggaaggcatcctggtcggcatctcgtccggcgcggcggtgtggtcggcgctgcagctggccaaacggccggaaaacgccggcaagctgatcgtagtggtgatcccgtcgttcggcgagcgttacctgtccaccgtgctgttcgagcatcttggctga

SEQ ID NO: 39559 - protein, 310 aa, Chromobacterium violaceum ATCC 12472
MRIANTITDLIGNTPLVKLNRVTEGVGATVVAKLEFFNPAHSVKDRIAVAMLDAAEQAGKIGPNTVIVEPTSGNTGIGLAMVCAARGYKLVITMPETMSKERRQLLKAYGAELILTPGPDGMGGAIAKAKALVDEFPDTYFMPQQFENPANPEIHRHTTAEEVWNDTDGKVDIFVAGVGTGGTITGVGEVLKARKPGVQIVAVEPDASAVLSGSPKGPHPIQGIGAGFVPAILNTGIYDEIIRVKNEDALQTAREVATKEGILVGISSGAAVWSALQLAKRPENAGKLIVVVIPSFGERYLSTVLFEHLG

SEQ ID NO: 39560 - DNA, 999 bp, Wolinella succinogenes DSM 1740
  CDS (1)..(999): transl_table=11
ttgtataatcctcctagattaattgcgcaagagagttttaaaaagatcaaaactttaaacgaaggagaaaaaatgaaagtcgctcagaatgttcaagaactcatcggcaagacccccctagttaggctcaatttcgcctctaaagagagtggagctaatgtcatcggcaaatgcgaattcatgaacccctcaggctcggtcaaagaccgaatcgccctagggatgatcaatgccgccattggggcgggtaaaatcacccctgagaccatcgtcattgagcccaccagtggaaatacaggaatcggactggcttctgtctgcgccgccaaaggaatcaagctcattctcactatgccaagctccatgagtattgagcggcgtaaactattggcggctttgggagcgcaaatcgagctaacccctgccgaaaaagggatgaaaggtgcagtggagagagctttggagctcgcccaagagaccaaaaactctttcgttcctcagcagtttgaaaaccccgccaaccctgaatatcaccgagtgaccacggcggtggagatttgggaagatttagatggcaaggtggatgtgctagtggctggagtcggcacgggcggcacgatcacaggcgtgggcgaggtgctcaaggcaaagaatcctaatctcaaaatctacgccgttgagcctatcgattctcctgtcctctctggaggcaagcccggccctcacaagattcagggaatcggagcaggatttgtccccaaggcgctcaacaccgccctctatgatgaggtgattcaggtgaaggtgagcgatgcttacgagatgtctagacgacttggcaaggaggaggggattttggttggaatctctgcaggcgccaacatttgggcctctaaagagattggcaagaaataccccggaaaaacagtggtgacgattctttgcgatacgggtgagagatacctaagcaccgagctttttgaccttcagccttcctga

SEQ ID NO: 39561 - protein, 332 aa, Wolinella succinogenes DSM 1740
MYNPPRLIAQESFKKIKTLNEGEKMKVAQNVQELIGKTPLVRLNFASKESGANVIGKCEFMNPSGSVKDRIALGMINAAIGAGKITPETIVIEPTSGNTGIGLASVCAAKGIKLILTMPSSMSIERRKLLAALGAQIELTPAEKGMKGAVERALELAQETKNSFVPQQFENPANPEYHRVTTAVEIWEDLDGKVDVLVAGVGTGGTITGVGEVLKAKNPNLKIYAVEPIDSPVLSGGKPGPHKIQGIGAGFVPKALNTALYDEVIQVKVSDAYEMSRRLGKEEGILVGISAGANIWASKEIGKKYPGKTVVTILCDTGERYLSTELFDLQPS

SEQ ID NO: 39562 - DNA, 963 bp, Gloeobacter violaceus PCC 7421
  CDS (1)..(963): transl_table=11
gtggtgagcaccgagattggcccgagcgccctgggaagcgtccagcctcccgccgagacggacctgctgcagtgggtgggcaacacgcctttgctgcgcctggagcgggtgacggcggggctttccccggacgtcgaagtgtacggcaaggcggagtggttcaacccgggcggctccgtcaaagatcgcccggcgctcaatatgattctcgaaggcgagcgcagcggccggctgacccgcgagaaaattattctcgatgccacctccggcaacaccggcatcgcctacgcctggatcgccgcgcgccggggctatcgcgtcaaactggccctgcccctgaacgcgagcgaagagcgcaagcgcatcctcaaggcctacggcgtcgatctcatcctcaccgatccgaccctcggttccgacggtgccatccaggaggcacgccggctctacgcagcggatcccgaacggtacttctatcccgaccagtacagcaacaacgccaactggcaggcgcactatctgacgacgggcgtcgaaatctaccagcagaccggtgggcgggtcacccattttgtggcggggctcggcacctcgggcacctgcatgggggtgggacggcgcctcaaggagttcgacccggccgttcgggtgattgccatgcagcccgactcgcccttccatgggctcgaagggctcaaacacatggagacggcgatcgtcccggcgatctacaaccctgctttgcccgaccggcaggtcgaagtgtccaccgaggaagcccaacgcaccgtcaagcgcctcgcccgtgaggagggcatgctggtgggcatctccgcagggggcaacgtggcggcggctttacgcctggcgcgcgaactcgaccgcggcgtggtggtcaccattttgtgcgacagtgccgacaagtacctttcggagcgcttctgggacgacccgaatctataa

SEQ ID NO: 39563 - protein, 320 aa, Gloeobacter violaceus PCC 7421
MVSTEIGPSALGSVQPPAETDLLQWVGNTPLLRLERVTAGLSPDVEVYGKAEWFNPGGSVKDRPALNMILEGERSGRLTREKIILDATSGNTGIAYAWIAARRGYRVKLALPLNASEERKRILKAYGVDLILTDPTLGSDGAIQEARRLYAADPERYFYPDQYSNNANWQAHYLTTGVEIYQQTGGRVTHFVAGLGTSGTCMGVGRRLKEFDPAVRVIAMQPDSPFHGLEGLKHMETAIVPAIYNPALPDRQVEVSTEEAQRTVKRLAREEGMLVGISAGGNVAAALRLARELDRGVVVTILCDSADKYLSERFWDDPNL

SEQ ID NO: 39564 - DNA, 963 bp, Gloeobacter violaceus PCC 7421
  CDS (1)..(963): transl_table=11
atgcatatcgctcacgacatcaccgaactgatcggccgcactccgctggtgcagctcaaccgtattccggccgccgagggtgcccttgcccgcatcgtggtcaaactcgaaagtttcaacccggccgcctccgtcaaagaccgcatcggcgtctcgatgatcaacgaagccgaaaagtcgggctttatcctgccgggcaaaacgaccctggtcgaacccacctccggcaacaccggcatcgccctggccatggtggcggcggcgcgcggctaccggctcatcctcacgatgcccgagacgatgagcagcgagcggcgggcgctcctgcgggcctacggcgcccaactcgaattgacccccggttcagaagggatgcgcggggccatccgccgcgctgaggagattacccgcgaagtgcccgacgcgtttatactccagcagtttcgcaaccccgccaatcccaagatccaccgcgagacgaccgccgaagaactctggcgcgacaccgacgggcagatggatatttttgtctccggggtgggtaccggcggcaccgtgaccggggtgggcgaagtctggaaggtgcgcaagcccggcgtgcagatcgtggcagtggaaccggcggcaagcccggtgctctccggcggtaaacccggctcgcacctcatccagggcattggcgcgggctttgtaccggatgtactgcggcgcgacgtgatcgacgaagtgatcgccgtagccgatgagaaagcgatcgaatacagccgcaggcttgccaaagaagaagggcttctctcgggcatctccaccggggcggctctgtgggcggctctgcagctggccaagcgccccgagaacaccggcaagctcattgtctttatccaacccagcttcggcgagcgctacttgagcacggcccttttccagaacgaagggcaatcgcccaccgccgtcgcccgctag

SEQ ID NO: 39565 - protein, 320 aa, Gloeobacter violaceus PCC 7421
MHIAHDITELIGRTPLVQLNRIPAAEGALARIVVKLESFNPAASVKDRIGVSMINEAEKSGFILPGKTTLVEPTSGNTGIALAMVAAARGYRLILTMPETMSSERRALLRAYGAQLELTPGSEGMRGAIRRAEEITREVPDAFILQQFRNPANPKIHRETTAEELWRDTDGQMDIFVSGVGTGGTVTGVGEVWKVRKPGVQIVAVEPAASPVLSGGKPGSHLIQGIGAGFVPDVLRRDVIDEVIAVADEKAIEYSRRLAKEEGLLSGISTGAALWAALQLAKRPENTGKLIVFIQPSFGERYLSTALFQNEGQSPTAVAR

SEQ ID NO: 39566 - DNA, 1368 bp, Photorhabdus luminescens subsp. laumondii TTO1
  CDS (1)..(1368): transl_table=11
atgaccacatcacgctctgttctcgatatgattggtaataccccattgctggagttaacgcatctgaataccggtccatgtcaattatttattaagctggagaatcaaaatcccggcggatctattaaagatcgcgttgctctttccatgatcgagcaggcggaagaacaagggttacttcaatctggtgggacaattatcgaagctactgctggtaataccggcatcgggttggcactggtcgctgccttgaaaggctataaattgattctggttgttccagataagatgagccgagagaaggtgtttcatctgcgtgctctgggtaccgatgtacgtcttactcgttctgatgtcagcaaaggtcatccagagtactatcaagattatgccctacgtctggcgcaagagatccccggtgcttattatatcgatcagttcaataatccggctaattcagcagcgcatactaccactaccggaccggaaatctggcagcaaatggaccacaatgtcgatgccgtggtgatcggtgtcgggtccggcggtacgctcggcggtttgagccactatttcgctcaagtttcgccggaaactgagtttgttctggcagatccaactggttctatcttggtagactatatcgaacacggcaaatatggtgaggccgggagttggcaggtggaaggtattggcgaagattttgtccctcctctgggcaatttcagtcgagtgcaccacgcataccgtgtcagtgatgcagaagctttctccagtgcccgtgatctgttgctaaaggaaggtgtgctggcgggttcttccagcggaaccttgctcgccgccgcactgcgctactgccgtgcgcaaaccacccccaaacgtgtggttacgctagcgtgtgacagcggaaacaagtatctgtcaaaaatgtttaacgattattggatgctggaacagggattccaatcacgtgtgcaacagcacgatctcagcgattatattacttaccgctatcaggatggcgctacggtttttatatcgccagaagatacgttaaaaactgcacatacccgaatgcgcttgtatgagatttctcaattaccggtgctgaaagaagagcaagtcgttggcattatcgacgagtgggatttgatgcacaccgtgcaggctgatccacgcaattttagcctgcccgttagccacgccatgactcatcaggtgagaacgctggataaaaacgattctctgcaacaattgatggcaactttcgacgccggacatgtggcgctgatcgtcgataatggccgttttcttgggctggtaactcgcacagatgtgctgaacgcatggcgtcagcaacttaattga

SEQ ID NO: 39567 - protein, 455 aa, Photorhabdus luminescens subsp. laumondii TTO1
MTTSRSVLDMIGNTPLLELTHLNTGPCQLFIKLENQNPGGSIKDRVALSMIEQAEEQGLLQSGGTIIEATAGNTGIGLALVAALKGYKLILVVPDKMSREKVFHLRALGTDVRLTRSDVSKGHPEYYQDYALRLAQEIPGAYYIDQFNNPANSAAHTTTTGPEIWQQMDHNVDAVVIGVGSGGTLGGLSHYFAQVSPETEFVLADPTGSILVDYIEHGKYGEAGSWQVEGIGEDFVPPLGNFSRVHHAYRVSDAEAFSSARDLLLKEGVLAGSSSGTLLAAALRYCRAQTTPKRVVTLACDSGNKYLSKMFNDYWMLEQGFQSRVQQHDLSDYITYRYQDGATVFISPEDTLKTAHTRMRLYEISQLPVLKEEQVVGIIDEWDLMHTVQADPRNFSLPVSHAMTHQVRTLDKNDSLQQLMATFDAGHVALIVDNGRFLGLVTRTDVLNAWRQQLN

SEQ ID NO: 39568 - DNA, 882 bp, Photorhabdus luminescens subsp. laumondii TTO1
  CDS (1)..(882): transl_table=11
gtggcaagcttggaacattttataggtaacaccccgctggtaaaattacaacgaatcaccgataagctagggggggaaatatgggtgaagcttgaaggtaataatccggcaggctcgataaaggacagaacagcgctatcaatgattcagcaagctgaattgcgcggtgaaatttctcccggtgacgtattaattgaagccactagcggaaatacgggtattgcgttagcaatgattgccgcagtgaaaggttatcaccttaaattactgatgcctgataatatgagccttgagcgtcaggcttctatgcgagcttatggtgcagaactgattttagtgagtagagcaatgggcatggaaggtgcacgtgatttagctcagcaaatggagcgtaatggtgaaggtaaagttcttgatcaattcaataacccagataatcctttagcgcattttacgacgacagggccggaaatttggcagcagacgcaagggcgtattacacattttgtttccagtatgggaacgacgggaaccattaccggtgttagccgctatttaaaaagccagtctaatcgtgtacagattattggcttacaaccggcggagaatagccatattcccggtattcgccgttggtcgccggcttatttgcctggcattttccgcaaggagctagttgatcaagtgctggatatcactcagaaagaagctgaagataccatgcgtttattagctcagaaagaagggattttctgtggagttagttccggcggtgctgttgctggagcattaagtattgcagcacaaaatccaggttctgttattgttaccattatttgcgatcgtggtgatagatatctttctaccggagtatttaattaa

SEQ ID NO: 39569 - protein, 293 aa, Photorhabdus luminescens subsp. laumondii TTO1
MASLEHFIGNTPLVKLQRITDKLGGEIWVKLEGNNPAGSIKDRTALSMIQQAELRGEISPGDVLIEATSGNTGIALAMIAAVKGYHLKLLMPDNMSLERQASMRAYGAELILVSRAMGMEGARDLAQQMERNGEGKVLDQFNNPDNPLAHFTTTGPEIWQQTQGRITHFVSSMGTTGTITGVSRYLKSQSNRVQIIGLQPAENSHIPGIRRWSPAYLPGIFRKELVDQVLDITQKEAEDTMRLLAQKEGIFCGVSSGGAVAGALSIAAQNPGSVIVTIICDRGDRYLSTGVFN

SEQ ID NO: 39570 - DNA, 954 bp, Photorhabdus luminescens subsp. laumondii TTO1
  CDS (1)..(954): transl_table=11
atgaataaaatttacgaagataattctttgactattggtcgtaccccgttaattcgcctaaaacactttggcaatgggcgtattctggcaaaagtagaatcccgtaacccaagttttagtgtaaaatgtcgcattggttccaacatgatttgggatgctgaaaaacacggtatcctacaacccgggaaagagttggtagaacctaccagcggtaataccgggatagcccttgcttatgttgccgccgctcggggctacaaattaacgctgactatgccagaaaccatgagtattgagcgccgcaagctattgaaagcattgggagcgcaactggtgctgacggaaggcgctaaaggtatgaagggtgccattgagaaagctaacgagattaaagctagcgatcccgatcgttatattatcctgcaacagtttagcaatccggcaaacccggaaatccatgaaaaaaccacaggcccggaaatctgggaagacacagacggtgaagtagatgtatttgttaccggtgtagggactggcggtacattaacaggggttgcccgttacctgaaaaacaccaaaggtaaaaatatcaccacggttgctgtagagccggaagaatcacccgtcatcagccagactctggccggtgaagaagtgaaaccgggtccccataagattcaaggtattggtgcaggtttcattccagataaccttgatttgacactggttgatcgcgttttcaaaatcagcagtgaggaagctatcaaaaccgcacgtgaaatcatggtaaaagagggcattctggcaggtatctcctctggagccgccgttgcagcagcggtgaaactttctcaggaaccagaatataaagataaaaatatcgtcgtcattctggcttcatcaggtgaacgttatctaagcagtgtactgtttgctgacttgtctgatgaataa

SEQ ID NO: 39571 - protein, 317 aa, Photorhabdus luminescens subsp. laumondii TTO1
MNKIYEDNSLTIGRTPLIRLKHFGNGRILAKVESRNPSFSVKCRIGSNMIWDAEKHGILQPGKELVEPTSGNTGIALAYVAAARGYKLTLTMPETMSIERRKLLKALGAQLVLTEGAKGMKGAIEKANEIKASDPDRYIILQQFSNPANPEIHEKTTGPEIWEDTDGEVDVFVTGVGTGGTLTGVARYLKNTKGKNITTVAVEPEESPVISQTLAGEEVKPGPHKIQGIGAGFIPDNLDLTLVDRVFKISSEEAIKTAREIMVKEGILAGISSGAAVAAAVKLSQEPEYKDKNIVVILASSGERYLSSVLFADLSDE

SEQ ID NO: 39572 - DNA, 969 bp, Vibrio vulnificus YJ016
  CDS (1)..(969): transl_table=11
atgagcaaaatctacgaagacaactctctgactattggcaatactccactggttcgtttgaacaaggtgagtaacggtaaagtgctcgcgaaaattgaagcacgcaaccctagcttcagtgttaagtgccgtatcggtgcaaacatgatttgggaagcagaaaaagaaggcaaactgaaaccaggtgttgaattggtagaaccaaccagtggtaatactggtattgcactggcatttgttgcagccgctcgtggttacaagctgacactgacgatgcctgagtccatgagtctagagcgccgtaaactattgaaagcacttggtgcaaatctagagcttactgaagcggcgaaaggcatgaaaggcgcaatcgctaaagcagaagaaattgttgctagcaaccctgaaaaatacctacttcttcaacaattcaataacccagcaaacccagaaatccacgaaaaaaccactggtccagaaatctgggaagccacagatggcgctatcgatgtctttgttgctggtgtaggtactggtggtaccattactggtaccagccgttacatcaaaggtgagaaagggaaacaaattctttccgttgctgttgagccaacagaatctcctgtaatttctcaagcgctggcaggtgaagaaatcaagccagcaccacacaaaatccaaggtatcggcgctggtttcattcctggtaacctcgacttgtcactgattgaccgtgttgagaaagtgacatcggaagaagccattgaaatggctcgtcgcctaatggaagaagaaggtatcttggcgggtatttcatcaggagcagcagtagtggcagcaaaccgccttgctgaactccctgaattcgaaggaaaaaccattgtcactgtactacctagctctggtgaacgttacctaagtaccgccctatttgctggcatctttactgagaaagagaaccagcagtaa

SEQ ID NO: 39573 - protein, 322 aa, Vibrio vulnificus YJ016
MSKIYEDNSLTIGNTPLVRLNKVSNGKVLAKIEARNPSFSVKCRIGANMIWEAEKEGKLKPGVELVEPTSGNTGIALAFVAAARGYKLTLTMPESMSLERRKLLKALGANLELTEAAKGMKGAIAKAEEIVASNPEKYLLLQQFNNPANPEIHEKTTGPEIWEATDGAIDVFVAGVGTGGTITGTSRYIKGEKGKQILSVAVEPTESPVISQALAGEEIKPAPHKIQGIGAGFIPGNLDLSLIDRVEKVTSEEAIEMARRLMEEEGILAGISSGAAVVAANRLAELPEFEGKTIVTVLPSSGERYLSTALFAGIFTEKENQQ

SEQ ID NO: 39574 - DNA, 936 bp, Corynebacterium diphtheriae NCTC 13129
  CDS (1)..(936): transl_table=11
atggctaaaatttacgacagcatcctcgacaccgtgggcaataccccactgattaagctcaatcgcctcgacaaatacctccccggcaacgttgtggtcaaagttgagttttttaaccctgcaaattctgtgaaagaccgtattggtaaagcaatcgtcgacgcagcagaagcctccggtgatctcaagccaggtggcaccatcgttgaagcaacatccggcaacaccggtatcgctctcgcactcgtcggtgctgcccgcggctacaacgttgtgctcaccatgccagaaacgatgtccctcgagcgccgcgtcatgctacgcgcctatggtgcagagatcgttctcacctctggtgcagccggaatgcaaggcgccgtagacaaagcaaacgaaatcgtcgctgagcgcgacaacgccatcctcgccagccagttcaagaacgccgccaacccagaaattcaccgtcgtactaccggcgaagaaatctggaacgacaccgacggacaggtcgacatcttcgtcgcaggcgtgggtaccggcggaaccgtcaccggcgctggcgaaaccctgaagaagcacaacccagagatcaaggtctacgccgtcgagccagcagcctccgctctcctaaccaccggcaaggcaggcccacacaagatccaaggcctcggcgcaaactttatcccaagcgttctaaaccagaaggtctacgaagaagtcattaccgtaactaacgaggacgcaatctccacctcacgccagcttgccgcacaagaaggcatcctaggcggcatttctgccggcgccaacctcaaggcagcacttgagcttgcagcattgccagaaaacgagggcaagaccatcgtcaccgtcgtacctgactacggcgagcgctacgtatcaaccgtcttgttcgacgacatccgcgactaa

SEQ ID NO: 39575 - protein, 311 aa, Corynebacterium diphtheriae NCTC 13129
MAKIYDSILDTVGNTPLIKLNRLDKYLPGNVVVKVEFFNPANSVKDRIGKAIVDAAEASGDLKPGGTIVEATSGNTGIALALVGAARGYNVVLTMPETMSLERRVMLRAYGAEIVLTSGAAGMQGAVDKANEIVAERDNAILASQFKNAANPEIHRRTTGEEIWNDTDGQVDIFVAGVGTGGTVTGAGETLKKHNPEIKVYAVEPAASALLTTGKAGPHKIQGLGANFIPSVLNQKVYEEVITVTNEDAISTSRQLAAQEGILGGISAGANLKAALELAALPENEGKTIVTVVPDYGERYVSTVLFDDIRD

SEQ ID NO: 39576 - DNA, 999 bp, Rhodopseudomonas palustris CGA009
  CDS (1)..(999): transl_table=11
atgtccagcgcagcaaccgcatcgatcaaagccgtcgcagaagcaccagcccatcgtcccggccgcggccgagtgtacgagtcgatcgccgatgcttacggcgatacgccgctggtacgtctgaaccggctgccgcagcagcacggcgtcaaggcgacgatctatgccaagctcgagtacttcaatccggcgagcagcgtgaaggaccgtatcggtgcggcgatgatcgcggcgctggagcaggaaggtatcatcaagcccgacaccgtgctgatcgaaccgacctccggtaacactggtatcgcgctggccttcgtggcggccgccaagggctaccggctgaagctggtgatgccggaatcgatgtcgatcgagcgccgcaagatgctcgccttcctcggtgccgaactggtgctgaccgaagccgccaagggcatgaagggcgcggtcgccaaggccgaagagctggtggcggcgaccccgaacgccgtgatgccgcagcagttcaagaacctcgccaacccggcggtgcatcgccgcaccaccgcggaggagatctggaacgataccgacggcgcggtcgatatcttcgtggccggcgtcggcaccggcggcaccgtctcgggcgtcggccaggtgctgaagccgcgcaaggcgtcgctgaaggtggtggcggtcgagccggaggaaagcccggtgctgtcgggcggcgcgcccggcccgcacaagatccagggcatcggcgccggcttcgtgccggacatcctcgaccgctcggtgatcgacgaggtggtcaagatcccgagcgccaccgcgattgaaacctcgcgcgcgctggcgcgccacgaaggcatcccgggcggcatctcgtcgggcgccgcgatcgccgccgcgatcgaactcggcaagcggccggaaaatgccggcaagacgatcgtggcgatcgtgccgtcgttctcggaacgctacctgtcgacggtgctgttcgaaggcgtctga

SEQ ID NO: 39577 - protein, 332 aa, Rhodopseudomonas palustris CGA009
MSSAATASIKAVAEAPAHRPGRGRVYESIADAYGDTPLVRLNRLPQQHGVKATIYAKLEYFNPASSVKDRIGAAMIAALEQEGIIKPDTVLIEPTSGNTGIALAFVAAAKGYRLKLVMPESMSIERRKMLAFLGAELVLTEAAKGMKGAVAKAEELVAATPNAVMPQQFKNLANPAVHRRTTAEEIWNDTDGAVDIFVAGVGTGGTVSGVGQVLKPRKASLKVVAVEPEESPVLSGGAPGPHKIQGIGAGFVPDILDRSVIDEVVKIPSATAIETSRALARHEGIPGGISSGAAIAAAIELGKRPENAGKTIVAIVPSFSERYLSTVLFEGV

SEQ ID NO: 39578 - DNA, 1398 bp, Rhodopseudomonas palustris CGA009
  CDS (1)..(1398): transl_table=11
gtgagcctggcccgtcttgccacaccgaaggatcgcacgcccaaggggctgatcgatctgatcggaaacacgcccctggtgcagctgacacggctggatgccggcccgtgccggttgttcgccaaactcgaaggccagaatccaggcggttcgatcaaggatcgaccggcgctggcgatgatcgaggcgttcgagcgcagcggcgagctgcggccgggcgggaccctggtcgaagccaccgccggcaacaccggcctcgggctggcgctgatcgccgcgctgaagggctaccggctggttctcgtcatcccggacaagatgagccgcgaaaaggtgctgcacctgaaggcgatgggcgccgaggtggtgatgacccgctccgacgtcggcaaggggcacccggcttactatcaggatcttgctcagaagatcacttccgaaacccctggcgcggtgttcgtcaatcagttcgccaatccggccaatccgctcgcgcatgaatacggcaccgcgccggaaatctgggagcagatggatcggcgcgtcgacgcggtggtgtgcggcatcggctccggcggcacgctgacagggatcgcgcggttctttcagcgcgcctcgccatcgaccgagatcattctggccgatccgaaaggctccgtgctggtcgacgtggtcgaagggcgggagccgggccctgtcggaagctggctggtcgagggcatcggcgaggacttcgtcccgagcaatgccgaactgaagctggtcacacgcggctacaccgtgaccgacgcagaatccttccacgctgcgcgtgagctgcttcgacgtgaagggattctcgccggctcgtcgtcgggcacgctactggcggctgcgctgcgctattgccgcgagcagacgcggccgaagcgggtggtgacgctgctgccagacggcggcaacaaatatctgtcgaagatgttcaacgatacctggatggccgatcaaggcttcgtaccgcgccggcatgacggggatctgcgcgacctgatcgtgcgtcgccatgacgagggcgcttcgatcacggtcgctcccgaggatacgctgaacttcgcctattcgcggatgaagctgtacgaggtgtcgcaactgccggtgctggtcgacgaccgcgtcgtcggcatcatcgacgagtccgatctgttgatggcgacgatcggcgatccggccaaattcgccgagccggtgcactcggcgatgagcaagcgggtcgaaaccgtcgaggcgtcggcgccattcgagagcctgatgccggtgttcgatcgcggcctggtcgtcgtggtcgtcgacggctcgcgcttcctcggcctgatcaccaggatcgacctgatcaaccatttgcgtagcaaggtgcactga

SEQ ID NO: 39579 - protein, 465 aa, Rhodopseudomonas palustris CGA009
MSLARLATPKDRTPKGLIDLIGNTPLVQLTRLDAGPCRLFAKLEGQNPGGSIKDRPALAMIEAFERSGELRPGGTLVEATAGNTGLGLALIAALKGYRLVLVIPDKMSREKVLHLKAMGAEVVMTRSDVGKGHPAYYQDLAQKITSETPGAVFVNQFANPANPLAHEYGTAPEIWEQMDRRVDAVVCGIGSGGTLTGIARFFQRASPSTEIILADPKGSVLVDVVEGREPGPVGSWLVEGIGEDFVPSNAELKLVTRGYTVTDAESFHAARELLRREGILAGSSSGTLLAAALRYCREQTRPKRVVTLLPDGGNKYLSKMFNDTWMADQGFVPRRHDGDLRDLIVRRHDEGASITVAPEDTLNFAYSRMKLYEVSQLPVLVDDRVVGIIDESDLLMATIGDPAKFAEPVHSAMSKRVETVEASAPFESLMPVFDRGLVVVVVDGSRFLGLITRIDLINHLRSKVH

SEQ ID NO: 39580 - DNA, 1038 bp, Rhodopseudomonas palustris CGA009
  CDS (1)..(1038): transl_table=11
atgagcatcaagaacgacgtcgtcgacgccatcggcaacacgcccctgatcaaattgaagcgcgcgtcggaggcgaccagctgcaccattctcggcaaggccgagttcatgaatccgggccagtcggtgaaggatcgggctgcgctgttcatcatccaggatgcggtgaagcgcgggacgctgcgtcccggcggcgtcgtggtcgaaggcaccgccggcaataccggcatcgggctggcactggccgccaatgcactcggtttccgtaccgtaatcgtgatcccgaacacgcagagccaggaaaagaaggacatgctgcggctatgcggcgccgagcttatcgaggtgcccgccgtcccctacgctaatcccaacaactacgtgaagctgtccggccgtctcgccgcgcagctcgccgaaaccgaaccgaacggagcgatctgggccaatcagttcgacaacgtcgccaaccgccaagcccatatcgagacgaccgcaccggaaatctggaatcagaccgatggcaaggtcgacggcttcgtcgccgcggtcggctccggcggcacgctggccggcgtgtcgatcggtctcaagcagttcaatccgaaagtccgcgccgtgctcgccgacccgttgggctcggcgctgtacaattactacaagaacggcgcgctgaaatcggaaggctcctcgattaccgaaggcatcggccagggccgcgtcaccgccaatctggaaggcgcgcagatcgacgacgcctatcagatccccgacgatgaagcggtgccgctgatctacgatctgctcgaacacgaaggactgtgcctcggcggctcgagcggcatcaacgttgccggcgcgatccgcctcgccaaggatctcggccccggccataccatcgtgaccatcctgtgcgattacggcagccgttatcagtccaagctgttcaacccggacttcatgcgcagcaagaacctgccggtgccggactggatggagaccaagagcacgattcaggtgccgttcgaaccggtgtga

SEQ ID NO: 39581 - protein, 345 aa, Rhodopseudomonas palustris CGA009
MSIKNDVVDAIGNTPLIKLKRASEATSCTILGKAEFMNPGQSVKDRAALFIIQDAVKRGTLRPGGVVVEGTAGNTGIGLALAANALGFRTVIVIPNTQSQEKKDMLRLCGAELIEVPAVPYANPNNYVKLSGRLAAQLAETEPNGAIWANQFDNVANRQAHIETTAPEIWNQTDGKVDGFVAAVGSGGTLAGVSIGLKQFNPKVRAVLADPLGSALYNYYKNGALKSEGSSITEGIGQGRVTANLEGAQIDDAYQIPDDEAVPLIYDLLEHEGLCLGGSSGINVAGAIRLAKDLGPGHTIVTILCDYGSRYQSKLFNPDFMRSKNLPVPDWMETKSTIQVPFEPV

SEQ ID NO: 39582 - DNA, 924 bp, Geobacter sulfurreducens PCA
  CDS (1)..(924): transl_table=11
atgccgctactaaccaacgacaaggtaatcgagcagatcggcaatacccctctcctgagactggcaaagcttgagcgaaagggttcggcagccgtattcggcaaggcggagttcttcaaccccggcggcagcatcaaggatcgtatctgcctcgccatgatcgaggccgccgagcgtgacggcaccctcaagcccggcgccacggtggtggagcccaccagcggcaatacgggcatcggcctgtccatgatctgcgcggtcaaggggtacaagctcatcctgaccatgcccgataccatgactgtggagcggcggcggctgctggcggcgtacggcgccgaactgatcctcacccccggcgcccaggggatgcgcggggccgttatgaaggcggaggaactggcggcccagccggggcacgtgatgatgcaccagttcaagaacccggcaaacccggatatccatcgccggaccacggggccggagatcgtggaaaccctgtccggcacgaccatcgacgccttcgtggcgggggtgggcaccggcggcaccatcaccggcgtcggcgaggtgctcaggacgcacaactcctcggtgcgggtcgtggcggtggagccggctgattcgccggtcctctcgggaggccagcccggtccccacaagatccagggaatcggagccggcttcgttcccgatgtgctcaataccaaggtgtatgacgagatcatcaccgtttccaacgacgatgcctatgccaccgtgcgcgacttggcccgcgaggagggcatcctcgtcggcatctcctcaggtgccaacgtcttcgccgcccttcaggtggctgccaagctcgggccgggcaagaacgtggtaacgatcctgtgcgacaccggcgagcggtacctttccaccggggtgttcgactga

SEQ ID NO: 39583 - protein, 307 aa, Geobacter sulfurreducens PCA
MPLLTNDKVIEQIGNTPLLRLAKLERKGSAAVFGKAEFFNPGGSIKDRICLAMIEAAERDGTLKPGATVVEPTSGNTGIGLSMICAVKGYKLILTMPDTMTVERRRLLAAYGAELILTPGAQGMRGAVMKAEELAAQPGHVMMHQFKNPANPDIHRRTTGPEIVETLSGTTIDAFVAGVGTGGTITGVGEVLRTHNSSVRVVAVEPADSPVLSGGQPGPHKIQGIGAGFVPDVLNTKVYDEIITVSNDDAYATVRDLAREEGILVGISSGANVFAALQVAAKLGPGKNVVTILCDTGERYLSTGVFD

SEQ ID NO: 39584 - DNA, 927 bp, Geobacter sulfurreducens PCA
  CDS (1)..(927): transl_table=11
atggagcatccccctttttcgcttgccggcagcatcggcgccacccccctcgttgagctgcgacacctgaacccgaatccgcgggttcgcatcctggccaaattggaggggaataacgtgggcggttccgtcaaggaccgtccggctctctacatgctggccaaggcggaggagtccggcgagttggtgccggagaagaccatcctcgagccgacctccggcaataccggcatcgctctggccatgctcggcacggtcaagggataccgggtcaagctcgtgatgcccgcctgcgtaagccttgaacggcgcgccgtgctggaggcctatggcgccgagttggtcctctctccccacgacgaggccaccgacggagccatccggctggcccaccgcatcctggaagaggagccggaccgctactacatgcccaaccagtacgccaatcccaacaatcccctggctcactatgagaccactgcgcctgagattttccgggacaccggcggtgccgtcgacttcttcgtggccggcatggggacgggcggcaccttgatgggaacgagccgctatttccgggagaagaagccttccgtgcgcatcgtgggcgtggagccgcgattggggcacaaggtgcaggggctcaagaacatgcaggaagccatcgtgcctcccatctaccaccccgaggccctggacctgaagctgacggtccatgacgagccggccttcgacacggcccgtgagctggccgcccgcgagggccttttcgtggggatgtccagcggcgccgccgtggcgggtgccgtccaggtggcacgggatgccccggcaggcagcaccatcgtagtgctcctgccggaccggggggaccgctatctcagcacggtcctgttccggtcggtttgcggcaagtgccctccctga

SEQ ID NO: 39585 - protein, 308 aa, Geobacter sulfurreducens PCA
MEHPPFSLAGSIGATPLVELRHLNPNPRVRILAKLEGNNVGGSVKDRPALYMLAKAEESGELVPEKTILEPTSGNTGIALAMLGTVKGYRVKLVMPACVSLERRAVLEAYGAELVLSPHDEATDGAIRLAHRILEEEPDRYYMPNQYANPNNPLAHYETTAPEIFRDTGGAVDFFVAGMGTGGTLMGTSRYFREKKPSVRIVGVEPRLGHKVQGLKNMQEAIVPPIYHPEALDLKLTVHDEPAFDTARELAAREGLFVGMSSGAAVAGAVQVARDAPAGSTIVVLLPDRGDRYLSTVLFRSVCGKCPP

SEQ ID NO: 39586 - DNA, 990 bp, Bdellovibrio bacteriovorus HD100
  CDS (1)..(990): transl_table=11
atgagaatatattctgatatcacgaaaaccattggtcaaacccccttaatcgaaatgcaaagaatcggcaaaggtttgccggggcgtcttctgctaaagcttgagttctttaatcccctgggatccgtcaaagaccgcatcggtctggcgatgatcgaggacgccgagcgctcaggtcagctaaagcctgggatgaaaattatcgaacccacaagcggcaacacaggcattgcgctggcttttgtggccgctgccaaaggttatgatatcactctgaccatgccagaaaccatgtctcaagagcgccgcacgttgctgctgatgctgggggcgaaaattattctgactccggggcccttgggtatgaagggggccattgccaaagccatggagcttctggaacaaacacccaatgcctggatgcctcgtcagtttgacaatccggccaatccggccattcacaaagaaaccacggctcttgaaatctggaacgacaccgatggcaaggtcgatatggtcgttagcggcgtcgggacttccggcaccatcactggtgtgggcaccgtgcttaaagccaaaaacaaaaacatcaaaatcatcgctgtcgaaccggctgaaagcccggtgctttccggcggtaaacccgggcctcacaagatccagggcctgggggcaggttttgttcccagcgtgatggacagatctgttgtcgatggggtggagcaggtgtcttcggaagagtccataaaagtggctcgggaagtgatcaaaaaagaaggcatcccggtggggatttcctcgggggcggcgatcagtgccggtcttcgccaagcggcgaaagaggaaaaccgcggtaagaatatcgtcgtgattattccaagcaccaccgaacggtatctgtcgaccttgttggccgaacaggaacgggcagaggcattgagtttgcctgtcgctacggtggatgaaaattacctgagtaaagtgaagtaa

SEQ ID NO: 39587 - protein, 329 aa, Bdellovibrio bacteriovorus HD100
MRIYSDITKTIGQTPLIEMQRIGKGLPGRLLLKLEFFNPLGSVKDRIGLAMIEDAERSGQLKPGMKIIEPTSGNTGIALAFVAAAKGYDITLTMPETMSQERRTLLLMLGAKIILTPGPLGMKGAIAKAMELLEQTPNAWMPRQFDNPANPAIHKETTALEIWNDTDGKVDMVVSGVGTSGTITGVGTVLKAKNKNIKIIAVEPAESPVLSGGKPGPHKIQGLGAGFVPSVMDRSVVDGVEQVSSEESIKVAREVIKKEGIPVGISSGAAISAGLRQAAKEENRGKNIVVIIPSTTERYLSTLLAEQERAEALSLPVATVDENYLSKVK

SEQ ID NO: 39588 - DNA, 1047 bp, Bdellovibrio bacteriovorus HD100
  CDS (1)..(1047): transl_table=11
atgtcacatatttacgactccattctggagaccatcggaaacacaccgattgtccgccttaaaaacgttaccaagggttcaaaacaccagttctttgcgaaaatcgagtatttcaatccaggtggcagcatcaaagatcgcgtcgctgtggcgatgattgaagaggcggaaaaacgcggcgatctgaaggcgggtggcactattgtcgaagccacttccggcaataccggtgtcggcctggctttggcggcggcggttaagggttataagtgcattttcgtgatgccagaaaagatgagtgaagaaaaaagagctattttgcgtgcctatggcgccaaagttgtcatcactccgatggtcgaccctgagcatccgctgagtcactattcagtgtctcagaaaattgcaaaagaaactcccggagcatttctaacgaaccagtatcacaatcctgacaaccctcagcgtcactatcaaaccacgggtccagaaatctggaagcagatggatggaaaagtggatgttgtggtcggcggggctggcactggaggcacactttccggggttgctaaatacctgaaagaaatgaatccaaacatcaaagcaatctgtgcagatccaattggaagcattctgtatgatctttattatcataagaagatcgtggatccaccgggctcttacaaagtggaaggtgtcggcgaagatatgctgccggacaacgttcacttgaatatttatgatggctttgaacgagtgtctgacccggaagcttttacgatgacccgtcgcctggtggcggaagaaggtcttcttgtggggccttccagtgctttggccctggtgggtgcgatgaaagctgcggaaaagatcgaaaagccatcaaatattgtggtggttttcccggacagcggacgagcgtatctgagcaaggccttcaatgatacatggatgattgaaaatgctcttctgaaaccggaagaagcgaaaaatgtctttaatcgcgtggtgaatgccgccgattttctggcagaactgaataagtag

SEQ ID NO: 39589 - protein, 348 aa, Bdellovibrio bacteriovorus HD100
MSHIYDSILETIGNTPIVRLKNVTKGSKHQFFAKIEYFNPGGSIKDRVAVAMIEEAEKRGDLKAGGTIVEATSGNTGVGLALAAAVKGYKCIFVMPEKMSEEKRAILRAYGAKVVITPMVDPEHPLSHYSVSQKIAKETPGAFLTNQYHNPDNPQRHYQTTGPEIWKQMDGKVDVVVGGAGTGGTLSGVAKYLKEMNPNIKAICADPIGSILYDLYYHKKIVDPPGSYKVEGVGEDMLPDNVHLNIYDGFERVSDPEAFTMTRRLVAEEGLLVGPSSALALVGAMKAAEKIEKPSNIVVVFPDSGRAYLSKAFNDTWMIENALLKPEEAKNVFNRVVNAADFLAELNK

SEQ ID NO: 39590 - DNA, 972 bp, Arabidopsis thaliana
  CDS (1)..(972)
atggaagaccgcgtcttgatcaagaacgatgtcactgaattgataggtaacacaccaatggtgtatctaaataaaattgtggatggttgtgtggctcgtattgctgccaagcttgagatgatggagccttgctctagcatcaaagatagaatcgcatatagtatgatcaaagatgctgaagacaaaggattgattactccgggaaagagtacattgattgaggcaacgggtggtaacaccgggattggtttagccagcatcggggcttcaagaggttataaagtgatccttttgatgccttcaacaatgagtttagaaaggagaatcattctaagagcattaggtgcagaggttcatctcactgacattagcataggcattaaaggacagttggagaaagctaaagagatattaagcaaaactcccggtggttacataccacaccagtttattaatcctgaaaatccagagattcattatagaaccacgggtccggagatttggagagattcagcagggaaagtagatatcttagtcgccggtgttggaactggtggaacggttactggaacagggaagtttcttaaagaaaagaacaaagatattaaggtttgtgtggtggaaccttccgaaagtgcggtactcagcggaggaaaaccaggtccacatttgatccaaggaataggctctggtgaaattccagccaatttggacttaagcattgttgatgaaatcattcaagtgactggtgaggaagctattgaaacaaccaagcttcttgctatcaaagaaggattattggttggaatatcctctggagcctcagctgcggctgcgttaaaggttgcaaagcggcctgaaaacgtagggaaactcattgtggttatttttcctagtggaggagaacgttatttatcgactgaattgttcgagtcagtcagatatgaagctgagaatttgccagttgaatga

SEQ ID NO: 39591 - protein, 323 aa, Arabidopsis thaliana
MEDRVLIKNDVTELIGNTPMVYLNKIVDGCVARIAAKLEMMEPCSSIKDRIAYSMIKDAEDKGLITPGKSTLIEATGGNTGIGLASIGASRGYKVILLMPSTMSLERRIILRALGAEVHLTDISIGIKGQLEKAKEILSKTPGGYIPHQFINPENPEIHYRTTGPEIWRDSAGKVDILVAGVGTGGTVTGTGKFLKEKNKDIKVCVVEPSESAVLSGGKPGPHLIQGIGSGEIPANLDLSIVDEIIQVTGEEAIETTKLLAIKEGLLVGISSGASAAAALKVAKRPENVGKLIVVIFPSGGERYLSTELFESVRYEAENLPVE

SEQ ID NO: 39592 - DNA, 924 bp, Bacillus cereus ATCC 10987
  CDS (1)..(924): transl_table=11
atgcgagtggcacaatcagtttcagaattaatcgggaaaacgccgatcgttaagttgaaccgcatcgtagaatcagacagcgcagatatatacttaaaattagaatttatgaatccagggagcagtgttaaagatcgtatcgcattagctatgattgaagatgctgagaaaaaaggattattaaaagaaggcgatacaatcattgaaccgacaagtggtaacacaggaattggtttagcgatggtagcagctgctaaaggatataaggcaattttagtaatgccagaaacaatgagtattgaacgtcgtaatttattacgtgcttacggtgcggaattagtattgactccaggtcctgaaggaatgggtggagcaattcgtaaagcgactgaattagcaaaagagaatggttacttcataccacaacagttcaaaaatcaatcgaatccagaaattcaccgtttaacaacaggtccagaaattgttgaacaaatgggcgaccaattagatgcgtttattgcaggtattggtacgggtggaacgattactggtgctggtgaagtgctgaaggaagcgtataaagatattaaaatttatgcagtagaacctgcggattcaccagtattatctggtgggaaaccaggtccacataaaatccaaggaattggggctggatttatcccagagacattggatgtagaagtatatgatgaaattgttcaagtgaaaacggagcaagcgtttgaatatgcaagaagagtggcgaaagaggaaggtattctagttggtatctcttctggagcagttatttatgcagcaacagaaattgcgaaaaagttaggcaaagggaaaaaggtacttgttattatcccaagtaacggtgaacgttatttaagtacaccactttatcaatttgagtcttaa

SEQ ID NO: 39593 - protein, 307 aa, Bacillus cereus ATCC 10987
MRVAQSVSELIGKTPIVKLNRIVESDSADIYLKLEFMNPGSSVKDRIALAMIEDAEKKGLLKEGDTIIEPTSGNTGIGLAMVAAAKGYKAILVMPETMSIERRNLLRAYGAELVLTPGPEGMGGAIRKATELAKENGYFIPQQFKNQSNPEIHRLTTGPEIVEQMGDQLDAFIAGIGTGGTITGAGEVLKEAYKDIKIYAVEPADSPVLSGGKPGPHKIQGIGAGFIPETLDVEVYDEIVQVKTEQAFEYARRVAKEEGILVGISSGAVIYAATEIAKKLGKGKKVLVIIPSNGERYLSTPLYQFES

SEQ ID NO: 39594 - DNA, 1431 bp, Magnaporthe grisea 70-15
  CDS (1)..(1431)
atgtctgaagagctggcggagcagctgggtattgcggcgacactcggcttccaagatttttatccttactgggagaggcggtatggtcgacggaaaagaggaggtgacgtgacaggctacggcgatgggttcaacgatttccagtccaagacgaccctcctggagagacagcacgccgctagacggcgtcggtccacactcctatcaagtatcggagctggcccggtgctgctacaggaccacgagtcagacccaggggacaacccgggcccgtcacaaccagatattcgcgacggcatcgaggcctgcatcggcaacacgcccatgatcaagatccgatccctctccgaggcgacgggctgcacgatcctcgccaaggcagagttcctcaacggcgcgggtggcagccccaaggaccgcgtggctctcaacatgatcctgacggccgaggagaccgggcacctggtcccgggccgcggcgacaccatctacgagggcaccgtgggcagcacgggcatcagcctggccatgttggcgcgcgcccgcggctaccgctgccacatctgcatgcccgatgacgtggcccgcgaaaagtcggacctgctgctgcacctgggcgccaccgtcgagcgcgtccccgtcgcccccatcaccgacaagcgccactttgtcaacctggccaggacccgcgccgaggcccacaccgccgccgccgatgatgacagcgtcggcttcttcgccggccagttcgaaaaccccgccaactggcaggcgcactggaactccaccggccccgagatcatcgagcagacgggcggccgcgtcgacgcctttgtggccggcgccggcaccggcggcaccatcgcgggcgtcgccgtgtttctcaaggaggaggcccgcatgaacgccacccgcgtggtgctagcagacccgcagggtagcgggctgtacaacaaggtgctcaacggtgtcatgtactcgccatcggagcgcgagggaacgcggcggcggcagcaggtggactcggttgtcgaggggatcggcctgaaatgggtgacgggcaactttgagcgcgggagggacctggtggacgacgcagtgcgcgtcaccgacgagcaggcctgcgccatggccaggtggctggtcgagcacgacggcatctttgccggcagcagcagcgccgtcaactgcgccgccgccgtcgtcacggccatgcgcatgcccaggggcagccaggtcgtcaccatcctgtgcgactctggctcgaggcacctcagccgcttctataagcaggtggccgacaaagggctcgagggcgacgtgcgcaaggagggcgccgagggtggggagaagccaagcagcccggaggatttactcactttgcttggactgaagcctcgagacgattcacatcaactcggaaccccctga

SEQ ID NO: 39595 - protein, 476 aa, Magnaporthe grisea 70-15
MSEELAEQLGIAATLGFQDFYPYWERRYGRRKRGGDVTGYGDGFNDFQSKTTLLERQHAARRRRSTLLSSIGAGPVLLQDHESDPGDNPGPSQPDIRDGIEACIGNTPMIKIRSLSEATGCTILAKAEFLNGAGGSPKDRVALNMILTAEETGHLVPGRGDTIYEGTVGSTGISLAMLARARGYRCHICMPDDVAREKSDLLLHLGATVERVPVAPITDKRHFVNLARTRAEAHTAAADDDSVGFFAGQFENPANWQAHWNSTGPEIIEQTGGRVDAFVAGAGTGGTIAGVAVFLKEEARMNATRVVLADPQGSGLYNKVLNGVMYSPSEREGTRRRQQVDSVVEGIGLKWVTGNFERGRDLVDDAVRVTDEQACAMARWLVEHDGIFAGSSSAVNCAAAVVTAMRMPRGSQVVTILCDSGSRHLSRFYKQVADKGLEGDVRKEGAEGGEKPSSPEDLLTLLGLKPRDDSHQLGTP

SEQ ID NO: 39596 - DNA, 1500 bp, Nasonia vitripennis
  CDS (1)..(1500)
atggagatggaattgatcagacctgataaccccagccgctgcacatggaagctgaatagtacggacagtccgcatacggatcggagcaagcaaatggacaggaatacattattgccgaatatcttgcatactattggacagacgccacttgttcgccttaacaagattccaaaagctcatggcattaagtgtcaaatgttcgctaaatgcgaatttatgaaccctggaggttcagtgaaagatcgcattggattcagaatggttgaagatgcagaagcaaagggaattttgaagcctggctgtacactcattgaaccaacaagtggaaatactggaataggattggcgatggcagcggctgtcaaaggttacaagtgcatcatagttatgccggagaagatgtctaatgagaaggtctatactcttcgcgccttaggcgccgaaatcgtacgtactcctaccgaagccgcatggaacagccccgaaggacacattgcaacatctcaaaggcttcaaaagacaattcctcatagcgttattttagatcagtatacgaactcggggaatcctttggctcattacgacacgactgcacttgagatttgggagcaggcagaaggaaaaatcgattacatggttgctggagcaggaaccgggggaactatcagtggcattggccgaaaactacgagaattatcgcctcacacgaaaattattgccgtagatccagaaggaagtttactagcagagcccgccgaattgaatgatactgcagtgcagttttacgatgtagaaggcataggatacgattttgttcctaccgttttggatcgcaacgttgtagatgtttgggtcaaaacgaaagatattgactcattccacttagccaggcagcttataaaggatgagggattactctgtggcggaagcagtggtgctgctttatacgcagcacttcaaattgccaagggtctgccagaagacaagcgagtcgtcgttcttctgccagatggaatccgtaactatatgacgaaatttgtttccgatttgtggatggaatctagaaatttcttggatccccccaaaccagtagaaagcaacaagtggtggtgggatttacctgtttctaaaataccattcaagaaacctgttattctctcaaatggttctacatgtgatgaagcagtaaaaatactgagaaacggaagtttccaccaaatgccaatggcagatgctgaaggcaacatcaagggctttatcactttggataaagttctgagtagcctcattgctggagaagtgaaagaatccgatccagcggaaaaggttctcattaagcagtatagaaaagtcgctactgccacaactttaggaagattatctagaatgcttcagaaagacatttatgcggttgtcctagatgaacacaacaatggtgctcttataggaattttgactcaaatcgatctcttagattacatttgcaatggacctcattaa

SEQ ID NO: 39597 - protein, 499 aa, Nasonia vitripennis
MEMELIRPDNPSRCTWKLNSTDSPHTDRSKQMDRNTLLPNILHTIGQTPLVRLNKIPKAHGIKCQMFAKCEFMNPGGSVKDRIGFRMVEDAEAKGILKPGCTLIEPTSGNTGIGLAMAAAVKGYKCIIVMPEKMSNEKVYTLRALGAEIVRTPTEAAWNSPEGHIATSQRLQKTIPHSVILDQYTNSGNPLAHYDTTALEIWEQAEGKIDYMVAGAGTGGTISGIGRKLRELSPHTKIIAVDPEGSLLAEPAELNDTAVQFYDVEGIGYDFVPTVLDRNVVDVWVKTKDIDSFHLARQLIKDEGLLCGGSSGAALYAALQIAKGLPEDKRVVVLLPDGIRNYMTKFVSDLWMESRNFLDPPKPVESNKWWWDLPVSKIPFKKPVILSNGSTCDEAVKILRNGSFHQMPMADAEGNIKGFITLDKVLSSLIAGEVKESDPAEKVLIKQYRKVATATTLGRLSRMLQKDIYAVVLDEHNNGALIGILTQIDLLDYICNGPH

SEQ ID NO: 39598 - DNA, 1128 bp, Magnaporthe grisea 70-15
  CDS (1)..(1128)
atgtttcgccacggaatccgtaggtttacaacaagctcgatacgggcggcagttgcagcggccgccgagccgacacagcataccatcaatgtgtcgagggcacaaggcgtagcaaagggcttgacaggagccatcggcaacacccccctgatcaggctaaacaagctgtccgaagagaccggctgtgagatcctgggcaaggccgagtttatgaaccctggaggttcggtaaaggaccgtgcggctctgtacgtggtcaaggatgccgaggagcgcggcctgctgcggcccggaggcaccgtggtcgagggcacggccggtaacactggcatcgggctggcgcacgtgtgccgctccaagggctacaagctcgtcatctacatgcccaacacgcagtcgcagggcaagatcgacctgctccgcctgctgggcgccgaggtctacccggttcccgccgtggcctttgacaacccgcaaaactacaaccaccaggcccgccgccacgccgagcgcctcgacaacgccgtctggaccaaccagttcgacaacacggccaatcgccgggcccacatcgagaccaccggcccggaaatctgggcccagaccgacggcaaggtcgacgcattcacctgcgccacgggcaccgccgggacactggccggtgttacgcggttcctcaaggatgcgagcggcggccgcgtcaagtcctttctggccgacccgccgggatccgtgctgcacagctacattgtgagcggcggcaagctcatcgagcggaccggatcgagcatcaccgagggcatcggccaggggcgcatcaccgacaacctgcagccggacctggcgctgctcgacggcgcgctgcacattagcgatgagaagagcatagagatggtctaccgctgcctcgacgaggagggcctgtacctgggcgcgtcgtcgtcgctcaacgtcgtcgccgccaaggaggtcgccgagaagctgggcaagggccacaccgtcgtcaccatgttgtgcgacggagcctacaggtacgccgaccgcctgttttcgagaaagtggctggaggacaagaagctgctctcggcgataccaaagcacttggagaagtacattgttctgccttga

SEQ ID NO: 39599 - protein, 375 aa, Magnaporthe grisea 70-15
MFRHGIRRFTTSSIRAAVAAAAEPTQHTINVSRAQGVAKGLTGAIGNTPLIRLNKLSEETGCEILGKAEFMNPGGSVKDRAALYVVKDAEERGLLRPGGTVVEGTAGNTGIGLAHVCRSKGYKLVIYMPNTQSQGKIDLLRLLGAEVYPVPAVAFDNPQNYNHQARRHAERLDNAVWTNQFDNTANRRAHIETTGPEIWAQTDGKVDAFTCATGTAGTLAGVTRFLKDASGGRVKSFLADPPGSVLHSYIVSGGKLIERTGSSITEGIGQGRITDNLQPDLALLDGALHISDEKSIEMVYRCLDEEGLYLGASSSLNVVAAKEVAEKLGKGHTVVTMLCDGAYRYADRLFSRKWLEDKKLLSAIPKHLEKYIVLP

SEQ ID NO: 39600 - DNA, 1338 bp, Gibberella zeae PH-1
  CDS (1)..(1338)
atggcgctcagcgaccatcccaaagcttacggctctgctgccgtcgcctttgctttcacaaccggtatcctcgtcactctgggcttcaaggacttttatccagatcttgagcgcaggttccagcgcaagaggcgcgcaaataccggcggcgggagaagatctagtgtcttctggggtgaccccgtggaactcgaggaccatgaatctctaccttcgtcgccaactttctacgatggcgcacgaaatggcttggctgatgggatagaagccaccatcggaaacactcctcttatcaaagtacaatctttatctgaagctacagggcggactatcatggcaaaggctgagttccttaacggtgctggaaactcccccaaggatcgtgtggcgcttaacatgattcgtgaggcagaagctcaaggtcttctcacaccacacaagggcgatactatctatgaaggaacagttggaagtacaggtatctctctggcaactcttgcgcgcgccatgggctacagggctcatatctgcatgcccagcgacatggctcttgagaaatccgacctactacttcatctcggcgcaacggtcgagcgagttacgcctgcgcctattaccagtcccgatcacttcgtcaaccttgcgcgacgaagggcggaggaacacgctagcaaggccaacgatggcagcaagggattctttgcgaatcagttcgagtccgaagctaactggaaagcgcacttcaacaccacgggccctgagatttggggacagacgaacggtgaactggatgcttttgtggcgggtgcaggcacaggaggaacagtatcaggcgtcgcaaagtatctcaaagaagaaaaggaaaagtcagatatcaaagtggtcctcgccgatcctcagggcagcggtctctacaacaaggttcgccatggtgtcatgtactcgtcgacagagcgcgaaggcactcgtcgcagacagcaggttgacaccatggtcgagggtattggcattacacgcttaactgagaactttgaagcaggccgtgaactcattgacgatgctgtgcgggtgacagatgagcaagcctgtcgtatggctcgctggctagttgagcacgacggtatctttgttggcagcagcagttccgtcaactgtgtcgccgccgtcgaaacagctatgagactgcccaagggaagccgtgtcgtgacaattctttgcgactctggaacaaggcatctcagcaagttctggaagcatatcaaggaaatgggaattgaaggcgaggaggaggcgactgatctgtttaccgagctaggcatacccggccacaaggcatga

SEQ ID NO: 39601 - protein, 445 aa, Gibberella zeae PH-1
MALSDHPKAYGSAAVAFAFTTGILVTLGFKDFYPDLERRFQRKRRANTGGGRRSSVFWGDPVELEDHESLPSSPTFYDGARNGLADGIEATIGNTPLIKVQSLSEATGRTIMAKAEFLNGAGNSPKDRVALNMIREAEAQGLLTPHKGDTIYEGTVGSTGISLATLARAMGYRAHICMPSDMALEKSDLLLHLGATVERVTPAPITSPDHFVNLARRRAEEHASKANDGSKGFFANQFESEANWKAHFNTTGPEIWGQTNGELDAFVAGAGTGGTVSGVAKYLKEEKEKSDIKVVLADPQGSGLYNKVRHGVMYSSTEREGTRRRQQVDTMVEGIGITRLTENFEAGRELIDDAVRVTDEQACRMARWLVEHDGIFVGSSSSVNCVAAVETAMRLPKGSRVVTILCDSGTRHLSKFWKHIKEMGIEGEEEATDLFTELGIPGHKA

SEQ ID NO: 39602 - DNA, 1554 bp, Gibberella zeae PH-1
  CDS (1)..(1554)
atggcgtctcaggttcctcacgtcttgcctcgcgctgctacagtccattccgcgactgaacttatcggcaacacccctcttgtccgactcaacaagatcccccagtcgctgggtatcgagtgcgatgtctacgtcaagccagagctcttcagcgctggtggtagcgtcaaggatagaatcgctctgcgcatgatcgaagaggccgagaagagcggccgcatcaagcctggtgatactttgatcgagcccaccagtggaaacactggtattggtttggctctcgtcggtgccatcaagggctacaagaccatcatcaccctccctgaaaagatgtcggccgaaaaggtttccgtcctccgtgcccttggcgccaccatcatccgtacccctacacaggctgcttgggacgcccccgagtctcacatcggtgttgctcgacgtctcgaaaaggagcttcccaacgcccacatcctcgaccagtacagcaacaaggacaaccccaacgcccatgagttcggtaccgcccaggagatctgggagcagactggtggtaaaatcactgctctcgttgctggcgctggtactggtggtaccatcactggtattgctcgcggtctcaagaagcacaaccaggacatcaaggttatcgctgccgatccccatggcagtatccttgctctgcctgagctcctgaaccaagagcacatcaacgaaggttacaaggtggagggtattggatacgactttatccccgatgtcctcgaccagcacatcgtcgacaagtggtacaagaccgatgaccgagagtccttccaccttgctcgccgactcatttccgaggagggtcttctcgtcggtggcagctctggttccgccatggctgctatgcttctcgccgtcaaggagtacggtttcaagaagggtgatgtcgtcgttgttgtcctgcccgacagcatccgaagctacctctccaagtttgccgatgacgactggctcgccgccaacaacctcctccccgtcaacggagtcgagtccaccgtcaacggcaacggcgacaagaagaactctgacccctacgagggcgccaccattgctgctctgcgcctcaagcccgtcacatccgtcggtgccacctccacctgctccgaggccatcgagaccatgcgcgacaagggtttcgaccagctccccgtcctctccgccagcggaaccaagctcgtcggtcttgttaccctcggtaacctcctgagctacatctccagcggccgcgccacgggccagagctccgtgtcagacgtcatgttcgatttcgcccgtctcgacgagatcgtcactgacccccgcgagttcgcctcccccatcaaccccggcaagcgcaggcagtttgtcgagatcacaaaggacacacccctcaccaccctcagcaagttcttcgagtggaacagtgctgctgttgtaaccgaaaagtcgggcgactccaagtctctgtccaagcccattgctgtcgtcacaaaggttgacctcctcacatggatgatcaacaagaagttgtag

SEQ ID NO: 39603 - protein, 517 aa, Gibberella zeae PH-1
MASQVPHVLPRAATVHSATELIGNTPLVRLNKIPQSLGIECDVYVKPELFSAGGSVKDRIALRMIEEAEKSGRIKPGDTLIEPTSGNTGIGLALVGAIKGYKTIITLPEKMSAEKVSVLRALGATIIRTPTQAAWDAPESHIGVARRLEKELPNAHILDQYSNKDNPNAHEFGTAQEIWEQTGGKITALVAGAGTGGTITGIARGLKKHNQDIKVIAADPHGSILALPELLNQEHINEGYKVEGIGYDFIPDVLDQHIVDKWYKTDDRESFHLARRLISEEGLLVGGSSGSAMAAMLLAVKEYGFKKGDVVVVVLPDSIRSYLSKFADDDWLAANNLLPVNGVESTVNGNGDKKNSDPYEGATIAALRLKPVTSVGATSTCSEAIETMRDKGFDQLPVLSASGTKLVGLVTLGNLLSYISSGRATGQSSVSDVMFDFARLDEIVTDPREFASPINPGKRRQFVEITKDTPLTTLSKFFEWNSAAVVTEKSGDSKSLSKPIAVVTKVDLLTWMINKKL

SEQ ID NO: 39604 - DNA, 1116 bp, Gibberella zeae PH-1
  CDS (1)..(1116)
atgttccgtcccaccgctagaaggctcgccgcctctgcggccaaagctgctgcagctcctacttcccatactctaaatgtcgctcgagctcaaggtgtctcccgaggtttgactggagccatcggaaacacacctctcatccgtcttaaccgtctctccgacgaaaccggctgcgaggttttgggcaaggccgagttcatgaaccctggtggctctgtcaaggaccgtgcagctctctatgtggtcaaggacgccgaagagcgtgggcttctcaagcccggtggtaccgtcgtcgaaggcaccgcaggaaatactggtattggtctcgcccacgtctgccggtctcgaggctacaagcttgtcatctacatgcccaacacccagtctcaaggcaagatcgatctcctgcgactcctcggcgctgaggtctaccctgttccagctgtcgctttcgacaaccccgagaactacaatcaccaggcccgtagacacgccgagcgattagacaatgccgtttggacgaaccagttcgataacacggctaaccgccgtgcgcacatcgagacgacaggtcctgagatctgggcgcaaacagatggaaaggttgatgccttcacatgtgctactggcaccgctggtacattagctggcattacaaggtatctgaaggatgtctccaacggccgggtcaagagcttcctcgccgatcctcctggcagtgtcctccactcctacgtatcctccggtggcaagcttaacgagcgcaccggctccagtattactgagggaatcggacagggtcgcatcactgacaacctccaaccagatattggcttggtggatggttcgcttcacatttcggacgagaagagcatcaagatggtctaccgctgcttggatgaggaaggtctctaccttggagccagctcttcccttaacgttgttgcagctaaggaggttgccgagaagctgggcaagggccacaccgttgttacggtcctctgtgacggcgcttacagatacgccgatagattgttctctcgcaagtggttgactgacaagaaacttcttggagctatccccaagcacttggagaagtacatcgttctaccatag

SEQ ID NO: 39605 - protein, 371 aa, Gibberella zeae PH-1
MFRPTARRLAASAAKAAAAPTSHTLNVARAQGVSRGLTGAIGNTPLIRLNRLSDETGCEVLGKAEFMNPGGSVKDRAALYVVKDAEERGLLKPGGTVVEGTAGNTGIGLAHVCRSRGYKLVIYMPNTQSQGKIDLLRLLGAEVYPVPAVAFDNPENYNHQARRHAERLDNAVWTNQFDNTANRRAHIETTGPEIWAQTDGKVDAFTCATGTAGTLAGITRYLKDVSNGRVKSFLADPPGSVLHSYVSSGGKLNERTGSSITEGIGQGRITDNLQPDIGLVDGSLHISDEKSIKMVYRCLDEEGLYLGASSSLNVVAAKEVAEKLGKGHTVVTVLCDGAYRYADRLFSRKWLTDKKLLGAIPKHLEKYIVLP

SEQ ID NO: 39606 - DNA, 1506 bp, Candida glabrata CBS 138
  CDS (1)..(1506)
atggattctagacacaacgttatagatttggttggtaacactccgcttatcgagctgaagaagctgcctaaggcgtatggtattcgtcctcgtgtgtttgccaagctggagctgtacaacccaggtggttccatcaaggaccgtatcgccaagagcatgatcgagtacgcagaggagcaaggcatcatccacccttcgaggtctacgctgatcgagcccacctctggtaacaccggtattggtcttgcgcttatcggtgccgtcaagggttacagaactattatcacgttgcctgagaagatgtccaatgagaaagttagtgttctgaaggcgcttggtgctgagattatcaggacgccaacggaggctgcttgggactctcccgagtcgcacatcggtgtggcccgccgtctggagaaggagatccctggcgcgatcatcctggaccagtacaacaacatgaagaaccccgaggcccactacttcggtaccggtcgcgaaatccagaagcagctggaggacctgaagctgttctcccacttgaacgccgtggtcgccggtgccggtactggtggtaccatctccggtatctccaagtacttgaaggagcagaacccagagatcaagatcgtcggcgctgaccctgtcggctccatccttgcccagccagagaacttgaacgagaccgagatcacctcttacaaagtcgaaggtatcggctacgacttcatcccagaagtgctagacagatccttggtcgacgtgtggtacaagaccgacgacaagcctgccttcaagtacgcaagacagctgatctccaacgagggtgtcctgatcggtggctcctccggttctgcgttcacagcgctagtcgagtactgcaacgaccacccagaactgtccgaagacgacgtcctggtcgccatcttcccagactccatcagatcgtacttgaccaagttcgtcgacgacgaatggttgaagacaaacgacctgtgggacgacgagatcctgaagcgcgtagacttcgacgaaaagaagaagccagccaccgacgacgtcttcaagggcgccaccgtcaaggacttgcacttgaagccagtggtcgccgtcaaggacaacgccttggtctccgacgtcatctccatcctaagagacaacgccttcgaccaactgcctgtcctgacacaagacggtaagctaacgggtctggtgactttgtcccaattgctaaagaagctatccaccggcaaagttaacaacacagacacaatcaagaacctatacttggatttcagaaagttgaacaacttcgacgaagtctcctcttacaacgaaaacaagtccggtaagaagaagttcgtccaattcacttccgaatccactttggctgaattgaacaagttcttcgaaaagaactccagtgccgtcatcacagatggattgaagcctgttcacatcgttacaaagatggacttgctaagttacttggcttccaccgcttga

SEQ ID NO: 39607 - protein, 501 aa, Candida glabrata CBS 138
MDSRHNVIDLVGNTPLIELKKLPKAYGIRPRVFAKLELYNPGGSIKDRIAKSMIEYAEEQGIIHPSRSTLIEPTSGNTGIGLALIGAVKGYRTIITLPEKMSNEKVSVLKALGAEIIRTPTEAAWDSPESHIGVARRLEKEIPGAIILDQYNNMKNPEAHYFGTGREIQKQLEDLKLFSHLNAVVAGAGTGGTISGISKYLKEQNPEIKIVGADPVGSILAQPENLNETEITSYKVEGIGYDFIPEVLDRSLVDVWYKTDDKPAFKYARQLISNEGVLIGGSSGSAFTALVEYCNDHPELSEDDVLVAIFPDSIRSYLTKFVDDEWLKTNDLWDDEILKRVDFDEKKKPATDDVFKGATVKDLHLKPVVAVKDNALVSDVISILRDNAFDQLPVLTQDGKLTGLVTLSQLLKKLSTGKVNNTDTIKNLYLDFRKLNNFDEVSSYNENKSGKKKFVQFTSESTLAELNKFFEKNSSAVITDGLKPVHIVTKMDLLSYLASTA

SEQ ID NO: 39608 - DNA, 1170 bp, Candida glabrata CBS 138
  CDS (1)..(1170)
atggactccaaatggggaagagtgataggtggtgtggtgctcagttgtggtgcattgtatacagcttatactgtgatacaaaggcggtatgagacggaggccaaagtgtacgatggtatgcaggagcttataggaaacacacctatggttaaactgaaatcactatgtgacacagacagaaacattaatgtgtacgccaagctagagatgaataacccaggtggaagcgcaaaggatagaatagcactaaacatcattcaggtggccgaggctgaaggcagactcgttcgtggagaacctggcatggtatttgaaggtaccagtggctccacgggtatatctttagccatgatctgtaatgccctaggatacaaagcacatatatcgttacctgatgatacctctttggaaaaattgaaccttctgaagagcttaggtgccataataaaccctgtaaaacctgcatcgattgtggatcccgatcaatatgttaacgcagcaaagaaagcttgcgatgattatctggagtcaggaaagaccaaatatgcaatctttagcgatcaattcgaaaatgagcacaattgggagatacattatagaaccactggaccagaaatatataaacagctcaaagggaaagttaactgcttcatttctggatgcggtaccggcggtactataagcggagtctcaaaatacttgaaggaaagaataagaccatatgttgtactcgctgatcctcaaggttcaggcttctacaacaggattaattatggtgtaatgtatgatagtgtcgagaaggaaggtaccagaagaagacaccaagttgataccatagtcgaaggaattggtttgaacagattgacatttaatttcttgaaaggtgaaaaatacatagatgaatctatcagagttaccgatcctcaagctataaagatggcaaaatttttatctattaatgaaggtttattcatcggtagcagtactgcaatcaatgctgtagctgcattagaactcatcaggagaaatgaccaagctattttaccaaatgactctaatattgttattattgcatgtgacagtggatcaagacatttaagcaagttttggaaagaggcacttcaagttcctgacactgttactttgaatgagatattagcatctaaataa

SEQ ID NO: 39609 - protein, 389 aa, Candida glabrata CBS 138
MDSKWGRVIGGVVLSCGALYTAYTVIQRRYETEAKVYDGMQELIGNTPMVKLKSLCDTDRNINVYAKLEMNNPGGSAKDRIALNIIQVAEAEGRLVRGEPGMVFEGTSGSTGISLAMICNALGYKAHISLPDDTSLEKLNLLKSLGAIINPVKPASIVDPDQYVNAAKKACDDYLESGKTKYAIFSDQFENEHNWEIHYRTTGPEIYKQLKGKVNCFISGCGTGGTISGVSKYLKERIRPYVVLADPQGSGFYNRINYGVMYDSVEKEGTRRRHQVDTIVEGIGLNRLTFNFLKGEKYIDESIRVTDPQAIKMAKFLSINEGLFIGSSTAINAVAALELIRRNDQAILPNDSNIVIIACDSGSRHLSKFWKEALQVPDTVTLNEILASK

SEQ ID NO: 39610 - DNA, 1068 bp, Kluyveromyces lactis NRRL Y-1140
  CDS (1)..(1068)
atgtcgcaatttattcgtcgcttgcacgttcctccattggcaaataaaggtttcaccgatgcaatcggtagtaccccattgatcaagatacagagactatccaaagaattgggaagaaatatctatggtaagtccgaactacagaaccccggtggatctgtgaaggaccgtgctgccctgtatttgattgaagatgcagaaaagaaagggttgatagatccaagcagacctgtcactgtggtcgaaggtagtgcaggaaacactgctattggattagctcatatctgtaaagcaaaaggttacaacgctgtcttctatatgcctgatacccaatctgaagcaaagatcaacttattgaaatggcttggtgcagaagtgtatcctgttcctgtttgccccatcacagatcctttaaactttaataatagagctagagaccacgccaaaagattggataacgcagtatggacagatcaatttgacaatcaatcgaactggaaagcccattatcacaccacggctcctgaaattctacaacaaatagaagaagcaggcatgatgttggatgcctttacttgttctaccggtactggtggtacatataccggtgttgccaaatttctgaaagaagccacgaatggcaactgtaaattagtcgtagctgatcctcctggatccgtcatttactcttatatcaaaacccgtgaattgaaaagggaaggtgggtccttcaccgaaggtattggccagggaagaatcactgaaaatatgagacaaagtgtcgatataactgatgatgctgtgtttattccagatgaagaatcaattatcatgcttttcagactattggatgaagaaggtcttttcgttggtggtaccacagcactaaacgttgtcgctgctgctaaagttgcacaaacactacctgaaggcagcaatgtggctaccattctatgtgactcgggtcataaatatgctgacagggtcttctctaagtcatggctacaaagtaaaaagctttatgatgttttgccagaccacttgaaaaaatatgcctcattagaatga

SEQ ID NO: 39611 - protein, 355 aa, Kluyveromyces lactis NRRL Y-1140
MSQFIRRLHVPPLANKGFTDAIGSTPLIKIQRLSKELGRNIYGKSELQNPGGSVKDRAALYLIEDAEKKGLIDPSRPVTVVEGSAGNTAIGLAHICKAKGYNAVFYMPDTQSEAKINLLKWLGAEVYPVPVCPITDPLNFNNRARDHAKRLDNAVWTDQFDNQSNWKAHYHTTAPEILQQIEEAGMMLDAFTCSTGTGGTYTGVAKFLKEATNGNCKLVVADPPGSVIYSYIKTRELKREGGSFTEGIGQGRITENMRQSVDITDDAVFIPDEESIIMLFRLLDEEGLFVGGTTALNVVAAAKVAQTLPEGSNVATILCDSGHKYADRVFSKSWLQSKKLYDVLPDHLKKYASLE

SEQ ID NO: 39612 - DNA, 1482 bp, Kluyveromyces lactis NRRL Y-1140
  CDS (1)..(1482)
atgggttacgatactcgccatgatgttatcgacttagtcggcaacactcctttaattcgcttgcaaaaattgccaaaggcaattggtatcaaacctaaggtctatgccaagttagagttgtacaacccaggtggttccatcaaggaccgtattgctaagtccatgatcgaagctgctgaagaagaaggtatcattcatccatccagatccactttgattgaaccaacttccggtaacaccggtattggtttggctttgatcggtgccattaagggttacagaactatcattactctacctgaaaagatgtctaacgaaaaggtttctgtcttgaaggctctaggtgctgaaattatcagaactccaactgctgctgcctgggattctccagaatctcatatcggtgttgccttacgtttagaaaaggaaattccaggtggtatcatcttggatcaatacaataacatgaagaatccagaagctcactacttcggtactggtaaggaaatccaccaccaattggaagatttatctttgttctccaagttgaaagctgttgtcgctggtgctggtacaggtggtactatctccggtatctcgaaatatatcaaggaacagaacgacaaaattgccattgtcggcgctgatcctgttggttccattttggctgtcccagaaaaattaaacgaaaccgatgtcactgaatacaaggtagaaggtattggttacgattttgttccaaaggttttgaaccgtgattctgttgaccattgggtcaagactgatgacaaatcctctttcaaatatgctcgtcaattgatctccaacgaaggtgttctagttggtggtagtagtggtagtgcatttactgctttggttgattactgtaacgaacatccagaattgactgaagatgatgttatcgtcgttatcttcccagattccgtcagatcctacttgactaagttcgtcgatgatgaatggctaaagaccaacggcctatgggatgatgccattgccactccaattgtgcaaaaagaaaccgatgtttttgaagatgccaccgtgaaggatttgaacttgaaaccagtggtctctgttgaagaagacgcttctgttgctactgtcatcaagattttaagagataactcgttcgatcaactacctgtgttaacaaaggatggaaagttgtgcggtttggtaactttgtctcaattattaaagaaattatccacttccaaggatgtttctagcattaaaagtctgttctttgatttccgtaagttgaataactttgatgacatctcttcctataacgccgacaagtctcataagaagatatttgttcgtttcgatgtcaatacaactttgtctgagttgaactctttctttgaaaagaactcagcagctatcattactgagggtctgaacccagtccatattgtcacaaaggtggatttattatcttacttggccaaataa

SEQ ID NO: 39613 - protein, 493 aa, Kluyveromyces lactis NRRL Y-1140
MGYDTRHDVIDLVGNTPLIRLQKLPKAIGIKPKVYAKLELYNPGGSIKDRIAKSMIEAAEEEGIIHPSRSTLIEPTSGNTGIGLALIGAIKGYRTIITLPEKMSNEKVSVLKALGAEIIRTPTAAAWDSPESHIGVALRLEKEIPGGIILDQYNNMKNPEAHYFGTGKEIHHQLEDLSLFSKLKAVVAGAGTGGTISGISKYIKEQNDKIAIVGADPVGSILAVPEKLNETDVTEYKVEGIGYDFVPKVLNRDSVDHWVKTDDKSSFKYARQLISNEGVLVGGSSGSAFTALVDYCNEHPELTEDDVIVVIFPDSVRSYLTKFVDDEWLKTNGLWDDAIATPIVQKETDVFEDATVKDLNLKPVVSVEEDASVATVIKILRDNSFDQLPVLTKDGKLCGLVTLSQLLKKLSTSKDVSSIKSLFFDFRKLNNFDDISSYNADKSHKKIFVRFDVNTTLSELNSFFEKNSAAIITEGLNPVHIVTKVDLLSYLAK

SEQ ID NO: 39614 - DNA, 1476 bp, Debaryomyces hansenii CBS767
  CDS (1)..(1476)
atgcctgtccctcccattgctgaagatgctttagatttaattggtaacacaccattaatcaagttgaatagaattccacaaagctttggtattaaagccaaggtttatgctaaggttgaattattcaatgcaggtggttctattaaggatagaatttccaaaaacatggttttagaagccgaaaagcaaggtagaatcaagccaggatataccttgatcgaacctacttcgggtaacaccggtattggtttggccttggtaggtgccgttagagggtacagaaccattattacattaccagaaaagatgtccaacgaaaaagtttcagttttgaaagctttaggtgctgaaattataagaactccaaccgaagcagcctgggatgccccagaatcgcatattggggtcgccagaaaattggaaaaggagatccctaattctgttatcttagaccagtattcgaatgaggctaaccctaatgctcattattacggtacaggttatgaaatttgggagcaaactaatggtaaggttacccacttaatagctggtgcgggtactggtggtactattaccggtatttccaagtacttgaaggaaaagaattcaaatattaaaattattggtgccgatccaaagggttctattttagctgtaccagaatctttaaatgatacaagtgaaggttacttagttgaaggtattggttacgactttatccctgatgttttaaagagagacagggttgactcctggatcaaaaccgatgattctgaatctttcaaattagcaagaagaattattagagaagaaggtattttagttggtggttcgtcgggttctgcattacaagccgcattagaagttgccaaggatttaactgaagacgataccgttgttgtcgttttccctgattcaatcagatcttacttaaccaagtttgccgatgatgaatggatgactactaacgggttccctatagaagaaaatgaaagtgcatcccacaaatctgatgaagtcttgaatacgacaactatcaaggatttggtttctggtaaggcaccagttgttactgttacattatctgatactgttggcaaaacttttgatttattacaaactaatggcttcgatcaattaccagttttgaacaactcaggtaaattagttggattaatcactttatctaagattttgaaatctctttctaccaagaaggtccaaatcactaattctatttcgtcaattattattgatttcagaaaattagctgattttgaaaaatccttcacaattaccaagaagtctggtttcactaagagaagttacgaaccaattacaatggatacatcgttagccttattaaacaaattcttcgaaaccaactccaacgccattgtgactgatgcggattacaagccagtccaaattgttacgaaggttgatttaatctcgtacttgacaaaaatcttataa

SEQ ID NO: 39615 - protein, 491 aa, Debaryomyces hansenii CBS767
MPVPPIAEDALDLIGNTPLIKLNRIPQSFGIKAKVYAKVELFNAGGSIKDRISKNMVLEAEKQGRIKPGYTLIEPTSGNTGIGLALVGAVRGYRTIITLPEKMSNEKVSVLKALGAEIIRTPTEAAWDAPESHIGVARKLEKEIPNSVILDQYSNEANPNAHYYGTGYEIWEQTNGKVTHLIAGAGTGGTITGISKYLKEKNSNIKIIGADPKGSILAVPESLNDTSEGYLVEGIGYDFIPDVLKRDRVDSWIKTDDSESFKLARRIIREEGILVGGSSGSALQAALEVAKDLTEDDTVVVVFPDSIRSYLTKFADDEWMTTNGFPIEENESASHKSDEVLNTTTIKDLVSGKAPVVTVTLSDTVGKTFDLLQTNGFDQLPVLNNSGKLVGLITLSKILKSLSTKKVQITNSISSIIIDFRKLADFEKSFTITKKSGFTKRSYEPITMDTSLALLNKFFETNSNAIVTDADYKPVQIVTKVDLISYLTKIL

SEQ ID NO: 39616 - DNA, 1095 bp, Debaryomyces hansenii CBS767
  CDS (1)..(1095)
atgattagaaccagcattcgtcgcttgactataagcagaaatcacgatatcaagcttccattcgtgcctttggtatcagagaacggtttcccacaggcaattgggaacacaccgcttctcaggttacccaggatctccgacaagatcggaagaaatgtttacgccaaagctgaatttatgaacccaggaggatcaattaaggacagggctgcattgtatgttattaacgatgctgaagagaagggtttgatcaaacctggtggaaccattgtggaaggtactgctggtaatacggggatcgggttggcccatgtatgcagagctaaaggctataagtgtgtgatctacatgccgaacacccaatctaagaataagattgaaactttgaggttattgggggccaccgtacacccagttccagcggttgcatttgacaatccagaaaattataaccaccaggctaagaggttcgctgaatctcaagaaaatgccgcctggaccaaccaattcgataatgttgccaacagacaggcacatattgaaacaactgggccagaaatctggtctcaattgaacggtaaagtggatgctttcacctgttccactggtacaggggggacttttgctggtgtaaccagatatttgaaggaaatctccaacggggcaaccaaatgtgtcttagctgatccaccaggatccgtcttgtattcttacatcaagtctaatggagaaacgatggaaagaggtggctcttccttcactgaaggtattggtcaaggtagagttaccgataacttgaaacaagaaatcccattggtagacgatgctttaaaaatcaccgatgaggaatcaattgaaatgttgtaccgtttattagatgaagagggattatacatcggtggtactggtgctttgaacgttgtcgctgctgtcaaagtagcccaatctttaccagaaggctcgaatgtcgttactttgttagctgattcagctcacaaatatagtgatcgtatcttctctaaaagctggttacaatcaaagggtttatttgacgctttaccttctcatttgaagaagtacgctaccctcgaatga

SEQ ID NO: 39617 - protein, 364 aa, Debaryomyces hansenii CBS767
MIRTSIRRLTISRNHDIKLPFVPLVSENGFPQAIGNTPLLRLPRISDKIGRNVYAKAEFMNPGGSIKDRAALYVINDAEEKGLIKPGGTIVEGTAGNTGIGLAHVCRAKGYKCVIYMPNTQSKNKIETLRLLGATVHPVPAVAFDNPENYNHQAKRFAESQENAAWTNQFDNVANRQAHIETTGPEIWSQLNGKVDAFTCSTGTGGTFAGVTRYLKEISNGATKCVLADPPGSVLYSYIKSNGETMERGGSSFTEGIGQGRVTDNLKQEIPLVDDALKITDEESIEMLYRLLDEEGLYIGGTGALNVVAAVKVAQSLPEGSNVVTLLADSAHKYSDRIFSKSWLQSKGLFDALPSHLKKYATLE

SEQ ID NO: 39618 - DNA, 1173 bp, Yarrowia lipolytica CLIB122
  CDS (1)..(1173)
atgagtcgctggatatacacggcttcgggcgtgcttataggaatatccatttctggaattctctataccgcttttctgcgacctgaatcgcagaagaaacgatcgaaatctaacaagaataccccctcacagcccattgttgacccgccaaaggcccggataggactccagggactcattggaaataccccaatggtcctagtgccgtcgttgagtcacgcaactggctgcaagatatatgccaaagttgaggcgtgcaacccgggaggttcagccaaggacagagttgcgttgggaatcattcaggctgccgaaaaatcgggggccattgctcctcacgagggtcacgtgatttacgagggaacaagtggctctacaggaatttctctcgccatgctgtcgaaggctatgggctacaattcgcatatttgtcttccagacgacacttcaagtgagaaggtggatcttcttactaacctgggagccgttgttgacaaggtgcgacctgctggaatcgttgacaaaaaccattatgttaatagtgcacgtgacaaggctgttgagtgcgagaccggtgctgtgttctcagaccagttcgaaaacgacgccaactggagaattcattacaacaccacgggacctgagatcttcatccagaccgacggagaggtagatttgtttgtgactggctctggaaccggaggaaccatttctggtgtggccaagtacctcaaagaaaaactggacgacgtcagggtggtccttgcagactgccaggggtctgggttgtatcgaaagattaagtatggagttatgtacgactccgtggaaaaggagggcactcgtcgacgacaccaggtggacactcttgtggagggtatcggtatcaatcgaattactcacaacctgtcccagggtctggagttcattgatgatgccatccgggtcactgatgaggaagccgtcaagatggccaagtatctggttgacaacgacggtatgtttgtgggctcttccactgctgtcaatatggtggctgcttacaagtgtgccaagagcctgggacccaatcacaccattgtcactctatggtgtgatggaggccatcgccatttgagtaagttctggaagcaggccagagagcttggggagatcaagttggaggatttttag

SEQ ID NO: 39619 - protein, 390 aa, Yarrowia lipolytica CLIB122
MSRWIYTASGVLIGISISGILYTAFLRPESQKKRSKSNKNTPSQPIVDPPKARIGLQGLIGNTPMVLVPSLSHATGCKIYAKVEACNPGGSAKDRVALGIIQAAEKSGAIAPHEGHVIYEGTSGSTGISLAMLSKAMGYNSHICLPDDTSSEKVDLLTNLGAVVDKVRPAGIVDKNHYVNSARDKAVECETGAVFSDQFENDANWRIHYNTTGPEIFIQTDGEVDLFVTGSGTGGTISGVAKYLKEKLDDVRVVLADCQGSGLYRKIKYGVMYDSVEKEGTRRRHQVDTLVEGIGINRITHNLSQGLEFIDDAIRVTDEEAVKMAKYLVDNDGMFVGSSTAVNMVAAYKCAKSLGPNHTIVTLWCDGGHRHLSKFWKQARELGEIKLEDF

SEQ ID NO: 39620 - DNA, 1617 bp, Yarrowia lipolytica CLIB122
  CDS (1)..(1617)
atggtaaccttttttctacacctgtcccaagccacttttcttcctccaccacaccctcatatctttacaacatacacaatgactccccctcccgtggcccagaccgtgctcgaacacattggcgacacgcccatggttgagctccaaaagatcccccagtctctgggcatcaagtgccgaattctcggaaagtgcgagtacttcaacgctggtggatccgtcaaggaccgaattgccaagcgaatggtgcttgaggccgagaagcagggccgaatcaagcccgacgccggctacactctgattgagcccacgtctggtaataccggtattggacttgctcttgtcggcgccgtccgaggttacagaaccatcatcactctgcccgagaagatgtccaacgagaaggtgtctgtgctcaaggctctgggagccgagattgtgagaacacccactgaggccgcctgggacgcccccgagtcccacattggagttgcccgacgtctggagcaggagatccccaaggctgtcattctcgatcagtacggaaacgaggccaaccccgacgctcacctctacggcactggtgccgagatctgggagcagactgagggtaaggtgacccatctcgtcgctggcgccggaaccggaggaaccatcaccggtattgccaaggctctcaaggccaagaacaaggacgtggttgttgtggctgctgaccccaagggctccattctggccgtccccgagtctctcaacgactccaacgagggctacaaggtcgagggtatcggttacgacttcgtgcccgacgttctggaccgagacgtgatcaactcgtggatcaagaccgaggacagagagtccttcctgctgtctcgacgactcatcaaggaggagggtctgcttgtgggtggatcttctggctcggctctggctgccgctcttcaggtcgccaaggacctcaccgagaacgacactgtggttgtcgtcttccctgattctgtgcgatcttacatcaccaagttcattgatgacgactggatgaagaacaacggcttcgtagacgatgccaccctcgccgagcaggccaagcgaaagcagcagtacaagggcgctaccattgccgatctgcatctcaagcccgttgtcaccgtaaagggtgactccactgtggctactgctgtcgagctcatgcgagagaagggctttgatcagatccccgtttccagcaagtcctccggcaagctcattggccttgttactcttggtaacctgctctcttacctttctcacggccgagctacccccgagactcccgttgagaaggtcatgcttgacttccgaaagctcgactctcaccagctcaccgccgatgccattgcttctgccaccgccagcctttccattggcactccttctggcgataagaaggcctctaagcagcgacagtttgtggaggttactgttgacactcctctgtctgctctcaacaagttcttcgagcacaactccagtgttattgtcaccgagaaggactccgatggtgtcaagcccgtgcacattgttaccaaggtcgatctgctcgcttacctcgtcaagaatggttcttttgagtaa

SEQ ID NO: 39621 - protein, 538 aa, Yarrowia lipolytica CLIB122
MVTFFLHLSQATFLPPPHPHIFTTYTMTPPPVAQTVLEHIGDTPMVELQKIPQSLGIKCRILGKCEYFNAGGSVKDRIAKRMVLEAEKQGRIKPDAGYTLIEPTSGNTGIGLALVGAVRGYRTIITLPEKMSNEKVSVLKALGAEIVRTPTEAAWDAPESHIGVARRLEQEIPKAVILDQYGNEANPDAHLYGTGAEIWEQTEGKVTHLVAGAGTGGTITGIAKALKAKNKDVVVVAADPKGSILAVPESLNDSNEGYKVEGIGYDFVPDVLDRDVINSWIKTEDRESFLLSRRLIKEEGLLVGGSSGSALAAALQVAKDLTENDTVVVVFPDSVRSYITKFIDDDWMKNNGFVDDATLAEQAKRKQQYKGATIADLHLKPVVTVKGDSTVATAVELMREKGFDQIPVSSKSSGKLIGLVTLGNLLSYLSHGRATPETPVEKVMLDFRKLDSHQLTADAIASATASLSIGTPSGDKKASKQRQFVEVTVDTPLSALNKFFEHNSSVIVTEKDSDGVKPVHIVTKVDLLAYLVKNGSFE

SEQ ID NO: 39622 - DNA, 1134 bp, Yarrowia lipolytica CLIB122
  CDS (1)..(1134)
atgtctcgaattggatctgtgactcgggttgcccgtgctgcacgggctgccaccactggtgtcgctcggaacctctcttcgacctcttaccaggctggcttcaagcctcttgtggcctccaacggcttcaatggcgctatcggcaacactcctctgattcgaatcaaccacctgtcggacgagactggctgcgaagtctacggtaaggccgaattcatgaaccccggtggatccgtcaaggaccgtgctgctctctacgtggttgaggatgccgagcgaaagggcctgatcaagcccggaggaaccgtggtggagggaaccgcaggaaacaccggtattggtcttgcccacgtctgccgagccaagggctacaagtgtgtcatctacatgcccaacacccagtcccagggtaagattgacctcctccgactgctgggagccgaggtttaccccgtcccagctgtcgcctttgacaacccgcaaaactacaaccacttggccaaggctcacgctgagaagcttggagctggaaatgccgtgtggactaaccagttcgacaatgttgccaaccgacaggctcatattgagaccactggtcccgaaatctgggcccagaccgacggcaagatcgacgccttcacttgttctaccggaaccggaggctcgtttgctggaaccatgcgatacctgaaggacgtttcccacggccgagtccagtgcattcttgccgatccccctggatccgtgctccattcttacgtccaatccggaggtaagctcactgagcgagctggttcttccatcactgagggtatcggtcagggccgagtcactgagaacttggctcccgagattgccgaggtcgatggctctgttcaaatccctgatcaggcaaccattgagatggtttacaacctgctggataaggagggtctctaccttggtgcctcttcttgtctgaacgttgttgctgcctacgaggttgctaagcagattggcccaggccatgttgtggtcactctgctctgtgatggtgctcaccgatacgccgaccggctgttcagcaagaagtggctcgagtccaagggactcaccattcccgagaatctccaaaagtacgttgttctggattaa

SEQ ID NO: 39623 - protein, 377 aa, Yarrowia lipolytica CLIB122
MSRIGSVTRVARAARAATTGVARNLSSTSYQAGFKPLVASNGFNGAIGNTPLIRINHLSDETGCEVYGKAEFMNPGGSVKDRAALYVVEDAERKGLIKPGGTVVEGTAGNTGIGLAHVCRAKGYKCVIYMPNTQSQGKIDLLRLLGAEVYPVPAVAFDNPQNYNHLAKAHAEKLGAGNAVWTNQFDNVANRQAHIETTGPEIWAQTDGKIDAFTCSTGTGGSFAGTMRYLKDVSHGRVQCILADPPGSVLHSYVQSGGKLTERAGSSITEGIGQGRVTENLAPEIAEVDGSVQIPDQATIEMVYNLLDKEGLYLGASSCLNVVAAYEVAKQIGPGHVVVTLLCDGAHRYADRLFSKKWLESKGLTIPENLQKYVVLD

SEQ ID NO: 39624 - DNA, 1608 bp, Aspergillus nidulans FGSC A4
  CDS (1)..(1608)
atgtcttccaaaacgacacccaccgtcccgccggtggctctcgattctatcacgcaacatattggcaatactcctcttgtgaggttgaacaaactaccgcagaacctcgggataaatgcgacggtatatgcaaagctagaatacttcaatgcaggcggaagcgtcaaagatcggatagctcttcgcatgattgaggaagccgaacggtcaggccgtatcaagccaggcgacactctgattgaacctaccagtggtaacactggtattgggttagctctcgtcgcggccgtcaaaggctacaagaccatcatcacccttccagagaagatgtctgctgagaaggtttctgttttacgggctcttaacgcgaccatcatccggactcctaatgaagctgcatacgactcgcccgaatcccacatcggcgttgcgaagcgtcttgaaaaggagctaccaaatgcgcacatcctagatcaatatggtaacgaaaacaatccattggctcatgagctcggcactgcgcaagaaatctggagtcagactaaaggacaaattaaggcgatcgttgctggcgcgggtacgggtggcacgattacagggctctcgcgcggcctgaagaagcacaattccaacgttcaagtaattgcggcggatccccaagggtcaatactggctctcccagctgcactaaacgaggagcatgccaatgagccatacaaggtcgaaggtattgggtatgacttcattccacaggtgctagatcagcacgccgtcgacaagtggtacaagacggacgacaaagaatccttccagtatgctcgccgtttaatagctgaggagggccttctcgttggtgggagcagcggaagcgcaatcgcggccctggtaaaggccgctagggacaacatgtttaaagagggtgatgttgtcgttgtgattttgccagacagcatcagaagctacctcacaaagatacagttcgccgacgacgattggcttgccgccaacgatctcctaccttcgttaccgactgaagtcatcctccaatcctccaataagcagactcaaggacaagacgacgcttttgccggtagtaaggttagctcgctccggctcaaaccagtgacaaccgtccactccaacgtcccttgtgagactgccattgaagtcatgcgcgacaaagggttcgatcaacttcccgttctggcaccatcaggcagaaagcttgtcggcctggttacactcggaaacgttctcagtcgattgacgcacaaccgcgcaactggtaggagccccgttgccgacgtaatgtttgatttccgcaccatttccgaggtcgtcaccgatcctcgagacatgggtcttgcgagcttggagcccaatcagaacgggagggatgcccccaaaccacaaaccaggagcaggaaattcgtcgagattactatggatacatctttaagtgtactgaatcgcttttttgagtggaatagtgcggctattgttacggaaagagatgaaggtgggactctaaggcccgtggctgttgtcacgaaagttgatcttcttacctggatgctccatcataagaagaacggcgcatcggaatag

SEQ ID NO: 39625 - protein, 535 aa, Aspergillus nidulans FGSC A4
MSSKTTPTVPPVALDSITQHIGNTPLVRLNKLPQNLGINATVYAKLEYFNAGGSVKDRIALRMIEEAERSGRIKPGDTLIEPTSGNTGIGLALVAAVKGYKTIITLPEKMSAEKVSVLRALNATIIRTPNEAAYDSPESHIGVAKRLEKELPNAHILDQYGNENNPLAHELGTAQEIWSQTKGQIKAIVAGAGTGGTITGLSRGLKKHNSNVQVIAADPQGSILALPAALNEEHANEPYKVEGIGYDFIPQVLDQHAVDKWYKTDDKESFQYARRLIAEEGLLVGGSSGSAIAALVKAARDNMFKEGDVVVVILPDSIRSYLTKIQFADDDWLAANDLLPSLPTEVILQSSNKQTQGQDDAFAGSKVSSLRLKPVTTVHSNVPCETAIEVMRDKGFDQLPVLAPSGRKLVGLVTLGNVLSRLTHNRATGRSPVADVMFDFRTISEVVTDPRDMGLASLEPNQNGRDAPKPQTRSRKFVEITMDTSLSVLNRFFEWNSAAIVTERDEGGTLRPVAVVTKVDLLTWMLHHKKNGASE

SEQ ID NO: 39626 - DNA, 1491 bp, Candida albicans SC5314
  CDS (1)..(1491): transl_table=12
atgacatctacaaacaaaccaccagccttaaaagaagatattttagaacttattggtaatactccattagtcaaattgaacaaaattccacaatcgttgggaattaaagccaaggtctatgccaaagttgaattattcaatgccggaggatcaattaaagatagaattgccaaaaatatggtattggaagccgaaaaacaaggtaaaatcaaaccaggctatactttgattgaaccaacctcaggtaatactggtattggtttggctttggttggtgccgttcgtggatacagaaccatcattaccttaccagaaaaaatgtcaaacgaaaaagtttctgttttgaaagccttaggtgctgaaatcattagaactccaactgaagctgcatgggactctccagaatctcatattggtgttgctaaaaaattggaaaaagaaataccaaactctattattttggaccaatatggtaacccagccaacccagatgctcattattatggtactggttatgaaatttgggaacaaactgaaggtaaaattactcacttggttgctggtgctggtactggtggtaccatcactggtatttccaaatacttgaaagaaaaaaattctaagattcatgttactggtgctgacccaaaaggttctattttagctgaaccagaatctttaaataattccaccgaaggttacttggttgaaggtattggttatgattttattccagatgtgttgaacagaaaatatgttgatgattggatcaaaacagatgatgctgaatcttttaaattggctagaagaattattagagaagaaggtattttggttggtggttcttctggttctgccttacaagctgctttacaagtagctaaagacttgactgaagacgatactgtcgttgttgttttcccagattccatcagatcttacttgtctaaatttgccgatgacgaatggttaatctccaatggattcgaagttgaagattcaccgggtgctaacaaggctgacgaattcttgaatggtaagactatcaaggatttggttgctggcaaagctccagttgtcactgtcactttatctgacacagttgccaagacttttgatttattgcaatccaatgggtttgatcaattgccagttttgaataactctggaagattagttggtttgatcaccttatccaagatattgaaatctttatccactaaaaagattcaaacgaccaattcaatcagttcgatcatcattgatttcagaaagttggctgattttgaaaaatctttcaccatcactaaaaaatcaggattcactaagagaagttatgaaccaatcaagttggacaccccattagctgctttgaataaattctttgaaaccaattcaaatgctataatcacagatgatgaattgaaaccagttcaaattgttactaaggtcgatttgctttcgtatttgactaaaaacgctagtttttaa

SEQ ID NO: 39627 - protein, 496 aa, Candida albicans SC5314
MTSTNKPPALKEDILELIGNTPLVKLNKIPQSLGIKAKVYAKVELFNAGGSIKDRIAKNMVLEAEKQGKIKPGYTLIEPTSGNTGIGLALVGAVRGYRTIITLPEKMSNEKVSVLKALGAEIIRTPTEAAWDSPESHIGVAKKLEKEIPNSIILDQYGNPANPDAHYYGTGYEIWEQTEGKITHLVAGAGTGGTITGISKYLKEKNSKIHVTGADPKGSILAEPESLNNSTEGYLVEGIGYDFIPDVLNRKYVDDWIKTDDAESFKLARRIIREEGILVGGSSGSALQAALQVAKDLTEDDTVVVVFPDSIRSYLSKFADDEWLISNGFEVEDSPGANKADEFLNGKTIKDLVAGKAPVVTVTLSDTVAKTFDLLQSNGFDQLPVLNNSGRLVGLITLSKILKSLSTKKIQTTNSISSIIIDFRKLADFEKSFTITKKSGFTKRSYEPIKLDTPLAALNKFFETNSNAIITDDELKPVQIVTKVDLLSYLTKNASF

SEQ ID NO: 39628 - DNA, 1197 bp, Candida albicans SC5314
  CDS (1)..(1197): transl_table=12
atggcaattaattggaaatcaacattacaaacctcggcatcagtgatatcattatttcttattgccaaagaattatataacttatatgttaccactaccaacaaagataaatcaaattctaaactaacattattaccaccacgaactcgaggcatcgaatcattaattggtaatactcccttaattgaaataaaatcattatcacgtcaattaggttgtaaaatatatgctaaattagaactttgtaatcctggaggaagtgcaaaagatcgagtagcattagctataatccgagctgcggaatcatcaggtcaattaatccctaatgcgaataatattatatttgaaggtactagtggatctacaggaatatcattagctatattatgtaatgcattagggtatatttgtcatatttgtttacctgatgatacatctttagaaaaattacaattattgaaatcattaggtgcagaattagaaccagttaaactggcaagtatagtagatcctaatcaatataccaatgctgctcgacgtggtgcattagccgtgaatcaaaatagagatggtcattctcaacgacgagcaatatttgctgatcaatttgaaaatgattttaattggagaattcattatgaaactaccggaccagagttattacaacaaatgggtcaagataaaatcgatgtatttataaatggtagtggtactggtggaaccattgctggtgttgggagatgtttaaaagaatataatccaagaacaaaaattgttttagctgatcctcaaggttctgggttagctaatagaattaattatggagttatgtatgattctgttgagaaagaggggacaagaagacgacatcaagttgatacattagttgaaggaattggattaaatcgattgacttggaattttaaacaagcagaaccatatattgatgaagctattagagtcactgatgatcaagcattaaaaatggcaaaatatttaagtattaatgatggattatttttagggagttcatcagcgataaattgtgttgctgctgtgaaaatggcattgaaaaatggtcctggtcaaaaaattgttgttattgcttgtgattctggtgctagacatttatctaaattttggaaagaagctgcaaaattacccaatgatcttacattagatgatgtactacaataa

SEQ ID NO: 39629 - protein, 398 aa, Candida albicans SC5314
MAINWKSTLQTSASVISLFLIAKELYNLYVTTTNKDKSNSKLTLLPPRTRGIESLIGNTPLIEIKSLSRQLGCKIYAKLELCNPGGSAKDRVALAIIRAAESSGQLIPNANNIIFEGTSGSTGISLAILCNALGYICHICLPDDTSLEKLQLLKSLGAELEPVKSASIVDPNQYTNAARRGALAVNQNRDGHSQRRAIFADQFENDFNWRIHYETTGPELLQQMGQDKIDVFINGSGTGGTIAGVGRCLKEYNPRTKIVLADPQGSGLANRINYGVMYDSVEKEGTRRRHQVDTLVEGIGLNRLTWNFKQAEPYIDEAIRVTDDQALKMAKYLSINDGLFLGSSSAINCVAAVKMALKNGPGQKIVVIACDSGARHLSKFWKEAAKLPNDLTLDDVLQ

SEQ ID NO: 39630 - DNA, 1146 bp, Ustilago maydis 521
  CDS (1)..(1146)
atggcctcgacacttccaagatccttggtgggcatcgctcggtcgtcggtgcgagctctgcacagctctgttgccactgccgcttccacttcgacgctttcgcccgtcgctgccgcccacatgcggcctgtcaacggtttcgtcggtgcgatcggcaacacgccgctcatccgtctcaacaagatcagcgatgagactggctgcgaggtactcggaaaggccgagttcatggagccaggaggaagtgtcaaggatcgtgctgcactctacgtggtcaaggatgccgaggaacgcggtcttatcaagcctggtggcaccgttgtcgagggcacggcaggcaacaccggtatcggtctagctcacgtctgccgtagcaagggctacaggtgcgtcatctacatgcccaacacgcagtcgcaggagaagatcgacctgttgcgcatgctcggtgccgaagtgcaccctgttcccgccgttgcgtttgacaatccggacaactacaaccaccaggctaaacgtcatgccgaacgcctcgaaaatgcggtctggacgaatcagttcgacaacaccgccaatcgacgcgctcacatcgagactacaggccccgagatctgggatcagatcgacggaaacctcgacggcttcatttgcgccaccggaacaggaggcacactcgccggcatcaccagttacctcaagcaaaagagcaacggcaaagtccagtgctggcttgccgacccacctggctcagtgctccactcgtatatccagaccaagggcaagctcatggaccgcgaaggtggttccatcaccgaaggtattggtcaaggccgagttaccgaaaacctcaagccagacgttgagaagctcgacaactcggtccacgttcctgacgaggagagcatctcgatggtctacgacctgctccacgaggagggtatctacgtcggagcctcgtcggcgctcaatgtggtagctgccaaaaagatggcccaacagctcggtcccaacaagaccatcgtcaccattctctgcgacggtgcgtaccgttaccaggctcgacttttctcgcgcaagtggctcgagtccaagaagctcgataccgccatccccgagcatttgcaaaagtacattgtcttaccatga

SEQ ID NO: 39631 - protein, 381 aa, Ustilago maydis 521
MASTLPRSLVGIARSSVRALHSSVATAASTSTLSPVAAAHMRPVNGFVGAIGNTPLIRLNKISDETGCEVLGKAEFMEPGGSVKDRAALYVVKDAEERGLIKPGGTVVEGTAGNTGIGLAHVCRSKGYRCVIYMPNTQSQEKIDLLRMLGAEVHPVPAVAFDNPDNYNHQAKRHAERLENAVWTNQFDNTANRRAHIETTGPEIWDQIDGNLDGFICATGTGGTLAGITSYLKQKSNGKVQCWLADPPGSVLHSYIQTKGKLMDREGGSITEGIGQGRVTENLKPDVEKLDNSVHVPDEESISMVYDLLHEEGIYVGASSALNVVAAKKMAQQLGPNKTIVTILCDGAYRYQARLFSRKWLESKKLDTAIPEHLQKYIVLP

SEQ ID NO: 39632 - DNA, 1218 bp, Cryptococcus neoformans var. neoformans B-3501A
  CDS (1)..(1218)
atggtcgattataaattcccgatctttttcagaaatccagctgtcgtcagtcccgaacttatctcctcttccctccacatctcctccaaaagcatccaaaacatggttgtctccagatcagcaagcatccttcgctccgtctgccctactttcatctcaagcagggcctatgcaaccgccgctcccgccttcggcaagcccgttaacggtttcgttggggccatcggaaacactcctttgatccgactcagccgtctctctgaggagaccggctgcaatatcctcgcgaaggccgagttcatgtcccctggtggctccatcaaggaccgagccgccctttaccttgtccaggacgccgaggagaagggtctcatccgacctggtggcactgttgttgagggtaccgctggtaacactgggataggtcttgctcatgtctgcaggtccaagggatacaagtgtgtcatctacatgcctgacactcaatctcaggagaagattgacttgctgaggatgttgggtgccgacgtcaggcctgtccctgccgtcgcttttgacaaccctcagaactacaaccaccaagctgcccgatacgctgcttcccttgagaacgccgtctggactaaccaatttgataatgtcgccaaccgaaatgcccacatcgtctctaccggtcctgaaatctgggaacaaaccgatggcggcaagctcgatgctttcatttgctctaccggtactggtggtacccttgccggtgtgactaggtatctgactgagaagagtaacggacgtgttgaggcttggttggcggaccctcctggaagtgtgttgttcaatttggttgagaatggtgagatcaagcgagaaggtaacggctctatcaccgagggtatcggacaaggtcgagtcaccaacaacctcgcccccgatctctctctcctgtctggcgctatccacgtgcccgactctgcctccattaacatgatctaccgacttcttgacgaggaaggtctctacgttggtgcgtcctccgcgctcaacgtctggtccgctgtcgagctcgcgaagcgaaaaggaaagggcagcaccgtcgttactgttctctgtgacggtgcttaccgataccaagctcgtttgttctctcgagtgtggctcgaatctaagggtctcgtctctcatatccccgaccatctccaaaagtatattgttcttccttaa

SEQ ID NO: 39633 - protein, 405 aa, Cryptococcus neoformans var. neoformans B-3501A
MVDYKFPIFFRNPAVVSPELISSSLHISSKSIQNMVVSRSASILRSVCPTFISSRAYATAAPAFGKPVNGFVGAIGNTPLIRLSRLSEETGCNILAKAEFMSPGGSIKDRAALYLVQDAEEKGLIRPGGTVVEGTAGNTGIGLAHVCRSKGYKCVIYMPDTQSQEKIDLLRMLGADVRPVPAVAFDNPQNYNHQAARYAASLENAVWTNQFDNVANRNAHIVSTGPEIWEQTDGGKLDAFICSTGTGGTLAGVTRYLTEKSNGRVEAWLADPPGSVLFNLVENGEIKREGNGSITEGIGQGRVTNNLAPDLSLLSGAIHVPDSASINMIYRLLDEEGLYVGASSALNVWSAVELAKRKGKGSTVVTVLCDGAYRYQARLFSRVWLESKGLVSHIPDHLQKYIVLP

SEQ ID NO: 39634 - DNA, 1098 bp, Strongylocentrotus purpuratus
  CDS (1)..(1098)
atggcttcgtctttgcgtaaaatagggcaaaaaatattgttatcccactgcaaaagggattacaatatacttcaacgactactttctaatgatgtccgaaagggttttgttggcatggtcggcaggacaccgctgattcgattgaataaagtcagcgaggagacaggatgtgatattgtggtcaaagctgagtttgcaaatggagggggctccgtaaaagacagagctgccctctttctcattcaacaaggcattgatcaaggacgacttaagtctggtggcactgtggtagaaggaactgcaggaaatacaggcatcggtctagctcatttatgtaacgccatgggtttcaagtgtgtgatctacatgccaaacaatcagagtcaagaaaagattgatatgttgcggctccttggtgccgtagtgtttcccgtccccgttgtacctttcgacgatcccgataattacaaccaccaggcaaggagacatgctgaatcgttagataatgccgtttggacaaaccagtttgacaacacagccaacagacaagctcatatagagaccacaggaccagagatatggcaacagactgagggcaaggtgaatgctgtcacatttggcactggaacaggtggcactttggcaggagttgggatgtacatgaaggagatgagcaaggatgtgaaggtcatcctagctgaccctcagggcagcgtcctctacaactacttcacccatggcaagctggagaggtcaccggggtcatccatcacagagggcataggtcaaggtcgggtcacagataacctcaagggcgcccccattgatgaggccttgtgcattatggacaccgatgctgtcagtatgacgttccgtctcctaaaagatgaagggttctttgttggggcgtcatctggtctaaatgtagtagccgcagtgcaggttgctaagcaactcggacctggacatgtagtagcttcctgcctgtgtgacacaggtcaacgatattatgcaaggctcttcaacagaacttggctcaaagaaaagggtctatttgatagcgtaccagaagagtgccatggcttcctgcattcatga

SEQ ID NO: 39635 - protein, 365 aa, Strongylocentrotus purpuratus
MASSLRKIGQKILLSHCKRDYNILQRLLSNDVRKGFVGMVGRTPLIRLNKVSEETGCDIVVKAEFANGGGSVKDRAALFLIQQGIDQGRLKSGGTVVEGTAGNTGIGLAHLCNAMGFKCVIYMPNNQSQEKIDMLRLLGAVVFPVPVVPFDDPDNYNHQARRHAESLDNAVWTNQFDNTANRQAHIETTGPEIWQQTEGKVNAVTFGTGTGGTLAGVGMYMKEMSKDVKVILADPQGSVLYNYFTHGKLERSPGSSITEGIGQGRVTDNLKGAPIDEALCIMDTDAVSMTFRLLKDEGFFVGASSGLNVVAAVQVAKQLGPGHVVASCLCDTGQRYYARLFNRTWLKEKGLFDSVPEECHGFLHS

SEQ ID NO: 39636 - DNA, 1596 bp, Strongylocentrotus purpuratus
  CDS (1)..(1596)
atggcaaccacaccacagaatggaggggttgacaagcattggatcgcccctgaccttccctcccgctgcacatggcatctagggatggagaagggaaagagccctcacagtcatgataaaagtgagggtaacaaggttcgagagagggcgcaacccaccatcttgaagatgatcggaaacacgcctctcatccgcatcaacaacgtcaccaaagggaccggtctcaagtgccaaatattggctaagtgtgaatacttcaatgccggtggaagtgtcaaggatcgcattgcgttgaagatggtggaagatgcagagaaagatggaacactgaaacccggatatacactgattgaaccaacgtcgggaaatacagggattggtctagccctggtagctgcggtgaaggggtaccgttgcatcatcgtcatgccggaaaagatgtccaatgagaaggtcgacaccctccgcgccctgggagccgagatcgtcagaaccccgacgtctgcaaggtttgatgctccggaatctcacatcagcgtggcgcagcgtctgaatcgcgagatccccaactccgtgattctagatcagtacaggaatgcaggcaatccgttggcacattacgacaatacggcaacagagatttgggaacagtgcaatggcaaggttgacatggttgtttgtggagctggaacaggaggtactgtgactggaatcggcaggaagctcaaggaactcaaccctcatataaaggttgtaggagttgatcctctgggttctatcctcgcccaaccagagaagcttaacgagacagacgtcacaagctatgaagtggagggaactggttacgacttcattccgacagtactggaccgaacagtcgtggatatgtggctcaaggtcggtgacaaagagtccttcgtaatgtcaaggagacttatcaaggaagagggactactctgtggtggtagtagcggtggctcaatgaccggtgcgttggaggctgccaagtccctaagagaaggccagacttgtgtggtgctcttagcggattcggtcaggaattacatgaccaagttcttgtctgacgactggatggttgagaaggaattcattgacaagcatgtggataacacaccacaacattggtggtggaatcagcccatatcgatgttgaagctgggcgcccccttgaccgtcctcctaacggtcagctgtcaggacgctatcgacattatgaacaaaaatggatttgaccagctgcccgtggtagaagagtccggtgatgtgaagggagttgtaacacttggtagtctcatgtcccagctgttagctgctaaaatcaagccttctacaccagtcgctgactgcctgtacaaacaatttcgaacagtcactctggacaccacgctcggcaatctctcccgagttttcgatcaagatcattttgttcttatccttcaagatcagagactgtactctgcaagccaaactgtggcccagaagaaaatgatcttcggcatcgcgacaagaattgatcttctccattacatcactcagagccaaccaaaaccgaatggcgtagaaaatggttcctaa

SEQ ID NO: 39637 - protein, 531 aa, Strongylocentrotus purpuratus
MATTPQNGGVDKHWIAPDLPSRCTWHLGMEKGKSPHSHDKSEGNKVRERAQPTILKMIGNTPLIRINNVTKGTGLKCQILAKCEYFNAGGSVKDRIALKMVEDAEKDGTLKPGYTLIEPTSGNTGIGLALVAAVKGYRCIIVMPEKMSNEKVDTLRALGAEIVRTPTSARFDAPESHISVAQRLNREIPNSVILDQYRNAGNPLAHYDNTATEIWEQCNGKVDMVVCGAGTGGTVTGIGRKLKELNPHIKVVGVDPLGSILAQPEKLNETDVTSYEVEGTGYDFIPTVLDRTVVDMWLKVGDKESFVMSRRLIKEEGLLCGGSSGGSMTGALEAAKSLREGQTCVVLLADSVRNYMTKFLSDDWMVEKEFIDKHVDNTPQHWWWNQPISMLKLGAPLTVLLTVSCQDAIDIMNKNGFDQLPVVEESGDVKGVVTLGSLMSQLLAAKIKPSTPVADCLYKQFRTVTLDTTLGNLSRVFDQDHFVLILQDQRLYSASQTVAQKKMIFGIATRIDLLHYITQSQPKPNGVENGS

SEQ ID NO: 39638 - DNA, 1098 bp, Candida albicans SC5314
  CDS (1)..(1098): transl_table=12
atgttgggcagaatagctaaacggtcgatctccattactaccaacacaccactcaaactccccttcatcccattagtcagtgaaacagggtttcctggggcaattggaaacacaccattattgaagttaccaaggatttccgaatcaataaatcgtaacatctatgccaaagcagaatttatgaatcctggtggatcaattaaagaccgtgctgctttgtacattatcaaagatgctgaggaaaaagggttgatcaaaccagggggtacaattgttgaaggaactgctgggaatacgggtattggattagctcacgtctgtcgagctcgtggatacaaatgcatcatttacatgccaaacactcaatcgcaaaacaaaattgaaacattgagattgttgggtgcagaagtccacccggtgccagctgttgcatttaccgatccagaaaactataaccaccaggctaaaagacacgcagaaagattagacaatgccgtatggactaatcagtttgacaacgtggccaatagacaagcccatatagaaactacaggaccagaaatctgggcacagttagacggtaaggttgatgcattcacctgctcaaccggaactggtggaacatttgctggtacaacgagatacttgaaggacatttccaatggcaaagtaaaagcagtgttggctgatcctccaggttcagtattatactcgtatatcaagtctggcggtaaagaaatgattagaggcggatcatcattcacagaagggattggtcaaggtagagttaccgataacttgcaaccagacttggagttggttgacgatgcagtcaagatccccgacgaagattcaatcgccatggtctaccgtttgttagacgaagaaggattgtatctcggtggtactggagcattaaatgtagctgctgcagtagaagtggctaaactgttgcctgaaggcagtaatgtcgttactgtattagctgacctggcccataaatacgccgataggatcttctccaaaaaatggttagcagaaaaaggattatacgatgctattccaccacacttgcaaaagtacgctgtattagattag

SEQ ID NO: 39639 - protein, 365 aa, Candida albicans SC5314
MLGRIAKRSISITTNTPLKLPFIPLVSETGFPGAIGNTPLLKLPRISESINRNIYAKAEFMNPGGSIKDRAALYIIKDAEEKGLIKPGGTIVEGTAGNTGIGLAHVCRARGYKCIIYMPNTQSQNKIETLRLLGAEVHPVPAVAFTDPENYNHQAKRHAERLDNAVWTNQFDNVANRQAHIETTGPEIWAQLDGKVDAFTCSTGTGGTFAGTTRYLKDISNGKVKAVLADPPGSVLYSYIKSGGKEMIRGGSSFTEGIGQGRVTDNLQPDLELVDDAVKIPDEDSIAMVYRLLDEEGLYLGGTGALNVAAAVEVAKSLPEGSNVVTVLADSAHKYADRIFSKKWLAEKGLYDAIPPHLQKYAVLD

SEQ ID NO: 39640 - DNA, 1605 bp, Tribolium castaneum
  CDS (1)..(1605)
atggctggagtcatcaatggaaaagaacagaaaacggttcaggcgggtaaaaaaagcgctctgaaatttatctcgaatctcaatgtgaattttgcaacccccgaccaaccgcccaagtgtacgtggcacaaaggggttgacccagaaacaaccccacatcggagggcagaatgcgtcttttataggagaacacaggagaagatttattccgatgtgaccaaagctgtgggaaatacacccctcgtgaggctcaacaaaatcgccaagagctacgggctggagtgcgaaatcctggcgaaatgcgaatatttcaatcccggcggttcggtcaaggaccgaattggattccgaatgattgaagatgccgaaatggcgggaattttgaaaccgggttcgactataattgagccaacttccggaaacaccggaattggccttgctcttggcgcggctgttaaagggtacagatgcattatcgtcatgtcggagaaaatgtcgaacgaaaaagtcgacgttttgaaagcactaggggctgaaatcgtccgaacacccatcactgccgactctaattcgccagaagggctctttggggtcagtcataggctcaagaaggagatccccaactcgattattttggatcagtacagcaatccggggaatcctttggcgcattacgacactacggcggaggagattttgcaccaatgcgacggaaaagtcgacatgatcgttgtggggaccggcaccgggggtacaatcacaggaatcggcaaaaaattcaaggaggtctcccccagtaccctcatcgtgggggccgaccccgtggggtccattttagcgcaaccggaggagctcaaccaaactgattcagatttttacgaggttgagggaataggctacgattttattccaacagggtttgaccgttctgtggtcgatcattgggtcaaagtgaacgatcaagaatcgctccccatggcccggaaattaattaaagaggaaggcttgttgtgcggtggcagcgccggtgccgtggttgctgcggcggtcaaagcgggccgtgatttaaaaaaggggcaaagaatcgtcgttattattcctgatagtatcaggaattacattacaaagtttgtttcggaccactggatggaatcgaaaggtttcaaacagtgtgacaatccaaataatcactggtggtgggaccagagtgttgccaacttcactctggaagcgcttataactgcaacttcaagtatgacatgcgagaggatcttgcatgttatgaaaaaacaaggcatcgatcaggtgcccattgttgacaaaaatggtggaattttgagtatggtcacgatgcagaaaattctaaatgtcttgatcagcggcaatgtgagacccagtgactccatagacaaggcttccgtcactgttttccctaaggtttaccaaaatgcgactttagggcttgtctcaaggattttagagcgtgagaactacgttctagttttggaaaaacaaaatattggacaatcaacaattgaaaaacccatcggaattattacagcagttgatctcttacatcacatttcaacaaatacgcccaaataa

SEQ ID NO: 39641 - protein, 534 aa, Tribolium castaneum
MAGVINGKEQKTVQAGKKSALKFISNLNVNFATPDQPPKCTWHKGVDPETTPHRRAECVFYRRTQEKIYSDVTKAVGNTPLVRLNKIAKSYGLECEILAKCEYFNPGGSVKDRIGFRMIEDAEMAGILKPGSTIIEPTSGNTGIGLALGAAVKGYRCIIVMSEKMSNEKVDVLKALGAEIVRTPITADSNSPEGLFGVSHRLKKEIPNSIILDQYSNPGNPLAHYDTTAEEILHQCDGKVDMIVVGTGTGGTITGIGKKFKEVSPSTLIVGADPVGSILAQPEELNQTDSDFYEVEGIGYDFIPTGFDRSVVDHWVKVNDQESLPMARKLIKEEGLLCGGSAGAVVAAAVKAGRDLKKGQRIVVIIPDSIRNYITKFVSDHWMESKGFKQCDNPNNHWWWDQSVANFTLEALITATSSMTCERILHVMKKQGIDQVPIVDKNGGILSMVTMQKILNVLISGNVRPSDSIDKASVTVFPKVYQNATLGLVSRILERENYVLVLEKQNIGQSTIEKPIGIITAVDLLHHISTNTPK

SEQ ID NO: 39642 - DNA, 969 bp, Prochlorococcus marinus str. AS9601
  CDS (1)..(969): transl_table=11
atggaaatagcaaatgatataacttctctagtgggaaatactccattagtaaaattaaatcgaatcagaaagtattttgattgttatccagaaataatagccaaactagaaagtttcaatccatcagcttccgtcaaggataggatcgcttattcaatgttgtgtaaagctgaagaagaaggattgataacaccagataaaacaacgttaattgaagcaactagtgggaatactggcatcgcattagcaatggttgctgcagcaaaaggctataaattgatattaactatgcctgatactatgagtattgagagaagggcaatgttgagagcatatggagctgaattacagctaactccaggaaaagacggaatgaaaggagctttagatttagctaatgagttgtcttcaactattgcaaatagctatcaatttaatcagtttgaaaactttgctaatccagatattcatgaaagaacaacagcccaagaaatatggtctcaatccaataacaatttagatggactagttacaggggtcggcacaggaggaacaattactggttgtgcacgttttttgaaaaaagttaatccaaattgcaaaatttatgccgtagagccaaaaaaaagtgctgtgatttctggagaaaaagcaggctcacattcgattcaaggaattggagcgggtttcgtaccaaaagtacttaatacgaaattaattgatgaaattataaaaatagatgacgatgaagcattttattttgggcgtttattagctcgattggaaggtcttttatctggtatcagcagtggagcagctttagcagcaactataaaaatcggcaaaagaaaagaactaatgaaaaaaagattgatagttattcttccaagttttggagaaagatatttatcaacagcaatgtttgaatctaatacctcaattcaagccagaaaagatggttatctttaa

SEQ ID NO: 39643 - protein, 322 aa, Prochlorococcus marinus str. AS9601
MEIANDITSLVGNTPLVKLNRIRKYFDCYPEIIAKLESFNPSASVKDRIAYSMLCKAEEEGLITPDKTTLIEATSGNTGIALAMVAAAKGYKLILTMPDTMSIERRAMLRAYGAELQLTPGKDGMKGALDLANELSSTIANSYQFNQFENFANPDIHERTTAQEIWSQSNNNLDGLVTGVGTGGTITGCARFLKKVNPNCKIYAVEPKKSAVISGEKAGSHSIQGIGAGFVPKVLNTKLIDEIIKIDDDEAFYFGRLLARLEGLLSGISSGAALAATIKIGKRKELMKKRLIVILPSFGERYLSTAMFESNTSIQARKDGYL

SEQ ID NO: 39644 - DNA, 969 bp, Prochlorococcus marinus str. MIT 9515
  CDS (1)..(969): transl_table=11
atggaaatcgcaagcgatatcacctccttagttggtaacacacctttagttaaattagatcgtattaaagattactgtaagtgtcatactgaaattatagctaaacttgaaagtttcaatccatcagcatctgttaaagatcgcatagcgtattctatgttaaattcagccgaagaagatggtttaatacttccaggaaaaacgaccttaattgaagcaacaagtgggaatactggcatagctttagcaatggttgcagcagctaaaggctatagattgatactaaccatgccagacaccatgagtattgagagaagggcaatgcttcgagcttatggtgcagaattgcaacttactccaggcacagagggaatgagaggggcattagaattagcgaatgaattatcttcaagtattccaaatagctttcaatttaaccagtttgaaaatctcgcgaatcctgagattcatgaaagaacaacagcaaaagaaatttgggatcaatctaatcaaaatattgatggattagtatctggggttggtactggaggaacaataactgggtgcgctagatttttaaaaaaagtgaatccaaattgcaaaatttacgcagttgagcctgcaaaaagtgcagttatatctggagaaaagccaagttctcactcgatccaaggaataggtgcaggcttcattcctaaagtcctcaatacccagttaatagacgaaataatcaagatagatgatgatgatgcattttattatgggagattattagctcgacttgagggtcttttatcaggaattagtagtggggctgctttagccgcagcaataaaaattggtaaaaggaaagaatttattaaaaaaagattaatagtaatccttccaagtttcggtgaaagatatttatcaacagcaatgtttgaatctaatactgtcgttcaggctagacaagacggttatttataa

SEQ ID NO: 39645 - protein, 322 aa, Prochlorococcus marinus str. MIT 9515
MEIASDITSLVGNTPLVKLDRIKDYCKCHTEIIAKLESFNPSASVKDRIAYSMLNSAEEDGLILPGKTTLIEATSGNTGIALAMVAAAKGYRLILTMPDTMSIERRAMLRAYGAELQLTPGTEGMRGALELANELSSSIPNSFQFNQFENLANPEIHERTTAKEIWDQSNQNIDGLVSGVGTGGTITGCARFLKKVNPNCKIYAVEPAKSAVISGEKPSSHSIQGIGAGFIPKVLNTQLIDEIIKIDDDDAFYYGRLLARLEGLLSGISSGAALAAAIKIGKRKEFIKKRLIVILPSFGERYLSTAMFESNTVVQARQDGYL

SEQ ID NO: 39646 - DNA, 987 bp, Prochlorococcus marinus str. MIT 9515
  CDS (1)..(987): transl_table=11
atggcaaaaatttatgaggacaacagctttgctattggaaacactccattagtaaaattaaagtcagttactaaaaatgctaaagctactgtactagcaaaaattgaaggaaggaatcctgcctatagtgttaaatgcagaattggtgcaaacatgatctgggacgctgagaaaagcgggaaactcacaaaagataaaacaattgttgagcctacatctggaaacactggaattgccctagcttttactgcttcagcaagaggttataagttaatccttactatgccagaatctatgtcgatagaaagaagaagagtgatggcagtattaggggctgaaattgttttaacagaggcttcaaaaggtatgccaggagcaattgctaaagccaaagagattgcggaaagcaatccctctcaatattttatgccaggtcagtttgataatccagcaaacccagaaattcattttaaaacaactgggcctgaaatttgggatgattgcgatggtgcaattgatgttttagttgcaggagttggaacaggtggaacaataacaggagtctcaagatacattaaacaagaaaagggtaaaaatattacttctgtagcagttgaaccatctcatagtcctgttattactcagacacttaatggagaggaagtgaaatcaggaccacataaaattcaaggaataggggcaggatttatccctaaaaatcttgatttatcaattgttgacaaagttgaacaggttacaaacgatgaatctatagaaatggctttaagattggctaaagaggaaggcttgctcgttggtatatcttgcggagctgctgctgctgctgctgttaaattagctgaacaagatgaatatgcaggcaagactattgtcgttgttcttcctgatttagcggaaagatatttatcatcaataatgtttactgaagtcccaagcggcataattgaggaaccaattaacgcttaa

SEQ ID NO: 39647 - protein, 328 aa, Prochlorococcus marinus str. MIT 9515
MAKIYEDNSFAIGNTPLVKLKSVTKNAKATVLAKIEGRNPAYSVKCRIGANMIWDAEKSGKLTKDKTIVEPTSGNTGIALAFTASARGYKLILTMPESMSIERRRVMAVLGAEIVLTEASKGMPGAIAKAKEIAESNPSQYFMPGQFDNPANPEIHFKTTGPEIWDDCDGAIDVLVAGVGTGGTITGVSRYIKQEKGKNITSVAVEPSHSPVITQTLNGEEVKSGPHKIQGIGAGFIPKNLDLSIVDKVEQVTNDESIEMALRLAKEEGLLVGISCGAAAAAAVKLAEQDEYAGKTIVVVLPDLAERYLSSIMFTEVPSGIIEEPINA

SEQ ID NO: 39648 - DNA, 987 bp, Prochlorococcus marinus str. MIT 9303
  CDS (1)..(987): transl_table=11
atgtcccgcatttacgaagacaacagccaggcaatcggcaacactccactggtcaaactgcacgccgtcagcaaaaacgccaaagcaactgttctcgcaaagattgaaggccgcaatcccgcctacagcgtgaaatgccgcattggcgccaacatgatctgggatgccgaaaagcgcggcttactgagcaaagaacgcacgatcattgagcccacctctggcaacacaggtatcgctctggccttcacagcagcagcccgcggctacaaactgatcctcaccatgcccgaatcaatgtcgctagaacggcggcgggtgatggcagtgcttggtgcagaactcatcctcacagaagcagccaaggggatgccaggcgccattgccaaggcaaaagagatcgccgaaagcgatccccagaaatacttcatgcccggtcagtttgagaatccggccaatcccgacatccacagcaaaacaaccggtccagaaatctggaacgactgtgatggcgccattgatgtgctcgtggctggcgtaggcaccggcggcacgatcaccggtgtgtcccgctacatcaagcaggagaaaggcaaatccatcgtttctgtagccgtcgaaccaacccatagcccggtcatcagccaaaccctcaacggggaagacgtcaaacctggtcctcacaaaatccagggcattggagccggctttattcccaaaaacctcgatcttgcgttagtggatcgtgttgagcaggtcagcaatgatgaatccatcgccatggccctgcgcttggcaaatgaagaaggtctactggtgggcatctccagtggtgcggcagttgcagcggctattcgtctggcagaacaacccgaatttgcaggcaaaaccatcgtggtagttctgccagacatggccgagcgttatctctcctcagtgatgtttgagagtgtgcccacaggcatcattcaggaccctgtagctgcctaa

SEQ ID NO: 39649 - protein, 328 aa, Prochlorococcus marinus str. MIT 9303
MSRIYEDNSQAIGNTPLVKLHAVSKNAKATVLAKIEGRNPAYSVKCRIGANMIWDAEKRGLLSKERTIIEPTSGNTGIALAFTAAARGYKLILTMPESMSLERRRVMAVLGAELILTEAAKGMPGAIAKAKEIAESDPQKYFMPGQFENPANPDIHSKTTGPEIWNDCDGAIDVLVAGVGTGGTITGVSRYIKQEKGKSIVSVAVEPTHSPVISQTLNGEDVKPGPHKIQGIGAGFIPKNLDLALVDRVEQVSNDESIAMALRLANEEGLLVGISSGAAVAAAIRLAEQPEFAGKTIVVVLPDMAERYLSSVMFESVPTGIIQDPVAA

SEQ ID NO: 39650 - DNA, 987 bp, Prochlorococcus marinus str. MIT 9303
  CDS (1)..(987): transl_table=11
atgacaatgacatcgcccatgcctatcgctgctgacattacggccttagttgggtgcactccgttggtgcgccttaatcgcttgccacaggtcagtggttgccatgcggaggtgctggccaagttggaaagcttcaaccccactgcctcggttaaagaccgcatcgcgggggccatgatccatgcagcggaggaagctggaaccattgctccggggcgcaccgtgctggtggaacccaccagtggcaacactgggatcgccttggccatggtggctgccgcccgaggctatcgcctcattctcaccatgccggacacgatgagtacagagcgtcgcgccatgcttagggcctatggcgctgaactgcaactcaccccaggcagcgatggaatgactggttccattgagttggcaaaggagttggtggcaaccatccctgaggcttatctgctgcagcagtttgataatcctgcgaatccgcaggtgcatgagcgcacaaccgcagaggagatctggaatgattgcgaggggcggttggatggtctgattactggagtaggaacggggggcacactcacaggttgtgcgcgtttgctcaagcaacgcaatccaagcctgcgagtgtttgcggtagagccagcgttaagccctgttttggcaggtgggagccctgctccccatcgcattcaggggattggtgctggcttcattcctagcgttcttgatctctctttgatcgatgagatcctgccggtctctgatgacgacgcgatggagatgggtcggcgcttggccagggaggagggcttgctaagtggggtaagcagtggcgctgctgttgcggctgcattgcaagtgggtagtagggctgagatggtgggcaagcgtcttgttgttgtcttggcaagttttggtgagcgttatctatcaacgccgatgtttagcgctgcttcggcggtgccggcgcagcgtgatggatacctttga

SEQ ID NO: 39651 - protein, 328 aa, Prochlorococcus marinus str. MIT 9303
MTMTSPMPIAADITALVGCTPLVRLNRLPQVSGCHAEVLAKLESFNPTASVKDRIAGAMIHAAEEAGTIAPGRTVLVEPTSGNTGIALAMVAAARGYRLILTMPDTMSTERRAMLRAYGAELQLTPGSDGMTGSIELAKELVATIPEAYLLQQFDNPANPQVHERTTAEEIWNDCEGRLDGLITGVGTGGTLTGCARLLKQRNPSLRVFAVEPALSPVLAGGSPAPHRIQGIGAGFIPSVLDLSLIDEILPVSDDDAMEMGRRLAREEGLLSGVSSGAAVAAALQVGSRAEMVGKRLVVVLASFGERYLSTPMFSAASAVPAQRDGYL

SEQ ID NO: 39652 - DNA, 909 bp, Clostridium thermocellum ATCC 27405
  CDS (1)..(909): transl_table=11
atgatatatgatgatatgcaacaacttataggaaacacacctcttgtacgtcttcgccattccggttttcctgacggtgtccgcgtatatgccaagcttgaactgtataaccccagtggcagtgtaaaagaccgaatcggaaaatatatgattgaagatgcggaaaaaagaggtgttttggttcccggcagcactatagtggaaggaactgcgggaaataccggactgggcattgcttttgccgcccttaaccggggttaccggttaattatggtggtaccaaccaaattttcacaagaaaaacaggctctgctccgcgccctcggtgcggaagtaattaacacaccccgtgaagaaggaatgttgggagcggaacgaaaagcggaagaattgcggcagtccattcctaaagccgtttcactggagcaattccgaaatccggcaaatccgttggctcattacgaaacaaccggtcctgaaatttgggaggacctgggagcggacatagattattttgtcgccggtgccggaagcggtggtacatatgcgggaatcgtgcgttacttaaaagaacaaaaaccggatatcaaaggtattcttgccgaccccatcggttccacaatgggaggaggagagcatggtgattatgacatagaaggcattggaaacgactttataccggaaacaatggatatgtcccttgtggacgaggttataaaagtcagtgatgatgaagcttttaccgagaccaggcttctggcgcgaaatgaaggtattattgccggctcgtcctccggagcaaatcttgcagcggtacgcaagcttgccatgcggattcaacgcggcaccattgttacagtgctgcctgacaggggtgaacgctatctatccaaaaacctgtttttgtga

SEQ ID NO: 39653 - protein, 302 aa, Clostridium thermocellum ATCC 27405
MIYDDMQQLIGNTPLVRLRHSGFPDGVRVYAKLELYNPSGSVKDRIGKYMIEDAEKRGVLVPGSTIVEGTAGNTGLGIAFAALNRGYRLIMVVPTKFSQEKQALLRALGAEVINTPREEGMLGAERKAEELRQSIPKAVSLEQFRNPANPLAHYETTGPEIWEDLGADIDYFVAGAGSGGTYAGIVRYLKEQKPDIKGILADPIGSTMGGGEHGDYDIEGIGNDFIPETMDMSLVDEVIKVSDDEAFTETRLLARNEGIIAGSSSGANLAAVRKLAMRIQRGTIVTVLPDRGERYLSKNLFL

SEQ ID NO: 39654 - DNA, 936 bp, Clostridium thermocellum ATCC 27405
  CDS (1)..(936): transl_table=11
atggctaaaatagctaagaatctgacggaactcataggaaataccccgcttttggagttgagcaattataacagagcaaacaatttggaagctgtcctgatagcaaagctcgaatacttcaatcctgcatccagtgtaaaggacaggattggttatgcaatgataaaggacgcagaagaaaaaggaataataaacaaagatacggttattatagagcccacaagcggaaatacaggtattgccctggcttttgtggcagctgcaagaggatacagggttatacttacaatgccagagaccatgagtattgaaagaaggaatcttttaaaggctttgggtgccgagttggtgctgacaccgggagccgacggaatgggaggagcgatcagaaaggctgaggagcttgcccgtgaaatacccaactcctttatccctcaacagttctccaatcctgcaaatccggagattcacagaaggaccacggcagaggaaatctggagagacaccgacggacaggtggatatatttgtggcgggagttggaacaggaggaacaatttccggtgtcggtgaagtgttaaagcagcgcaagccggatgtaaagattgttgcggtggagccttttgattcaccggttctgtccggaggaaccaaaggtcctcacaagatacagggaataggtgccggttttgtgccggataatttcaaccgcgcagtggtggatgaaatattcaaggttaaaaatgaagaggcctttgaaacatccagaaagcttgcaagaacggaaggtcttttggtgggaatatcctcgggagctgcagcttttgcagccacacagattgcaaaaaggcctgaaaacaaaggaaagaacattgtggttctgcttcccgatacaggagagagatatttgtccacggcattattccaggatgcatag

SEQ ID NO: 39655 - protein, 311 aa, Clostridium thermocellum ATCC 27405
MAKIAKNLTELIGNTPLLELSNYNRANNLEAVLIAKLEYFNPASSVKDRIGYAMIKDAEEKGIINKDTVIIEPTSGNTGIALAFVAAARGYRVILTMPETMSIERRNLLKALGAELVLTPGADGMGGAIRKAEELAREIPNSFIPQQFSNPANPEIHRRTTAEEIWRDTDGQVDIFVAGVGTGGTISGVGEVLKQRKPDVKIVAVEPFDSPVLSGGTKGPHKIQGIGAGFVPDNFNRAVVDEIFKVKNEEAFETSRKLARTEGLLVGISSGAAAFAATQIAKRPENKGKNIVVLLPDTGERYLSTALFQDA

SEQ ID NO: 39656 - DNA, 909 bp, Clostridium difficile 630
  CDS (1)..(909): transl_table=11
atgttatataataacgcattagagttgataggaaacacacctgtagtaaggctgaataatttaggctgtactaatgggtgttctaacatatatgtaaaattagaaaaagtaaatccagcaggaagtataaaagatagagctgtttatgaaatgttagagggcttagagcaaagaggagaattaaaaaagggagatgtactagttgaagcaactagtggaaatactggtattgcattatctatgataggaaaattaaaaggatatgaagtagtaatcgtaatgcccgaaacaatgagcgttgagagaagagatttaatgaaggcttatggagcaaatttggtgcttacagatggtaaagctggaatggcaggttccatagaaaaagcaaatgaacttttaaaagaaaatccaaactataaaagcctaaaacaatttgaaaataaagataatccaaatgcacattataaaacaacagcagttgaaattatgaatgatgtcaaagatttagatatattcgtatgtggagttggaacaggtggtactttaataggaactgcaagatatttaaaagaacaaaatccaaatataagagtaattgcacttgaaccaaaaaaatctccagctatatcagaaaacaagactggacctcataaaatacaaggaataggtgctaactttgttcctgaaaattatgattctagtgtagttgatgaagtaatattagtagatgatgaagatgcatttgatacagttaaattacttgcagcaaaagagggaattttagtagggatatcttctggagcaaatatatttggtgctatagagatggcaaaaaagtatccagataaaaagatagttacagtagctccagatggagttgataagtatatgtctatgggaatattttaa

SEQ ID NO: 39657 - protein, 302 aa, Clostridium difficile 630
MLYNNALELIGNTPVVRLNNLGCTNGCSNIYVKLEKVNPAGSIKDRAVYEMLEGLEQRGELKKGDVLVEATSGNTGIALSMIGKLKGYEVVIVMPETMSVERRDLMKAYGANLVLTDGKAGMAGSIEKANELLKENPNYKSLKQFENKDNPNAHYKTTAVEIMNDVKDLDIFVCGVGTGGTLIGTARYLKEQNPNIRVIALEPKKSPAISENKTGPHKIQGIGANFVPENYDSSVVDEVILVDDEDAFDTVKLLAAKEGILVGISSGANIFGAIEMAKKYPDKKIVTVAPDGVDKYMSMGIF

SEQ ID NO: 39658 - DNA, 963 bp, Clostridium difficile 630
  CDS (1)..(963): transl_table=11
atgcgtgtacttaataatgttacagaggctataggcaatactcatatgttacatttatccaaaatagcagatgaatttggagttcaaggtaatatttatgcaaagatggaatacttaaatccgggatttagtaaaaaggaccgtgtagcattacaaatgattaccgaagcagaaaatgcaggtttattagttccaggtcaagcagttgtggaattaacaagtggtaatactggaacaggactagcaatagcttgtgcatgtaaaggatataaatttatagcgtgtatgtcaaaaggaaattctatggaaagagcaagaatgatgaaagctttaggtgctgaagtagttcttgtagaccaaatgcctaattcagttcatggacaggtatctggtgaagatttggcacttgtagaaattgaggctcaaaaaatagcaaaagaaagaaatgcatttagagcagaccaatttaatttagaagcttgtaatcatgcacatgaaaagtatacagcagaagaaatgtgggaacaattggatggaaatattgatgtatttgtagattttcttggaagtggtagtacttttgcaggatgttcaaaaacacttaaaaaacataattcttctatcaaatgttatgttgttgaacctgaaacagcagcaatttattcaggtaaagaaataactgaccaagggcataaaatacaaggtggaggatattctatggatttgccattagtagacaagaaacttattgatggttatattcaagttacagacgaggaggcaactgatgtagcaagaaaattagctaaattagaaggtgtatttgcaggattttcttcaggggcaaatgtatgtgcagcaattaagttgttaaagagcagtgaaaaaggaaaaaatatagttttaactcttaatgatagtggtttaaaatatttaagtactgatttatatgaagaattgtaa

SEQ ID NO: 39659 - protein, 320 aa, Clostridium difficile 630
MRVLNNVTEAIGNTHMLHLSKIADEFGVQGNIYAKMEYLNPGFSKKDRVALQMITEAENAGLLVPGQAVVELTSGNTGTGLAIACACKGYKFIACMSKGNSMERARMMKALGAEVVLVDQMPNSVHGQVSGEDLALVEIEAQKIAKERNAFRADQFNLEACNHAHEKYTAEEMWEQLDGNIDVFVDFLGSGSTFAGCSKTLKKHNSSIKCYVVEPETAAIYSGKEITDQGHKIQGGGYSMDLPLVDKKLIDGYIQVTDEEATDVARKLAKLEGVFAGFSSGANVCAAIKLLKSSEKGKNIVLTLNDSGLKYLSTDLYEEL

SEQ ID NO: 39660 - DNA, 969 bp, Prochlorococcus marinus str. MIT 9301
  CDS (1)..(969): transl_table=11
atggaaatagcaaatgatataacttctcttgttggaaataccccattagttagattaaatcgaattagaaatcattttaattgctatccagaaataatagccaaattagaaagtttcaatccatcagcgtccgtgaaggatcgcatcgcttattcaatgttatgcaaagcagaagaagacggtttgataaaaccagataaaacaacattgattgaagctacaagtggtaatacgggcatcgcattagcaatggttgctgcagcaaaaggctataaattgatattaactatgccggatacgatgagtattgagaggagggcaatgttgagagcatatggagctgaattacagttaacgcctgggaaagaaggaatgaaaggagctttagatttagctaatgagttgtcttcaaccattgcaaatagctatcaatttaatcaatttgaaaactttgctaatccggatattcatgaaagaacaacggcacaagaaatatggtctcaatccaataacaatttagatggactcgttacaggagtaggaacaggaggaacaatcacgggttgcgcacgtttcctgaaaaaagttaatccaaattgcaaaatttatgctgtagagccccaaaaaagtgctgtgatttctggagaaaaagctggatctcattcgattcaaggaataggagcaggtttcgtgccgaaagtactggatactaaattaattgatgaaattataaaaatagatgacgatgaagcattttattatgggcgtttattagctcgattggaaggccttttatctggcataagtagcggtgcagctctagcagcaactattaaaatcggtgaaaggaaagaactaactaacaaaagattgatagttattcttccaagttttggtgaaagatatttatcaacagcaatgtttgaatctaatacttcaattcaagccagaaaagatggttatctctaa

SEQ ID NO: 39661 - protein, 322 aa, Prochlorococcus marinus str. MIT 9301
MEIANDITSLVGNTPLVRLNRIRNHFNCYPEIIAKLESFNPSASVKDRIAYSMLCKAEEDGLIKPDKTTLIEATSGNTGIALAMVAAAKGYKLILTMPDTMSIERRAMLRAYGAELQLTPGKEGMKGALDLANELSSTIANSYQFNQFENFANPDIHERTTAQEIWSQSNNNLDGLVTGVGTGGTITGCARFLKKVNPNCKIYAVEPQKSAVISGEKAGSHSIQGIGAGFVPKVLDTKLIDEIIKIDDDEAFYYGRLLARLEGLLSGISSGAALAATIKIGERKELTNKRLIVILPSFGERYLSTAMFESNTSIQARKDGYL

SEQ ID NO: 39662 - DNA, 903 bp, Herminiimonas arsenicoxydans
  CDS (1)..(903): transl_table=11
atgcaatatttgactatcgaagacaccataggcaacacgccgctggtgcaactcaagcgcatggacggcgaagagtcggcgcgtcgcaacaacgtcattctcggaaagctggagggcaacaatcccgccggttcggtgaaagaccggcctgccttatccatgatcaagcatgcagaagaacgcggcaccatcaagccaggtgataccttgatcgaggcaaccagcggcaataccggcatcgcactggcgatggttgcggcgatgcgcggatacaagatgatcttgctgatgccggaaaatttaagtgaagagcgtcgccaggcgatggctgcgtatggtgcgaaaattgtgctgacgccgaaagctggcggcatggaatatgcacgcgatctggcggagcaaatgcagaaaaatggcgaaggtttgattctcgaccagtttgccaatcccgacaatccacgttcgcattatgaaactaccgggccggaaatctggcgtgataccggcgggaaaatcactcatttcattagtgcgatgggcactaccggcaccatcattggtgtgtccgaatacctgaaggaaaaaaatccggacatcagaatcattggcgtgcagccggaagagggttcacagattcccggtatcagaaaatggccggaagcctatctgcccaagatttatgatgcaagcaaggtcgatcagctggaatatgtcagccagggggttgccgagcgaatggcgcgacgtctggcaatggaagaagggattttctgcggaatttccgcggcaggcgcgtgcgaagtcgcgctgcgaatttctcaaacgactgaaaatgcgacgattgtattcgttgtctgcgaccgtggcgatcgctatctttcaacaggcgttttcccggcctga

SEQ ID NO: 39663 - protein, 300 aa, Herminiimonas arsenicoxydans
MQYLTIEDTIGNTPLVQLKRMDGEESARRNNVILGKLEGNNPAGSVKDRPALSMIKHAEERGTIKPGDTLIEATSGNTGIALAMVAAMRGYKMILLMPENLSEERRQAMAAYGAKIVLTPKAGGMEYARDLAEQMQKNGEGLILDQFANPDNPRSHYETTGPEIWRDTGGKITHFISAMGTTGTIIGVSEYLKEKNPDIRIIGVQPEEGSQIPGIRKWPEAYLPKIYDASKVDQLEYVSQGVAERMARRLAMEEGIFCGISAAGACEVALRISQTTENATIVFVVCDRGDRYLSTGVFPA

SEQ ID NO: 39664 - DNA, 903 bp, Burkholderia vietnamiensis G4
  CDS (1)..(903): transl_table=11
atggcttacaaaacgattgaagacacgatcggcaacaccccgctcgtgcaactggtccgcctgccggacgacgagattcgcgcgcgcaacaacgtcgtgctcgcgaagctcgaaggcaacaacccggccggctccgtgaaggatcgtccggcgctgtcgatgatcagcaaggcggaagcgcgcggccgtatcaagccgggcgacacgctgatcgaggcgacgagcggcaacacgggcatcgcgctcgcgatggccgctgcgatccgcggctacaagatggtgctggtcatgccggaggatctgtcggtcgagcgccgccagagcatggccgcgtacggcgcggaaatcatcctgacgccggtgaagggcggcatggaactggcgcgcgacctcgccgagcagatgcagcgcgaaggcaagggcgtgatcctcgaccagttcggcaacccggacaaccccgtcgcgcattacgagtcgaccggtccggagatctggcgcgacaccgaaggacgcgtcacgcacttcgtgtccgcgatgggcacgacgggcacgatcatgggcacgtcgcgctatctgaaggagcagaatccggcgatcgagatcatcggcgcgcaaccggaagacggctcgcgcattccgggcattcgcaagtggccggaagcctacatgccgacgatcttcgatcgcagccgcgtcgatcgcgtcgagaacgtgagccaggccgcgtccgaaacgatggcgcgccggctcgcggccgtcgaaggcatttttgccgggatctcgtcgggcggcgcctgcgaagtcgcgatgcgcatcgcgcggcaggtcgagaacgcgacgatcgtgttcatcgtctgcgaccgcggcgaccgttacctgtcgaccggcgtgtttcctgcgtga

SEQ ID NO: 39665 - protein, 300 aa, Burkholderia vietnamiensis G4
MAYKTIEDTIGNTPLVQLVRLPDDEIRARNNVVLAKLEGNNPAGSVKDRPALSMISKAEARGRIKPGDTLIEATSGNTGIALAMAAAIRGYKMVLVMPEDLSVERRQSMAAYGAEIILTPVKGGMELARDLAEQMQREGKGVILDQFGNPDNPVAHYESTGPEIWRDTEGRVTHFVSAMGTTGTIMGTSRYLKEQNPAIEIIGAQPEDGSRIPGIRKWPEAYMPTIFDRSRVDRVENVSQAASETMARRLAAVEGIFAGISSGGACEVAMRIARQVENATIVFIVCDRGDRYLSTGVFPA

SEQ ID NO: 39666 - DNA, 1035 bp, Bradyrhizobium sp. ORS278
  CDS (1)..(1035): transl_table=11
atgaccattagaaacgacgtcgtcgcggcgatcggcaacacgcccctgatcaagctcacgcgcgcctcggaggcgaccggctgcaccatcctcggcaaggccgagttcatgaaccccggccagtcggtcaaggatcgcgccggcaaatggatgatcctggaggccgagaagcgcggcgatctcaagccgggcggcctcgtcgtggagtcaacggccggcaacaccggcatcggtcttgccgtggtcgccaatgcccgtggctatcgcacgctgatcgtgattccggagacgcagagccaggaaaagaaggacatgctgcggatgtgcggtgccgatctcgtcgaggtcccggctctgccgttcaacaacccgaacaattacgcccatgtcggccgccggcttgccgacgagttgcgcaagagcgagccgaacggcgtgctgttcgccgaccagtggaacaacctcgacaacgccaaggcgcattacgagtcgaccggtccggagatctgggagcagaccggcggcaaggtcgacggcttcgtctgcgcggtcggcaccggcggcacgctggccggcaccagccgctatctgaaggagaaaaacgccggcatcgtcacagcctgcgccgatccgcacggctttgcgatgtacaactggttcaagaaccgcgaggtcaagtccacgccgggcgattccatcaccgagggcatcggcatcggccgggtcacgccggtgatcgagaccgccaaggtcgataccgcgttcctgatctccgatgaggacgcggtcaacaccatctacgatctgctgcagcacgaaggcctgtgcctgggcggctcgagcggcgtcaatatcgccggcgcggtgcagctcgccaagcagcttgggcccggccacaccatcgtgaccatcctgtgcgacccgggcaaccgctatcagtcgaagctgtacaatccggagttcatgcggtcgaagaacctgcccgtgccggaatggctggagcggcgcagcggcatcaagccgccattcgtgtga

SEQ ID NO: 39667 - protein, 344 aa, Bradyrhizobium sp. ORS278
MTIRNDVVAAIGNTPLIKLTRASEATGCTILGKAEFMNPGQSVKDRAGKWMILEAEKRGDLKPGGLVVESTAGNTGIGLAVVANARGYRTLIVIPETQSQEKKDMLRMCGADLVEVPALPFNNPNNYAHVGRRLADELRKSEPNGVLFADQWNNLDNAKAHYESTGPEIWEQTGGKVDGFVCAVGTGGTLAGTSRYLKEKNAGIVTACADPHGFAMYNWFKNREVKSTPGDSITEGIGIGRVTPVIETAKVDTAFLISDEDAVNTIYDLLQHEGLCLGGSSGVNIAGAVQLAKQLGPGHTIVTILCDPGNRYQSKLYNPEFMRSKNLPVPEWLERRSGIKPPFV

SEQ ID NO: 39668 - DNA, 969 bp, Bradyrhizobium sp. ORS278
  CDS (1)..(969): transl_table=11
atggagtcgtcggctgcgacacagcgtcccggacgcgggcgcgtatttgattcaattatcgaggcattcggcaatacgccgattgtgcggctgcgaaagttgccggagcagcatggcgtcaaggcgaccatcctcgccaagctggaatacttcaatcctgccgcgagcgtgaaggaccgcattggcgtcggcatgatcctggcgatggagcaggccggtgtgctcaagccggactccgttctgatcgagccgacctcgggcaataccggcattgcgctcgccttcgtcgcggcggcgcgcggctacaagctgaagcttgtcatgccggagtcgatgtcggtggagcggcgcaagatgcttgccttcctcggcgccgagatcgtgctgacaccggcggcgcagggcatgaagggcgcgatcgcgaccgccgaggagctgttgcgaaccacgccgaactcggtgatgccgcagcagttcaagaacctcgccaatccggagatccatcgccgcacgacggcggaggagatctggaacgacaccgcggggaatatcgacctgttcgtcgccggcgtcggtaccggaggcaccattaccggcgtcggccaggtgctgaagtcgcgcaaacccggactcaaggtggttgctgtcgagccggaggagagcccggtcctgtcgggcggccagcattcgccgcacaagatccagggcatcggcgccggcttcgtcccggatattctcgaccggtccgtgatcgacgagatcgtcaagatcaacagcgccacggccatcgagacctcgcgcgcgctggcgcgcaacgagggcattcccggcggcatttcctcgggcgcggcgatcgcggcggcgatcgagctcggcaagcggccggagaatgccggcaagacgatcctggcgatcgtcccgtcgttctccgagcgctatctctccacggcgctgttcgaagggatctga

SEQ ID NO: 39669 - protein, 322 aa, Bradyrhizobium sp. ORS278
MESSAATQRPGRGRVFDSIIEAFGNTPIVRLRKLPEQHGVKATILAKLEYFNPAASVKDRIGVGMILAMEQAGVLKPDSVLIEPTSGNTGIALAFVAAARGYKLKLVMPESMSVERRKMLAFLGAEIVLTPAAQGMKGAIATAEELLRTTPNSVMPQQFKNLANPEIHRRTTAEEIWNDTAGNIDLFVAGVGTGGTITGVGQVLKSRKPGLKVVAVEPEESPVLSGGQHSPHKIQGIGAGFVPDILDRSVIDEIVKINSATAIETSRALARNEGIPGGISSGAAIAAAIELGKRPENAGKTILAIVPSFSERYLSTALFEGI

SEQ ID NO: 39670 - DNA, 963 bp, Dehalococcoides sp. BAV1
  CDS (1)..(963): transl_table=11
atggaaaatagaacatctaaatataatatccataatggacgcggcattgcgtcaaacattacagaacttataggcaatactccgctggtacgtttaaataagataggcagcgggctaaaggccgaaattatactcaaactggaatcgtttaaccccacccacagtgccaaagaccgtccggctctgtatatgataaaaaaggccgagcaggaaggcaagcttatacccggcagtatcgtaatagagtcaaccagcggcaataccggcatagctctggctgccgtttgcgctgccaaaggttaccggttgatgctcaccatgcctgaaaacttttcggtggaacgcaggcgtttactccgtctgctgggagcagagctggtgctcaccccggcagaactgggcatgcagggggctatagaaaaggcggccgaacttaaggctaaactgccccaagcctttataccgaaccagtttgaaaatccagctaatcctgaaagccattataaaactactgccgaagaaatctggcgggatacagacggcaaagtggatatactggtggcaggcgtaggcaccggcggtaccataagtggtatcgccagagggctaaaggcagccaaaccatctatacggataatagcggtagagccggctgagtcacccgtaatttctggtggcgaacctcagcctcaccttattcaaggcataggggcaggctttataccccgcatactctctctggaactgatagataaagttatcagggtacccggaaaagaagccgtcaacatggctctccggttggcacgcgaagaagggattatggctggtatttcttccggagcggcactttgggcggcactggaaacagccaaacaagcagaaaactcaggcaagcttatcgtcgccatcatgccggacagcggcgaacggtatctgtccagcctgcctctgggtgactag

SEQ ID NO: 39671 - protein, 320 aa, Dehalococcoides sp. BAV1
MENRTSKYNIHNGRGIASNITELIGNTPLVRLNKIGSGLKAEIILKLESFNPTHSAKDRPALYMIKKAEQEGKLIPGSIVIESTSGNTGIALAAVCAAKGYRLMLTMPENFSVERRRLLRLLGAELVLTPAELGMQGAIEKAAELKAKLPQAFIPNQFENPANPESHYKTTAEEIWRDTDGKVDILVAGVGTGGTISGIARGLKAAKPSIRIIAVEPAESPVISGGEPQPHLIQGIGAGFIPRILSLELIDKVIRVPGKEAVNMALRLAREEGIMAGISSGAALWAALETAKQAENSGKLIVAIMPDSGERYLSSLPLGD

SEQ ID NO: 39672 - DNA, 987 bp, Synechococcus sp. WH 7803
  CDS (1)..(987): transl_table=11
atgtcacgcgtttacgccgacaacagccaggccatcggcaacacccccctggtgcgtctcaaccacgtcaccaaaggctgcaaagccaccgtgctcgccaaggttgagggtcgcaacccggcctacagcgtgaagtgccgcatcggcgccaacatgatctgggacgctgaaaagcgaggggctctcaccgaaggcaaggtgatcgtggaacccacctccggcaacaccggcattgccctggcctttaccgccgcagcgcgcggctacaagctcgtgctcaccatgcccgagtcgatgtccatcgagcgtcgccgtgtgatggccgtgctcggcgctgagattgtgctcaccgaggccgccaaaggcatgcccggtgccattgccaaggccaaggagatcgcagccagcgatcccgccaaatacttcatgcccgggcagtttgagaatcctgccaaccctgaaattcacttcaaaaccacagggcctgagatctggaacgactgtgacggagccatcgacgttctggtgtccggcgtcggcaccggcggcacgatcactggcgtgtcccgttacatcaagaacgaggctggcaaggcgattgagtctgtggccgtggagcccagccacagccccgtgatcacccagaccctcaatggtgaggagatcaagcctggtcctcacaagatccagggcatcggcgctggcttcatccccgagaacctcgatctttccgtggtcgacaaggtggagcaggtgaccaatgaggagtccattgccatggctcagcgcctcgccaaagaggaggggctgctggtgggaatctcctgcggtgcagcagcagctgccgccatccggctggcgcaacaggatgcctacgccggcaaaaccatcgtggtggtgctgcccgacctggccgagcgttacctgtcgtcggtgatgttcgcggatgtgcccaccggcatcatcgaacagcctgttgctgtttga

SEQ ID NO: 39673 - protein, 328 aa, Synechococcus sp. WH 7803
MSRVYADNSQAIGNTPLVRLNHVTKGCKATVLAKVEGRNPAYSVKCRIGANMIWDAEKRGALTEGKVIVEPTSGNTGIALAFTAAARGYKLVLTMPESMSIERRRVMAVLGAEIVLTEAAKGMPGAIAKAKEIAASDPAKYFMPGQFENPANPEIHFKTTGPEIWNDCDGAIDVLVSGVGTGGTITGVSRYIKNEAGKAIESVAVEPSHSPVITQTLNGEEIKPGPHKIQGIGAGFIPENLDLSVVDKVEQVTNEESIAMAQRLAKEEGLLVGISCGAAAAAAIRLAQQDAYAGKTIVVVLPDLAERYLSSVMFADVPTGIIEQPVAV

SEQ ID NO: 39674 - DNA, 969 bp, Synechococcus sp. WH 7803
  CDS (1)..(969): transl_table=11
atggcgattgccccagacatcacagccttggtgggatgcacgcccatggtgcggctcaatcgtctgcccaaggcctggggatgcacggccgagatcgtggccaagttggagagctttaaccccacggcgtcggtgaaggaccgcattgccggcgcgatggtggaggccgctgaaagcgctggaaccattgcccctgagcggaccgttctggtggaacccaccagtggcaacaccggaatcgccctggcgatggtggcagcggcccgaggttatcggctgatcctcacaatgcccgacacgatgagcacggaacgccgggcgatgctcagggcctatggagctgagctgcagctcactccaggtatggaggggatgcagggagcgatcgaacgggcgcgtgaactggttgacgagatccctggggcctacctcctccagcagttcgataaccccgcgaaccctgcggtgcacgcagcatccacagccgaagagatctgggctgatactgagggttccctggatgctgtggtggccggggtggggaccgggggaaccatcaccggttgcgcccgagtgctgaaagagcgccagcccaagctttcggtggtcgccgtggagccggctgccagtccggtgttggcgggtggcgttgctggcccccatcggttgcagggaatcggcgctggcttcatcccgcccgttctggagatggatctcatcgatgagatcatcgcggtcagcgacgatgaggccatggacgtcggtcggcgtctcgcccgggaagagggtctgttgtgcggggtgagcagtggtgccgcggtggctgctgcgctgaggcttgggcaacgcccagccatggagggccggcgcattgtggtgatcctggccagtttcggagagcgctatctctccacaccgatgttcagcactgcggcgccgcttccggcacgccgggacgctcagctgtga

SEQ ID NO: 39675 - protein, 322 aa, Synechococcus sp. WH 7803
MAIAPDITALVGCTPMVRLNRLPKAWGCTAEIVAKLESFNPTASVKDRIAGAMVEAAESAGTIAPERTVLVEPTSGNTGIALAMVAAARGYRLILTMPDTMSTERRAMLRAYGAELQLTPGMEGMQGAIERARELVDEIPGAYLLQQFDNPANPAVHAASTAEEIWADTEGSLDAVVAGVGTGGTITGCARVLKERQPKLSVVAVEPAASPVLAGGVAGPHRLQGIGAGFIPPVLEMDLIDEIIAVSDDEAMDVGRRLAREEGLLCGVSSGAAVAAALRLGQRPAMEGRRIVVILASFGERYLSTPMFSTAAPLPARRDAQL

SEQ ID NO: 39676 - DNA, 930 bp, Leptospira interrogans serovar Copenhageni str. Fiocruz L1-130
  CDS (1)..(930): transl_table=11
atgaaagctaagaacattttagaaacgatcggaaatacacctcatgtaaaaattaaccgtttgtttaatacgaaaagcgaggtttatgcaaaattagaaagatccaatccaggcgggtccattaaggatcgcattgcactttccatgatcgaagacgcggaaaaaacaggtaaacttactaaagacagcatcattgtagaacctacttctggaaatactggaattggtttagcactcgttgcagcggttaaaggttataagttacttttagttatgcctgaatctatgagtatcgagagaagaagaattatggcggcgtacggagcggagtttgaactgactccaagagaaaaaggaatgccgggggcgatcgaaaaggcaaaacaaattgtcgcagaaaatccaaaagcgtggatgcctcaacaatttgaaaacgaagcaaatattaagattcacgtagaaacaaccgctcaagagattgcaaaagattttccagatgggctggactacgtaattacaggtgtcggcactgggggacatatcacgggtgtggcgcaggtcctaaaacaaaaatttcctaaattgaaagtgtttgccgtggaaccagaagcatctccagtaatctccggaggaaaaccgggaccacatccgattcaaggaattggtgcgggatttattcctaaaaatttacatacaaatcttttagacggaactatacaaattagtaaagacgaagcgtttgagtatgcacaaagagcggcaaaagaagaaggactttttataggagtttcatccggagcggcacttgcagcggttgcaaaaaaattgcctgaaattccggaaggttcaagaatattaactttttcttatgacactggagaaaggtatctttctatcgaagggcttttccctgttccatctaacgcataa

SEQ ID NO: 39677 - protein, 309 aa, Leptospira interrogans serovar Copenhageni str. Fiocruz L1-130
MKAKNILETIGNTPHVKINRLFNTKSEVYAKLERSNPGGSIKDRIALSMIEDAEKTGKLTKDSIIVEPTSGNTGIGLALVAAVKGYKLLLVMPESMSIERRRIMAAYGAEFELTPREKGMPGAIEKAKQIVAENPKAWMPQQFENEANIKIHVETTAQEIAKDFPDGLDYVITGVGTGGHITGVAQVLKQKFPKLKVFAVEPEASPVISGGKPGPHPIQGIGAGFIPKNLHTNLLDGTIQISKDEAFEYAQRAAKEEGLFIGVSSGAALAAVAKKLPEIPEGSRILTFSYDTGERYLSIEGLFPVPSNA

SEQ ID NO: 39678 - DNA, 915 bp, Thermus thermophilus HB27
  CDS (1)..(915): transl_table=11
atgcgggtggagggcgccatcggcaagacccccgtggtccgcctcgccaaggtggtggagccggatatggccgaggtctgggtcaagctggaagggctgaaccctgggggctccatcaaggaccgccccgcctggtacatgatcaaggacgccgaggagcgggggatcctgaggccgggctcgggacaggtcatcgtggagcccacgagcggcaacaccggcatcggcctcgccatgatcgccgcaagccggggctaccgcctcatcctcaccatgcccgcccagatgtccgaggagcggaagcgggtcctcaaggcctttggcgccgagctcgtcctcaccgacccggaaaggcggatgctcgcggcgagggaggaggcgctaaggctcaaggaggagctcggggccttcatgccggaccagttcaaaaaccccgccaacgtccgggcccactacgagaccacggggcccgagctctacgaggccctggagggccgcatagacgccttcgtctacggctccggcaccgggggaacgatcacgggggtgggccgctacctcaaggaaaggatcccccacgtgaaggtcatcgccgtggagcccgcccgctccaacgtcctctccggggggaagatggggccgcaccagttccagggcatgggcccgggcttcatccccgagaacctggacctttccctcctggacggggtgatccaggtctgggaggaggacgcctttcccttggcccggcggctcgcacgggaggaggggcttttcctggggatgagctcgggggggatcgtctgggccgccctccaggtggcccgggagctcggccccgggaagcgggtggcctgcatcagcccggacggcggctggaagtacctctccacccccctttacgccgagccctag

SEQ ID NO: 39679 - protein, 304 aa, Thermus thermophilus HB27
MRVEGAIGKTPVVRLAKVVEPDMAEVWVKLEGLNPGGSIKDRPAWYMIKDAEERGILRPGSGQVIVEPTSGNTGIGLAMIAASRGYRLILTMPAQMSEERKRVLKAFGAELVLTDPERRMLAAREEALRLKEELGAFMPDQFKNPANVRAHYETTGPELYEALEGRIDAFVYGSGTGGTITGVGRYLKERIPHVKVIAVEPARSNVLSGGKMGPHQFQGMGPGFIPENLDLSLLDGVIQVWEEDAFPLARRLAREEGLFLGMSSGGIVWAALQVARELGPGKRVACISPDGGWKYLSTPLYAEP

SEQ ID NO: 39680 - DNA, 927 bp, Desulfovibrio vulgaris subsp. vulgaris str. Hildenborough
  CDS (1)..(927): transl_table=11
atggacatcgcatcaagcatgacggacctcgtgggcaagacgcccatggtgcgcctcaacaaggtcacactcggctgtgtcgccgaggtcgtcgccaaactcgagaatttcaacccgtgcagttccgtgaaggaccgcatcgccctcaacatggtggaagccgccatcgcacggggagagattgccccgggcgcggtgcttgtggaacccaccagcggcaacaccggagtgggccttgccttcgtatgcgccgtgcgcggcctcaagctggtgctgaccatgccggagagcatgagcgccgaacgccgggcactgctcaaggccttcggcaccacgctggtgctcacgcccgcagccaaggggatgcgtggcgcggtggaagaggccgagcgcatcgtggccgacacccccggtgcggtgatgctgcaacagttcgccaaccccgacaaccccgctgcccatgaggccaccaccggcccggagatatgggccgacaccgacggcatgatcgactgcttcgtggcgggggtcggcacgggcggcaccatcaccggtacgggacgctacctcaagggacgcaaccccgacatccgggtcatcgccgtcgaacccgcagaatcggccgtgctttccggcggtgcccccggcccccatgccattcagggcatcggtgcggggttcgtcccgcccgtgctcgacacgtcggtctatgacgaggtgatgcccgtccccggtgccgacgcgctgaccatggcccggcggctgcttcaggaggagggcatcctgtgcggcatctcttcgggtgccaacgtgcatgccgccatcgcctacgccagacgccccgagaatgcgggcaagcgcgtggtgtgcatcatctgcgacacgggcgaacgctacctttcgacaccgctcttcgcccccgagtag

SEQ ID NO: 39681 - protein, 308 aa, Desulfovibrio vulgaris subsp. vulgaris str. Hildenborough
MDIASSMTDLVGKTPMVRLNKVTLGCVAEVVAKLENFNPCSSVKDRIALNMVEAAIARGEIAPGAVLVEPTSGNTGVGLAFVCAVRGLKLVLTMPESMSAERRALLKAFGTTLVLTPAAKGMRGAVEEAERIVADTPGAVMLQQFANPDNPAAHEATTGPEIWADTDGMIDCFVAGVGTGGTITGTGRYLKGRNPDIRVIAVEPAESAVLSGGAPGPHAIQGIGAGFVPPVLDTSVYDEVMPVPGADALTMARRLLQEEGILCGISSGANVHAAIAYARRPENAGKRVVCIICDTGERYLSTPLFAPE

SEQ ID NO: 39682 - DNA, 951 bp, Picrophilus torridus DSM 9790
  CDS (1)..(951): transl_table=11
atgtcagatataaaagagaatgttctcaatgcaataggaaacacacctcttgtaaaattaaataaaatcaacgttaaaaatatagaaatatatgtaaagcttgagtattacagtcccggcatgagcataaaggacagaatagcccttggcatgatagaggatgccgagagaaagggtttgatcgagccgggtgacacaataataggcaaaacctcaggtaataccggcatagggcttgcgatagcctgtgctgtaaagggatacagatttgttgcggtcatgtccgctggaaattccgcagaaagacaaaaaatactaagggcccttggtgccgaggtcgttcttgtgccgcagcaacccggtgaggaacctggaagaatatcaagaaaggacaacgatgccgttgagaaaaagacacaggaattaacagaaaaattgaatgcatacaggccaaatcagtacataaattcaatgaactggaaggttcatcagcacacaacaggccaggagataataaggcagacttctggaaggctggacgcgtttgttgcatacataggcaccggtggaacctttgttggaatagcaagggccctgaaaagctttaacaatgatataaaatgctatcctgttgaaccagatgttgcagcatttctcgcaggcaaaaaggttataacgacgcagcatctgatccagggtggcggtcatgcagtgaaacctccgttctgggatgaatcaatagtggatggatatatacaggtttccgaggatgaggcaataaaaactgcaagggcacttgcaaaaaatgagggtatactaacaggtttttcaggcggtgcaaacgttgcagccgcagccaagctcgacgattcattaaggccgggcagcatcgtggttacggttttacctgatacaggacttaaatacctttcaacggttctctatgagtag

SEQ ID NO: 39683 - protein, 316 aa, Picrophilus torridus DSM 9790
MSDIKENVLNAIGNTPLVKLNKINVKNIEIYVKLEYYSPGMSIKDRIALGMIEDAERKGLIEPGDTIIGKTSGNTGIGLAIACAVKGYRFVAVMSAGNSAERQKILRALGAEVVLVPQQPGEEPGRISRKDNDAVEKKTQELTEKLNAYRPNQYINSMNWKVHQHTTGQEIIRQTSGRLDAFVAYIGTGGTFVGIARALKSFNNDIKCYPVEPDVAAFLAGKKVITTQHLIQGGGHAVKPPFWDESIVDGYIQVSEDEAIKTARALAKNEGILTGFSGGANVAAAAKLDDSLRPGSIVVTVLPDTGLKYLSTVLYE

SEQ ID NO: 39684 - DNA, 918 bp, Bacillus thuringiensis serovar konkukian str. 97-27
  CDS (1)..(918): transl_table=11
atgaaattatgtgaaaacgtaacagaattaataggagatacacctgtcgtccgattatctaaatttattccagaagacgcagcagatgtgtatgtaaaactagaaatgtttaatccatcgcgcagtgtgaaagaccgtgctgcctataatttactgcacgttgcagaagagaatggtcttatcaaaccaggagatacaattattgaaccgacaagtggaaatacagggataggcttagcaatgaatgcagcagctaaagggtataaagcgattttaattatgccagataatatgtcaaaagagcgtataaatttattaaaagcatacggtgcagaagtagttttaacaccagcagaacaaagaatgccaggagcaattgcgaaggcgttagaactgcaaaagcaaattccaaatagttttattccgcagcaatttgaaaatccagcaaacccgaatattcaccgttatacaactgcacttgaaatttatgaacaaatggatggagagcttgatgcgtttgtagcaacggcaggaacaggcggaactattacagggactggggaaacattaaaagagaaactaccaaacttatatattgcagtagtagaaccgaaaggatctcccgttttatcaggcggtgtgccaggtcctcataaactagtaggaacaagtccggggtttattccgaaaaatttaaatacagaagtgtataacgaaattattcaaattgcagatgaagaggctttaacgacaatgagaaacttagctagacaagaaggtttattagtagggccgtcttccggagcttctgtttatgccgcaattatgattgcaaaacgtttaggcactggaaaaaaagttttatgtgttgcacctgatacaggggaacgttatttgagtatgggattatttgaatga

SEQ ID NO: 39685 - protein, 305 aa, Bacillus thuringiensis serovar konkukian str. 97-27
MKLCENVTELIGDTPVVRLSKFIPEDAADVYVKLEMFNPSRSVKDRAAYNLLHVAEENGLIKPGDTIIEPTSGNTGIGLAMNAAAKGYKAILIMPDNMSKERINLLKAYGAEVVLTPAEQRMPGAIAKALELQKQIPNSFIPQQFENPANPNIHRYTTALEIYEQMDGELDAFVATAGTGGTITGTGETLKEKLPNLYIAVVEPKGSPVLSGGVPGPHKLVGTSPGFIPKNLNTEVYNEIIQIADEEALTTMRNLARQEGLLVGPSSGASVYAAIMIAKRLGTGKKVLCVAPDTGERYLSMGLFE

SEQ ID NO: 39686 - DNA, 999 bp, Acinetobacter sp. ADP1
  CDS (1)..(999): transl_table=11
atgtctaccgatcaagagtttaaagcaccagcaaatttgggcatagcagtatattcaaataatgcagaagcaattggaaatacgcctttagtacgcattaatcgtattattaaaactggtgcaacggttttaggtaaagttgagagtcgaaaccctgcattctcagtaaaatgccgcattggtgctgctttaattgcagatgcagagaaacgtggtgtattaaaatctggtatgcatattgttgaaccgactagtggcaatacagggattgctttagcttttgttgcagctgcaaaaggttacccgattaccttaaccatgccagcaagtatgagtcttgagcgccgaaaagtgcttaaagctttcggtgcaaacttggttttgacagaaccagcaaaaggaatgaaaggtgcagtggaggaagcagtacgattggcgacagaacagccagatatatatttcctgccacaacagttcgaaaatccagctaaccctaaaattcacgaacaaaccacagggccagaaatttgggatgcaaccaatgggcaagttgatattttagtcgctggagttggtacaggcggcacaatttcaggtatttcgcattattttgaaaaagttcagaataaacccatttattcagttgcagttgaacctgcagaatctccgattatcactcagaccaagcgtggtgaggagattacacctgcacctcataaaatccaaggtattggcgccaattttattccaaagaatctggacttagatattgtagatgaagtcatgcccatcactagtgatgaagcattggaatgggctcgtaaatgtgcgactcaagaaggaattttggggggtatttcatgtggtgcagccttagctgctgctgcaaaaattgcagaacgacctgaaaatgaaggtaaaactattgttgtgattttaccagatagcggtgaacgctacttatcttctgtattatttgaaggtatgtttgaggaatag

SEQ ID NO: 39687 - protein, 332 aa, Acinetobacter sp. ADP1
MSTDQEFKAPANLGIAVYSNNAEAIGNTPLVRINRIIKTGATVLGKVESRNPAFSVKCRIGAALIADAEKRGVLKSGMHIVEPTSGNTGIALAFVAAAKGYPITLTMPASMSLERRKVLKAFGANLVLTEPAKGMKGAVEEAVRLATEQPDIYFLPQQFENPANPKIHEQTTGPEIWDATNGQVDILVAGVGTGGTISGISHYFEKVQNKPIYSVAVEPAESPIITQTKRGEEITPAPHKIQGIGANFIPKNLDLDIVDEVMPITSDEALEWARKCATQEGILGGISCGAALAAAAKIAERPENEGKTIVVILPDSGERYLSSVLFEGMFEE

SEQ ID NO: 39688 - DNA, 924 bp, Acinetobacter sp. ADP1
  CDS (1)..(924): transl_table=11
atgaacacagtagaacctaattttttagctgatgagtttttgttagatcattatgttggaaagacgccattggtgcgattacagcgtttggcgtgtcatacacaatcggtagtattggcaaaattagaaggcaacaatccagcaggatccgttaaagatcgccctgcttataacatgatcatgcaagctgaaaagcgtggaaagattcgaccaggcgatacattgattgaagcaaccagcggaaatacaggaattgccttggcgatggttgcggccatgcgtggttataaaatgaagctgattatgcccaataacatgagccaagagcgtaaagatgcaatgttggcttatggtgcagagttgattgaagtgactcagcaacaaggcatggaaggcgctcgtgatttagccttgaaaatgcaatcagaaggtcaggggcttgttttaaaccagtttggtaatcctgataatgttgaagcacattatctcaccactggccctgaaatctggcagcagactaatggaaaaatcacgcattttgtgagttcgatgggaacgacgggcaccattatgggtgtatcaaaatatctaaaagagcaaaatccagatatccagattgtcggtttacaaccatctgaaggatcaagcattgcggggattcgacgttggccacaagaatatttgccaaccatttttgaaccgtcacgtgtcgatcgaattattgatattccgcaaatcgaagctgaaaaaaccatgcgccgtcttgccagagaagaaggaattagtgcaggaacttcttcggggggtgcagtgtgggcatctctcaagattgcggaagagcagcccgatgcagtcattgtttgtattatttgtgatcgcggtgatcgttacttgtcgactggactattttcggttcaagattga

SEQ ID NO: 39689 - protein, 307 aa, Acinetobacter sp. ADP1
MNTVEPNFLADEFLLDHYVGKTPLVRLQRLACHTQSVVLAKLEGNNPAGSVKDRPAYNMIMQAEKRGKIRPGDTLIEATSGNTGIALAMVAAMRGYKMKLIMPNNMSQERKDAMLAYGAELIEVTQQQGMEGARDLALKMQSEGQGLVLNQFGNPDNVEAHYLTTGPEIWQQTNGKITHFVSSMGTTGTIMGVSKYLKEQNPDIQIVGLQPSEGSSIAGIRRWPQEYLPTIFEPSRVDRIIDIPQIEAEKTMRRLAREEGISAGTSSGGAVWASLKIAEEQPDAVIVCIICDRGDRYLSTGLFSVQD

SEQ ID NO: 39690 - DNA, 882 bp, Erwinia carotovora subsp. atroseptica SCRI1043
  CDS (1)..(882): transl_table=11
gtgacaacgcttgagcagtgtattggcaataccccgctggtgaaattacagcgcatgacgcaggggttgaagagtgaaatctggctgaagctggaagggaataatcccgccggttcggtaaaggatcgcgctgcattctctatgatcctgcaggcggaaaatcgtggtgacattactcccggtgaccggctgatcgaggcgaccagcggcaataccggtattgcgctggcaatgattgctgcgctaaaaggctaccggctgcgcttgctgatgccggacaacatgagctatgaacgccagactgcgatgcgtgcatatggcgcagagctggtgttggtcaatcgcaagctggggatggaaggggcacgagatcgggcgaaacagatggtactggcgggggaagggaagacgctcgatcagttcaataatccagacaactcgctggcgcactttctcacgacgggtccagaaatctggcagcagacggcaggcaagctgacgcactttatctccagtatgggaacgaccggtacgatctccggcgttagccgctacctgaagcagcagaatccggcaatctgtacggtagggttacagcctgcggaagggagccacattcccggtattcgccgttggacgccggactatatgccaggtattttccgcgccgatctggtcgatcgtattctggatatgacgcaagtggatgccgagaatacgctgcggcaactggcgcgtcaggaaggtattttctgcggtgtcagtaccggtggtgcggtggctggcgcgctgcggattgcggcggaaaaccccggcagcgtgattgtggcgatcgcctgcgatcgtggcgatcggtatctgtccaccggggtatttgattaa

SEQ ID NO: 39691 - protein, 293 aa, Erwinia carotovora subsp. atroseptica SCRI1043
MTTLEQCIGNTPLVKLQRMTQGLKSEIWLKLEGNNPAGSVKDRAAFSMILQAENRGDITPGDRLIEATSGNTGIALAMIAALKGYRLRLLMPDNMSYERQTAMRAYGAELVLVNRKLGMEGARDRAKQMVLAGEGKTLDQFNNPDNSLAHFLTTGPEIWQQTAGKLTHFISSMGTTGTISGVSRYLKQQNPAICTVGLQPAEGSHIPGIRRWTPDYMPGIFRADLVDRILDMTQVDAENTLRQLARQEGIFCGVSTGGAVAGALRIAAENPGSVIVAIACDRGDRYLSTGVFD

SEQ ID NO: 39692 - DNA, 969 bp, Erwinia carotovora subsp. atroseptica SCRI1043
  CDS (1)..(969): transl_table=11
atgagcaagatctacgaagacaattctttcacaatcggccatacgccgctggttcgcctgaaccgtatcggcaacggacgcattctggctaaagtggaatcccgcaaccccagcttcagcgtaaaatgccgtatcggctccaacctgatttgggatgcagaaaagcgtggcgttctcaaaccgggcatcgaactggttgaacctaccagcggaaacacagggatcgccctggcctacgtcgcggcggctcgcggctacaagctcactctcaccatgccggaaaccatgagcattgagcgtcgtaagctgctgaaagcgctgggggctaatctggtgctgaccgaaggcgccaaaggcatgaaaggggctatcgccaaagcagaagagattgtcgctagcgatccgagccgttatctgctgttacagcagttcagcaacccagctaacccagagattcacgaaaagaccaccggccctgaaatctgggaagatactgacggtgaggttgatgtctttatctctggcgtcggtacaggcggtacgctgactggcgtgagccgctacctcaagaacaccaaaggcaaggccataatcagcgtggcggttgaacctactgattcaccggtgatctctcaagcgcttgctggcgaagagctgaaacccggtccgcacaagattcagggcatcggcgcaggtttcattcctggaaacctagatctggaactgattgaccgcgtagaaaaagtgacgaacgaagaagcaatcagcaccgcacgccgtttgatggaagaagaaggcattctggctggtatttcttccggcgcagctgttgccgcagcactgaatttactcaaagagaaagagttcgacggtaaaactatcgtcgttattctgccctcttccggcgaacgctacctcagtaccgcactctttgccgacctgttcaccgaacaggaactgcaacaatag

SEQ ID NO: 39693 - protein, 322 aa, Erwinia carotovora subsp. atroseptica SCRI1043
MSKIYEDNSFTIGHTPLVRLNRIGNGRILAKVESRNPSFSVKCRIGSNLIWDAEKRGVLKPGIELVEPTSGNTGIALAYVAAARGYKLTLTMPETMSIERRKLLKALGANLVLTEGAKGMKGAIAKAEEIVASDPSRYLLLQQFSNPANPEIHEKTTGPEIWEDTDGEVDVFISGVGTGGTLTGVSRYLKNTKGKAIISVAVEPTDSPVISQALAGEELKPGPHKIQGIGAGFIPGNLDLELIDRVEKVTNEEAISTARRLMEEEGILAGISSGAAVAAALNLLKEKEFDGKTIVVILPSSGERYLSTALFADLFTEQELQQ

SEQ ID NO: 39694 - DNA, 936 bp, Propionibacterium acnes KPA171202
  CDS (1)..(936): transl_table=11
atggcgaagatcgctaacgacgttaccgagctcatcggcaataccccgctggtcaagatcaataaactgttcccggactcccaggccaccgtattggccaagctcgagttctataacccggcctcgagcgtcaaggaccgtatcgctacgtcgatcgttgacgcggctgaggcttccggccagctcaatccgggaggcacgattgttgaagccacgtccggtaatacaggtgtcggtctggctctggttggtgcggctcgcggttacaaggtcatcatcactatgcctgagacaatgtcgaaggagcgccgcgccatcattcgtctgctgggtgccgagctggtgctcaccccaggcgctgacggcgtgccaggagccaacagcaaggctgccgagatcgtcgagaatacccccggtgccatcctggccagccagttcgataaccccgctaatcctgcgatccatcatgattgcactggtgaggagatctggaacgataccgagggcgaggtcgacgccatcgtcgccggtatcggtaccggtggcaccatctctggcgctggcaagtacctcaaggagaaggatcccgagatcaagatcttcggtgccgagcccgccgagtcccccgtcattactaaaggtgacaaggctccgcacaagatccagggctggggcccgggctttgtcccggataacctcgacaagtccgtcgttgacgggatcctgctggttcccggtgatgaggccatcgccttcgcccgtcgcgctgccgcagaagagggcattatcacgggtatctccggtggcggggccctgcaagctgccggtcaggtagtcgctcgtccagagtttgcgggaaagacgatcgtcgtcgttatcgctgacactggtgagcgctacctgtcgaccgctctcttcgaaggcctcctcgattga

SEQ ID NO: 39695 - protein, 311 aa, Propionibacterium acnes KPA171202
MAKIANDVTELIGNTPLVKINKLFPDSQATVLAKLEFYNPASSVKDRIATSIVDAAEASGQLNPGGTIVEATSGNTGVGLALVGAARGYKVIITMPETMSKERRAIIRLLGAELVLTPGADGVPGANSKAAEIVENTPGAILASQFDNPANPAIHHDCTGEEIWNDTEGEVDAIVAGIGTGGTISGAGKYLKEKDPEIKIFGAEPAESPVITKGDKAPHKIQGWGPGFVPDNLDKSVVDGILLVPGDEAIAFARRAAAEEGIITGISGGGALQAAGQVVARPEFAGKTIVVVIADTGERYLSTALFEGLLD

SEQ ID NO: 39696 - DNA, 921 bp, Desulfotalea psychrophila LSv54
  CDS (1)..(921): transl_table=11
atgaccacaacaattggacaatccattggcaacacccctttactcaagctaggtcgacttgacagggactgcgctgccaccattctcgttaaacaggaatcacgaaacccagcaggcagtgtaaaatgccgggttgccgtctccatgatcgaaacaggtctgcgagagggaaagatctctaagggaacaaccatcgtcgaaccaaccagtggcaacactggtattgggctcgcctttgtctgcgcagccaagggattacgcctcattctcaccatgcccgagagcatgagcatagagagacgtaaactcctggcgcatctgggcgccgagattgttcttaccccggcagccgagggaatgacaggagccatcaccaaagcagaggaactgctaacaggcctggctgatggctttatgccagatcagtttaataatccagccaacccagagatccatagacaaacaaccggcaaagagatcctgcgagataccgatggcagggtagatatctttgtcgccggagtgggcacaggcggcacccttaccggagtgggcagtgtacttaaggcaaaaaaccctagagtgcaggtgattgcggtagagcccgccacctctgccgttatttccggcgaagccccggggccccacggcatccagggtatcggggcaggattcatccccggtaatcttgatatcagtctcatcgacgaaaccatcaaggtaaacgacgaagatgcactcgtggcagctcaagagcttgccacccaagagggcattctctgtgggataagctcaggcgctgccttctgggcaagcctggaagttgccaaacgaccggaaaatataggaaaaaccattgtcaccattctaccggataccggggaaagatacctcagcaccaatctatttagcacctcttga

SEQ ID NO: 39697 - protein, 306 aa, Desulfotalea psychrophila LSv54
MTTTIGQSIGNTPLLKLGRLDRDCAATILVKQESRNPAGSVKCRVAVSMIETGLREGKISKGTTIVEPTSGNTGIGLAFVCAAKGLRLILTMPESMSIERRKLLAHLGAEIVLTPAAEGMTGAITKAEELLTGLADGFMPDQFNNPANPEIHRQTTGKEILRDTDGRVDIFVAGVGTGGTLTGVGSVLKAKNPRVQVIAVEPATSAVISGEAPGPHGIQGIGAGFIPGNLDISLIDETIKVNDEDALVAAQELATQEGILCGISSGAAFWASLEVAKRPENIGKTIVTILPDTGERYLSTNLFSTS

SEQ ID NO: 39698 - DNA, 894 bp, Yersinia pseudotuberculosis IP 32953
  CDS (1)..(894): transl_table=11
gtgacaaccctggaacactgcatcggccatacaccattggtgaaactacaacgcttaagccaagggctaaatgcggagatttgggtcaaactggaagggaacaatccggccggttcggttaaagatagagccgcgctggcgatgatccagcaggcagagttacgtggtgatattgcccccggtgatgtcctgattgaagcgaccagtggaaataccgggattgccttggcgatgattgccgccatgaaaggctatcacttgaagttactgatgccagaaaacatgagtcaggagcgtcaggcggcgatgcgggcttacggcgcggaactgattctggttagccgtgaacagggcatggaaggggcgcgtgatctggcgttaaccatgcaggagaacggcgaaggtaacgtgctggatcaatttaataatgcggataatccctatgcgcattttacggggaccgggccggaaatttggcagcaaacggcgggtaaagtgagccactttgtctccagtatggggaccaccggtacgatcaccggtgtcagccagtatctaaaaagccaaaatccgcaggtgaaggttatcggcctgcaaccagcagaaggcagcagtattccggggatccgccggtggtcagcggaatatataccgggtattttccgccccgagctggtggatcaggtgttggatatcacgcagagtgtcgcagagcaaaccatgcggcggctggcgaaagaagaggggatattctgtggcgtcagttctggtggtgcggtggctggggcgctgcggatcgcggtagataaccctgatgcggtgattgtggcgattatctgtgaccgtggtgaccgctatttatcaactggggtttttttaagtaaggggggctaa

SEQ ID NO: 39699 - protein, 297 aa, Yersinia pseudotuberculosis IP 32953
MTTLEHCIGHTPLVKLQRLSQGLNAEIWVKLEGNNPAGSVKDRAALAMIQQAELRGDIAPGDVLIEATSGNTGIALAMIAAMKGYHLKLLMPENMSQERQAAMRAYGAELILVSREQGMEGARDLALTMQENGEGNVLDQFNNADNPYAHFTGTGPEIWQQTAGKVSHFVSSMGTTGTITGVSQYLKSQNPQVKVIGLQPAEGSSIPGIRRWSAEYIPGIFRPELVDQVLDITQSVAEQTMRRLAKEEGIFCGVSSGGAVAGALRIAVDNPDAVIVAIICDRGDRYLSTGVFLSKGG

SEQ ID NO: 39700 - DNA, 936 bp, Symbiobacterium thermophilum IAM 14863
  CDS (1)..(936): transl_table=11
atggcccggatctacgacagcatcgccgacacgatcggacggacgcccctggtccggctgaaccgggtgaccgagggggcggtggcgaccgtgctcgccaaggtggaggccttcaacccggcgtcgtcggtgaaggaccgcatcggctacgcgatgatcaaggacgcggaggagaagggcatcctgaagcccggcatgaccatcgtcgaacccaccagcggcaacacgggcatcgccctggccttcgtggcggcggcgaaggggtatcgctgcatcctcacgatgccggacacgatgtcgctggagcggcggaagctgctcaaggccttcggcgcggagctggtgctgacgccgggcgcggagggcatgaagggggccatcgccaaggccaaggagatcctcgagaacacgcccggggcctggatgccccagcagttcgagaatccggccaatcctgagatccaccggaagaccacggccgaggagatctggcaggacaccgacggccaggtggacatcgtcgtcggcggcgtgggcaccggcggcaccctcacgggcgtcggcgaggtcatcaaggcccgcaagcccgacttcaaggtggtggcggtcgagccggccgagtcgccggtcatctcgggcggcaagcccggcccgcacaagatccagggcatcggcgccgggttcatcccgaagaacctgaacaccgaggtggtggacgaggtgatcacggtggccagcgaggacgccatcgcgactgcccgccgcatggcccgggaagaggggctcctcgtcggcatctcctccggcgccgcggcctttgccgcgctgcaggtggcccgccggccggagaatgccggcaagaccattgtggtggtgctgcccgacaccggcgaacgctacctctccagcgccctgtgggccgacatccaggtgtga

SEQ ID NO: 39701 - protein, 311 aa, Symbiobacterium thermophilum IAM 14863
MARIYDSIADTIGRTPLVRLNRVTEGAVATVLAKVEAFNPASSVKDRIGYAMIKDAEEKGILKPGMTIVEPTSGNTGIALAFVAAAKGYRCILTMPDTMSLERRKLLKAFGAELVLTPGAEGMKGAIAKAKEILENTPGAWMPQQFENPANPEIHRKTTAEEIWQDTDGQVDIVVGGVGTGGTLTGVGEVIKARKPDFKVVAVEPAESPVISGGKPGPHKIQGIGAGFIPKNLNTEVVDEVITVASEDAIATARRMAREEGLLVGISSGAAAFAALQVARRPENAGKTIVVVLPDTGERYLSSALWADIQV

SEQ ID NO: 39702 - DNA, 921 bp, Bacillus licheniformis ATCC 14580
  CDS (1)..(921): transl_table=11
atggttcgcgttgcaaactctgtttatgacttaatcggaaatacacctgtcgttaaattaaatcgactagttgatgaagacagtgctgaagtatatgtgaaactggagtatatgaaccctggaagcagcgtaaaagaccggattgcgcttgctatgatagaagacgctgaagagaaaggccttctgaaagaaggagatacactgattgaaccgacaagcggaaatacaggaatcggacttgccatggtcgctgcagcgaaaggcatcaaagcgattcttgttatgcctgatacaatgagttctgagcgccgcaaccttctgcgtgcatatggagctgagcttgtgctgactccaggtgctgagggaatgaaaggcgcgattaaaaaagcggaagaactggctgaggaacacggctattttatgcctcagcaatttaacaatcctgcgaacgcagaagttcaccgccgcacgacgggaaaagaaatcgctgaacaattcggagacggtttagatgctttcattgcaggtatcggaaccggcggaacgataacgggtgccggagaagttctgaaagaaaaaaatccgtccatcaagattttcgcggtggaaccgactgattctcctgttctttccggaggaaaaccagggccgcacaaaattcagggaatcggagcgggattcgttccgaaaatcttgaatacggaaatttacgatgaaatcatcacagtgaaaaacgaagaagcctttgaatttgcccgtaagcggcgagagaggaaggaattctcggaggatttcttcaggcgcagccatctgtgctgctcttcagttgctaaaaagcttggaaaaggcaaaaaagttctcgctgtgcttcctagtaacggagagagatacttaagcacgcctctttaccaatttgaatag

SEQ ID NO: 39703 - protein, 306 aa, Bacillus licheniformis ATCC 14580
MVRVANSVYDLIGNTPVVKLNRLVDEDSAEVYVKLEYMNPGSSVKDRIALAMIEDAEEKGLLKEGDTLIEPTSGNTGIGLAMVAAAKGIKAILVMPDTMSSERRNLLRAYGAELVLTPGAEGMKGAIKKAEELAEEHGYFMPQQFNNPANAEVHRRTTGKEIAEQFGDGLDAFIAGIGTGGTITGAGEVLKEKNPSIKIFAVEPTDSPVLSGGKPGPHKIQGIGAGFVPKILNTEIYDEIITVKNEEAFEFARKRRERKEFSEDFFRRSHLCCSSVAKKLGKGKKVLAVLPSNGERYLSTPLYQFE

SEQ ID NO: 39704 - DNA, 924 bp, Bacillus cereus E33L
  CDS (1)..(924): transl_table=11
atgcgagtggcacaatcagtttcagaattaatcgggaaaacgccgatcgttaagttgaaccgcatcgtagaatcagacagcgcagatatatacttaaaattagaatttatgaatccggggagcagcgttaaagatcgtatcgcattagctatgattgaagatgctgagaaaaaaggattattaaaagaaggcgatacaatcattgagccgacaagtggtaacacaggaattggtttagcgatggtagcagctgctaaaggatataaggcaattttagtaatgccagaaacaatgagcgttgagcgtcgcaatttattacgtgcttatggcgctgaattagtattgactccagggcctgaaggaatgggcggagcaattcgtcaagcgactgaattggcaaaagaacatggctactttataccgcaacagttcaaaaatcaatcaaatccagaaattcatcgtttaacaacaggtccagaaattgttgagcaaatgggtgatcaattagatgcatttattgcaggtattggtacaggtggaacgattactggtgctggtgaagtgctgaaggaagcatataaagatattaaaatttatgcagtagaacctgcggattcaccggtgttatctggtggaaaaccgggtccacataaaatccaaggaattggggctggatttgttccagaaacattggatgtagaagtatatgatgaaatcattcaagtgaaaacagagcaagcgttcgaatacgcaagaagagtggctaaagaggaaggtattttagttggtatctcttcaggagcggttatttatgcagcgacagaagttgcgaaaaagttaggtaaagggaaaaaggtacttgttattatcccaagtaatggtgaacgttatttaagtacaccactttatcaatttgagtcttaa

SEQ ID NO: 39705 - protein, 307 aa, Bacillus cereus E33L
MRVAQSVSELIGKTPIVKLNRIVESDSADIYLKLEFMNPGSSVKDRIALAMIEDAEKKGLLKEGDTIIEPTSGNTGIGLAMVAAAKGYKAILVMPETMSVERRNLLRAYGAELVLTPGPEGMGGAIRQATELAKEHGYFIPQQFKNQSNPEIHRLTTGPEIVEQMGDQLDAFIAGIGTGGTITGAGEVLKEAYKDIKIYAVEPADSPVLSGGKPGPHKIQGIGAGFVPETLDVEVYDEIIQVKTEQAFEYARRVAKEEGILVGISSGAVIYAATEVAKKLGKGKKVLVIIPSNGERYLSTPLYQFES

SEQ ID NO: 39706 - DNA, 918 bp, Bacillus cereus E33L
  CDS (1)..(918): transl_table=11
atgaaattatgtgaaaatataacagaattaataggagatacacctgtcgtcagattatctaaatttattccagaagacgcagcagatgtgtatgtaaaactagaaatgtttaatccatcgcgcagtgtgaaagaccgtgctgcctataatttactgcacgttgcagaagagaatggtcttatcaaaccaggagatacaattattgaaccgacaagtggaaatacagggataggcttagcaatgaatgcagctgcgaaagggtataaggcgattttaattatgccagacaatatgtcaaaagagcgtataaatttattgaaagcatatggagcggaagtagttttaacaccggcagaacaaagaatgccgggagcaattgcgaaggcgttagaactgcaaaaggaaattccgaatagttttattccgcagcaatttgaaaatccagcaaacccgaatattcatcgttatacaactgcacttgaaatttatgaacaaatggatggagagcttgatgcatttgtagcaacggctggaactggtggaactattacagggactggggaaacattaaaagagaagctaccaaacttatatattgcagtagtagaaccgaaaggatctcccgttttatcaggcggtgtgccaggtcctcataaactagtaggaacaagtccggggtttatcccgaaaaatttaaatacagaagtgtataacgaaattattcaaattgcagatgaagaggctttaacgacaatgagaaacttagctagacaagaggggttattagttgggccgtcttctggagcatctgtttatgcggcaattatgatagcaaaacgattaggtgcaggtaaaaaagttttatgtattgcacctgatacaggggaacgttatttgagtatgggattatttgaatga

SEQ ID NO: 39707 - protein, 305 aa, Bacillus cereus E33L
MKLCENITELIGDTPVVRLSKFIPEDAADVYVKLEMFNPSRSVKDRAAYNLLHVAEENGLIKPGDTIIEPTSGNTGIGLAMNAAAKGYKAILIMPDNMSKERINLLKAYGAEVVLTPAEQRMPGAIAKALELQKEIPNSFIPQQFENPANPNIHRYTTALEIYEQMDGELDAFVATAGTGGTITGTGETLKEKLPNLYIAVVEPKGSPVLSGGVPGPHKLVGTSPGFIPKNLNTEVYNEIIQIADEEALTTMRNLARQEGLLVGPSSGASVYAAIMIAKRLGAGKKVLCIAPDTGERYLSMGLFE

SEQ ID NO: 39708 - DNA, 924 bp, Bacillus cereus E33L
  CDS (1)..(924): transl_table=11
atgaatgtatatcgtggagttcatgagttaattggtcatacaccaattgtggaaattactcgtttttcacttccagaaggggtccgtttatttgcaaagcttgaattttataacccaggcggaagcgttaaggaccggctaggaagagaattaatcgaagatgcgctagaaaaagggcttgttacagagggcggaacaattattgaaccgactgccggaaatactggtattggactggcacttgcagcgttacaacatgatttacgcgttattgtttgtgtaccagagaaatttagtattgaaaaacaagaattaatgaaagcactaggtgcaacggtcgtgcatacaccgactgagcaaggaatgaccggtgcaattgcaaaagcgaaagagttagtaaatgaaataccaaattcatactctccaagtcagtttgcgaatgaagcaaaccctcgtgcttatttcaaaacattaggtcctgaactttggtcggcacttaacggagagattaacatatttgttgcaggagcaggaactggcggaacatttatggggactgcatcttatttgaaagaaaaaaatatagatataaaaacagttattgtggaaccagaaggatccattttaaatggtggtaaagctggctcacatgaaacagaagggattggccttgaattcatcccgccatttttgaaaacatcttattttgatgagattcatacaatttctgatcgaaatgcatttttacgagtgaaagaattagcacaaaaagaaggattgctcgttgggagctcttcaggagcagcgtttcatgcaagtttacttgaagcagagaaagcggcgccaggtacaaatattgtaacgatttttcctgatagtagtgagcgctatttaagtaaagacatatacaaaggatgggaataa

SEQ ID NO: 39709 - protein, 307 aa, Bacillus cereus E33L
MNVYRGVHELIGHTPIVEITRFSLPEGVRLFAKLEFYNPGGSVKDRLGRELIEDALEKGLVTEGGTIIEPTAGNTGIGLALAALQHDLRVIVCVPEKFSIEKQELMKALGATVVHTPTEQGMTGAIAKAKELVNEIPNSYSPSQFANEANPRAYFKTLGPELWSALNGEINIFVAGAGTGGTFMGTASYLKEKNIDIKTVIVEPEGSILNGGKAGSHETEGIGLEFIPPFLKTSYFDEIHTISDRNAFLRVKELAQKEGLLVGSSSGAAFHASLLEAEKAAPGTNIVTIFPDSSERYLSKDIYKGWE

SEQ ID NO: 39710 - DNA, 951 bp, Mannheimia succiniciproducens MBEL55E
  CDS (1)..(951): transl_table=11
atgacaatttttgcagataactcatattcaatcggtaatactccgttagttcgtttacataacttcggtcacaacggaaaccttgttgttaaaattgaaagccgtaacccaagtttcagtgtgaaatgccgtatcggtgcaaacatggtatggcaagcggaaaaagacggcgttttaactaaagacaaagaaattgttgacgctacaagcggtaacacaggtattgctcttgcttatgtagctgccgcccgcggttataaaattactctgactatgccggaaacaatgagccttgagcgtaaacgtttattacgcggtctaggcgtaaacctggtgttaacggaaggcgcaaaaggtatgaaaggcgctattgctaaagcggaagagatcgtcgcatcggatccgaaccgttatatcatgctaaaacaatttgaaaacccggcgaatccggcaattcaccaacaaaccacaggtgtcgaaatttggcaggcgaccgaaggtaaagtggatgtggttgttgcaggcgtgggtaccggcggtacaattacaggtatttcccgagcaattaagctggaccaaggcaaacaaattacttccgttgccgtagaacctgccgaaagcccggttattacacaaatcttagccggcgaagaaattaaaccgggtccgcataaaattcagggtatcggtgccggttttattccgaaaaacttagatctttcgcttatcgaccgcgttgaaaccgtagatagtgatacggcaataaaaaccgcccgccgtttaatggctgaagaaggtattcttgctggtatttcatccggtgcggcagttgcggcggcggatcgtttagcaaaattaccggaattccaagataaattaatcgtagcgattcttccttccgcttcagaacgttatttaagtacggcgttatttgaaggtatcgaaggctaa

SEQ ID NO: 39711 - protein, 316 aa, Mannheimia succiniciproducens MBEL55E
MTIFADNSYSIGNTPLVRLHNFGHNGNLVVKIESRNPSFSVKCRIGANMVWQAEKDGVLTKDKEIVDATSGNTGIALAYVAAARGYKITLTMPETMSLERKRLLRGLGVNLVLTEGAKGMKGAIAKAEEIVASDPNRYIMLKQFENPANPAIHQQTTGVEIWQATEGKVDVVVAGVGTGGTITGISRAIKLDQGKQITSVAVEPAESPVITQILAGEEIKPGPHKIQGIGAGFIPKNLDLSLIDRVETVDSDTAIKTARRLMAEEGILAGISSGAAVAAADRLAKLPEFQDKLIVAILPSASERYLSTALFEGIEG

SEQ ID NO: 39712 - DNA, 924 bp, Bacillus licheniformis ATCC 14580
  CDS (1)..(924): transl_table=11
atggttcgcgttgcaaactctgtttatgacttaatcggaaatacacctgtcgttaaattaaatcgactagttgatgaagacagtgctgaagtatatgtgaaactggagtatatgaaccctggaagcagcgtaaaagaccggattgcgcttgctatgatagaagacgctgaagagaaaggccttctgaaagaaggagatacactgattgaaccgacaagcggaaatacaggaatcggacttgccatggtcgctgcagcgaaaggcatcaaagcgattcttgttatgcctgatacaatgagttctgagcgccgcaaccttctgcgtgcatatggagctgagcttgtgctgactccaggtgctgagggaatgaaaggcgcgattaaaaaagcggaagaactggctgaggaacacggctattttatgcctcagcaatttaacaatcctgcgaacgcagaagttcaccgccgcacgacgggaaaagaaatcgctgaacaattcggagacggtttagatgctttcattgcaggtatcggaaccggcggaacgataacgggtgccggagaagttctgaaagaaaaaaatccgtccatcaagattttcgcggtggaaccgactgattctcctgttctttccggaggaaaaccagggccgcacaaaattcagggaatcggagcgggattcgttccgaaaatcttgaatacggaaatttacgatgaaatcatcacagtgaaaaacgaagaagcctttgaatttgcccgtaaagcggcgagagaggaaggaattctcggaggaatttcttcaggcgcagccatctgtgctgctcttcaagttgctaaaaagcttggaaaaggcaaaaaagttctcgctgtgcttcctagtaacggagagagatacttaagcacgcctctttaccaatttgaatag

SEQ ID NO: 39713 - protein, 307 aa, Bacillus licheniformis ATCC 14580
MVRVANSVYDLIGNTPVVKLNRLVDEDSAEVYVKLEYMNPGSSVKDRIALAMIEDAEEKGLLKEGDTLIEPTSGNTGIGLAMVAAAKGIKAILVMPDTMSSERRNLLRAYGAELVLTPGAEGMKGAIKKAEELAEEHGYFMPQQFNNPANAEVHRRTTGKEIAEQFGDGLDAFIAGIGTGGTITGAGEVLKEKNPSIKIFAVEPTDSPVLSGGKPGPHKIQGIGAGFVPKILNTEIYDEIITVKNEEAFEFARKAAREEGILGGISSGAAICAALQVAKKLGKGKKVLAVLPSNGERYLSTPLYQFE

SEQ ID NO: 39714 - DNA, 924 bp, Bacillus licheniformis ATCC 14580
  CDS (1)..(924): transl_table=11
atgaatgtgatcaaggatatcaccgaattgatcggcaaaacgccgcttctgcagattttggattttcgaatccctaaaggcgttaacatatatgcaaaacttgaaatgatgaatccgggaggcagcattaaagaccggctcggagaagtgctgattgctgaagcgatcggttcgggaaagctgaaacccggtggaacggtcattgaggcaacagcaggcaatacgggaatcggtctggctctcgccgccagaaagcacggcattcgacccgttttttgcgtacccgagcatttcagcatggaaaaacagtcgattatgaaagcgctcggcgctcggatagttcatacccccagaagtgccgggatgaagggtgcgattgaaaaagcacttgaacttgagaaggagattcccgattcttattgcgttttgcagtttaaaaacccagtaaatccattggcttactataaaacgattgccccggaaatatggaatgatcttggcggccggattgacgtcttcgtcgccggagcggggtcaggcggcacatttgcgggaaccgccaagtttctgaaagaaaaaaatccgtccattaaaacggttattgttgaaccggaaggctcgattttaaacggaggggaaccgcatgggcataagaccgaaggaatcggaatggaattcatcccggaatacatggaggaaagctatttcgatgagatttacacagtgcttgacgaagatgcgtttcgactcgtaaaagaagccgcggaaaaggaagggcttctgattggaagctcatcaggcgccgcgttgtttgccgcattgaaagaagccgaaaaagcgaaagccggcacaaacattgtgacgatttttcccgacagcagcgaccgctatttaagcaaaaaaatttacgaaggaggaatatga

SEQ ID NO: 39715 - protein, 307 aa, Bacillus licheniformis ATCC 14580
MNVIKDITELIGKTPLLQILDFRIPKGVNIYAKLEMMNPGGSIKDRLGEVLIAEAIGSGKLKPGGTVIEATAGNTGIGLALAARKHGIRPVFCVPEHFSMEKQSIMKALGARIVHTPRSAGMKGAIEKALELEKEIPDSYCVLQFKNPVNPLAYYKTIAPEIWNDLGGRIDVFVAGAGSGGTFAGTAKFLKEKNPSIKTVIVEPEGSILNGGEPHGHKTEGIGMEFIPEYMEESYFDEIYTVLDEDAFRLVKEAAEKEGLLIGSSSGAALFAALKEAEKAKAGTNIVTIFPDSSDRYLSKKIYEGGI

SEQ ID NO: 39716 - DNA, 933 bp, Bacillus licheniformis ATCC 14580
  CDS (1)..(933): transl_table=11
gtgagagccgttcaaaatattgcagaattaatcggggaaacgccccttgtcaagttgaaccgcgttcagcccgaaaacgcggcccaagtttatatcaagcttgaatcttttaatccgagcggaagcgtaaaagaccgcgcggcctaccaaatgatcctggatgccgaagaaaaaggcctgctgaaaccgggttcaaccatcattgaaccgacgagcgggaacaccggcatcggccttgcgatgaacgcggcggcaagaggctacaaagccattcttgtcatgcctgatacgatgacgaaggagcggatcaatcttctgaaagcgtacggagccgaagtcgtcctgacgccgggggatgaaagaatgccgggcagcatcaaaaaagcgcaggagctcgctcggcaaatcccaggcagctttattccgatgcagtttgataatgaagccaatccggaggctcaccggagatcaaccgctctggaaattgcccgggcaatagaagaaatcggcaaacctctcgctgcatttgttgcaacagcagggacagggggaacgattaccggaacaggcgaaaagctgaaagctttatttccgggaataaccgttcacgtggcagaacctgcagggtcgcctgttttatccggcggcaaacccggaaaacacaagcttgtcgggacaagcccgggatttatcccaaacattttaaacgaaaacgtctatgacgaaatcttaaagatcaaggatgaagaagcctatgagatgacgcgcagattggcgcgggaagaaggaatccttgtcggcccttcttcaggagccgcttgcttcgctgctgttgaaacggccaagaagctccctcccgacaaagtggtcgtctgcatgacggccgatacaggggaacgctatttatcaagcgatttatttcaatttgattaa

SEQ ID NO: 39717 - protein, 310 aa, Bacillus licheniformis ATCC 14580
MRAVQNIAELIGETPLVKLNRVQPENAAQVYIKLESFNPSGSVKDRAAYQMILDAEEKGLLKPGSTIIEPTSGNTGIGLAMNAAARGYKAILVMPDTMTKERINLLKAYGAEVVLTPGDERMPGSIKKAQELARQIPGSFIPMQFDNEANPEAHRRSTALEIARAIEEIGKPLAAFVATAGTGGTITGTGEKLKALFPGITVHVAEPAGSPVLSGGKPGKHKLVGTSPGFIPNILNENVYDEILKIKDEEAYEMTRRLAREEGILVGPSSGAACFAAVETAKKLPPDKVVVCMTADTGERYLSSDLFQFD

SEQ ID NO: 39718 - DNA, 951 bp, Legionella pneumophila subsp. pneumophila str. Philadelphia 1
  CDS (1)..(951): transl_table=11
atgatttaccctaacatcctggccactataggccatactcccgttgtaaaaattaacaggcttggaaaagatctggaatgtgagctgtatgccaaatgcgaattctttaatcctggcggctccgtaaaagatcgtattggctatgaaatggtagtaaaagcagaaaaggaagggagaattaaaccgggagataccttgatcgagcctacttccgggaacaccggcataggtatagccctggcaggcgctgtattaggctacaaagtgattattaccatgccagaaaaaatgagccaggaaaagcaatccgtgctcgaacgcctgggagccatcatttatcgaacgccaacagaagcggcgtataatgatccagacagtcatatttctctggctaaaaaattacaagctgaaatccctaactcccatatccttgatcaatacgcgaaccccaataaccccaatgcccattattttgggaccgctcaggaaattattgacgacttcggaaaagatttacatatggttgttgctggcgttgggacaggcggaacaattacaggcattgccaaacgccttaaagaatttaaccctgccatcaaaatcattggagcagatcccgaaggctcaattctcggtggcggcacagaaatcaaatcttatcatgttgaagggataggttatgatttcttccctgatgtgctggataatacgttgattgatgcctacataaaaaccaatgatgcggattctttccgtactgccagacgcctcattaaagaagaaggactgttaattggcggctcatgtggagcagcgatgtgggccgcattgcaagcagccaaatccttaagcaaaggacaaaaatgtctggtgattttacccgactctatccgtaattacatgtccaaatttgccaatgatgaatggatgaaagaaatgggctttctttaa

SEQ ID NO: 39719 - protein, 316 aa, Legionella pneumophila subsp. pneumophila str. Philadelphia 1
MIYPNILATIGHTPVVKINRLGKDLECELYAKCEFFNPGGSVKDRIGYEMVVKAEKEGRIKPGDTLIEPTSGNTGIGIALAGAVLGYKVIITMPEKMSQEKQSVLERLGAIIYRTPTEAAYNDPDSHISLAKKLQAEIPNSHILDQYANPNNPNAHYFGTAQEIIDDFGKDLHMVVAGVGTGGTITGIAKRLKEFNPAIKIIGADPEGSILGGGTEIKSYHVEGIGYDFFPDVLDNTLIDAYIKTNDADSFRTARRLIKEEGLLIGGSCGAAMWAALQAAKSLSKGQKCLVILPDSIRNYMSKFANDEWMKEMGFL

SEQ ID NO: 39720 - DNA, 933 bp, Methylococcus capsulatus str. Bath
  CDS (1)..(933): transl_table=11
atgaaaatcgccaatagcgtcaccgatctcatcggcaatacccccctggtccgaatccaccggctcagcgcaggctgcggcgcggaggtcgtcgccaagctcgaattcttcaacccggcccacagcgtcaaggaccgcatcggcgcggcgatgatcgacgccgccgagcaagctggcctgatcggtccggacaccgtcatcgtcgaacccaccagcggcaacaccggcatcgccctggccatggtctgcgccgcgcgcggctaccgctgcgtgctgaccatgcccgaaaccatgagcaaggagcgtcgcatgctgctgcgggcctacggggcggagctcgttctgacaccgggcccggatggcatgggcggggcgatccgtaaggcggaggaactggcggcttccgatccgaaatatttcatgccccagcagttcaagaacgccgccaatccggaaatccaccgcaggacgacggccgaggaaatctggcgcgacaccgagggtcgggtcgacatcgtggtggcgggagtcggtaccggcggtaccatcaccggggtgggcgaagtcctgaagcagcgcaagccctcccttcggtgtgtcgcggtggagccagacgcttcgccggtgctgtccggcggcgagaagggaccgcacccgatccagggcattggcgccggcttcgtgccgccgatcctgaataccacgatttacgacgaggtcatccgggtgaagaacgacgatgctttcgaattcgcccggcgcgcggcccgggaggagggtctgctggtcggcatttcttccggtgcggcgctgtgggccgcgcggcaactggcatgccgtccggagaacgcagggaagctgatcgtgacgatcatcccctcgttcggcgaacgctacctcagtaccgccctgtttgcacatctggaggactaa

SEQ ID NO: 39721 - protein, 310 aa, Methylococcus capsulatus str. Bath
MKIANSVTDLIGNTPLVRIHRLSAGCGAEVVAKLEFFNPAHSVKDRIGAAMIDAAEQAGLIGPDTVIVEPTSGNTGIALAMVCAARGYRCVLTMPETMSKERRMLLRAYGAELVLTPGPDGMGGAIRKAEELAASDPKYFMPQQFKNAANPEIHRRTTAEEIWRDTEGRVDIVVAGVGTGGTITGVGEVLKQRKPSLRCVAVEPDASPVLSGGEKGPHPIQGIGAGFVPPILNTTIYDEVIRVKNDDAFEFARRAAREEGLLVGISSGAALWAARQLACRPENAGKLIVTIIPSFGERYLSTALFAHLED

SEQ ID NO: 39722 - DNA, 888 bp, Methylococcus capsulatus str. Bath
  CDS (1)..(888): transl_table=11
atgtttcccaccatcgaatccttcgtcggcaacacgccgctggtacgtttgcagcgcttgcccggcgacaccgccaacttcattctggccaagctggaaggcaacaaccccgcggggtccgtcaaggaccggccggccctcagcatgatccgctgcgccgaggcgcgcggcgacatccagccgggcgaccggttgatcgaggcgaccagcggcaacaccggcattgccctggccatggcggcggccatcaagggctaccgcatgaccctgatcatgcccgataacatgagcgccgagcgtcgggcgacgatgaaggctttcggggccgagatcatcctgacgccggcggcgggcggcatggaggcggccatcgacctggcacgggcgatggaggctcggggcgagggcaagatcctcgatcagttttccaactccgacaatccacgcgcccattacgaaggcacggggccggaaatctggcgagacagccaggggcgggtcacccacttcgtcagctccatgggcaccaccggcaccatcatgggcacggcacgctacctgaaagagcggaatcctgcgatccagatcatcggcgtccagcccaaggacgaggccaggatccccggcatccggcgttggccgcaggaatacctgccgaagatctacgatccctcgctggtggaccgcatcctcgacgtgacccaggaagaggccgagtcgaccacgcgggaactggcggcacaggaaggcatcttcgccggcatttcctccggcggtgcggtggcagccgccctgcgactgtcgcgggaggtggagaacgcggtgatcgccgtcatcatctgcgaccgcggcgaccgttatctctccacaggcgtatttccggaataa

SEQ ID NO: 39723 - protein, 295 aa, Methylococcus capsulatus str. Bath
MFPTIESFVGNTPLVRLQRLPGDTANFILAKLEGNNPAGSVKDRPALSMIRCAEARGDIQPGDRLIEATSGNTGIALAMAAAIKGYRMTLIMPDNMSAERRATMKAFGAEIILTPAAGGMEAAIDLARAMEARGEGKILDQFSNSDNPRAHYEGTGPEIWRDSQGRVTHFVSSMGTTGTIMGTARYLKERNPAIQIIGVQPKDEARIPGIRRWPQEYLPKIYDPSLVDRILDVTQEEAESTTRELAAQEGIFAGISSGGAVAAALRLSREVENAVIAVIICDRGDRYLSTGVFPE

SEQ ID NO: 39724 - DNA, 891 bp, Azoarcus sp. EbN1
  CDS (1)..(891): transl_table=11
atggactacaagacgctggaagactacgttggccacacgccgctggtgcgcctcaagcgcatcggcgcgggtcgcaacaacgtcattctcgcgaagctcgaaggcaacaacccggccggatcggtaaaggaccggccggcgctgtcgatgatcgtgcaggcggaagcgcgcggcgagatccgccccggcgatacgctgatcgaggcgaccagcggaaataccgggattgcgctggcgatggctgcggcgatgcgcggttaccagatgatcctcgtgatgccggaaaaccagagcgtcgagcggcgccagaccatgcgggcattcggcgccgagctcgtcctgactccgcgcgacggcggcatggaaatggcccgggacgtcgcggagcggatgcgcgatgaaggccggggcatcatccttgaccagttcgcgaatccggacaatccgctctctcattatgaagccactggtccggaaatctgggagcagacggacggccggatcacgcacttcgtcagcagcatgggcacgaccgggacgatcatgggctgctcgcgctttttgaaggaaagaaatccggcagtccggattatcggctgccagcccgacgagggctcgcagatcccgggcatccgcaagtggcccgaagcctatctgccgaagatctacgaaaaaccgcgggtcgatgcgctcgaaaacgtgagccaggccgacgccgaggagatgacacggcgcctggcgcgcgaggaaggcatttttgccggaatatcctccggcggcgcgatgcacgtcgccgtccgcattgctgccgaactggaaaatgcagtgatcgtgtccatcatctgcgatcgtggcgaccggtacctgtcgaccggcgtgtttccgggctga

SEQ ID NO: 39725 - protein, 296 aa, Azoarcus sp. EbN1
MDYKTLEDYVGHTPLVRLKRIGAGRNNVILAKLEGNNPAGSVKDRPALSMIVQAEARGEIRPGDTLIEATSGNTGIALAMAAAMRGYQMILVMPENQSVERRQTMRAFGAELVLTPRDGGMEMARDVAERMRDEGRGIILDQFANPDNPLSHYEATGPEIWEQTDGRITHFVSSMGTTGTIMGCSRFLKERNPAVRIIGCQPDEGSQIPGIRKWPEAYLPKIYEKPRVDALENVSQADAEEMTRRLAREEGIFAGISSGGAMHVAVRIAAELENAVIVSIICDRGDRYLSTGVFPG

SEQ ID NO: 39726 - DNA, 978 bp, Azoarcus sp. EbN1
  CDS (1)..(978): transl_table=11
atgtcgaactggtattccgacaatgccttgtcgatcggcaagacacccttggtcaagctgaatcgcgtcaccgacggcgccacggcgaccgtccttgcgaaaatcgaaggccgcaaccccgcctattcggtgaaatgccgtatcggcgctgcgatgatctgggacgccgagcaacgcggcctgctcggccccggcaaggaaatcgtcgagccgacgagcggcaacaccggcatcgcgctggcgttcgtcgccgccgcgcgcggcatcccgatcacgctgacgatgcccgagacgatgagcgtcgaacggcgcaagctcctcgtcgcatacggcgcgaagctggtgctgaccgagggagccaagggcatgaacggcgcgatcgcgaaagccgaggagatcgccgcgtccgaccccggtcgctacgtgctgctgcaacagttcaacaaccccgcaaatccggcgatccacgcgtcgacgacaggcccggagatctggaacgacaccgacggcaacgtcgatatcttcatttccggcgtcggtaccggcgggacgatcacgggcgtgtcgcgttacttcaaggagacgcggggcaagccgatcgtttcggtcgcggttgaaccggaagccagcccggtactgacgcagacgcgcgccggagagccgctcaagccggggccgcacaagatccagggactcggcgccggcttcgtgccgaaagtgctcgacctgtcgctgatcgacgccgtcgagacggtcagcaacgaagacgcgattctctacgcgcatcggctcgcgcgcgaggaaggcatcctctccggcatctcctgcggcgccgcggtggcggtagctgcgcgcatcgcccagcgcccggagaatgccggcaagacgatcgtcgtagtgctgccggactcgggcgaacgctacctcagctcgatcctgttcgaaggccttttcgacgcttcgggcgtggcgatctga

SEQ ID NO: 39727 - protein, 325 aa, Azoarcus sp. EbN1
MSNWYSDNALSIGKTPLVKLNRVTDGATATVLAKIEGRNPAYSVKCRIGAAMIWDAEQRGLLGPGKEIVEPTSGNTGIALAFVAAARGIPITLTMPETMSVERRKLLVAYGAKLVLTEGAKGMNGAIAKAEEIAASDPGRYVLLQQFNNPANPAIHASTTGPEIWNDTDGNVDIFISGVGTGGTITGVSRYFKETRGKPIVSVAVEPEASPVLTQTRAGEPLKPGPHKIQGLGAGFVPKVLDLSLIDAVETVSNEDAILYAHRLAREEGILSGISCGAAVAVAARIAQRPENAGKTIVVVLPDSGERYLSSILFEGLFDASGVAI

SEQ ID NO: 39728 - DNA, 1035 bp, Silicibacter pomeroyi DSS-3
  CDS (1)..(1035): transl_table=11
atgcgcattgcacgcgatctggccgaggccgttggacataccccgctgatccggctgcgccgggtcagcgaagagaccggatgcgagatctatggcaaggccgagttcatgaacccgggccagtcggtcaaggaccgtgccgcgctgtacatcatccgcgacgccattgcgcgcggcgagttgcagccgggtggcaccatcgtcgagggcaccgccggcaataccggtatcggcctggcgctggttggcgcctcgatggggttcaagacggtgatcgtgatccccgagacccaatccgaggaaaagaaggacatgctgcgcctggcgggggccgaactggtgcaggtgcccgccgcgccctatcgcaaccccaacaactttgtgcgctattccgagcgtctggcgcgggaactggccaagaccgagcccaatggcgcgatctgggccaatcagttcgacaataccgccaaccggcaggcccatgtggaaaccactggccccgagatctgggagcagaccggtggcaaggtcgacgggttcgtcgcggcggtcggctcgggcggaacgctggcgggcgtggccgaggcattgcagcccaagggcgtcaagatcggtctggccgacccgatgggcgcggccctgttcagctattacaccaccggcgaactggcgatggagggcggctcgatcgccgaggggatcggccaggtgcgcatcacccggaacctcgaagggttcaaacccgatttcgcctatcaggtgcccgatgccgaggcgctgccctatatctttgacctgctgcggcaggaggggctggtgatgggcggctcgaccgcgatcaacatcgccggcgcggtgcgcatggcgcgcgagatggggccgggccataccatcgtcaccgtgctgtgcgattacggcacccgctatcagtcgaaactgttcaatcccgatttcctgcgcgaaaaggacttgcccgtgcccgagtggatgagccgcgcgcccagctcgatcccgggtgtgttcgaggacgtctga

SEQ ID NO: 39729 - protein, 344 aa, Silicibacter pomeroyi DSS-3
MRIARDLAEAVGHTPLIRLRRVSEETGCEIYGKAEFMNPGQSVKDRAALYIIRDAIARGELQPGGTIVEGTAGNTGIGLALVGASMGFKTVIVIPETQSEEKKDMLRLAGAELVQVPAAPYRNPNNFVRYSERLARELAKTEPNGAIWANQFDNTANRQAHVETTGPEIWEQTGGKVDGFVAAVGSGGTLAGVAEALQPKGVKIGLADPMGAALFSYYTTGELAMEGGSIAEGIGQVRITRNLEGFKPDFAYQVPDAEALPYIFDLLRQEGLVMGGSTAINIAGAVRMAREMGPGHTIVTVLCDYGTRYQSKLFNPDFLREKDLPVPEWMSRAPSSIPGVFEDV

SEQ ID NO: 39730 - DNA, 1065 bp, Silicibacter pomeroyi DSS-3
  CDS (1)..(1065): transl_table=11
atgatcttcaccaccacgggccgcgggcggctttatggctcgatcctggaaacggtgggcaatacgcccgtgatccgtttgaacaccatcgcccccggacatgtcaccatgtatgtgaagttcgaggcgttcaatccggcgggctcggtcaaggaccggctggcgctgaacatcatcgaggccgcagaacgcgagggccggttgcaaccggggcagaccgtggtcgaggcgaccagcggcaataccggtattggccttgccatggtctgcgccgccaagggctatccgctggtcatcaccatgcatgacgggttttcggtcgagcgccgccgcctgatgcggatgctgggcgccaaggtggtgctgacccgcaaggaggacaaggcggtcggcatggtggtgaaagccaaggaactggccgaggcgaacggctggttcctggcgcatcagttcgaaaccaaggacaacgccgatatccacgaggccaccacagcgcaagagatcctcggcgatttcgacggtgaacggctggatcacgtagtgctgggttatggcaccggcggcaccgtcgccgggttgggccgggtgctcaaagccgcgcggcctggactgaagatcaccctgagcgagcccgccaatgcagcgctggtacagtcgggcgaggcgcaacagcgcaatgccgagggtgaacccgccgcgacccatcccgccttcaacccgcatccgatccagggctggaccccggatttcatcccgctggtgctgcaagaggcgctggatcagggctatttcgacgcgctggagccggtgagcggcccggaaagcatcgcctggtccaaacgcctggcagccgaggaaggcatcctgaccggcatatcgggcggcgccagcctggcggcggcgatgaaagtggccgagaccgcgcccgagggctcggttcttctggtgatgctgcccgataccggcgagcgttacctctcgacgccgctgttcgaggacattgcggccgagatggacgaggccgaacaggcgctgtcggcctcgactcccggatatcagtactga

SEQ ID NO: 39731 - protein, 354 aa, Silicibacter pomeroyi DSS-3
MIFTTTGRGRLYGSILETVGNTPVIRLNTIAPGHVTMYVKFEAFNPAGSVKDRLALNIIEAAEREGRLQPGQTVVEATSGNTGIGLAMVCAAKGYPLVITMHDGFSVERRRLMRMLGAKVVLTRKEDKAVGMVVKAKELAEANGWFLAHQFETKDNADIHEATTAQEILGDFDGERLDHVVLGYGTGGTVAGLGRVLKAARPGLKITLSEPANAALVQSGEAQQRNAEGEPAATHPAFNPHPIQGWTPDFIPLVLQEALDQGYFDALEPVSGPESIAWSKRLAAEEGILTGISGGASLAAAMKVAETAPEGSVLLVMLPDTGERYLSTPLFEDIAAEMDEAEQALSASTPGYQY

SEQ ID NO: 39732 - DNA, 939 bp, Bacillus clausii KSM-K16
  CDS (1)..(939): transl_table=11
gtgaccgttgtaaacaacattacggaattgatcggcaataccccgcttgtaaaattaaaccgcctggcgactgctgaacatgcagacgtgtacttaaagcttgaataccaaaatccaggaagcagcgtaaaagatcggattgcactggcgatggtgaatgcagctgaagaatccggagaactaaagccaggagcgaccattgttgaaccaacaagtggcaacacgggcattggcctcgctatggttgcagcggccaaaggctataaaacaaaactggttatgcctgaaacgatgagtatggagcggcgtaacttgctgcgcgcttacggagctgagcttgtgttgaccccaggtccagaaggcatgggcggggcaatccgaaaagcgacagagttagctaaacaagacgggcattttatgccgcagcaatttgaaaacagcgccaatccgaaaatccaccgtgaaacgactggcaaagaactgcttaagcaagtcgatgggcagcttgacggctttgtcgccggcatcggcacaggcggcacgataactggagcaggcggcctattaaaagagcattttccagaattgaaaattgtcgcgattgagccgaaagactctcctgtgctgtcaggcggcaagcccggcccccataaactgcaaggcattggcccaggttttgtgccaggcatcttaaatacaaatgtgtatgattcggttttacaagtatcgactgaacaagcgtttgaatatgcacgtcgtgcggcaagggaagaaggcattttaggcggtatttcctcaggggcagccatttatggagcgttagaacttgcgaaagagctagggccaggtaaaaaagtggttgcgattattccttcaaacggagaacggtacttgagcacgccgctgtaccaatttgaggaagaaacgacccattcataa

SEQ ID NO: 39733 - protein, 312 aa, Bacillus clausii KSM-K16
MTVVNNITELIGNTPLVKLNRLATAEHADVYLKLEYQNPGSSVKDRIALAMVNAAEESGELKPGATIVEPTSGNTGIGLAMVAAAKGYKTKLVMPETMSMERRNLLRAYGAELVLTPGPEGMGGAIRKATELAKQDGHFMPQQFENSANPKIHRETTGKELLKQVDGQLDGFVAGIGTGGTITGAGGLLKEHFPELKIVAIEPKDSPVLSGGKPGPHKLQGIGPGFVPGILNTNVYDSVLQVSTEQAFEYARRAAREEGILGGISSGAAIYGALELAKELGPGKKVVAIIPSNGERYLSTPLYQFEEETTHS

SEQ ID NO: 39734 - DNA, 927 bp, Bacillus clausii KSM-K16
  CDS (1)..(927): transl_table=11
atggaagtgtaccgccatatccatgaactcataggttcaacccccatgcttgaactgacggcctttccgctcccgcgccgtgtgcgtttatttgcaaagttggagtataccaatcctggaggaagcattaaagaccgtttaggcatcaaactcctcaaggaagcaattgccaccggtaaaatcacaccgaagggcacattgattgagccaacggctggaaatacagggattgctcttgcgctcgcagcgattggcacggatgtaaaggtcatttgtgtcgtgccaaaggcatttagcatcgaaaagcagcagctgatgcgcgcccttggagctgtcattgtccatacaccgagtgaacatgggatgaagggagcaattgcaaaagcaaaagcgttagaacaagagcttgatgatgcttattgcccgcagcagttcagcaataaagcgaatccactcgcttattatgagacgcttggcccagaaatcgttcacgagcttgatggcaaagttgatgtttttgttgcaggcgctggaacaggagggacattttcaggaacagccgcttatttaaaagaagtgatccctggcattcgcactgttgtggtggaaccagagggttcgattttaaatggtggggagccaggaccgcaccggactgagggaattgggatggaattcatcccagactttgtaaacaggtctttatttgaagccatttatacgatttcagacaaccaagcgtttaagcggacacgcgaactcgctgaacatcaaggtgtgcttgtcggcagttcttcaggtgctgctcttgaagctgccttgcgagaggctgaaatggccgacgaaggtgcccatatcgtcactgtctttcctgacggggcggaacggtatttgagcaaaggcatttatgaggaggaacctttgtga

SEQ ID NO: 39735 - protein, 308 aa, Bacillus clausii KSM-K16
MEVYRHIHELIGSTPMLELTAFPLPRRVRLFAKLEYTNPGGSIKDRLGIKLLKEAIATGKITPKGTLIEPTAGNTGIALALAAIGTDVKVICVVPKAFSIEKQQLMRALGAVIVHTPSEHGMKGAIAKAKALEQELDDAYCPQQFSNKANPLAYYETLGPEIVHELDGKVDVFVAGAGTGGTFSGTAAYLKEVIPGIRTVVVEPEGSILNGGEPGPHRTEGIGMEFIPDFVNRSLFEAIYTISDNQAFKRTRELAEHQGVLVGSSSGAALEAALREAEMADEGAHIVTVFPDGAERYLSKGIYEEEPL

SEQ ID NO: 39736 - DNA, 933 bp, Bacillus clausii KSM-K16
  CDS (1)..(933): transl_table=11
atgcgagtagtagacaatatcgctgacttaattggacagacgcctttggtccgtttaaacaagctgcctgatagtgaaggcgcatctgtctatttaaaattagaaatgaataacccgagcggcagcgtgaaagaccgtgctgccttttccatgattattcaagcagaaaaggatggccatttgcaacctggttccaccattattgagccaacgagtggaaatactgggattggcttggctatgaacgctgcggcccgcggctatcgcgctattctcgtcatgcctgatacaatgagccaagaacggattaatttactaaaggcgtatggcgctgaagtcgtgctaacggaaggcgataaaaaaatgcctggggccatcgaaaaagccaaggagcttgccgaaagcattcctggctctttcatgccaatgcagtttgaaaatgaagcaaaccctgatgcccaccgccgtaccactgccatagaaattaaacaagacttagatgcaattggcgccacactttcagggtttgtcgcagcctctggtacgggcggcacgatcaccggcacaggagaagtgcttaaaacctattaccctgatgcccttattcatgtggtggagccagctggatcacctgttttgtcaggtggcaagcctggcccgcataagcttgtcggtacaagccctggatttgtaccgcctatactaaatacagctatctatgaccagattaggcggatcgaagatgaagatgcatacaagacagcaaaagacttggcacggcttgaaggcattcttgtcggcccttcttctggagcggcttgctttgcggcactggaaatggccaagacgcttgacaaaggcgatcacgtcgttgccatcgcctgtgatacaggcgagcgctatttatcgaccgacctgtatcaatccgaatag

SEQ ID NO: 39737 - protein, 310 aa, Bacillus clausii KSM-K16
MRVVDNIADLIGQTPLVRLNKLPDSEGASVYLKLEMNNPSGSVKDRAAFSMIIQAEKDGHLQPGSTIIEPTSGNTGIGLAMNAAARGYRAILVMPDTMSQERINLLKAYGAEVVLTEGDKKMPGAIEKAKELAESIPGSFMPMQFENEANPDAHRRTTAIEIKQDLDAIGATLSGFVAASGTGGTITGTGEVLKTYYPDALIHVVEPAGSPVLSGGKPGPHKLVGTSPGFVPPILNTAIYDQIRRIEDEDAYKTAKDLARLEGILVGPSSGAACFAALEMAKTLDKGDHVVAIACDTGERYLSTDLYQSE

SEQ ID NO: 39738 - DNA, 1395 bp, Mycobacterium tuberculosis H37Rv
  CDS (1)..(1395): transl_table=11
atgcggatcgcgcaacatatcagtgaactcattggtggtaccccactggttcggctgaactccgtggtacccgacggcgccggaaccgtggccgcaaaggtcgagtatctcaaccctggcggcagctccaaggatcggatcgcggtgaagatgatcgaagccgccgaggccagcggtcagctgaagccgggtggcaccatcgtcgaacccacgtccggcaataccggcgttggtctggcgttggtcgctcagcgccgcggctacaagtgcgtgttcgtctgcccggacaaggtcagtgaggataaacgcaatgtgttgatcgcctacggcgccgaggtcgtggtgtgcccgacggcggtcccgccgcacgatccggccagctactacagtgtgtcggaccggttggtccgtgatatcgacggtgcctggaagcccgaccagtacgccaacccggagggaccggcaagccattatgtgaccaccggcccggaaatctgggccgataccgagggcaaggtcacccatttcgtggctggcatcggcaccggcggtaccatcaccggcgctggccggtacctcaaagaggtgtccgggggccgagtacgcatcgtcggcgccgacccggagggatcggtctattcgggcggtgccggccgaccgtatctggtcgagggggtcggcgaggatttctggccggcggcctatgacccgagcgtgcccgacgagatcatcgcggtgtccgactccgactcgttcgacatgaccaggcggctggcccgcgaagaggcgatgttggtcggcgggtcgtgcgggatggcggtggttgccgcgctcaaggtcgccgaggaagccgggcccgacgcgttgatcgtcgtcctgttgcccgacggcggccggggctacatgtcgaaaatcttcaacgacgcgtggatgtcgtcctatgggttcctgcgcagccgccttgacgggtcgaccgagcaatccaccgtcggtgatgtgttgcgccgcaagtccggcgcgctgcccgccctggtgcacacccatccgtcggagaccgtgcgcgacgccatcgggattcttcgcgagtacggggtgtcgcagatgccggtggtcggcgccgagccgccggtgatggccggcgaggtcgccggtagcgtctcggaacgcgagctgctctcggccgtgttcgagggccgcgccaagttggccgacgccgtgtcggcacacatgagcccgccgctgcggatgataggcgccggtgaattggtcagtgcggccggcaaggcgttgcgtgattgggatgcgttgatggtggtggaggaaggcaagccggttggggtcattacccggtacgacttgttgggcttcttgtcggagggggcgggacggcggtag

SEQ ID NO: 39739 - protein, 464 aa, Mycobacterium tuberculosis H37Rv
MRIAQHISELIGGTPLVRLNSVVPDGAGTVAAKVEYLNPGGSSKDRIAVKMIEAAEASGQLKPGGTIVEPTSGNTGVGLALVAQRRGYKCVFVCPDKVSEDKRNVLIAYGAEVVVCPTAVPPHDPASYYSVSDRLVRDIDGAWKPDQYANPEGPASHYVTTGPEIWADTEGKVTHFVAGIGTGGTITGAGRYLKEVSGGRVRIVGADPEGSVYSGGAGRPYLVEGVGEDFWPAAYDPSVPDEIIAVSDSDSFDMTRRLAREEAMLVGGSCGMAVVAALKVAEEAGPDALIVVLLPDGGRGYMSKIFNDAWMSSYGFLRSRLDGSTEQSTVGDVLRRKSGALPALVHTHPSETVRDAIGILREYGVSQMPVVGAEPPVMAGEVAGSVSERELLSAVFEGRAKLADAVSAHMSPPLRMIGAGELVSAAGKALRDWDALMVVEEGKPVGVITRYDLLGFLSEGAGRR

SEQ ID NO: 39740 - DNA, 963 bp, Dehalococcoides ethenogenes 195
  CDS (1)..(963): transl_table=11
atggataatataacgcctgagcataataaacataccaaccaaaatatcgctccggatattactaaacttataggcaataccccgctggtgcgtctgaacaggataggcagcgggctgaaagccgaaattgtgctgaaactggaatcatttaatcccacccacagtgccaaagaccgccccgccctgcatatgatagaaaaggccgagcaggaaggcaagcttcgccccggaagcatcataatagaatccaccagcggcaataccggaatagcccttgccgcggtttgtgccgccagaggctaccgcctgatgctgaccatgcctgaaagcttctcactggaaagaaggcgtttgctccgcctgctgggggcggaactggtacttaccccgaaagaacttggtatgcagggggctctggaaaaagcagccgaactcaaaaacaagctcccagagacttttatacccggccagtttgtaaatccggctaatccggaaagccactgccagactactgccgcagaaatctggcgggatacaaacggcaaagtagatatactgatagcgggcgtaggcacaggcggcactctaagcggcacagccaaaggcctaaaagcagtcaaaccttcggtacagataatagcggtagaaccggtcgaatcaccggtactttcaggcggagaaccccacccccatcttattcagggcataggggcaggctttataccccgcatactttccgtggaactgatagacaaagtcatacaggtgcccggagaagaagcagtgaaaatggcactccgcctggcgcgtgaagagggtattatggcgggtatttcatccggggcagcactctgggcagcgctggaaacagctaaacagggcgaaaactgcggcaagcttattgtagccattatgcctgacagcggcgaacgctatttatccagcctgccgctgggtgactga

SEQ ID NO: 39741 - protein, 320 aa, Dehalococcoides ethenogenes 195
MDNITPEHNKHTNQNIAPDITKLIGNTPLVRLNRIGSGLKAEIVLKLESFNPTHSAKDRPALHMIEKAEQEGKLRPGSIIIESTSGNTGIALAAVCAARGYRLMLTMPESFSLERRRLLRLLGAELVLTPKELGMQGALEKAAELKNKLPETFIPGQFVNPANPESHCQTTAAEIWRDTNGKVDILIAGVGTGGTLSGTAKGLKAVKPSVQIIAVEPVESPVLSGGEPHPHLIQGIGAGFIPRILSVELIDKVIQVPGEEAVKMALRLAREEGIMAGISSGAALWAALETAKQGENCGKLIVAIMPDSGERYLSSLPLGD

SEQ ID NO: 39742 - DNA, 933 bp, Neisseria gonorrhoeae FA 1090
  CDS (1)..(933): transl_table=11
atgaaaattgcaaacagcatcaccgaattgatcggcaacacgcctttggtcaaactgaaccgtttgaccaaaggtttgaaggcagaggttgccgtgaaactggaattttttaatccgggcagcagcgtcaaagaccgcattgccgaagcaatgatcgaggccgccgaaaaagcgggaaaaatcaacaaaaacaccgtcattgtcgaagcaaccagcggcaatacgggtatcggtttggcaatggtatgtgccgcacgcggctacaaactggcgattaccatgccggaaagcatgagcaaagagcgcaaaatgctgttgcgcacgtttggcgcggaactgattctaacccccgccgccgaaggtatggcgggcgcgattgccaaagcgcaatccttggtggacgctcatccagacacttattttatgccgcgccagttcgacaatgaggcaaatcccgaagtccaccgcaaaacaaccgccgaggaaatttggaacgataccgacggtaaagtcgatgtcttcgttgccggcgtcggcacgggcggtacgattaccggcgtgggcgaagtgttgaaaaaatacaaacccgaaattgaagtgtgtgccgtcgaagctggcgcttcccccgtattgagcggcggcgaaaaaggtccgcacccgattcaaggtatcggcgcaggttttattccgaccgttttgaataccaaaatctacgacagcattgccaaagtgccgaacgaagcggcttttgaaaccgcccgtgcaatggcggaaaaagaaggcattttggcgggcatttcttccggtgcggcggtttggagcgcgttgcagcttgccaaacagcctgaaaacgaaggcaagctgatagtcgtgctgctgccttcttatggcgaacgctatctttctacgccactttttgcagatttggcataa

SEQ ID NO: 39743 - protein, 310 aa, Neisseria gonorrhoeae FA 1090
MKIANSITELIGNTPLVKLNRLTKGLKAEVAVKLEFFNPGSSVKDRIAEAMIEAAEKAGKINKNTVIVEATSGNTGIGLAMVCAARGYKLAITMPESMSKERKMLLRTFGAELILTPAAEGMAGAIAKAQSLVDAHPDTYFMPRQFDNEANPEVHRKTTAEEIWNDTDGKVDVFVAGVGTGGTITGVGEVLKKYKPEIEVCAVEAGASPVLSGGEKGPHPIQGIGAGFIPTVLNTKIYDSIAKVPNEAAFETARAMAEKEGILAGISSGAAVWSALQLAKQPENEGKLIVVLLPSYGERYLSTPLFADLA

SEQ ID NO: 39744 - DNA, 951 bp, Bacteroides fragilis NCTC 9343
  CDS (1)..(951): transl_table=11
atggcaaaaatcgcaaagaaacttaccgaactgataggccatactccattgatggagttgtccggttatagtcgtaaatacggccttcaagagaatatagttgctaaactggagtcgtttaaccctgccggaagcgtaaaggaccgcgtggcactttcgatgattgaggatgccgaagagagaggagtgctgcaacccggtgccactatcatcgagcctaccagtggcaataccggtgtgggacttgcgatggtggccactatcaaagggtatcgccttatactgaccatgcccgaaaccatgagcctggaacgtcgtaatctgttgaaggcattgggagcccagattgttttgactaacggacagaagggaatggccggttccattgccaaggcagaggaactgaaaaagtcgattccaggttcggtcattctgcaacagtttgagaatcctgcgaataccgaagtccatgctcggtctaccggtgaagaaatctggcaggatacggacggagaagtggctgtattcgtggcgggagtaggaaccggaggtactgtttgcggggtggcccgtgcattaaaaaaacataatccgaatgtatatatagtagctgtagagcctgcatcctctccggtactcgaaggcgggaaagcagcttcacaccgtatacaggggatcggagcgaatttcgtgcccggcatttatgatgcttcggttgtggacgaagtcatgcctgtgcccgatgatgaagcgattcgtggcggacgagaattggcctcgacagaaggattgttggtgggaatttcttccggagcagctgtttatgcagcccgtcaactggccggacgtccggaatttaaaggaaaaatgattgtgactctgttgccggataccggcgaacgctatctaaccaccgagctattcgcatttgacgcttatccgttggactga

SEQ ID NO: 39745 - protein, 316 aa, Bacteroides fragilis NCTC 9343
MAKIAKKLTELIGHTPLMELSGYSRKYGLQENIVAKLESFNPAGSVKDRVALSMIEDAEERGVLQPGATIIEPTSGNTGVGLAMVATIKGYRLILTMPETMSLERRNLLKALGAQIVLTNGQKGMAGSIAKAEELKKSIPGSVILQQFENPANTEVHARSTGEEIWQDTDGEVAVFVAGVGTGGTVCGVARALKKHNPNVYIVAVEPASSPVLEGGKAASHRIQGIGANFVPGIYDASVVDEVMPVPDDEAIRGGRELASTEGLLVGISSGAAVYAARQLAGRPEFKGKMIVTLLPDTGERYLTTELFAFDAYPLD

SEQ ID NO: 39746 - DNA, 948 bp, Bacteroides fragilis NCTC 9343
  CDS (1)..(948): transl_table=11
atgggaaagatagcaaagaaactgacagatttagtgggtaacaccccgttactggaactgagtaattacaatgcaagtaatgggctgaaggctcgtgtagtggcaaaactggaatatttcaacccggcggggagcgtgaaagaccgtatctctctggctatggttgaagatgccgaagcgaaagggacgttgaagtccggcgctactattattgagccgaccagtggaaatacaggtgtcggcctggcatttgtggcagctgccaaaggttacaaactgatattgaccatgcccgatacgatgagcatggaacgcaggaatctgctgaaagcactgggagcggagcttgtgcttactccgggagcgaacggaatgaaaggagccatcgccaaggccgaggaactgagggctgccactcccggatctgttatcctgcaacagttcgaaaatccggctaaccctgcagtccatgtccgtactacgggtcaggagatctggagagataccgatggaaaagtggatatctttgtagccggagtgggaacgggaggtactgtaagtggggtaggagctgctttaaaggagcataatcctgccgtacgaatcgttgccgtagagcctgtcgattcgccggtgctgtccggtggagctcccggtccgcacaagatacaggggattggtgccgggtttattcctaaaacttatcatgcagccgtagtagacgagatcaggcaggtgggaaatgacgatgccatccgcaccagtcgtgagttggctgctaaagaaggacttttggtcggcatttcttcgggagcagcagtatatgcggctacagagctggcaaaactgccggaaaatgaaggaaagctgatcgttgtattgctgccggatacgggagaacgctatctgtcgactatcttgtatgcgtttgaagagtatccgctttga

SEQ ID NO: 39747 - protein, 315 aa, Bacteroides fragilis NCTC 9343
MGKIAKKLTDLVGNTPLLELSNYNASNGLKARVVAKLEYFNPAGSVKDRISLAMVEDAEAKGTLKSGATIIEPTSGNTGVGLAFVAAAKGYKLILTMPDTMSMERRNLLKALGAELVLTPGANGMKGAIAKAEELRAATPGSVILQQFENPANPAVHVRTTGQEIWRDTDGKVDIFVAGVGTGGTVSGVGAALKEHNPAVRIVAVEPVDSPVLSGGAPGPHKIQGIGAGFIPKTYHAAVVDEIRQVGNDDAIRTSRELAAKEGLLVGISSGAAVYAATELAKLPENEGKLIVVLLPDTGERYLSTILYAFEEYPL

SEQ ID NO: 39748 - DNA, 1110 bp, Pseudomonas fluorescens Pf-5
  CDS (1)..(1110): transl_table=11
atgaactcggcgtcgctgatgtgtctcttgcataggcacgactggcccggctggcccgggtgttgcgcgactggacgctcaagggcgccaggcatacccttggggacttcttcactgctgcataaggacccagccatgagccgaatttttgctgataacgcccattccatcggcaatacgcccttggtgcagatcaaccgcatcgccccgcgcggggtgaccatcctggccaagatcgaaggacgcaacccgggctattcggtgaagtgccggatcggcgcgaacatgatctgggacgccgaaagcagcggcaagctcaagccgggcatgaccatcgtcgagcccacgtcgggcaacaccgggatcggcctggccttcgtcgccgccgcccgtggctacaagctgatgctgaccatgccggcgtccatgagcatcgagcggcgcaaggtgctcaaggccctgggcgccgagctggtgctcaccgagccggccaagggcatgaagggggcgatcgaaaaggcggcggaaatcgttgccagcgacccggccaggtacttcatgccgcagcagttcgataacccggccaacccggcgatccacgaaaagaccaccggtccggaaatctggaacgataccgacggcgcggtggacgtgctggtggccggggttggcacagggggcaccatcagcggtgtgtcgcgctacatcaagaagacccagggcaagccgattctctcggtggcggtggagccggcgacttctccggtgatcacccagaaactcgccggtgaagagatcaagcccagcccccacaagatccagggcatcggcgccggtttcgtgcccaggaacctggacctggcgatggtcgaccgggtggagctggtgaccgatgaagagtccaaggccatggccctgcggctgatgcaggaagagggcatcctctgcggcatctcctgcggcgcggcgatggcggtggcggtacgcctggcggaaaccccggaaatgcagggcaagaccatcgtggtgatcctgccggactccggtgagcgctacctgtcgagcatgcttttcagcgacctgttcaccgagcaggaaaaccagcagtaa

SEQ ID NO: 39749 - protein, 369 aa, Pseudomonas fluorescens Pf-5
MNSASLMCLLHRHDWPGWPGCCATGRSRAPGIPLGTSSLLHKDPAMSRIFADNAHSIGNTPLVQINRIAPRGVTILAKIEGRNPGYSVKCRIGANMIWDAESSGKLKPGMTIVEPTSGNTGIGLAFVAAARGYKLMLTMPASMSIERRKVLKALGAELVLTEPAKGMKGAIEKAAEIVASDPARYFMPQQFDNPANPAIHEKTTGPEIWNDTDGAVDVLVAGVGTGGTISGVSRYIKKTQGKPILSVAVEPATSPVITQKLAGEEIKPSPHKIQGIGAGFVPRNLDLAMVDRVELVTDEESKAMALRLMQEEGILCGISCGAAMAVAVRLAETPEMQGKTIVVILPDSGERYLSSMLFSDLFTEQENQQ

SEQ ID NO: 39750 - DNA, 903 bp, Pseudomonas fluorescens Pf-5
  CDS (1)..(903): transl_table=11
atgaccttgcagtacccaaccatcgccgattgcgtcggcaacacccccctggtccgcctgcagcgcctgcctggcgccaccagcaataccctgctgctaaagctcgagggcaacaacccggcgggttcggtcaaggaccgtccggcactgtcgatgattacccgcgccgagttgcgcgggcagatccaggccggcgataccctgatcgaagcgacctcgggcaataccggcatcgccctggccatggctgcggcgatcaagggctacaagatgatcctgatcatgcccgacaactccagcgccgagcgcaaggcggccatgaccgcctacggcgccgagctgattctggtcagccaggaagaaggcatggaaggcgctcgcgatctggccgagcggatgcaggccgaaggccgcggcaaggtgctcgaccagttcgccaacggcgacaaccctgaggcccactacagcggcaccggcccggaaatctggcgccagacccagggcagcattacccacttcatcagctcgatgggcaccaccggcaccatcatgggcacctcgcgttacctgaaggagcagaacccggcggtgcagatcgtcggtctgcagccgatggaaggctcggccattcccggcattcgccgctggcccgagcaatacctgccgaagatctaccaggccagtcgggtcgaccggatcgtcgacatggcccagagcgaggccgaagacgtgactcggcgcctggcccgtgaagaagggatcttctgtggcgtctcttccggcggtgcggtggcagcgatgctgcgcctgtcccgggaagtggaaaacgcggtcatggtcgcgatcatctgcgaccgtggcgatcgttacctgtcgaccggcattttcgatgcgcccaattga

SEQ ID NO: 39751 - protein, 300 aa, Pseudomonas fluorescens Pf-5
MTLQYPTIADCVGNTPLVRLQRLPGATSNTLLLKLEGNNPAGSVKDRPALSMITRAELRGQIQAGDTLIEATSGNTGIALAMAAAIKGYKMILIMPDNSSAERKAAMTAYGAELILVSQEEGMEGARDLAERMQAEGRGKVLDQFANGDNPEAHYSGTGPEIWRQTQGSITHFISSMGTTGTIMGTSRYLKEQNPAVQIVGLQPMEGSAIPGIRRWPEQYLPKIYQASRVDRIVDMAQSEAEDVTRRLAREEGIFCGVSSGGAVAAMLRLSREVENAVMVAIICDRGDRYLSTGIFDAPN

SEQ ID NO: 39752 - DNA, 957 bp, Psychrobacter arcticus 273-4
  CDS (1)..(957): transl_table=11
atgtccgctacagctccgttaaacgtcaactttatcacccagattactgaccttgctgattgcgtcggtcaaacgcccttggtcaaattgcagcgtttacctgagcaagagcagattgacaatggtgccatcatgcttgccaagcttgaaggtaataatcctgctggctctgtcaaagaccgccctgcgtttaatatgatctatcaagcggagcggcgcggtgatatcaagccaggtgacatgttgattgaggcaaccagtggcaataccggtattgctttagccatggtggcggcaatgcgcggctatccgattaccttgtttatgccaagtaactcaacccaagaacgtaaagatgccatgactgcttatggtgcaacgctgattcaggtagaagaagggatagaagcagcgcgcgatatggcattacaaatgcaagcagatggcaaaggtattgtattagatcaatttaataaccctgataataaacaagcgcattatctgactacagggcctgagctgtgggcgcaaactgagggtaaaatcactcattttatcagctctatgggcactactggcactattaccggtgtagcacagtatttaaaagagcaaaaccctgccatacaaatcatcggtctacaacctgatgaggaagcagctattgctggtatccgccgctggcctgccgcttatatgccaggaatttttgatgccgacctagtcgatgagattatggatatcgatcagcgcgtcgctgaggtctatatgcgtaagcttgccaaaactgaagggatatttgcgggtgtctcctccggtgcagcggcatgggccgccacacaagtcgctaaagcaaatcctgatgccgtcattgcctttatcgtctgtgatcggggtgatcgttatttatcgactggcttatataatgtcgatgacagcatagataatgcaaactaa

SEQ ID NO: 39753 - protein, 318 aa, Psychrobacter arcticus 273-4
MSATAPLNVNFITQITDLADCVGQTPLVKLQRLPEQEQIDNGAIMLAKLEGNNPAGSVKDRPAFNMIYQAERRGDIKPGDMLIEATSGNTGIALAMVAAMRGYPITLFMPSNSTQERKDAMTAYGATLIQVEEGIEAARDMALQMQADGKGIVLDQFNNPDNKQAHYLTTGPELWAQTEGKITHFISSMGTTGTITGVAQYLKEQNPAIQIIGLQPDEEAAIAGIRRWPAAYMPGIFDADLVDEIMDIDQRVAEVYMRKLAKTEGIFAGVSSGAAAWAATQVAKANPDAVIAFIVCDRGDRYLSTGLYNVDDSIDNAN

SEQ ID NO: 39754 - DNA, 981 bp, Colwellia psychrerythraea 34H
  CDS (1)..(981): transl_table=11
atgtctaaaatattcgaagacaacaccactgctataggtaatacacctttagttaaattaaaccgcgtgattgattctgaaaatggcgctaatgtttatgccaaaattgaagccagaaatccaagtttcagtgttaaatgtcgtatcggcgctagtatggtttgggatgctgaagaaaaaggtttattaacccctggaaaagaaattgtagaaccaacaagtggtaatacaggtatcgcattagcatttgttgctgcggcacgtggctacggcattaccttgactatgcctagcactatgagcttagaacgtcgtaagttattatctgcgttaggcgcaaaagttgaacttaccgatggtgctaaaggtatgggcggtgctattgctaaagcgcaagagcttaaagattcagatccagaaaagtatgtattattagggcaatttgataaccctgccaacccaaaaattcatgaagaaactactggtccagaaatctggaatgataccgatggaaatgttgatatctttgttgccggtgttggaacaggtggcactcttactggtacaagtcgctatcttaagttaactaaaggtaaagcaattaccacagtagccgttgaacctactgactctccagtgattactcaagcccttgctggtgaagaattaacacccggtcctcataagattcaaggtataggtgctggctttattcctggcaatttagatcttgatatggtcgatgctgttgaactggtttcaaatgaagatgcttttgctatggcacaccgtttgatgaaagaagaaggtattcttgctggcatctcatctggcgcagctgttattgcagcaaaacgtcttgctgaacgtcctgaaaataaaggtaaaaatatcgtagtgatattaccgagttcagctgagcgttacttatcaagtgcactttttactgaaacctttagcgataaagaacttgttcagtaa

SEQ ID NO: 39755 - protein, 326 aa, Colwellia psychrerythraea 34H
MSKIFEDNTTAIGNTPLVKLNRVIDSENGANVYAKIEARNPSFSVKCRIGASMVWDAEEKGLLTPGKEIVEPTSGNTGIALAFVAAARGYGITLTMPSTMSLERRKLLSALGAKVELTDGAKGMGGAIAKAQELKDSDPEKYVLLGQFDNPANPKIHEETTGPEIWNDTDGNVDIFVAGVGTGGTLTGTSRYLKLTKGKAITTVAVEPTDSPVITQALAGEELTPGPHKIQGIGAGFIPGNLDLDMVDAVELVSNEDAFAMAHRLMKEEGILAGISSGAAVIAAKRLAERPENKGKNIVVILPSSAERYLSSALFTETFSDKELVQ

SEQ ID NO: 39756 - DNA, 975 bp, Pseudomonas syringae pv. phaseolicola 1448A
  CDS (1)..(975): transl_table=11
atgagccgtatctacgctgataacgcccattccatcggtaatacgccgctggtgcagatcaatcgtattgcaccccgcggtgtcacgattctggccaagatcgaaggacgtaatccgggctactccgtcaagtgccgtatcggcgccaacatgatctgggacgctgaaagcagcggcaaactcaagcccggcatgaccatcgtcgaaccgacctcgggcaataccgggattggcctggcattcgttgccgccgcccgtggttacaaattgatgctcaccatgcccgcttccatgagcatagaacgtcgcaaggtactcaaggcgttgggtgccgaactggtgttgactgaaccggcaaaggggatgaaaggcgcgattgccaaggcagaagagctgctggcgggcgatccggaaaaatatttcatgctcgcacagttcgagaacccggccaacccggccatccatgaaaagaccaccggccctgaaatctgggcggacaccgacggcgctatcgacgtactggtggcaggcgtcgggactggcgggactatcaccggtatttcccgctatatcaagtacaccgcaggcaagccgatcctgtcggttgcggtcgagccagacggttcgccgattatcacccaggcgatggccggtgaagagatcaaacccagcccgcacaagattcaaggcatcggtgccggtttcattccgaaaaacctcgatctgtcgattgtcgaccgggtagagcgtgtcaccgatgaagagtccaaggccatggcccggcgtctgatgcaggaggagggcattctctgtggtatttcctgcggcgcggccatggcggcagccgttcgtctggctgaaaaaccggagatgcagggcaagactatcgtggtgatcctgcctgactctggcgaacgttacctgtccagcatgctgttcagcgacctgtttaccgatcaggagctttctcagtaa

SEQ ID NO: 39757 - protein, 324 aa, Pseudomonas syringae pv. phaseolicola 1448A
MSRIYADNAHSIGNTPLVQINRIAPRGVTILAKIEGRNPGYSVKCRIGANMIWDAESSGKLKPGMTIVEPTSGNTGIGLAFVAAARGYKLMLTMPASMSIERRKVLKALGAELVLTEPAKGMKGAIAKAEELLAGDPEKYFMLAQFENPANPAIHEKTTGPEIWADTDGAIDVLVAGVGTGGTITGISRYIKYTAGKPILSVAVEPDGSPIITQAMAGEEIKPSPHKIQGIGAGFIPKNLDLSIVDRVERVTDEESKAMARRLMQEEGILCGISCGAAMAAAVRLAEKPEMQGKTIVVILPDSGERYLSSMLFSDLFTDQELSQ

SEQ ID NO: 39758 - DNA, 942 bp, Pseudomonas syringae pv. phaseolicola 1448A
  CDS (1)..(942): transl_table=11
atgataggcaccccccgcagtctggattgcgaagacgccatgaccctgcagtatcaaaccattgccgattgcgtcggcaacaccccgctggtgcgtctgcaacgcatggcgggcaacaccagcaataccctcctgttgaaactcgaaggtaacaaccccgctggctcggtaaaagaccgcccggccttgtcgatgatcacccgcgccgagttgcgcggccagatccatccaggagacacgctgatcgaagcgacctccggcaataccggaatcgcgctggccatggccgcggcgatcaagggctaccggatgattctgatcatgccggacaactccagtgccgaacgcaaggccgccatgactgcctatggcgccgagctgatttcggtcagcaaggaccagggcatggaaggcgcccgtgatctggccgagcgcatgcaggccgaaggccgcggcaaagtgctcgatcagttcgccaatggcgacaatcccgaggcgcattacacgtccaccggtccggaaatctggcggcagacgggcggtaccgtgacccatttcgtcagctcgatgggcaccaccggcaccatcatgggcacctcgcgctacctcaaggagcaaaatcccgaggtgcagatcgtcggtctgcaaccgatggagggcgcttcgatccccggtattcgccgctggccgcatgaatacctgccgaaaatctatcagtcggaccgtgtcgaccgcatcatcgacatgggccagaccgaagccgaagacaccatgcgccgactggcgcgcgaagaaggcatcttctgtggcgtgtcgtccggtggctcggtcgccggggcgttgcgtatttcccaggaagtcgaaaacgccgtgattgtggcgatcatctgtgaccgaggcgaccgttacctgtcgaccggcgtctatgattcgcccaactga

SEQ ID NO: 39759 - protein, 313 aa, Pseudomonas syringae pv. phaseolicola 1448A
MIGTPRSLDCEDAMTLQYQTIADCVGNTPLVRLQRMAGNTSNTLLLKLEGNNPAGSVKDRPALSMITRAELRGQIHPGDTLIEATSGNTGIALAMAAAIKGYRMILIMPDNSSAERKAAMTAYGAELISVSKDQGMEGARDLAERMQAEGRGKVLDQFANGDNPEAHYTSTGPEIWRQTGGTVTHFVSSMGTTGTIMGTSRYLKEQNPEVQIVGLQPMEGASIPGIRRWPHEYLPKIYQSDRVDRIIDMGQTEAEDTMRRLAREEGIFCGVSSGGSVAGALRISQEVENAVIVAIICDRGDRYLSTGVYDSPN

SEQ ID NO: 39760 - DNA, 900 bp, Dechloromonas aromatica RCB
  CDS (1)..(900): transl_table=11
atgtataaaaccctgcaggattttgtcggaaacacgccactggtacgtctggtgcgtattcccggtgctgacaacgacaagcgaggcaatgtcatcctggccaagctggaggggaataatccggctggttcagtcaaggacagacctgcgctgtcgatgatcgtccatgccgaggcgcgtggcgacatcaagccaggcgatacgctgatcgaggcgacctcaggtaataccggcatcgcgctggccatggcagcggcgatcaaggggtaccggatgatccttgtcatgccggaaaaccagagtgtcgagcgtcggcagagcatgcgtgcctacggcgcggaactggttctgacgcccaaggatggcggtatggaactggcacgcgacgtggccgacaagatgcgcgacgaaggcaagggcatcatccttgaccagttcgccaaccctgataatccgctggcccattacgaaggtaccggcccggaaatctggcgcgatactgatggcaaaattacccatttcgtatccagcatgggaacgaccgggaccatcatgggaaccagtcgtttcttgaaggaggcgaacccggccatcgagatcgttggctgccagccggaagacggcagccagatccccggcatccgcaagtggccggaagcctatctgccgaaaattttcgacaagaccaatgtcgatcgcgtcgaatacgtcagtcaggctgatgctgaggcgatgacccggcgcctggcgatggaagagggaatttttgccggcatttcctcgggtggtgcgctcgccgtggccctgcgcctgtcgcagcaactggagaatgcggtgatcgtctcgatcatctgcgaccgtggtgaccgttatctctcgaccggtgttttcccggcatga

SEQ ID NO: 39761 - protein, 299 aa, Dechloromonas aromatica RCB
MYKTLQDFVGNTPLVRLVRIPGADNDKRGNVILAKLEGNNPAGSVKDRPALSMIVHAEARGDIKPGDTLIEATSGNTGIALAMAAAIKGYRMILVMPENQSVERRQSMRAYGAELVLTPKDGGMELARDVADKMRDEGKGIILDQFANPDNPLAHYEGTGPEIWRDTDGKITHFVSSMGTTGTIMGTSRFLKEANPAIEIVGCQPEDGSQIPGIRKWPEAYLPKIFDKTNVDRVEYVSQADAEAMTRRLAMEEGIFAGISSGGALAVALRLSQQLENAVIVSIICDRGDRYLSTGVFPA

SEQ ID NO: 39762 - DNA, 975 bp, Dechloromonas aromatica RCB
  CDS (1)..(975): transl_table=11
atgtccaaatggtttgcagataattcacagtcgatcggccgcacgccgctgatcaagctcaaccgtgtcatcgacggcgccaaggctaccgtgctcgccaagatcgaaggtcgcaacccggcctattcggtcaagtgccggatcggcgccgccctgatcaatgatgccgagaagcgtggcctgctcggtccgggcaaggagctggtcgagccgacttccggcaacaccggcatcgcgctggctttcgtcgccgccgccaagggtattccgctgacgctgaccatgcccgaaacgatgagtatcgaacggcgcaagctgctgacggcttttggtgccaagctggtgctgaccgaaggcgccaagggcatgtccggcgccatcgccaaggccgaggaaattgccgcttccgatgccaagtacgtgttgttgcagcagttcaagaacccggccaatccggccatccacgaactgaccaccggtccggaaatctgggacgacaccgatggcgccatcgacattctggtgtccggggtcggcactggcggcacgatcaccggtgtttcgcgttacatcaagaacaccaagggcaaggcgatccagtcggtcgccgtcgagccgaccgccagcccggtgctgacccaggctcgtgccggcgagccaatcaagcccggtccgcacaagattcaggggattggcgccggtttcgtgccggccgtgctcgatctgtcgctgctcgatgccgttgagcaagtgtctaatgaggatgccgtgctttacgcccgccgcctggccaaggaagagggcatcatctccgggatttccagcggtgctgcggttgcggcggccgctcgtctggcccggataccggaaaatgccggcaagaccattgtcgccatcctgcctgactccggcgagcgttacctcagctccatcctgttcgaaggcttgttcaacgaagccgggctggccgcatga

SEQ ID NO: 39763 - protein, 324 aa, Dechloromonas aromatica RCB
MSKWFADNSQSIGRTPLIKLNRVIDGAKATVLAKIEGRNPAYSVKCRIGAALINDAEKRGLLGPGKELVEPTSGNTGIALAFVAAAKGIPLTLTMPETMSIERRKLLTAFGAKLVLTEGAKGMSGAIAKAEEIAASDAKYVLLQQFKNPANPAIHELTTGPEIWDDTDGAIDILVSGVGTGGTITGVSRYIKNTKGKAIQSVAVEPTASPVLTQARAGEPIKPGPHKIQGIGAGFVPAVLDLSLLDAVEQVSNEDAVLYARRLAKEEGIISGISSGAAVAAAARLARIPENAGKTIVAILPDSGERYLSSILFEGLFNEAGLAA

SEQ ID NO: 39764 - DNA, 933 bp, Dechloromonas aromatica RCB
  CDS (1)..(933): transl_table=11
atgaaaatcgccaacaatgtgaccgaactggtcggcaacacgccgctggtcaagctcaaccgcgtcaccgcaggcgctggtgccaccatcgccgccaagctcgaattcttcaaccccggccacagcgtcaaggacaggattgccgtatccatgctcgatgcggccatcgccgccggcaaggtcggtccggataccgtcattctcgagccgacttccggcaataccggcatcggcctggcgatggtctgcgcggcgcgcggcatcaagtgcgctttcgtcatgccggaaacgatgagccgcgagcgcaagctgctgctcaaggcctacggcgctgaactgattctgacccccggccccgaaggcatgggcggtgcgattgccaaggccaaggcgctggccgaaagcgacccgaaatatttcgtgccgcaacagttcgaaaacccggccaatccggaagtgcaccgcaacacaacagccgaggaaatctggcgggataccgatggccaggtcgacattttcgtttccggtgtcggcaccggtggcacgatcactggcgtcggcgaagtgctcaaggcgaagaagccgggcatcaagatcgtcgccgtcgagccggatgcctcgccggtgctgtccggcggccagaagggcccgcacccgatccagggcattggcgccgggttcgtgcctggcgtgctgaacacggcggtttacgatgaggtgattcgcgtcaagaacgacgacgcctttgccattgcccgtcagatggccacggaagaggggctgctggtcggcatttcctccggtgccgccacctgggccgcgctggaactggccaggcgccccgaaaacgccggcaagctgatcgtcgtgattattccttcatttggcgaacgctatctgtccacccccttgtatcagcacctcgaagtttga

SEQ ID NO: 39765 - protein, 310 aa, Dechloromonas aromatica RCB
MKIANNVTELVGNTPLVKLNRVTAGAGATIAAKLEFFNPGHSVKDRIAVSMLDAAIAAGKVGPDTVILEPTSGNTGIGLAMVCAARGIKCAFVMPETMSRERKLLLKAYGAELILTPGPEGMGGAIAKAKALAESDPKYFVPQQFENPANPEVHRNTTAEEIWRDTDGQVDIFVSGVGTGGTITGVGEVLKAKKPGIKIVAVEPDASPVLSGGQKGPHPIQGIGAGFVPGVLNTAVYDEVIRVKNDDAFAIARQMATEEGLLVGISSGAATWAALELARRPENAGKLIVVIIPSFGERYLSTPLYQHLEV

SEQ ID NO: 39766 - DNA, 1368 bp, Thermobifida fusca YX
  CDS (1)..(1368): transl_table=11
atgcgggtctccaactctttgatcgaactcgtcggcaacacaccgctggttcggttgaagaaagtcacggccggactcgctccgactgtgctggcgaaagtggagtacttcaaccccgggggatcggtgaaagaccgcatcgccctgcgtatggtcgaagacgccgaacggcggggcctcctcaaaccaggcggcacgatcgtggagcccacctccggaaacaccggtgtaggcctggcgatcgtcgccgcggaaaagggctaccgctgcgtcttcgtctgcccggacaaggtcggcgccgacaaactcgcggtgctgcgcgcctacggggccgaagtcgtggtctgccccacgaccgtcgcccccgaccaccccgagtcctactactcggtctccgaccgcctggccgcgacaatccccggcgcgtggaaacccgaccagtactccaaccccaacaacccggagtcgcactactacagcaccgggccggagatctgggagcagaccgaaggccgcatcacccacttcgtcgcggggatcggcaccggcggcacgatcaccggcaccggccgctacctgaaagaggtctccaacggccgggtgaaggtcatcggcgccgacccggaaggctcggtctactccggcggcactggccgcccctacctggtggagggcgtgggggaagacatctggcccgccacctacgacacgaagatctgcgacgagatcatcgcggtcagcgacaaggactccttcctcatgacccgccgcctcgctaaagaggaggcgctgctggtcggcggctcgtgcgggctcgccgtggtagccgcgctcaaggtggcggcccaagccggacccgacgacgtcatcgtggtgctcctgcccgacggcggccgcggctaccttggcaagatcttcaacgacgagtggatggccgactacggcttcctggagccggagacggaggaagccaccgccggacaggtcctcgccgccaaggacgacagcctgcccgagttcgtgcacacccacccgcacgagacggtcggcaccgccatcgccatcatgcgcgaatacggggtctcccagctgccggtcatgaaggaggaacccccggtgatggccgccgaagtggtgggcgccatcgcggaacgcgacctgctcgacgcgctgttcaacggccgggcccagctcggcgaccccgtggagcagcacatgagaccgccgctgccggtcgtcggctccggggagccggtgagccgctgcgtggaactgctccaaagctcgggagcggtcgtggtgctcgaggacggcaagccttcgggaatcctcacccgccaagacctgctcgcccacctagcgagctga

SEQ ID NO: 39767 - protein, 455 aa, Thermobifida fusca YX
MRVSNSLIELVGNTPLVRLKKVTAGLAPTVLAKVEYFNPGGSVKDRIALRMVEDAERRGLLKPGGTIVEPTSGNTGVGLAIVAAEKGYRCVFVCPDKVGADKLAVLRAYGAEVVVCPTTVAPDHPESYYSVSDRLAATIPGAWKPDQYSNPNNPESHYYSTGPEIWEQTEGRITHFVAGIGTGGTITGTGRYLKEVSNGRVKVIGADPEGSVYSGGTGRPYLVEGVGEDIWPATYDTKICDEIIAVSDKDSFLMTRRLAKEEALLVGGSCGLAVVAALKVAAQAGPDDVIVVLLPDGGRGYLGKIFNDEWMADYGFLEPETEEATAGQVLAAKDDSLPEFVHTHPHETVGTAIAIMREYGVSQLPVMKEEPPVMAAEVVGAIAERDLLDALFNGRAQLGDPVEQHMRPPLPVVGSGEPVSRCVELLQSSGAVVVLEDGKPSGILTRQDLLAHLAS

SEQ ID NO: 39768 - DNA, 969 bp, Prochlorococcus marinus str. NATL2A
  CDS (1)..(969): transl_table=11
atgcccattgctaatgacataacttatttagttggccaaacacctttggtcaaactgaatcgattgcctaatgaatttgattgtagggctgaaattatagccaaattagaaagttttaaccccacagcatccgtaaaagaccgcatagctggcgcaatggtgatgtcagcagaaaaagagggcactatcaaacctggacatactgttcttgttgaaccaactagcggaaacacaggaattgcattagcgatggttgcggcagcaaaaggttatcggctcatacttacaatgcctgacacaatgagtactgaacgtcgctccatgttaagagcatttggagcagagcttcaactaactcctggccaagagggaatccaaggcgctattcagctggcaaaggaattggtagcctctatacctaatgcatacttgcttcagcaattcgataatttatccaatcctgaaattcatgaaaaaacaaccgctgaagaaatatgggaagattgcgaaggcaaacttgatgcattaattgcaggagtgggaacaggaggaacaatcacaggttgtgccagattcttaaaacaaaaaaatccaaaaatcaaggtttttgcagtagaaccttcatcaagccctgttctgtccggagggaatcctggatctcatgcaatacaaggcattggggctggtttcattcctaatgtattagatatgaatcaaattgatgaagtcataagaatcaatgataatgaagcaatggacataggcagaagacttgccaaagaagagggattgctaagtggtgtcagcagtggtgctgcagtagccgctgctttaaaagtaggaaatcaacctgagtttgcgaataaacgcttgattgttattctgcctagttttggtgaaagatatctatcaacaacaatgtttacttccatccccgcaaagccagtaaaagggaatgagtatctctaa

SEQ ID NO: 39769 - protein, 322 aa, Prochlorococcus marinus str. NATL2A
MPIANDITYLVGQTPLVKLNRLPNEFDCRAEIIAKLESFNPTASVKDRIAGAMVMSAEKEGTIKPGHTVLVEPTSGNTGIALAMVAAAKGYRLILTMPDTMSTERRSMLRAFGAELQLTPGQEGIQGAIQLAKELVASIPNAYLLQQFDNLSNPEIHEKTTAEEIWEDCEGKLDALIAGVGTGGTITGCARFLKQKNPKIKVFAVEPSSSPVLSGGNPGSHAIQGIGAGFIPNVLDMNQIDEVIRINDNEAMDIGRRLAKEEGLLSGVSSGAAVAAALKVGNQPEFANKRLIVILPSFGERYLSTTMFTSIPAKPVKGNEYL

SEQ ID NO: 39770 - DNA, 987 bp, Prochlorococcus marinus str. NATL2A
  CDS (1)..(987): transl_table=11
atgtcaagaatctatgaagacaatagttttgctattggtcatacaccattggtcaaacttaattcgatcacaaaaaacgcaaaagcaacagtacttgcaaagatagaaggtcgtaaccctgcctacagtgttaaatgtagaataggagcaaatatgatctgggatgctgaaaagaaaggtttactcaataaagataaagtaattattgaaccaacatctgggaatactggaatagcacttgcttatacagccgctgctagaggttacaagttaatcctcacgatgcctgaatccatgtcaattgaacgtaggaggatgatggctgttcttggtgctgaattaatacttactgaagcagcaaaaggaatgcctggtgccattgcaaaagcgaaggaaatagcagatagcgaccctaaaaaatacttcatgccaggacaatttgataacccagccaatccagaaatacatttcaaaactacaggtcctgaaatttgggatgatacggacggtcaaattgatgttttagtctctggtgtcggaacaggtgggacaattacaggtgtttctcgtttcataaagcaagaaaaaaatcattcattattgtctgttgccgtagagcctactcacagcccagtaataacacaaactctcaatggagaagaagtaaaacccggccctcacaagatccaagggattggagctgggtttattcctcaaaaccttgacttatccgtagtcgatcaagttgagcaagtctccaatgatgagtctattgcaatggcattacgtttggcacaagaagaaggtctactagttggtatctcatgtggtgctgctgctgctgtggccttaaggctggccgaaaaagaggagttctcagggaagacaatcgttgtagttctacctgaccttgccgaaagatatatctcatccgtaatgtttgagaatgttcctacaggtgttattaaagaaccatcattagcttga

SEQ ID NO: 39771 - protein, 328 aa, Prochlorococcus marinus str. NATL2A
MSRIYEDNSFAIGHTPLVKLNSITKNAKATVLAKIEGRNPAYSVKCRIGANMIWDAEKKGLLNKDKVIIEPTSGNTGIALAYTAAARGYKLILTMPESMSIERRRMMAVLGAELILTEAAKGMPGAIAKAKEIADSDPKKYFMPGQFDNPANPEIHFKTTGPEIWDDTDGQIDVLVSGVGTGGTITGVSRFIKQEKNHSLLSVAVEPTHSPVITQTLNGEEVKPGPHKIQGIGAGFIPQNLDLSVVDQVEQVSNDESIAMALRLAQEEGLLVGISCGAAAAVALRLAEKEEFSGKTIVVVLPDLAERYISSVMFENVPTGVIKEPSLA

SEQ ID NO: 39772 - DNA, 903 bp, Ralstonia eutropha JMP134
  CDS (1)..(903): transl_table=11
atggcctacaagacaatcgaagacaccatcggcaatacgccgctggtcagactgcagcgcattcccggtgccgccaacgacgcacgcggcaacgtcatcctgggcaagctcgagggtaacaacccggcagggtcagtcaaggatcgcccggccgtgtcgatgatcgcccgtgctgaggcgcgcggccgcatcaagcccggcgacacgctgatcgaagccacgtccggaaataccggcatcgcgctcgccatggccgcggccatccgcggctacaagatggtgctgatcatgccggaagatctgagcctggaacgccgccagagcatggccgcctatggggccgagatcatcttgactccggtgaagggcggcatggagtacgcgcgcgacctcgccgattcgatggagcgtgacggcaagggcgtcatcctggaccagttcgggaatccggataatccgctggcccactacgaaaccaccggcccggaaatctggcgcgatacggaagggcggattacgcatttcgtatcggccatgggaacgaccggcacaatcaccggcgtttcgcgatacctgaaagagcagaacccggccattgagatcgtcggcgcgcagccggcggaaggctcgcggattccaggcattcgcaagtggccggaggcttatctgccgaagatctatgatgcgaaatacgtggaccgtaccgagcccgtgagccaggccgatgcggaacatatggcacggcgcatggcaagcgaggaaggcatctttagcggtatctcggcggcgggcgcgctgtgcgtggccttgcgagttgctgaagaggtggaaaacgcgacgatcgttttcgtggtctgcgacaggggagatcgatacctgtccacgggcgtatttcccgcctga

SEQ ID NO: 39773 - protein, 300 aa, Ralstonia eutropha JMP134
MAYKTIEDTIGNTPLVRLQRIPGAANDARGNVILGKLEGNNPAGSVKDRPAVSMIARAEARGRIKPGDTLIEATSGNTGIALAMAAAIRGYKMVLIMPEDLSLERRQSMAAYGAEIILTPVKGGMEYARDLADSMERDGKGVILDQFGNPDNPLAHYETTGPEIWRDTEGRITHFVSAMGTTGTITGVSRYLKEQNPAIEIVGAQPAEGSRIPGIRKWPEAYLPKIYDAKYVDRTEPVSQADAEHMARRMASEEGIFSGISAAGALCVALRVAEEVENATIVFVVCDRGDRYLSTGVFPA

SEQ ID NO: 39774 - DNA, 918 bp, Ralstonia eutropha JMP134
  CDS (1)..(918): transl_table=11
atgaaggcagacaacatcctgcagaccatcggcaatacgccgcatatccgcatccgacggctgttcggaaacggccacgaagtctggatcaagtcggagcggtccaacccgggcggctcgatcaaggaccgtatcgcgctatcgatggtggaagacgccgaacgccgtggcgtgctcaaacccggtggcaccattgtcgagccgacctccggcaataccggcatcggcctggcgatggtggcggcagtcaagggctacaagctgatcctggtgatgccggacagcatgtcgatcgaacgccgccggctgatgctcgcctacggcgcgacctttgacctgaccccgcgcgagaaaggcatgaagggcgcgatcgcccgcgccgaggaattgatcgcctcgatccccggcgcgtggatgccgcagcaattcgagaatccggccaacatcgacgtccatgcgcgcaccacggcgcaggaaatcctggcggacttcccggaaggcctcgatgcactgattaccggcgtgggcacgggcggccatatctcgggctgcgcgcaggtgctcaagcagaaatggccgcaactgaaggtgttcgccgtggagccgacggcatcgccggtgatttcgggtggcgcgcccgcgccgcatccgatccagggcatcggcgccggttttatcccggagaacctgaaaaccgacctgctcgatggcgtgatccaggtcgatgccgaaccagcgcgcgagatggcgcgccgctgcgcgcgcgaagaaggcatcctggttggcatttcgtcgggcgcgacgctggccgcgatcgcgagcaagctgcctgaacttccggccggcgcccgcgtgctcgggttcaactatgacaccggcgagcgttacctgacggtcgagggcttcctgccggcctga

SEQ ID NO: 39775 - protein, 305 aa, Ralstonia eutropha JMP134
MKADNILQTIGNTPHIRIRRLFGNGHEVWIKSERSNPGGSIKDRIALSMVEDAERRGVLKPGGTIVEPTSGNTGIGLAMVAAVKGYKLILVMPDSMSIERRRLMLAYGATFDLTPREKGMKGAIARAEELIASIPGAWMPQQFENPANIDVHARTTAQEILADFPEGLDALITGVGTGGHISGCAQVLKQKWPQLKVFAVEPTASPVISGGAPAPHPIQGIGAGFIPENLKTDLLDGVIQVDAEPAREMARRCAREEGILVGISSGATLAAIASKLPELPAGARVLGFNYDTGERYLTVEGFLPA

SEQ ID NO: 39776 - DNA, 927 bp, Methanosarcina barkeri str. Fusaro
  CDS (1)..(927): transl_table=11
atggggcgaatatattccgacataacctggacaattggtaatacgcctcttgtcaggttaaaccgcataacagaaggtctacatgcggatgtgttagctaaagtagagtcctttaatcctatgggaagtgtgaaggacagaatagggctggcgatgattgaaaaagccgaacttgaagggaaaatcaaaaagggtaccactgttattgaagccaccagcggcaacaccggcatcggactcgcctgcgtctgcgctgcccgtggctataagctcatactggttatgcctgaaacaatgacggtagaacgaagaaaactcctgaaagccctgggagcagagctggttctgaccccaggaacggaaggaatgaaaggagcagttaataaagccgagcagatggctgctgacgatccttcgctttacttcatagcccagcaattccagaatcctgcaaatccagaaattcacagacgtacaacggctgaagaaatctggagagatactgatggcaaagcagatgtcattgtagcaggcgtgggaacaggcggaactatcacaggcgttgccagcgtcctcaaaaaacggaaacctgcttttaaggctattgcagtcgaacctgccgaatctcctgtgctcagcggcggaagccctggaccacataaaatccagggtattggtgcaggttttattcctgatgtactccagcttgaccttgttgatgaagtgatcagagtaaccggagacaacgccgctgccatgtcccggcgcctggcaaaggaagaaggcatccttgcaggcatatcttcaggcgctgctacctatgctgcactgcaggtcgcagccagggaagaaatgaacggaaagacgattgttgtgatcttgccagatacgggagaacgttatctgagcactgatctctttgactga

SEQ ID NO: 39777 - protein, 308 aa, Methanosarcina barkeri str. Fusaro
MGRIYSDITWTIGNTPLVRLNRITEGLHADVLAKVESFNPMGSVKDRIGLAMIEKAELEGKIKKGTTVIEATSGNTGIGLACVCAARGYKLILVMPETMTVERRKLLKALGAELVLTPGTEGMKGAVNKAEQMAADDPSLYFIAQQFQNPANPEIHRRTTAEEIWRDTDGKADVIVAGVGTGGTITGVASVLKKRKPAFKAIAVEPAESPVLSGGSPGPHKIQGIGAGFIPDVLQLDLVDEVIRVTGDNAAAMSRRLAKEEGILAGISSGAATYAALQVAAREEMNGKTIVVILPDTGERYLSTDLFD

SEQ ID NO: 39778 - DNA, 894 bp, Thiobacillus denitrificans ATCC 25259
  CDS (1)..(894): transl_table=11
atgagcacttacaagaccatcgaggatacggtcggcaatacgccgctggtgcgtctcaagcgtctgcccggcgagacgtcgaacatcgtgctggtcaagctcgaaggcaacaatccggccggttcggtgaaggaccgccccgcgctgtcgatgatcgagcaggccgaggcgcgcggcgagatccggcccggtgacacgctgatcgaggcgaccagcggcaacacgggcatcgcgctcgcgatggcggcggcgatgcgtggctacaagatggtgctcatcatgcccgagcatctgtcgatcgagcggcgccagaccatgcgtgccttcggcgcggagttgcggctcgtcagccgggaggcgggcatggagggggcgcgcgatctggcgatcgaactcgagaaacagggcgtcggccgcgtcctcgaccagttcaccaaccccgacaatccggccgcgcattaccgcagcaccggcccggagatctggcgcgacaccgaaggccggatcagccatttcgtctcgagcatgggcacgaccggcacgatcatgggctgctcgcgctacctcaaggagcagaaccccgcgatccagatcgtcggcgtgcagccgaccgaaggcgcgcagattcccggcatccgtaagtggccggccgaatacgtgccgaagatctgcgacccgagccgcgtcgaccgcatgatctacgtcggccagcaggacgccgaggagacgacccggcgcctcgcgcgcgaggaaggcatcttcgccggcatctcttcgggcggcgcgctgtgggccgcgctgcaactgtcgaaggaagtcgagaacgcgaccatcgtctcgatcgtctgcgaccgcggcgaccgctatctgtcgaccggcgtgttccccgcgtaa

SEQ ID NO: 39779 - protein, 297 aa, Thiobacillus denitrificans ATCC 25259
MSTYKTIEDTVGNTPLVRLKRLPGETSNIVLVKLEGNNPAGSVKDRPALSMIEQAEARGEIRPGDTLIEATSGNTGIALAMAAAMRGYKMVLIMPEHLSIERRQTMRAFGAELRLVSREAGMEGARDLAIELEKQGVGRVLDQFTNPDNPAAHYRSTGPEIWRDTEGRISHFVSSMGTTGTIMGCSRYLKEQNPAIQIVGVQPTEGAQIPGIRKWPAEYVPKICDPSRVDRMIYVGQQDAEETTRRLAREEGIFAGISSGGALWAALQLSKEVENATIVSIVCDRGDRYLSTGVFPA

SEQ ID NO: 39780 - DNA, 960 bp, Anabaena variabilis ATCC 29413
  CDS (1)..(960): transl_table=11
atgcgaattgctaatgatgtaacagaacttattggaggtacacctttagttaagctgaataagattccgcaagcggaaggagtagttgcgagaatagttgtcaaactagaaggtatgaatccagcctcttccgtaaaagaccggattggggtgagtatgattaactcagcagaagcggaaggtttaatcacaccgggaaaaactattttagtagaaccaacttctggtaacacaggaattgctctggcaatggtagccgccgcccgtggttatcggttaattttgactatgccagaaaccatgagccaagaaagacgggctatgttgcgggcttatggtgcaactttagagttgactccaggtacggaaggtatgcggggagccattcgcaaagctgaagaacttgtggctagtacccctgatgctcatatgttgcaacagtttcgcaacccagctaaccccaaaatccaccgcgaaactactgctgaagaaatttggaatgataccgatggtgaagttgatattgtaattgctggggtgggtactggaggaacgattaccgggattgcagaggtactgaagcaacgcaaacctagttttcaggcgatcgcagttgaaccaagcaatagtcctatcctttccggtggacaagcagggccgcacaaaatccaaggtatcggcgcaggctttgttcccgatgtcctccgcctggaattggtggatgaagtcatcagggtgagtgatgatcaagcgatgagttacgggcggcgtttagccagggaagaaggtttgttatctggtatctcctctggtgcggctttgtgtgcagctttacaggtggggaaacgtcccgaaaacgccggtaagttaattgtgatggttcaaccttccttcggcgaacgctacctcagcacccctttgtttcaggatttgacgaatgaaactgctggcgttcggtaa

SEQ ID NO: 39781 - protein, 319 aa, Anabaena variabilis ATCC 29413
MRIANDVTELIGGTPLVKLNKIPQAEGVVARIVVKLEGMNPASSVKDRIGVSMINSAEAEGLITPGKTILVEPTSGNTGIALAMVAAARGYRLILTMPETMSQERRAMLRAYGATLELTPGTEGMRGAIRKAEELVASTPDAHMLQQFRNPANPKIHRETTAEEIWNDTDGEVDIVIAGVGTGGTITGIAEVLKQRKPSFQAIAVEPSNSPILSGGQAGPHKIQGIGAGFVPDVLRLELVDEVIRVSDDQAMSYGRRLAREEGLLSGISSGAALCAALQVGKRPENAGKLIVMVQPSFGERYLSTPLFQDLTNETAGVR

SEQ ID NO: 39782 - DNA, 975 bp, Anabaena variabilis ATCC 29413
  CDS (1)..(975): transl_table=11
atggatatcaaaaatggctttgtaggcactgttggcaacacaccactgattcgtttaaacagttttagtgaagaaacaggatgtgaaatccttgctaaagcagaatttctcaatcccggtggttcagttaaagaccgtgcagcactttacatcatcgaagacgcagaaaaaaaaggactacttaaaccaggcggaaccgttgtagaaggaactgctggtaatactggtattggattagcgcatatttgcaatgccaaaggctacaaatgcctgataattattcctaacacccaatcacaggaaaagattgatgcactcacagctttgggtgcagaagtccgtcccgtgccggctgtaccttacaaagacccaaataactacgttaaactttctgggagagttgctgcggaattagacaacgcaatttgggcaaatcaatttgataatttagctaaccgcctcgctcactacgaaaccacaggcccagaaatttggacacaaaccgatggtaaagttgatggctgggtagcttccactggtactggtggcacatttgccggtgtagccatgtatctaaaagaccaaaaccccgccattaaatgcgtagtagctgacccattaggtagcggtttatatagttatatcaaaactggagaaatcaagatagaaggaaattctatcactgaaggtattggtaacagccgtgtcacagctaatatggaaggcgcaccagctgacgatgctatccaaatagatgaccatgaagctctgcgggtagtttaccaactgctgcgaaaagatggcttattcatgggtggttccacaggtattaatgtagcaggtgctgtggctttagcgaagcaattggggcctggtcacaccattgttaccatattgtgtgacagtggttctcgttaccaatcccgcatattcaaccgcgattggcttgcgtccaaaggactaactgtagattag

SEQ ID NO: 39783 - protein, 324 aa, Anabaena variabilis ATCC 29413
MDIKNGFVGTVGNTPLIRLNSFSEETGCEILAKAEFLNPGGSVKDRAALYIIEDAEKKGLLKPGGTVVEGTAGNTGIGLAHICNAKGYKCLIIIPNTQSQEKIDALTALGAEVRPVPAVPYKDPNNYVKLSGRVAAELDNAIWANQFDNLANRLAHYETTGPEIWTQTDGKVDGWVASTGTGGTFAGVAMYLKDQNPAIKCVVADPLGSGLYSYIKTGEIKIEGNSITEGIGNSRVTANMEGAPADDAIQIDDHEALRVVYQLLRKDGLFMGGSTGINVAGAVALAKQLGPGHTIVTILCDSGSRYQSRIFNRDWLASKGLTVD

SEQ ID NO: 39784 - DNA, 1386 bp, Anabaena variabilis ATCC 29413
  CDS (1)..(1386): transl_table=11
atggctacttatgaaaatattttacaagcaattggtcagactcctttagtgagattaaatcgagttactgccaatgttcaatctcctatttatgcaaaagtagagtatcttaatcctggtggcagtaccaaagatagaattgccctgtccatgattgaaaatgccgaaaaaacaggtcaaatacaaccaggaggaactattattgaggccaccgcaggtaataccggtgtgggattagcactcattgccgcagttaaaaaatatcgctgtatttttgtcatgcctgataaaatgagtcaggataaaattaacctgctcaaagcttatggtgcagaagttgttgttactcctacctctgtaccgcctgactctccagaaagttataacggtgtcgcggaaagactagctaaagaaattcccggtgcatatagaccaaatcaatttgaaaacccgaataatcctttagctcattatttaacaactgggccagaaatctgggcagatagtcaaggtaaaattgatgtttttgtcgctggtatgggtactggtgggacaatttctggagttgctaaatatctcaaagaacaaaacccaaatattattattgttggtgcagatccagaaggttctatcctctcaggagatagccctaaatcttataaagttgaaggaattggtgaagactttattccgaaaacttttaatcgtcaattagttgatgaaatgattcgcgtcagcgataaagaatcttttaatatggcgcgtcgtctagctagagaagaaggcttattagtgggaggttcttgtggtacagtagtagccgcagccctcaagtatgcagcacgattatcacagccaaaatatatcgtagttttgttaccagatacagggagaaactacattaataaaatttactctgatgtctggatgcaagagaatggtttttgggaaggtaaaacagttaaaactataaaagttggggaaattctgcaacaaaaaactgattttccttctttagttgctgttagtcctagtgatactttaagccaggcgacaaacttactacagaaactcaatatctctcagttgcctgtaattgataatcatcatgtagtaggtagcctcaatgaagcatctttgatgaaatttctctatgacgggattaatttctctaatcagcaagttttagctgtgatgggtaaaccacttccaattctcgatgaaaatgtagatgtttctgaagcttaccgagttcttttatcaggaacaacagggattattattactcgtaataatattcccgcaggattaattaccagagccgatttaattagatattggattagtcaaaaccaagaaaaatcaaaggtaaacaatggaatttga

SEQ ID NO: 39785 - protein, 461 aa, Anabaena variabilis ATCC 29413
MATYENILQAIGQTPLVRLNRVTANVQSPIYAKVEYLNPGGSTKDRIALSMIENAEKTGQIQPGGTIIEATAGNTGVGLALIAAVKKYRCIFVMPDKMSQDKINLLKAYGAEVVVTPTSVPPDSPESYNGVAERLAKEIPGAYRPNQFENPNNPLAHYLTTGPEIWADSQGKIDVFVAGMGTGGTISGVAKYLKEQNPNIIIVGADPEGSILSGDSPKSYKVEGIGEDFIPKTFNRQLVDEMIRVSDKESFNMARRLAREEGLLVGGSCGTVVAAALKYAARLSQPKYIVVLLPDTGRNYINKIYSDVWMQENGFWEGKTVKTIKVGEILQQKTDFPSLVAVSPSDTLSQATNLLQKLNISQLPVIDNHHVVGSLNEASLMKFLYDGINFSNQQVLAVMGKPLPILDENVDVSEAYRVLLSGTTGIIITRNNIPAGLITRADLIRYWISQNQEKSKVNNGI

SEQ ID NO: 39786 - DNA, 963 bp, Anabaena variabilis ATCC 29413
  CDS (1)..(963): transl_table=11
atgaaaattgccagaaatattacagagctagttggacgcacgccattggtgcggttaaataatattcctcaagcagagggatctgtagccgatatagtggtgaagttagaaagcatgaacccatctgcgtcggtgaaagacagaattggcgtaagtatggtggaaagtgcagaagaggcaggtctaattcatccaggtaagacaatattagtagaaccaacttcaggaaatacgggtattgctttggcaatggtggctgctgctaaaggctatcatttgattctgaccatgccggagacgatgagtacagaaagacggtcgatgttgcgagcttatggcgcacagttggaattaactccaggtctggaagggatgcggggagcgatcgccagagccgagcagattgtaacagaattgcctaatgcctatatgttgcaacagttccgtaacccagcgaatcccaaagtacatcgtcaaactactgctgaagaaatttggtcagataccgatggacaggtagatattgtggtgggtggagtcgggactggcggaacattaactggagtcgctcaggtacttaaagaacgtaaacccagttttcaagctattgctgtagaaccaagcaatagccaagtgctttccggaggaaaatcaggagcgcataaaattcaaggtatcggtgcaggatttatcccggcaatttgtcgtctggaattgattgatcagataattgccgtttcggatgaggatgcgatcgcctatagtcgcagattagcaagagaagaaggtttattatcaggtatctctacaggtgcagcgttgtatgcagctattcaggtggcaaagcgtccagaaaatagcggtaagttgattgttatggttcaacctagttttggcgaacgctatttgagtaccacgttgttcaaggatttatcagagttggaaatatctgcactcaattaa

SEQ ID NO: 39787 - protein, 320 aa, Anabaena variabilis ATCC 29413
MKIARNITELVGRTPLVRLNNIPQAEGSVADIVVKLESMNPSASVKDRIGVSMVESAEEAGLIHPGKTILVEPTSGNTGIALAMVAAAKGYHLILTMPETMSTERRSMLRAYGAQLELTPGLEGMRGAIARAEQIVTELPNAYMLQQFRNPANPKVHRQTTAEEIWSDTDGQVDIVVGGVGTGGTLTGVAQVLKERKPSFQAIAVEPSNSQVLSGGKSGAHKIQGIGAGFIPAICRLELIDQIIAVSDEDAIAYSRRLAREEGLLSGISTGAALYAAIQVAKRPENSGKLIVMVQPSFGERYLSTTLFKDLSELEISALN

SEQ ID NO: 39788 - DNA, 975 bp, Pseudomonas fluorescens PfO-1
  CDS (1)..(975): transl_table=11
atgagccgtatttttgctgacaacgcccattccatcggcaacacgccgctggtgcagatcaaccgcattgcgccccgtggcgtgaccattctggccaagatcgagggtcgcaacccgggctactcggtcaagtgccggattggcgccaacatgatctgggacgccgaaagcagcggcaaactcaagccgggcatgaccatcgtcgagccgacctccggcaacaccggcatcggtctggccttcgtggcggccgctcgcggttacaaattgctgctgaccatgccggcctcgatgagcatcgagcggcgcaaggtgctcaaggcgctgggtgccgagctggtgctgaccgaaccagccaaaggcatgaaaggcgctatcgaaaaggccaacgaaatcgtagccagtgacgcgggcaaatacttcatgccggcccagttcgataatccggccaacccagccattcatgaaaagaccaccggcccggaaatctggaatgacaccgatggcgccatcgatgtgctggtggcgggcgtcgggaccggcggaaccatcaccggcgtgtcgcggtatatcaagaatacggcaggcaaaccgattctgtcggtggcggtggaaccggtgtcttcgccggtgattacccaggcgctggcaggtcaagaaatcaagccgagcccgcacaagattcagggcatcggtgccgggttcgtgccgaagaaccttgatctgtcgatggttgaccgggtcgagttggtgacggatgacgagtccaaagccatggccctgcgcctgatgcaggaggaagggatcctgtgcggtatttcctgcggtgcggccatgtcggtggcggtgcgtctggcggagacgccggaaatgcagggcaagaccattgtggtggtgctgcccgactccggtgagcgttatctgtcgagcatgctgttcagtgatctgttcaccgatcaggagaaccagcagtaa

SEQ ID NO: 39789 - protein, 324 aa, Pseudomonas fluorescens PfO-1
MSRIFADNAHSIGNTPLVQINRIAPRGVTILAKIEGRNPGYSVKCRIGANMIWDAESSGKLKPGMTIVEPTSGNTGIGLAFVAAARGYKLLLTMPASMSIERRKVLKALGAELVLTEPAKGMKGAIEKANEIVASDAGKYFMPAQFDNPANPAIHEKTTGPEIWNDTDGAIDVLVAGVGTGGTITGVSRYIKNTAGKPILSVAVEPVSSPVITQALAGQEIKPSPHKIQGIGAGFVPKNLDLSMVDRVELVTDDESKAMALRLMQEEGILCGISCGAAMSVAVRLAETPEMQGKTIVVVLPDSGERYLSSMLFSDLFTDQENQQ

SEQ ID NO: 39790 - DNA, 1440 bp, Pseudomonas fluorescens PfO-1
  CDS (1)..(1440): transl_table=11
atgttgcacgcgagctttttccccgcgaatggaacgcgatcaacaccacaaagaggtgaagagatgtcaaaggattcacgccctgccgtacttgggctgatcggcaatacgccgctggtacaagtcacccgcttcgataccggtccctgcaccctgtttctcaaactcgaatcacaaaaccccggcggttcgatcaaggaccgcatcggtctggccatgatcgacgccgctgagcgcgatggtcgcctgcaacccggcggcacgatcgtcgaggccaccgccggcaacaccggtctgggcctggccctggtcggccgcgccaagggctaccgcgtcgtgctggtggtgccggacaaaatgtccaccgaaaaagtcctgcacctcaaagccatgggcgccgaagtgcacatcacccgctccgatgtcggcaagggccatcccgagtattaccaggatgtcgccgcgcgtctggccaaggacattcccggcgcgttcttcgccgaccagttcaacaaccccgccaacccactggcccacgagttcagcactggaccagaaatctgggcccagaccgagcatgacctcgacgcgatcgtggtcggtgtcggctcggccggcacgctgaccggcctgacacgcttcttcaagcgcgtgcaaccggatctggaaatggtcctggccgacccggtcggttcggtgatggctgaatacagccgtagcaagcatctaggcaccgcaggttcgtgggcggtggaaggcatcggcgaggacttcattccgtcgatcaccgacctgtcgagcgtgcgcagcgcctactcgatcagcgacgaagaaagcttcgatcacgcccgtcagctgctgaaagccgaaggcatcctcggtggttcgtccaccggcaccctgctcgccgccgcgctgcgctactgccgcgaacagaccgagccgaaacgcgtggtcagctttgtctgcgacaccgggactcgctacctgtcgaaggtctacaacgaccagtggatgaccgatcagggactgctgcagcgcaaacgctacggcgacttgcgcgacctgatcgcccgacgcttcgaagacggcaaagtcgtcagcgtcggcccggacgatacgctgatgaccgcgttccagcgcatgcgcctggccgacgtttcacaactgccggtgctggtggatggcaagcaactggtcggtgtgatcgacgagtcggacattctggtgcgtgtgcacgaagacgcttcgctcttcagcaaacccgtttccagcgcgatgaccgacaagttgcaaaccctcgcccccggcgcgacgctggctgaactggaagccgtgctcagcagcggtctggtggccatcatcgccgacgcttcaggcttccacggcctgatcacccgcgtcgacatgctcaatcaattacggagatccctggcatga

SEQ ID NO: 39791 - protein, 479 aa, Pseudomonas fluorescens PfO-1
MLHASFFPANGTRSTPQRGEEMSKDSRPAVLGLIGNTPLVQVTRFDTGPCTLFLKLESQNPGGSIKDRIGLAMIDAAERDGRLQPGGTIVEATAGNTGLGLALVGRAKGYRVVLVVPDKMSTEKVLHLKAMGAEVHITRSDVGKGHPEYYQDVAARLAKDIPGAFFADQFNNPANPLAHEFSTGPEIWAQTEHDLDAIVVGVGSAGTLTGLTRFFKRVQPDLEMVLADPVGSVMAEYSRSKHLGTAGSWAVEGIGEDFIPSITDLSSVRSAYSISDEESFDHARQLLKAEGILGGSSTGTLLAAALRYCREQTEPKRVVSFVCDTGTRYLSKVYNDQWMTDQGLLQRKRYGDLRDLIARRFEDGKVVSVGPDDTLMTAFQRMRLADVSQLPVLVDGKQLVGVIDESDILVRVHEDASLFSKPVSSAMTDKLQTLAPGATLAELEAVLSSGLVAIIADASGFHGLITRVDMLNQLRRSLA

SEQ ID NO: 39792 - DNA, 942 bp, Pseudomonas fluorescens PfO-1
  CDS (1)..(942): transl_table=11
atgataggcgcccccgctgtccggattgcgaaaaacgccatgaccttgcagtacccaaccatcgccgattgcgtcggcaacacgccgctggtgcgtttgcagcgcctgcccggtgtcaccagcaacacccttttgctcaagcttgaagggaacaacccggcgggttcggtcaaggatcgtccggcgctgtcgatgatcacccgtgccgagttgcgcgggcagatccacgaaggcgatacgctgatcgaagcgacctcgggcaacaccgggatcgccttggcgatggccgccgcgatcaagggttacaagatgatcctgatcatgccggacaactccagcgccgaacgtaaagcggcgatgaccgcttacggcgcagagctgattctggtcagccaggaagagggcatggaaggcgctcgcgatctcgcccagcggatggaagccgaaggccgtggcaaggtgctggatcagttcgccaacggcgacaatcctgaagcgcactacaccaccaccggcccggaaatctggcgtcagacccagggctccatcacccatttcgtcagctccatgggtaccaccggcaccatcatgggcgtgtcgcgctacctcaaggagcagaacgacaacgtacagatcgtcggcctgcaaccgatggaaggctcggccattcccggcatccgccgctggccgcaggaatacctgccgaagatctatcaggccgaccgcgtcgaccgcatcgtcgacatggcgcaaagcgaggccgaaaacgttacccggcgtctggcccgcgaagaaggcatcttctgcggcgtgtcctcgggcggtgcagtggcagcgatgctgcgcctgtccaaagaagttgaaaacgcggtgatcgttgcgatcatctgcgaccgtggcgaccgttacctgtcgaccggcattttcgacgcgcccaactga

SEQ ID NO: 39793 - protein, 313 aa, Pseudomonas fluorescens PfO-1
MIGAPAVRIAKNAMTLQYPTIADCVGNTPLVRLQRLPGVTSNTLLLKLEGNNPAGSVKDRPALSMITRAELRGQIHEGDTLIEATSGNTGIALAMAAAIKGYKMILIMPDNSSAERKAAMTAYGAELILVSQEEGMEGARDLAQRMEAEGRGKVLDQFANGDNPEAHYTTTGPEIWRQTQGSITHFVSSMGTTGTIMGVSRYLKEQNDNVQIVGLQPMEGSAIPGIRRWPQEYLPKIYQADRVDRIVDMAQSEAENVTRRLAREEGIFCGVSSGGAVAAMLRLSKEVENAVIVAIICDRGDRYLSTGIFDAPN

SEQ ID NO: 39794 - DNA, 1077 bp, Rhodobacter sphaeroides 2.4.1
  CDS (1)..(1077): transl_table=11
atggatgctcagaagatccggacgaccgagggccgcggcaggctctacgacagcgtgctcgacacggtgggcaacacgcccgtcatccgcatcaacaacctctcgcccgaaggcgtgacgatctacgtcaaggccgagttcttcaatccggcggcctcggtcaaggaccggctcgcgctgaacatcattgaggcggcggaacggtcgggcaagctcaagcccggcatgaccgtcgtcgaggcgacctcgggcaataccggcatcggactcgccatggtctgcgcccagaagggctatccgctggtcatcaccatgtccgaagccttctcggtcgagcggcggcggctgatgcggcttctgggcgcgaaggtcgtcctgaccccgcgcggcggcaagggcttcggcatgtatcgcaaggcgcaggagctggccgaggcgaacggctggttcctcgcgagccagtttgagaccgacgccaatgccgacatccacgaggccaccaccgcgcgcgagatcgtggcggatttcgcgggcgagcggctcgactggttcgtgaccggctacggcaccgggggcacggtcaccggcgtcgcgcgggtgctgcgccgcgagcgaccggaggtgaagatcgtgctctccgagcctgcgaatgcgcaactcgtggcctcgggcgtgccgcaggaccgcaacgccgacggcactgcggcctcgggccacccggccttcgaggcgcatccgatccagggctggacgcccgacttcatcccgaaggtgctgcaggaggggctcgacgccggggcctatgacgagctgatcccggttgcgggcgaggacgggatgaaatgggcgcgcgagctggcggccaaagagggcatcctcaccggcgtctcgggcggttccaccttcgcggtggcgcggcaggtggccgaacgggcgccgaagggctcggtgatcctcgcgatgctgcccgacacgggcgagcgctacatgtcgaccccgctcttccaggcgatcggcgaggacatgaacgaggaggagaaggccctttcggcctcgacgccgagcttccagctctga

SEQ ID NO: 39795 - protein, 358 aa, Rhodobacter sphaeroides 2.4.1
MDAQKIRTTEGRGRLYDSVLDTVGNTPVIRINNLSPEGVTIYVKAEFFNPAASVKDRLALNIIEAAERSGKLKPGMTVVEATSGNTGIGLAMVCAQKGYPLVITMSEAFSVERRRLMRLLGAKVVLTPRGGKGFGMYRKAQELAEANGWFLASQFETDANADIHEATTAREIVADFAGERLDWFVTGYGTGGTVTGVARVLRRERPEVKIVLSEPANAQLVASGVPQDRNADGTAASGHPAFEAHPIQGWTPDFIPKVLQEGLDAGAYDELIPVAGEDGMKWARELAAKEGILTGVSGGSTFAVARQVAERAPKGSVILAMLPDTGERYMSTPLFQAIGEDMNEEEKALSASTPSFQL

SEQ ID NO: 39796 - DNA, 921 bp, Carboxydothermus hydrogenoformans Z-2901
  CDS (1)..(921): transl_table=11
atgcgaatttatgaggatattacccagcttatcggcaagaccccgttattgaaattaaaaagagttaccagaggtgtgaaagcaacagttgtggccaagcttgagtattttaacccgggaggtagtgttaaggaccgtatcgcgtttaacatgattaaagctgctgaagaacaggggcttttagataaggataccgtcattattgagcctacttctggcaataccgggattggccttgcgatggtggccgcagcccggggttatcgtttaattattaccatgcccgaaaccatgagtgtggagcggcgaatgcttttaaaagcatacggggcggaaatagttctgactcccggagagcttgggatgaccggtgcggtaaacaaagctctggaactggctaaagaatttcccaaagcttttattccgcaacagtttgaaaacccggctaatccggaaatccaccggaaaacaacggcaatagaaatctgggaagatactgatggtcaggtggatattgtggttggtggtgttgggaccggaggtaccattaccggagtaggagaggttcttaaagccaaaaaaccggaagtaaaaattatagcggtggagccggcagattcaccggtattatcgggaggaaaacccggccctcataaaattcagggaattggtgcgggttttgtacctaaagtatttaacagggacgtggtggatgagattattcaggtagaaagtgatgatgcttttgctatggctaaaaaaattgcaaaagaagaaggggtactggtggggatttcttccggtgcggctctctgggcagcgttagaagtggccaaaagaccggaaaatgaagggaaacttatcgtggttgtcttacccgataccggcgaacgttacctgtccacacccctgtttagctaa

SEQ ID NO: 39797 - protein, 306 aa, Carboxydothermus hydrogenoformans Z-2901
MRIYEDITQLIGKTPLLKLKRVTRGVKATVVAKLEYFNPGGSVKDRIAFNMIKAAEEQGLLDKDTVIIEPTSGNTGIGLAMVAAARGYRLIITMPETMSVERRMLLKAYGAEIVLTPGELGMTGAVNKALELAKEFPKAFIPQQFENPANPEIHRKTTAIEIWEDTDGQVDIVVGGVGTGGTITGVGEVLKAKKPEVKIIAVEPADSPVLSGGKPGPHKIQGIGAGFVPKVFNRDVVDEIIQVESDDAFAMAKKIAKEEGVLVGISSGAALWAALEVAKRPENEGKLIVVVLPDTGERYLSTPLFS

SEQ ID NO: 39798 - DNA, 903 bp, Burkholderia sp. 383
  CDS (1)..(903): transl_table=11
atggcttacaaaactatcgaagacacgatcggcaatacgccgctcgtccaactggtccgcttgccggacgacgaaatccgcgcgcgcaacaacgtggtgctcgcgaagctcgaaggcaacaatccggccggttcggtgaaggatcgtccggcactgtcgatgatcagcaaggccgaggcgcgcgggcgcatcaagccgggcgatacgctgatcgaggcgaccagcggcaacacgggtatcgcactcgcgatggcagcggcgatccgcggctacaagatggtgctgatcatgccggaggacctgtcggtcgagcgccgccagagcatggccgcctacggtgccgagatcatcctgacgccggtgaagggcgggatggaactggcacgcgatctcgcggaccagatgcagcgcgaaggcaagggcgtgatcctcgaccagttcgcgaaccccgacaatccgattgcgcactacgaagcgacgggcccggaaatctggcgcgataccgaagggcgcatcacgcacttcgtatcggccatgggcacgacgggcacgatcatgggcacgtcgcactatctgaaggaacagaatccggcgatcgagatcgtcggtgcgcagccggaagacggttcgcgcattccgggcatccgcaagtggccggaagcgtacatgccgaccatcttcgatcgcagccgcgtcgaccgcgtcgagaacgtgagccaggccgcggcggaaacgatggcgcgccggctcgcgtcggtcgaaggcattttcgcgggcatttcgtcgggcggcgcatgtgaagtcgcgatgcgcatcgcgcgtcaggtcgagaatgcgacgatcgtgttcatcgtctgcgatcgcggcgaccgctacctgtccacgggcgtgtttcctgcctga

SEQ ID NO: 39799 - protein, 300 aa, Burkholderia sp. 383
MAYKTIEDTIGNTPLVQLVRLPDDEIRARNNVVLAKLEGNNPAGSVKDRPALSMISKAEARGRIKPGDTLIEATSGNTGIALAMAAAIRGYKMVLIMPEDLSVERRQSMAAYGAEIILTPVKGGMELARDLADQMQREGKGVILDQFANPDNPIAHYEATGPEIWRDTEGRITHFVSAMGTTGTIMGTSHYLKEQNPAIEIVGAQPEDGSRIPGIRKWPEAYMPTIFDRSRVDRVENVSQAAAETMARRLASVEGIFAGISSGGACEVAMRIARQVENATIVFIVCDRGDRYLSTGVFPA

SEQ ID NO: 39800 - DNA, 987 bp, Synechococcus sp. CC9605
  CDS (1)..(987): transl_table=11
atgtcccgcatttacgacgacaacagccaggccatcggcaacaccccgctggtcaagctgaacaacgtcaccaaaaactgcaaggccactgtgctggccaaggttgaggggcgcaaccccgcctacagcgtcaagtgccggatcggcgccaacatgatctgggacgccgagaagagcggaaagctcaccaagggcaaggtgattgttgagcccacctccggcaacaccggcatcgctttggccttcaccgccgcagcccgaggttacaagctgatcctgacgatgcccgagtcgatgtcgatcgagcgacgtcgggtcatggccgtgctcggagctgagctgatcctcaccgaggccgccaaaggcatgcccggtgcgatcgccaaggccaaagaaatctctgagagcgatccggccaagtacttcatgcctggccagttcgacaatcccgccaaccccgaaatccacttcaagaccaccggtcctgaaatctggaacgactgcgatggcgccattgacgtgctcgtggccggcgtcggcaccggtggcaccatcaccggcgtctcccgttacatcaaaaatgaagcgggcaaggcgatcgaatccgtggccgttgaacccaccaatagcccggtgatcacccagaccatgaacggtgaggccgtcaagcccggtccccacaagattcagggcatcggtgccggcttcatccccaaaaacctcgacctctccgtggtcgacaaggtggagcaggtgaccaacgaggagtccgttgccatggccctgcgcctggcacaggaggaaggcctgttggtgggcatctcctgcggtgctgccgccgccgccgccattcgtctggccgagaaagatgagtacgccggcaaaaccattgtggtggtgctgcccgacctggccgagcgttacctctcctcggtgatgttcgctgaggtgccgaccggcatcatcgagcaaccggtggctgtctga

SEQ ID NO: 39801 - protein, 328 aa, Synechococcus sp. CC9605
MSRIYDDNSQAIGNTPLVKLNNVTKNCKATVLAKVEGRNPAYSVKCRIGANMIWDAEKSGKLTKGKVIVEPTSGNTGIALAFTAAARGYKLILTMPESMSIERRRVMAVLGAELILTEAAKGMPGAIAKAKEISESDPAKYFMPGQFDNPANPEIHFKTTGPEIWNDCDGAIDVLVAGVGTGGTITGVSRYIKNEAGKAIESVAVEPTNSPVITQTMNGEAVKPGPHKIQGIGAGFIPKNLDLSVVDKVEQVTNEESVAMALRLAQEEGLLVGISCGAAAAAAIRLAEKDEYAGKTIVVVLPDLAERYLSSVMFAEVPTGIIEQPVAV

SEQ ID NO: 39802 - DNA, 969 bp, Synechococcus sp. CC9605
  CDS (1)..(969): transl_table=11
atgagcattgctcctgacatcacagccttgatcggtggcacgcccctcgtgcggttgaaccgtctgccccaggcctgcggctgccaggccgagatcctggccaagttggagagctttaatccctccgcctcggtgaaagaccgcatcgccagcgccatggtgttggaggcggagcaatccggcacgatcattccaggccgaacggtgctggtggagcccaccagtggcaacaccggcatcgccctggccatggtggcggcggcccgggggtaccggctgatcctcaccatgccggacactatgagcacggagcgtcgcgcgatgctgcgggcctatggggccgagttgcagctcaccgacggtgcccagggcatgaatggggcgatcgccctggccaaggagttggtggatgagattcccaatgcctatctgctgcagcagttcgacaaccccgccaatccagccgtgcatgaacgcaccacggcggaggagatctggcgcgataccgagggccagatcgatgcctttgtggcgggggtgggcaccggcggcaccatcaccggttgtgcccggctgttgaaacagcggcagccgcagcttcaggtaattgccgtagagcccgaggccagtgccgtgctgtctggcaagcctcctggggcccatcgcattcaggggatcggggctggttttgtgcctgcggtgttggaattggatcggatcgactcgatcctcacggtgagcgatgaggaggccatgcaagtgggccggcgcctggcccgtgaggaaggtctgctctgtggcatcagcagtggcgcggccatggctgcggctctgcgggtgggccaggaccccgccatggtgggcaaacgcctggtggtgatgctggctagttatggcgagcgctacctctccaccccgatgttcagtgctgcttcgcagctgccggcccggagggatggtcagctgtga

SEQ ID NO: 39803 - protein, 322 aa, Synechococcus sp. CC9605
MSIAPDITALIGGTPLVRLNRLPQACGCQAEILAKLESFNPSASVKDRIASAMVLEAEQSGTIIPGRTVLVEPTSGNTGIALAMVAAARGYRLILTMPDTMSTERRAMLRAYGAELQLTDGAQGMNGAIALAKELVDEIPNAYLLQQFDNPANPAVHERTTAEEIWRDTEGQIDAFVAGVGTGGTITGCARLLKQRQPQLQVIAVEPEASAVLSGKPPGAHRIQGIGAGFVPAVLELDRIDSILTVSDEEAMQVGRRLAREEGLLCGISSGAAMAAALRVGQDPAMVGKRLVVMLASYGERYLSTPMFSAASQLPARRDGQL

SEQ ID NO: 39804 - DNA, 927 bp, Geobacter metallireducens GS-15
  CDS (1)..(927): transl_table=11
atggaacatacccccttttccctgtcagggagcatcggctccacccccctcgtggagatcagaaagctgaaccccaacccgaaggtgagaattctcgccaagcttgaggggaataatgtggggggctcggtcaaggaccgccccgccctctacatgcttgccaaggccgaggctgccggggaactgtcccctgagaggacgatcctggagcccacctcgggaaacaccggcatcgccatcgccatgctcggcgcggccaaggggtaccgggtgaagctcgtcatgcctgcctgcgtgagccttgagcggcgggcggtgctggaggcctacggcgccgaactggttctctctccggcagaggaggccactgacggcgccatccgcctggcgcaccggattctcgacgaagaacccgaccgctactacatgcccaaccagtatgccaaccccaacaaccccctcgcccactacgagaccaccggtccggagatttaccgcggcaccgacggcaccgtcgactttttcgtggccgggatggggaccggcggaaccctcatgggggtaagccgctactttcgggaaaccaagccgtccgtgcgcatcgtcggcgtggagccccggctcggccacaaggtccaggggctcaagaacatgcaggaagccatcgtcccagccatctacaaccccgctgccctcgacctgaagctcaccgtccaggacgagcccgccttcgatacggcgcgggatctggccgtccgcgaggggctcttcgtggggatgtccagcggcgcggccatggctggcgccatccgggtggccaaggatgccccggccggaagcaccatcgtcgtccttctccccgacagaggggaccgttacctcagcacggtgctcttccggtccgtctgcggcaaatgccccccctaa

SEQ ID NO: 39805 - protein, 308 aa, Geobacter metallireducens GS-15
MEHTPFSLSGSIGSTPLVEIRKLNPNPKVRILAKLEGNNVGGSVKDRPALYMLAKAEAAGELSPERTILEPTSGNTGIAIAMLGAAKGYRVKLVMPACVSLERRAVLEAYGAELVLSPAEEATDGAIRLAHRILDEEPDRYYMPNQYANPNNPLAHYETTGPEIYRGTDGTVDFFVAGMGTGGTLMGVSRYFRETKPSVRIVGVEPRLGHKVQGLKNMQEAIVPAIYNPAALDLKLTVQDEPAFDTARDLAVREGLFVGMSSGAAMAGAIRVAKDAPAGSTIVVLLPDRGDRYLSTVLFRSVCGKCPP

SEQ ID NO: 39806 - DNA, 930 bp, Geobacter metallireducens GS-15
  CDS (1)..(930): transl_table=11
atggcacaaatttacgagaatcttactgacctgatcggcaaaactccgttgctgaggcttcgcaaagtggccgcgggaatcgaggcagacattgtagcgaagctggaatcgttcaaccccggcggcagcgtcaaggaccggatcggcgtgtccatgatccgtgatgccgaagggaggggactcatcaacaaagatacggtcattatcgagccgaccagtggcaacaccggcatcgctctggccttcgtctgcgcggcaagaggataccgcctggtcctcaccatgcccgataccatgagcgtcgagcggcgcaatctcctgaaggcctacggcgccgaactggttctcacccggggggcggaagggatgaagggtgcgatcaataaagccgaggaactggccgcggatatccccaactcgttcataccccagcagttccggaacccggctaacccccacatccatcgtttcaccaccgctgaggagatctggacggacaccgacggcaaagtcgacgttttcgtggccggcgtcggaaccggcggaaccgtgaccggtgtcggcgaggtgctcaaaaagagaaacccgggggtgaaaatcatcgccgtggagccgttcgattcaccggtcctttccggcggccatcccgccccacacaaaatccagggaatcggcgccggtttcgtgccggaggtattgaaccgtgaagccattgacgaaatcttcacggtgagaaacgaggaggcgctggaaaccgcccgccgtctggcccgagaagaggggctgcttgtggggatctccgcgggagcggcggctttcgccgccctggaggtggcgaggcgtcccgaaaacaaggggaagagaattgttgttgtccttcccgacaccggagagcggtatctcagtaccgttcttttccaggatcagtag

SEQ ID NO: 39807 - protein, 309 aa, Geobacter metallireducens GS-15
MAQIYENLTDLIGKTPLLRLRKVAAGIEADIVAKLESFNPGGSVKDRIGVSMIRDAEGRGLINKDTVIIEPTSGNTGIALAFVCAARGYRLVLTMPDTMSVERRNLLKAYGAELVLTRGAEGMKGAINKAEELAADIPNSFIPQQFRNPANPHIHRFTTAEEIWTDTDGKVDVFVAGVGTGGTVTGVGEVLKKRNPGVKIIAVEPFDSPVLSGGHPAPHKIQGIGAGFVPEVLNREAIDEIFTVRNEEALETARRLAREEGLLVGISAGAAAFAALEVARRPENKGKRIVVVLPDTGERYLSTVLFQDQ

SEQ ID NO: 39808 - DNA, 924 bp, Geobacter metallireducens GS-15
  CDS (1)..(924): transl_table=11
atgccggtatttgacagcgacaaggtaatcgagcagatcggcaacacgccgctgcagcgtctggcgaagcttgaggcgcccggttccgcggccgtgtatggcaaggcggagttctttaacccgggtggcagcgtgaaggaccgcatctgcctggcgatgatcgaggcggccgagaaagacggttccctcaagccggggatgaccgtggtggagcccaccagcggcaataccgggatcggcctctccatgatctgcgccatcaagggatacaagctcgttctcaccatgcccgacaccatgaccgtggagcggcgcaggctcctggccgcctacggggccgaactcgtcctgacccccggggcccaggggatgcgcggggccgtccagaaggccgaggaactggccgcccagccggggcacatcatgatgcagcagttcaagaacggggcgaaccccgaggcgcaccgcaggaccaccggccccgagatcgtcagggccctcagcggccagagcatcgacgccttcgtggccggggtcggaaccggcggcaccatcaccggcgtcggcgaggtgctgaaggaacacaacgccgctgtgcgaatcgtggcggtggagcccgatgcctctcccattctctccggcgggcagcccggtccccacaagattcaggggatcggtgccggcttcgtccccgacgtgctcaacacgaaggtctacgatgaggtgatccgggtgaccaacgaggacgcctacgaaaccgttcggcgcctggcccaggaagaaggggtcctcgtggggatatcctccggcgccaacgtctttgccgccctccaggtggcgaaaaggctcggccccggcaagaacgtggtgacgatcctctgcgataccggggagcggtacctttcgacgggcgtgttcgactag

SEQ ID NO: 39809 - protein, 307 aa, Geobacter metallireducens GS-15
MPVFDSDKVIEQIGNTPLQRLAKLEAPGSAAVYGKAEFFNPGGSVKDRICLAMIEAAEKDGSLKPGMTVVEPTSGNTGIGLSMICAIKGYKLVLTMPDTMTVERRRLLAAYGAELVLTPGAQGMRGAVQKAEELAAQPGHIMMQQFKNGANPEAHRRTTGPEIVRALSGQSIDAFVAGVGTGGTITGVGEVLKEHNAAVRIVAVEPDASPILSGGQPGPHKIQGIGAGFVPDVLNTKVYDEVIRVTNEDAYETVRRLAQEEGVLVGISSGANVFAALQVAKRLGPGKNVVTILCDTGERYLSTGVFD

SEQ ID NO: 39810 - DNA, 930 bp, Desulfovibrio desulfuricans G20
  CDS (1)..(930): transl_table=11
gtgaacatcgcagaaaacatggccgctctggtcggaaacaccccgctggtacgcctgaacaggctggcacggggttgtcacgccgaagttgtcgccaaactggaattttacaacccctgcgcctcggtaaaagacagaatcgcccgcagcatgatcgaatcggcactggagtcgggagaaatcaacgccgattcgctgctggtggaacccaccagcggcaataccggtgtggggctggcgttcatctgcgcggttcacgggctgcggctgaccctgaccatgccggaatccatgagcgacgaacgtaaaaaactgctgcgcagtttcggcaccacgctggtgctcacccccgcggcacagggtatgcgcggcgccattgcagaagccgagcgcatcgtgcgtgaaaccccgggagccgtcatgctgcagcagtttgccaatcccgccaaccccgcggcacattacgccacaacggctgaagaaatatggcgcgacacagacggcagggtggatgcgtttgtggccggtgtaggcaccggcggcaccatcaccggtaccggcagacgcctgcgcgagcttaatgcgggggtgcgcatcatcgccgtggaacctgaagcatcccccgtgctttcgggcggtgctcccgcaccccaccccattcagggcataggcgcaggctttgtccctgaagtgctggataccggaatctacgacgaagtattcaaggtttccggtgacgacgccatgaacaccgcacgcgacctgctgcgtcaggaaggtattctgtgcggcatttcctcgggggcaaatgcatttgccgcactggaagcggccagacggcccgaaatgaaaggcaagcgcatcgtattcattgtctgcgacaccggcgaacgctacctgagcacaccgcttttttccggccagagctag

SEQ ID NO: 39811 - protein, 309 aa, Desulfovibrio desulfuricans G20
MNIAENMAALVGNTPLVRLNRLARGCHAEVVAKLEFYNPCASVKDRIARSMIESALESGEINADSLLVEPTSGNTGVGLAFICAVHGLRLTLTMPESMSDERKKLLRSFGTTLVLTPAAQGMRGAIAEAERIVRETPGAVMLQQFANPANPAAHYATTAEEIWRDTDGRVDAFVAGVGTGGTITGTGRRLRELNAGVRIIAVEPEASPVLSGGAPAPHPIQGIGAGFVPEVLDTGIYDEVFKVSGDDAMNTARDLLRQEGILCGISSGANAFAALEAARRPEMKGKRIVFIVCDTGERYLSTPLFSGQS

SEQ ID NO: 39812 - DNA, 969 bp, Prochlorococcus marinus str. MIT 9312
  CDS (1)..(969): transl_table=11
atggaaatagcaaatgatatcacttctctagttggaaatactccattagttaaattaagtcgaatcagaaattactttaattgttatccagaaataatagccaaactcgaaagtttcaatccatcagcgtctgtaaaagatcgtattgcttattcaatgttatgcaaagctgaagaagaaggattgataacaccagacaaaacaacattgattgaagcaacaagtggaaatactggcatcgcattagcaatggttgctgcagctaaaggctataaattgatattaactatgcctgatacgatgagtattgaaagaagggcaatgttgcgagcatatggggctgaattacagctaacgccaggtcaagaaggaatgaaaggagccttagatttagctaatgagttgtcttctagcattgcaaatagctatcaatttaatcaatttgaaaactttgctaatccagatattcatgaaagaacaaccgctcaagaaatatgggcccaatccaataacaatttagatggactagttacgggagtaggcacaggaggcacaattactggttgcgcacgttttttgaaaaaagttaatccaaattgcaaaatttatgctgtagagcccagaaaaagtgctgtcatttccggagaaaaagcaggatctcattcgattcaaggaataggggcaggtttcgtaccgaaagtcctgaatactaaattaattgatgaaattataaaaattgatgacgacgaagcattttattatgggcgtttattagctcgattggaaggtcttttatcaggcatcagcagcggagccgctttagcagcaactataaaaattggtgaaaggaaagaactaattaataaaagattgatagtaattctgccaagttttggtgaaagatatttatcaaccgcaatgtttgaatccaatacctcaattcaagcaagaacagatggttatctttaa

SEQ ID NO: 39813 - protein, 322 aa, Prochlorococcus marinus str. MIT 9312
MEIANDITSLVGNTPLVKLSRIRNYFNCYPEIIAKLESFNPSASVKDRIAYSMLCKAEEEGLITPDKTTLIEATSGNTGIALAMVAAAKGYKLILTMPDTMSIERRAMLRAYGAELQLTPGQEGMKGALDLANELSSSIANSYQFNQFENFANPDIHERTTAQEIWAQSNNNLDGLVTGVGTGGTITGCARFLKKVNPNCKIYAVEPRKSAVISGEKAGSHSIQGIGAGFVPKVLNTKLIDEIIKIDDDEAFYYGRLLARLEGLLSGISSGAALAATIKIGERKELINKRLIVILPSFGERYLSTAMFESNTSIQARTDGYL

SEQ ID NO: 39814 - DNA, 987 bp, Prochlorococcus marinus str. MIT 9312
  CDS (1)..(987): transl_table=11
atggcaagaatttatgaggacaacagttttgctattggaaacactccattagtaaaattaaaatcagttactaaaaacgcaaaagctacagtacttgcaaaaattgaaggtagaaaccctgcttatagtgtcaaatgtaggattggcgcaaacatgatctgggatgcagagaaaagtgggaagcttacaaaagataaaacgattgttgagccaacttctggaaatacaggaattgctctagcttttactgcttcagcaagaggttataaactcatccttacaatgccagaatctatgtcaattgaaagaagaagggttatggcagtgttgggggctgaaattgttttaacagaggcttctaaaggtatgcctggagcaatagctaaagccaaagaaattgcagaaagtaatccttctcaatatttcatgcctggtcaatttgataatccagcaaaccctgaaattcatttcaaaacaactggaccagaaatctgggatgattgcgatggtgaaattgatgttttagttgcaggggttggaactggcggaacaattacaggggtttcaagatatattaagcaagagaagggtaaaaatattacttctgtagctgtagaaccatcgcatagtcctgttattacacagacaatgaatggggaagaggttaaatctggaccacataaaatccaaggaataggagcaggatttattcctaagaacctagacttatcaattgttgataaggttgaacaggtaacaaatgacgagtcaattgagatggctcttagattagcaaaagaagaaggtctattagttggaatatcttgtggagctgctgctgctgctgctgttagattagctgaacaagataaatatgcaggaaaaattattgtagttgttctacctgatttagcagagagatatttatcatcaattatgtttaatgaagttccaagcggaatcattcaagaaccagtcaaagcttaa

SEQ ID NO: 39815 - protein, 328 aa, Prochlorococcus marinus str. MIT 9312
MARIYEDNSFAIGNTPLVKLKSVTKNAKATVLAKIEGRNPAYSVKCRIGANMIWDAEKSGKLTKDKTIVEPTSGNTGIALAFTASARGYKLILTMPESMSIERRRVMAVLGAEIVLTEASKGMPGAIAKAKEIAESNPSQYFMPGQFDNPANPEIHFKTTGPEIWDDCDGEIDVLVAGVGTGGTITGVSRYIKQEKGKNITSVAVEPSHSPVITQTMNGEEVKSGPHKIQGIGAGFIPKNLDLSIVDKVEQVTNDESIEMALRLAKEEGLLVGISCGAAAAAAVRLAEQDKYAGKIIVVVLPDLAERYLSSIMFNEVPSGIIQEPVKA

SEQ ID NO: 39816 - DNA, 990 bp, Synechococcus elongatus PCC 7942
  CDS (1)..(990): transl_table=11
atgccgaaaattctcaaccgactaacggagtggatcggcaataccccgctggtacgcctccaagaaactgcacagcagtatggggcgatcgcagaagtgctgctcaagctggaatatttgaatccgctcgggagtgtcaaagaccgcaccgctttgagcttgatccagtcggcgcgatcgcagggtctgatcaccgccggcaccaccctaatcgaaccgaccacgggcaacaccggcattggcttagcctttgccgcggcggctgaacagttgcggctgattctggtcatgcccgatcgcgtcagtgcggagcggatccgcttggctaaactgctgggcgccaaggttgttctcacaccggctgctgaagcgatgctgggctgtattgccaaagctcaggctttgcaacagcagattccggacagcgttattctgcagcagtttcaaaatccggcaaatcccagcattcatcaagcgaccaccggccctgagatttggcgcgataccgatggagaagtcgatatcgtcgtcgccggtgtcggaacaggcggaactctcatgggcatttcccgctatctcaagcccttgcgacctcgcttgcagagcattgccgttcaaccggcgcgatcgcccgttctctctggaggtgcagcgggatcgcatcagctgactggaatggggccaaactttgtctcccccttggtcgatcgcagcctgattgatgaaattctctcagcctatgaagaagacgcgatcgcagtcattcgcacctgcgctgcccgtgaaggaattcccctcggcgtttccagtggcgcaattgtttgggccgccttacaagttgccaaacgaccagaaaatgctggcaagcgtatcgtagcggtttgtccttccggcagtgaacgctatctctctagcactctgctcgccgacatcagccttgagagcgatgacgtctctgattgggtcgcaattccccaaggtcaagcatga

SEQ ID NO: 39817 - protein, 329 aa, Synechococcus elongatus PCC 7942
MPKILNRLTEWIGNTPLVRLQETAQQYGAIAEVLLKLEYLNPLGSVKDRTALSLIQSARSQGLITAGTTLIEPTTGNTGIGLAFAAAAEQLRLILVMPDRVSAERIRLAKLLGAKVVLTPAAEAMLGCIAKAQALQQQIPDSVILQQFQNPANPSIHQATTGPEIWRDTDGEVDIVVAGVGTGGTLMGISRYLKPLRPRLQSIAVQPARSPVLSGGAAGSHQLTGMGPNFVSPLVDRSLIDEILSAYEEDAIAVIRTCAAREGIPLGVSSGAIVWAALQVAKRPENAGKRIVAVCPSGSERYLSSTLLADISLESDDVSDWVAIPQGQA

SEQ ID NO: 39818 - DNA, 1119 bp, Synechococcus elongatus PCC 7942
  CDS (1)..(1119): transl_table=11
atggcggcgcgagatatccacttcgctaatcgtgacaggagaccaagccccctcgttggggcttttttattgagggtgagagaaccaaagcaagttggtaggatcaaacccggctgcccaaccgaaaaacgcatggatatccgcaacggctttatcgacaccatcgggaatacgccgctgattcgcctcaacagcctgagcgaggcgactggctgtaacattctcggcaaagccgagttcctcaacccgggtggatcggtcaaggatcgggcggcgctgttcatcattgaagacgccgagcggcagggtaaattacggccgggcgggacggttgttgaaggaacggcgggcaatacgggcatcggtctagcacatatctgcaatgccaagggctaccgctgcctgattgtgattcctgagacgcaatcgcaggaaaagattgacctactacgaacactgggcgcggaagtgcgaactgtccctgcagtgccctatcgcgatcccaacaactacgtcaaagtctcggggcgcctcgcagaagaactggacaatgctatttgggcgaaccaattcgacaatttagccaaccgccaagcccactacgcgacaactggccccgaaatttggcagcagaccgaaggaactgttgatgcgtgggtggcggcaacgggtaccggtggaacctatgcgggtgttgcactctacctgaaagagcaaagttctaaggtgcgctgcgttgtggctgacccgatgggcagcggcctctacagctgggtcaaaaccggcgaaattcatctcgaaggtagctcagtcaccgaaggcatcggcaacagccggattacggccaacatgcaagatgtaccgatcgacgatgcgattcagattgctgaccctgaagccctggagatcatctatcaactgctgcaccgcgatggcctcttcatgggcggctccgtggggatcaatgtcgcggcggcctatcgcctcgccaaggaaatggggccgggccacacgatcgtgacggtactttgtgatggcggtgcccgctatcaatcgcgactcttcaacgccgagtggctggcctcaaaagggctgcaaatgccgcaggtgacaacatga

SEQ ID NO: 39819 - protein, 372 aa, Synechococcus elongatus PCC 7942
MAARDIHFANRDRRPSPLVGAFLLRVREPKQVGRIKPGCPTEKRMDIRNGFIDTIGNTPLIRLNSLSEATGCNILGKAEFLNPGGSVKDRAALFIIEDAERQGKLRPGGTVVEGTAGNTGIGLAHICNAKGYRCLIVIPETQSQEKIDLLRTLGAEVRTVPAVPYRDPNNYVKVSGRLAEELDNAIWANQFDNLANRQAHYATTGPEIWQQTEGTVDAWVAATGTGGTYAGVALYLKEQSSKVRCVVADPMGSGLYSWVKTGEIHLEGSSVTEGIGNSRITANMQDVPIDDAIQIADPEALEIIYQLLHRDGLFMGGSVGINVAAAYRLAKEMGPGHTIVTVLCDGGARYQSRLFNAEWLASKGLQMPQVTT

SEQ ID NO: 39820 - DNA, 1005 bp, Synechococcus elongatus PCC 7942
  CDS (1)..(1005): transl_table=11
atgattataaggacgccgtcttcacccgctaaccgctcagtcatgcgaatcgctcagaacatcacggaactcattggccggactcctctggtgcagctcaatcgcatccccgtcgcagatggctgcttggccagaattgtggtaaagctggaaagctttaatccttcagcgtcggtcaaagaccggatcggcatcagcatgattctagaggctgagcgcaaaggcctcattgctcctgatcgcacaacactggtagagccgacctctggcaacacagggattgccttagcgatggctgctgcagcaagaggctaccggctgattttgaccatgccagacacgatgagttcagagcgtcgggcgatgctgcgggcctatggggccacactggaattgacgcccgggattgaagggatggctggttgcattcagcgggcacaggaaattgttgcctcgcatcctgaagcctatatgctgcaacagttcaagaatcccgcgaatcccaaaattcaccgagaaactacagcagaagagatttgggcggacaccgatggcaccgtcgatattttgatttcaggggttggcacagggggaacaatcaccggggtagcggaggttttgaaggaacgcaaaccgtccttccaagcgttcgcagttgagccagctaatagtccggtgctatcgggagggcggcctggtccccacaagattcaaggcattggggcaggttttgtgccagaagtgctggcgactcaactgatcgatgaggttgtgacggtaagcgatgacgaagcgatcgcctacggccgtcgcttagctcgcgaggaagggttgctgtcggggatttccagtggcgctgcagtcgctgccgccgtccaagttgctcgccggcctgaaaataccgacaaactgatcgtggtcatcttgcccagttttggcgagcgctatctcagcacacctttgttccaagagccggaactggtttcagttagcagcaacggttag

SEQ ID NO: 39821 - protein, 334 aa, Synechococcus elongatus PCC 7942
MIIRTPSSPANRSVMRIAQNITELIGRTPLVQLNRIPVADGCLARIVVKLESFNPSASVKDRIGISMILEAERKGLIAPDRTTLVEPTSGNTGIALAMAAAARGYRLILTMPDTMSSERRAMLRAYGATLELTPGIEGMAGCIQRAQEIVASHPEAYMLQQFKNPANPKIHRETTAEEIWADTDGTVDILISGVGTGGTITGVAEVLKERKPSFQAFAVEPANSPVLSGGRPGPHKIQGIGAGFVPEVLATQLIDEVVTVSDDEAIAYGRRLAREEGLLSGISSGAAVAAAVQVARRPENTDKLIVVILPSFGERYLSTPLFQEPELVSVSSNG

SEQ ID NO: 39822 - DNA, 1365 bp, Rhodospirillum rubrum ATCC 11170
  CDS (1)..(1365): transl_table=11
atgacagcccccgtcgatctcctcgcccagatcggtcacacgccgatcgtccgcctcgatcacctcgataccgggccctgttcgctgtttgtgaagcttgaaagccagaacccctcgggttcgatcaaagaccgcatcgccgtgtcgatgatcgatgccgccgaacgcgatggccggttgaagcccaagggcaggatcgtcgaggcgacggcgggcaacaccggccttgccctggccctggtggcggcgcgccgcggctaccatttgaccctggtcatccccgataagatgagccgggaaaagatcgcccatgtgcgggcgatgggggccgaggtggtgctgacgcgctcggatatcggcaagggccatccggcctattaccaggatctggcccagcgcatcgccgacgagaccggggccttcttcaccgatcagttcaacaatcccgacaatccgatcgcccatgaaaccggcaccggccccgagatctgggagcagatggacggccgggtcgacgccgtggtcgccggcgtcggatcgggcggcaccctgaccgggttgtcgcggtttttcgcccgtgtctcgccgcagaccgatatcgttctggccgatcccaagggctcgatcctggccgattacgtgacatcggggcggatcggcgcggcgggatcctggctggtcgaaggcatcggcgaggatttcgtgccgccggtctcggatctgtcgcgggtgacccacgcctataccattcccgacggcgaaagcttcgccacggcgcgcggcgtgctgcgccaggaagggctgctgatcggctcgtcctcgggcaccttgctggccgcggccttgcgctattgccgcgaacagaccagcccgaagcgggtggtcagcttcgtctgcgacagtggcaataaatacctatcaaagatgtataatgatttctggatggccgatcagggtctgtccaaccgtccgcgctttggcgatctgcgcgacttgatcgcgcggcgccaggacgagggcgcggtggtctccgtcgcccccggcgataccctggccatcgcctatcagcgcatgaagctttacgacgtttcccaattgcccgttctcgacgggacccgctgcgtcgggttgatcgacgaatcggacgttttgctcagcctgcgcgagcgcggcgggctgttcgacgtcgccgtcagcgcggcgatgtcgaccgatttggaaaccgttggtcccgacgccgacgccgaccaccttgtcgggctgttcgatcgcggacgcgtcgccatcgttgtcgatgacagcggtttcctcgggctgatcacccgcatcgatttcctgaaccatctaaggggcaaagccgcatga

SEQ ID NO: 39823 - protein, 454 aa, Rhodospirillum rubrum ATCC 11170
MTAPVDLLAQIGHTPIVRLDHLDTGPCSLFVKLESQNPSGSIKDRIAVSMIDAAERDGRLKPKGRIVEATAGNTGLALALVAARRGYHLTLVIPDKMSREKIAHVRAMGAEVVLTRSDIGKGHPAYYQDLAQRIADETGAFFTDQFNNPDNPIAHETGTGPEIWEQMDGRVDAVVAGVGSGGTLTGLSRFFARVSPQTDIVLADPKGSILADYVTSGRIGAAGSWLVEGIGEDFVPPVSDLSRVTHAYTIPDGESFATARGVLRQEGLLIGSSSGTLLAAALRYCREQTSPKRVVSFVCDSGNKYLSKMYNDFWMADQGLSNRPRFGDLRDLIARRQDEGAVVSVAPGDTLAIAYQRMKLYDVSQLPVLDGTRCVGLIDESDVLLSLRERGGLFDVAVSAAMSTDLETVGPDADADHLVGLFDRGRVAIVVDDSGFLGLITRIDFLNHLRGKAA

SEQ ID NO: 39824 - DNA, 984 bp, Rhodospirillum rubrum ATCC 11170
  CDS (1)..(984): transl_table=11
atgaccattcgcgacggctttctgggcaccatcggtggaaccccgcttattcgtctgccctgggcctcgcggatcaccggtcgggaaattttaggcaaggccgagtttctcaatcccggcggttcggtcaaggaccgcgccgccctggccatcatcaccgacgccctggagcgcggcgccctcgcgcccggcggcaccatcgtcgaaggcacggccggcaatacgggaatcggcctgaccctggtcggcaacgccatcggctgcaagacggtgatcgtcatgcccgaaacccaaagccaggaaaaaaaggacgccctgcgcctgtgcggggccgatctgcggctggttgccgcccggccctataaggatcccggcaattacgtgcgctactccgaaaccctggccaaggaattgggcggcttttgggccaatcaattcgacaatacggccaatcgcgacgggcaccgcgccacgacgggacgggaaatcatcgagcaatgcgaagggcggctggatgccttcacctgcgccgtcggcaccggcggcaccctggccggcgtcgccctcgccctcaaggcccatgacccggccatcaaagtggtgctggccgaccctttcggctcggccctttatagctggatcaccagcggcgagttgaaggccgagggcggatcggtgaccgagggcatcggccagggacgggtgaccgccaatctgcgcgacgctccgcttgacgaggcggtgcggataggcgacgccgaagcgctggaggcgatcttcgccatggtccgtgaagacggcctgatgctaggcggatcgagtggcgtcaacgtcgcggcggcgatgaaggtcgcccttaccctgcccaagggcagccgggtggtcaccattctgtgcgacggcgcccaacgctaccaaagcaagctgttcaaccccgatttcctgcgctcgaaagccctgccggttcccgactggctggcctga

SEQ ID NO: 39825 - protein, 327 aa, Rhodospirillum rubrum ATCC 11170
MTIRDGFLGTIGGTPLIRLPWASRITGREILGKAEFLNPGGSVKDRAALAIITDALERGALAPGGTIVEGTAGNTGIGLTLVGNAIGCKTVIVMPETQSQEKKDALRLCGADLRLVAARPYKDPGNYVRYSETLAKELGGFWANQFDNTANRDGHRATTGREIIEQCEGRLDAFTCAVGTGGTLAGVALALKAHDPAIKVVLADPFGSALYSWITSGELKAEGGSVTEGIGQGRVTANLRDAPLDEAVRIGDAEALEAIFAMVREDGLMLGGSSGVNVAAAMKVALTLPKGSRVVTILCDGAQRYQSKLFNPDFLRSKALPVPDWLA

SEQ ID NO: 39826 - DNA, 1020 bp, Rhodospirillum rubrum ATCC 11170
  CDS (1)..(1020): transl_table=11
atggaactggaaaaagccatgaccgtgatcgctccgtccgccgcctccgagtccgtcggcaccagcgcgaccgacatcgagttccgcggcaaggtctatgactcgatcgtcgacaccatcggcgccacgccgctggtccggctggcgcgcttttccaaggcccatggcgtggtcgccgacctgcttggcaaatgcgaattcttcaatccgctggccagcgtcaaggaccgcatcggcttcgccatgatcgatgccgccgaacgcgacggccgcatcaagcccggcgccaccctggtcgaaccgacctcgggcaatacgggcatcgccctggccttcgtttgcgccgcgcgcggctaccggctgatcttaaccatgcccgaaagcatgtcgatcgagcgccgcaagatgctgacccacctcggcgccgaaatcgacctgaccccggcggccaagggcatgaagggcgccgtcgcccgcgcccaggaactggtcgagagcattcccggcgccgtgctgcttcagcagttcgacaatccggccaaccccgagatccatcgccagaccaccgcccaggaaatctggaacgataccaacggcgccgttgatatcgtggtgtcgggcgtgggcaccggcggcacggcgaccggcatcgccagcgtcctcaaaaagctcaagcccagcgtcaagctggtggtcgtcgagcccgaggacagcccggtgatcagcggtggcgccccggggccccacaagatccagggcatcggcgccggcttcattccgggcaatctcgatgtcagcctgatcgatgaagtggtcaaggtcgccaacgaaaccgccttcgccaccgcccgcgccgtcgcccgtcaggaaggcgtgccggtggggatttcctcgggcgcggccctggccgccgccgtcgaggtcggccagcgcccggaaaacaaggataaaaccctggtggtcatcctgcccagcttcgccgagcgctatctgtcgacgccgctgttcgagcagccctga

SEQ ID NO: 39827 - protein, 339 aa, Rhodospirillum rubrum ATCC 11170
MELEKAMTVIAPSAASESVGTSATDIEFRGKVYDSIVDTIGATPLVRLARFSKAHGVVADLLGKCEFFNPLASVKDRIGFAMIDAAERDGRIKPGATLVEPTSGNTGIALAFVCAARGYRLILTMPESMSIERRKMLTHLGAEIDLTPAAKGMKGAVARAQELVESIPGAVLLQQFDNPANPEIHRQTTAQEIWNDTNGAVDIVVSGVGTGGTATGIASVLKKLKPSVKLVVVEPEDSPVISGGAPGPHKIQGIGAGFIPGNLDVSLIDEVVKVANETAFATARAVARQEGVPVGISSGAALAAAVEVGQRPENKDKTLVVILPSFAERYLSTPLFEQP

SEQ ID NO: 39828 - DNA, 921 bp, Moorella thermoacetica ATCC 39073
  CDS (1)..(921): transl_table=11
atgaagatagcccgggatgttacccagttgatagggcagacgccgatcctgcgcctgaaccgcctggtagaggacgggatggaggtatacttaaaaatcgagttttttaatcctggaggcagtgttaaggaccgcattgccctcagcatgattaccgctgcggaagccgacggccgcttgaaacccggggataccattgtcgagcccacaagtggtaatacgggtatcggcctggccatggtggcggccgtacggggttaccgcctgatcctggttatgccggaaacaatgagtattgagaggcgcaagctcctggcggcctatggggcggagttcgtcctgactccgggaaacctggggatgaagggggctgtagataaagcaaatgaactggtacgggagaaccccggttactttatgccccagcagtttgaaaatccggccaacccggccatccaccgccagaccacggccagggagatcctggagcaaatggacggtaaagtagacgcctttgtggccggcgtcgggaccgggggtaccctcaccggggtgggtgaggtcctgaaaaaggaaatcccgggggtaaggattgtagctgtggaaccggcggcttcaccggtcctttctggaggccagccaggaccccataagattcagggtataggtgccggctttgtcccgccggtcttgcgccgggaggtggttgacgagataatcaccgtcaccaacgaagacgctatggaaacggcccggcgcctggcacgggaggaaggcctgctggtgggcatctcttcgggcgccgctgcttttgccgccctccaagtggcccggcgcctgggccgggggaaaagggtactggccatcgcccccgacaccggcgagcgctacctgagtacggagttgttcaagataggctaa

SEQ ID NO: 39829 - protein, 306 aa, Moorella thermoacetica ATCC 39073
MKIARDVTQLIGQTPILRLNRLVEDGMEVYLKIEFFNPGGSVKDRIALSMITAAEADGRLKPGDTIVEPTSGNTGIGLAMVAAVRGYRLILVMPETMSIERRKLLAAYGAEFVLTPGNLGMKGAVDKANELVRENPGYFMPQQFENPANPAIHRQTTAREILEQMDGKVDAFVAGVGTGGTLTGVGEVLKKEIPGVRIVAVEPAASPVLSGGQPGPHKIQGIGAGFVPPVLRREVVDEIITVTNEDAMETARRLAREEGLLVGISSGAAAFAALQVARRLGRGKRVLAIAPDTGERYLSTELFKIG

SEQ ID NO: 39830 - DNA, 927 bp, Moorella thermoacetica ATCC 39073
  CDS (1)..(927): transl_table=11
gtgggtcgtatttaccagaacatcacccagcttatcggtggtaccccgatcgtcaagctccaccgtatgaatccaagcgaagcagaagttctggtcaagctggaactttttaaccccggcggaagtatcaaagatcgtatcgccttagccatgattgaagacgccgaagagcgggggctcctggacaaagacaccgttattattgaaccgaccagtggcaataccggcatcggcctggccatggtggccgcggcacggggatacaaattgatcctaaccatgccggaaaccatgagccaggaacggcgtcagcttctcaagggcttcggtgccgagctggtcctcacgccgggggccgaggggatgaagggggccatccgccgggccgaagagctggctgccacctatccccgggccttcatcccccagcagtttgaaaatcccgccaacccggccgcccatcgccatactaccgctgctgagatctatgacgctaccgacgggcagctggatatcctggtctgtggtgtcggtaccggcgggaccatcaccggcaccggcgaagttttaaaagaacggatacccggactgcaggtagtagctgtcgaaccggcttcatcccctgtcctttccggcggtatggccggaccccataaaatccagggtataggcgcggggtttgttccggaaattctcaatatcgacgttatcgacgagattatccaggttacggacgaggaagccattgatactgctcgacggctggccagggaagagggtattatggtcggcatatcttccggggccgcctgctgggcagccctgcgcctggccgcccgcccggaaaacgccggcaagcgtatcctggcagtgctacccgacaccggtgaacgctacctgtctacctcgcttttccaggagatttaa

SEQ ID NO: 39831 - protein, 308 aa, Moorella thermoacetica ATCC 39073
MGRIYQNITQLIGGTPIVKLHRMNPSEAEVLVKLELFNPGGSIKDRIALAMIEDAEERGLLDKDTVIIEPTSGNTGIGLAMVAAARGYKLILTMPETMSQERRQLLKGFGAELVLTPGAEGMKGAIRRAEELAATYPRAFIPQQFENPANPAAHRHTTAAEIYDATDGQLDILVCGVGTGGTITGTGEVLKERIPGLQVVAVEPASSPVLSGGMAGPHKIQGIGAGFVPEILNIDVIDEIIQVTDEEAIDTARRLAREEGIMVGISSGAACWAALRLAARPENAGKRILAVLPDTGERYLSTSLFQEI

SEQ ID NO: 39832 - DNA, 912 bp, Burkholderia thailandensis E264
  CDS (1)..(912): transl_table=11
gtgacgttcatggcttacaaaactatcgaagacacgatcggcaatacgccgctcgtgcaaatcgtccgcttgccggacgacgagattcgcgcccgcaacaacgtgattctcgcgaagctggaaggcaacaatccggcgggctcggtgaaggaccgtcccgcgctgtcgatgatccgcaaggcggaagagcgaggcaggatcaagccgggcgatacgctgatcgaggcgacgagcggcaacaccgggatcgcgcttgcgatggtggcggcgatccgcggctacaagatggtgctgatcatgccggaggatctgtccgtcgagcgtcgtcagagcatggctgcgtacggcgcggaaatcgtgctgacgccggtgaagggcggcatggaattcgcgcgcgatctcgccgaccagatgcagcgcgaaggcaagggcgtgatcctcgatcagttcgcgaatccggataatccgcttgcgcattacgagggcaccggccccgaaatctggcgcgagaccgagggccgcatcacgcacttcgtgtccgcgatgggcacgacgggcacgatcatgggtacgtcgcagtatctgaaggagcggaatccggccgtcgagatcgtcggcgcgcagcctgaagagggctcgcggattccgggcatccgcaagtggccggaagcgtatctgccgaagattttcgatcgtagccgcatcgaccgcgtcgagaacgtgagccaggccgcgtccgaagcgatggcgcgcaagctcgcggccgtcgaaggcatcttctgtggcatctcgtcgggcggcgcatgcgaagtcgcgctgcgcgtcgcgcggcaggtcgagaatgcgacgatcgtgttcgtcgtctgcgaccgcggcgaccgttatctgtcgacgggggtgtttcccgcgtaa

SEQ ID NO: 39833 - protein, 303 aa, Burkholderia thailandensis E264
MTFMAYKTIEDTIGNTPLVQIVRLPDDEIRARNNVILAKLEGNNPAGSVKDRPALSMIRKAEERGRIKPGDTLIEATSGNTGIALAMVAAIRGYKMVLIMPEDLSVERRQSMAAYGAEIVLTPVKGGMEFARDLADQMQREGKGVILDQFANPDNPLAHYEGTGPEIWRETEGRITHFVSAMGTTGTIMGTSQYLKERNPAVEIVGAQPEEGSRIPGIRKWPEAYLPKIFDRSRIDRVENVSQAASEAMARKLAAVEGIFCGISSGGACEVALRVARQVENATIVFVVCDRGDRYLSTGVFPA

SEQ ID NO: 39834 - DNA, 888 bp, Syntrophus aciditrophicus SB
  CDS (1)..(888): transl_table=11
atggacacacatgatgtaatggaactgataggaaacacgcctttaattcggctgagaaacgaaaatataatcgccaaggctgaatttcttaatcctggaggaagtataaaagaccgcattggcctggcaatgatcgaagcggcggaacgggatggaacactgaaaccgggaatgaaaattgtcgagccgacctcgggcaataccggaattggaataacgctcgtcggggctgcaaagggatatgaagtatttattgtcatgcccgaaggtatgagcgaggagagaaagcatatcattaaggttctgggcggaaatctcgttctgactccggacagtgagaacatagccggcgcgatcaaaaaggcggaagaacttgttgaagaattccatggatatatgccgaatcaattcaagaaccctgctaacgcactggcccacttcacacataccgcgccggaactctggaaacaggcggaacataaaatcgatgcctttatttcgggaattggaagcggcggaacgattcagggggttggctcttttctgaaggagaggaatccggacgtgaccattgtggccgtggagcccaaaaacgtatccgctcttctcggtcatgagccgggtttacaccagatccagggaatcggggatggattcatccctgaaattctcaacgtttccctgatcgacagaataattgaagtctctgatgacgatgcaatcaggacaacgcgtgagcttgcatcaaataattctcttttatgcggaacttcatccggggcaaacgtatgggccgcgaggcagatagccatggaacatccggaatggacgatagccacggttcttgcggaccgggcggaacggtatttcagcaccggcttactctga

SEQ ID NO: 39835 - protein, 295 aa, Syntrophus aciditrophicus SB
MDTHDVMELIGNTPLIRLRNENIIAKAEFLNPGGSIKDRIGLAMIEAAERDGTLKPGMKIVEPTSGNTGIGITLVGAAKGYEVFIVMPEGMSEERKHIIKVLGGNLVLTPDSENIAGAIKKAEELVEEFHGYMPNQFKNPANALAHFTHTAPELWKQAEHKIDAFISGIGSGGTIQGVGSFLKERNPDVTIVAVEPKNVSALLGHEPGLHQIQGIGDGFIPEILNVSLIDRIIEVSDDDAIRTTRELASNNSLLCGTSSGANVWAARQIAMEHPEWTIATVLADRAERYFSTGLL

SEQ ID NO: 39836 - DNA, 1389 bp, Frankia sp. CcI3
  CDS (1)..(1389): transl_table=11
atgaccgatatgcaggcattcgaccacgtaatcgatcttgtcggaaacacgccgctggtccggatcacaccgacgatcgagacgacgccgacgccagtgctggcaaagctggagtaccttaatcccggtggatcggtgaaagaccgggtagcgctgaccatggtctccgccgccgaggaggccggactgcttccgcctggtgggaccatcatcgaacctaccagcggaaacaccggtgtcggcttggccctggtggcggcccggcggggctatcgctgcgtgttcaccatgcccgacaagatcagcgaagagaaacgagccgtcctgcgcgcctacggcgccgaggtcgtcatctgcccgacagcagtggcacccgacgacccccgctcctactactcggtggcccgccggctcgtccgcgagactcccggtggttggagcccggatcagtattccaacccgaacaatcccgctgcgcactacgctacgaccgggccggagatctggcaggccacgaacggtcgcgtcacccatttcgtcgccggcatcgggaccggcgggacgatcagtggagtcggccgttacctcaaggaggcgtccggcggaaccgtgcagatcgtgggcgcggatccggagggttcggtctactccggtggcagcggccggccctacctcgtcgaaggcgtcggggaggacatctggccgacgacctacgacaagacggtcgtcgaccgggtggaggcggtcagcgaccgcgactcgttcctgatgacgcgcgagctggccaggaaatgcgggctgctggtgggcggatcaggcgggctcgcggtggtagtcgccctccgggtcgctcgcgagctcggcccggacgacgccgttgtggtcctgcttccggactccggccgcggatacctgtcgaagatcttcaacgacgaatggatgtacgagtacggctttctggagccgccgtcgaacgagccgaccgtctcggacgtcctgcggaacaaggccgaacagaccagtggtccccccgatctggtgcatgtccacccggccgagacagtcggtgccgccatctcctacctgcgcgagtacaacgtgtcgcagatgccggtggtgcggcacgaaccgcccctgcgggcggcggaggtcgcgggttccgtcatcgagcggcatctgctcgcggcggtcttcgccgaccggtccgccatcgacgctccggtcgccgatcatctgtcgccgtcgcttccgatggtgggtaccggcgagccactggcccggatcgtcgcggtgctcggggacgaacccgcggtgctggtacacgacgagggtaatcccgtcggcatccttacccgtgccgacctgctgagtttcctggccgtccgctag

SEQ ID NO: 39837 - protein, 462 aa, Frankia sp. CcI3
MTDMQAFDHVIDLVGNTPLVRITPTIETTPTPVLAKLEYLNPGGSVKDRVALTMVSAAEEAGLLPPGGTIIEPTSGNTGVGLALVAARRGYRCVFTMPDKISEEKRAVLRAYGAEVVICPTAVAPDDPRSYYSVARRLVRETPGGWSPDQYSNPNNPAAHYATTGPEIWQATNGRVTHFVAGIGTGGTISGVGRYLKEASGGTVQIVGADPEGSVYSGGSGRPYLVEGVGEDIWPTTYDKTVVDRVEAVSDRDSFLMTRELARKCGLLVGGSGGLAVVVALRVARELGPDDAVVVLLPDSGRGYLSKIFNDEWMYEYGFLEPPSNEPTVSDVLRNKAEQTSGPPDLVHVHPAETVGAAISYLREYNVSQMPVVRHEPPLRAAEVAGSVIERHLLAAVFADRSAIDAPVADHLSPSLPMVGTGEPLARIVAVLGDEPAVLVHDEGNPVGILTRADLLSFLAVR

SEQ ID NO: 39838 - DNA, 948 bp, Frankia sp. CcI3
  CDS (1)..(948): transl_table=11
atgcgcttctcctccctggccgactccgtcggccggaccccgctggtcgggcttccgcgactgtcgccgtcgccggatgcccggctgtgggcgaagctggaacaggacaacccgaccggttcgatcaaggaccgggcggcgctgtggatgatcgccgacggcgagaagcgcggtctgctcactccgggcgcgaccgtgctcgaaccgacgtccggtaataccgggatctcgctggccatggcctgccgtcagcggggctaccggctgatctgtgtgatgccggagaacacctcgatcgagcgccgtcagctcctgcagatgtggggcgccgagatcaggttctcgcccgccgccggcggatcgaatgaggcggtcgccgtcgcgaagcggctggccgctgagaatcccgactgggtgatgctctaccagtacggcaatccggcgaacgcccaggcgcactatgagacgaccgggccggagattctcgaggacctgcccgaaatcacgcacttcgtggcgggcctcggcacgaccggaaccctcatgggaaccggtcgttacctcaaggaacgggtgccggacatctcgatcgtcgcggccgaaccgcgctacggcgagctggtgtacgggctgcgcaacatcgacgaggggttcgttcccgaactgtacgacccgtcggtgctcacctcgcgatactcggtcggtccgcgggaggcgctgcgccgtacccgcgagctggtgcaggaggagggcatcttcgccgggatctccaccggggccatcctgcacgcggcgcttgcgcaggccgagcgggcggtcaaggagggcaagtcggccgatatagtcctgatcgtctgtgacggtggctggaagtatctgtccaccggcgcctacgccggcaccctcgaagaagccgaagccgccctggaagggcagctgtgggcctag

SEQ ID NO: 39839 - protein, 315 aa, Frankia sp. CcI3
MRFSSLADSVGRTPLVGLPRLSPSPDARLWAKLEQDNPTGSIKDRAALWMIADGEKRGLLTPGATVLEPTSGNTGISLAMACRQRGYRLICVMPENTSIERRQLLQMWGAEIRFSPAAGGSNEAVAVAKRLAAENPDWVMLYQYGNPANAQAHYETTGPEILEDLPEITHFVAGLGTTGTLMGTGRYLKERVPDISIVAAEPRYGELVYGLRNIDEGFVPELYDPSVLTSRYSVGPREALRRTRELVQEEGIFAGISTGAILHAALAQAERAVKEGKSADIVLIVCDGGWKYLSTGAYAGTLEEAEAALEGQLWA

SEQ ID NO: 39840 - DNA, 930 bp, Frankia sp. CcI3
  CDS (1)..(930): transl_table=11
atgaggatcgcggaagacatcacgcaactgatcggcaacacgccgctggtccgattgcgtcgcgtcacggacggagtgggagcccaggtcgtggccaaactggagtccttcaacccggcgcacagcgtgaaggaccgtctcggtgtggccctgatcgacgccgtggagcgggccgggctgatcgggccggacaccgtcatcctcgaacccaccagtgggaacaccggcatcgccctggccatggtgtgcgccgcccgcggctaccgctgcgtcctgacgatgcctgagacgatgagcaccgagcggcggatgctgctgcgggccctcggcgcggagctcgtgctcacccccggtgccgagggcatgcccggcgccatcgcgaaggcggaggagctcgcgaagaacgacgaacggtacctcatcccgcagcaattcgagaacccggccaacccggcgatccaccgcgccacgaccgccgaggagatctggcgcgacaccgacgggcagatcgacgtgctcgtcgccggagtcggcaccggcgggaccatcaccggcgtcgcccaggtcatcaaggagcgcaggcccgaggcccggttcgtcgccgtggagccgtcggcatcgccggtgctctcgggcggcgtgaagggaccgcacccgatccagggcatcggcgccgggttcgtcccgccggtcctggagaccggcctcgtcgacgagatcatccaggtcgatggtgaggacgccttcgacctggcccgccggctggcccaggaggagggactcctggtgggcatctcctcgggcgcggcggtgtcggcggcgctgcaggtagcccgccgcccggagaacgccgggaagctggtcgtcgtcgtgcttccggacttcggcgagcgctacctgagcacaccgttgttcgccgggctcgggtga

SEQ ID NO: 39841 - protein, 309 aa, Frankia sp. CcI3
MRIAEDITQLIGNTPLVRLRRVTDGVGAQVVAKLESFNPAHSVKDRLGVALIDAVERAGLIGPDTVILEPTSGNTGIALAMVCAARGYRCVLTMPETMSTERRMLLRALGAELVLTPGAEGMPGAIAKAEELAKNDERYLIPQQFENPANPAIHRATTAEEIWRDTDGQIDVLVAGVGTGGTITGVAQVIKERRPEARFVAVEPSASPVLSGGVKGPHPIQGIGAGFVPPVLETGLVDEIIQVDGEDAFDLARRLAQEEGLLVGISSGAAVSAALQVARRPENAGKLVVVVLPDFGERYLSTPLFAGLG

SEQ ID NO: 39842 - DNA, 999 bp, Novosphingobium aromaticivorans DSM 12444
  CDS (1)..(999): transl_table=11
atgatggctcctgcgattgctcccgataccatttccctcatcggcaacacgcctctcgtccggctcaaggggccgagcgaggagaccggttgcgagatctacggcaagtgcgaattcaccaaccccggcgcttcggtgaaggatcgcgcggccctgtggatcgtccgcgacgccgaagagcgcggcattctcaagcccggcggcaccattgtcgagggcacggcgggtaacaccgggatcggcctggcactcgtcgccaatgcgcgcggctacaagtcggtcatcgtcatgcccgagacgcaatcgcgcgagaagatggacaccttgcgggcactgcgttcggagctggtgctggttccggccgcccccttctcgaaccccggccacttcgtgcacacttcgcgccgcattgccgaggagaccgaaggcgcggtctgggcgaaccagttcgacaacatcgccaaccgccgagcgcacatcgaaagcaccgcgcccgaaatctgggagcagatggagcatcgcatcgatggcttcacctgcgctgcgggtacgggtggcaccatcgcgggcgtgggcatgggcctcaaggccttcgacgagaacatcaccattgccctcaccgatccgcatggcgccgcgctgtacaattactatgcccacggcgaactgaaggcggaaggctcttcggttgccgaggggatcggtcaggggcgcatcacggcgaacctcgacggtgcgcccatcgacacccagttccgcatttcggacgaggaaggtctgcactgggtcgaacgcctgctggccgaggaaggcctctgtcttggcctgtcgagcggcatcaacgtggcgggcgcggttgcgctggcaaggcaactgggcaagggcagccgcgtggcgacgatcctgtgcgacacgggcttccgctatctctcctcgctctacaatccggaatggctcaagaccaagggcctgcgagtgttcccttggctggagcaatga

SEQ ID NO: 39843 - protein, 332 aa, Novosphingobium aromaticivorans DSM 12444
MMAPAIAPDTISLIGNTPLVRLKGPSEETGCEIYGKCEFTNPGASVKDRAALWIVRDAEERGILKPGGTIVEGTAGNTGIGLALVANARGYKSVIVMPETQSREKMDTLRALRSELVLVPAAPFSNPGHFVHTSRRIAEETEGAVWANQFDNIANRRAHIESTAPEIWEQMEHRIDGFTCAAGTGGTIAGVGMGLKAFDENITIALTDPHGAALYNYYAHGELKAEGSSVAEGIGQGRITANLDGAPIDTQFRISDEEGLHWVERLLAEEGLCLGLSSGINVAGAVALARQLGKGSRVATILCDTGFRYLSSLYNPEWLKTKGLRVFPWLEQ

SEQ ID NO: 39844 - DNA, 918 bp, Novosphingobium aromaticivorans DSM 12444
  CDS (1)..(918): transl_table=11
atgagagcggaatccatcctcgccacgatcggcaacaccccgcacattcgcctgtcccgcctgtttcccgaccacgaggtatgggtgaagtgcgagcgcgccaatccgggcggctccatcaaggacaggatcggcctcgccatgatcgaggccgcagaggccgacggcagcctgaagccgggcggcaccatcgtcgagcccacttccggcaataccggcatcggtcttgccatggcggcggcggtaaagggctacaagctcatcctcgtcatgcctgaatcgatgtcgcttgaacgccgccgcctgatgctggcctatggcgcgaccttcgacctgaccccgcgcgaaaagggcatgaagggcgcgatcgagcgcgcgaaggaaatcgtcgatcagaccgacggcgcatggatgccgcagcagttcgacaatccggccaacgtatcggttcacgtccgcacgaccgcccaggaaatcctcaaggacttcggcagcgaaccgatcgacgtgctcatcaccggcgtcggcaccggcggtcacctgaccggttgcgccgaggaactgaagaagcactggccctcgctcaaggcctatgccgtggaacccaccctttccccggtcatctcgggcggccaacccggcccgcacccgatccagggcatcggcgcgggcttcatccccggcaacctccacacccagtcgatcgacggcgcaatccaggtcgacccggcggacgccaaggaaatggcgcgcctttgcgcatcgaaggaaggcatgctggtcggcatctcgtccggcgcaacgctggcggccatcgcgcagaagctgccgagcctgcccgccggcagccgcgtgctgggcttcaactacgacaccggcgagcgctatctctcggtgccggacttcctgccggagtaa

SEQ ID NO: 39845 - protein, 305 aa, Novosphingobium aromaticivorans DSM 12444
MRAESILATIGNTPHIRLSRLFPDHEVWVKCERANPGGSIKDRIGLAMIEAAEADGSLKPGGTIVEPTSGNTGIGLAMAAAVKGYKLILVMPESMSLERRRLMLAYGATFDLTPREKGMKGAIERAKEIVDQTDGAWMPQQFDNPANVSVHVRTTAQEILKDFGSEPIDVLITGVGTGGHLTGCAEELKKHWPSLKAYAVEPTLSPVISGGQPGPHPIQGIGAGFIPGNLHTQSIDGAIQVDPADAKEMARLCASKEGMLVGISSGATLAAIAQKLPSLPAGSRVLGFNYDTGERYLSVPDFLPE

SEQ ID NO: 39846 - DNA, 924 bp, Francisella tularensis subsp. holarctica
  CDS (1)..(924): transl_table=11
atgctatctttaataggaaagactcctataataaaacttaaaaatacaataaacaatcataatctttatgctaagtgtgaatggctaaacccaactggtagtatcaaagatcgtgttgcgaaatatatcttggaaaacttaataaaaaacaaaaaaataaaacctcaacaagcaattatcgaagcaagttcaggcaatatgggaacatctttagctgcaattggtaaattatacaaacatcctgtgtacattacatgtcctgagaaaacgggacaaataaaaagagaaatgatcaaaagttttggagcaaaccttacaatttgtaaaaacacatcagatcatacggatccagatttttatgtaaataaagctaaacaattaacagaagatttagatggaatattagttaaccaatatgataatttattaaatacagagtgtcattacaaaactacaggtcaagaaatagtggactattttttaacacaaaatgttgatattgactactttataacggttgggggatctggcggcactattacaggatgtgcaaagaagataaaagagttttttccaaaaacacaagttattatgccagacccttatggatctgtttattatgatattttttatcatggagcacctattaaagaaaacatacatagctataaagtagaaggtccaggtaaccctgtcttctgtaaatcaatggatcttgcatatattgacgaaataatacaatttagtgataatcaagcaatacaagcatgtcatgagttagctagtgaacaaggtatttatgctggacatagtagcggtgctaactatttcattgctaaaaaactactcgaaaaattaccacaacatcagagctataacatccttataatggtattagatagcggtatgaaatatgctttttaa

SEQ ID NO: 39847 - protein, 307 aa, Francisella tularensis subsp. holarctica
MLSLIGKTPIIKLKNTINNHNLYAKCEWLNPTGSIKDRVAKYILENLIKNKKIKPQQAIIEASSGNMGTSLAAIGKLYKHPVYITCPEKTGQIKREMIKSFGANLTICKNTSDHTDPDFYVNKAKQLTEDLDGILVNQYDNLLNTECHYKTTGQEIVDYFLTQNVDIDYFITVGGSGGTITGCAKKIKEFFPKTQVIMPDPYGSVYYDIFYHGAPIKENIHSYKVEGPGNPVFCKSMDLAYIDEIIQFSDNQAIQACHELASEQGIYAGHSSGANYFIAKKLLEKLPQHQSYNILIMVLDSGMKYAF

SEQ ID NO: 39848 - DNA, 954 bp, Desulfitobacterium hafniense Y51
  CDS (1)..(954): transl_table=11
atgccaaaaatcgcagataatctgacggatttaattggaaaaacgccgctgctgcgcttgaaccggtattcaaaaggcaaaaatctattcgctgaaatcatcgccaagctggaatacttcaatccgcagagcagtgttaaggacagaatcgcttacgccatgatcgaggatgccgaaaaacagggtgctatcgatcaggatacgacgattattgagccgaccagcggcaataccggcatcggccttgcctttgtggcggcagccaagggatacaggattgtcttggtcatgccagataccatgagcgtggaaagacggcggcttttacgggcgctgggcgcggacctggtgctgaggccgggcactcagggcatgggcggcgccatccgcaaggccgaagaattaaaagaacaaataagtaaatcgtttattccggatcagttcagcaatccggtcaacccttcctttcaccgggagacgacagccaaggaaatactggaggataccgaagggaaggtagacgtctttgtagccggagtaggtacaggcggaacggttaccggcgtgggagaagccctgaaggcggtaaatccaggaatcaaggttgtggctgttgagccttataattctcccgttctttcgggcggacagccgggcccacatgcgattcagggaattggcgccggctttattcccaaagtattcaattcaagcttcgtggatgaaatattccaggtcaaaaacgaggaagcctttgaagcctccagagaagtggcgaaattggaaggactcctggtcggagtctcatccggtgccgccctctatgcggccaccaggattgcggccagaagagagctggaaggcaagaaaatcgttgtgcttctgccggataccggtgaacgttacttgtcaacgccgctgtttccctacgatgagggatccaaccatttttaa

SEQ ID NO: 39849 - protein, 317 aa, Desulfitobacterium hafniense Y51
MPKIADNLTDLIGKTPLLRLNRYSKGKNLFAEIIAKLEYFNPQSSVKDRIAYAMIEDAEKQGAIDQDTTIIEPTSGNTGIGLAFVAAAKGYRIVLVMPDTMSVERRRLLRALGADLVLRPGTQGMGGAIRKAEELKEQISKSFIPDQFSNPVNPSFHRETTAKEILEDTEGKVDVFVAGVGTGGTVTGVGEALKAVNPGIKVVAVEPYNSPVLSGGQPGPHAIQGIGAGFIPKVFNSSFVDEIFQVKNEEAFEASREVAKLEGLLVGVSSGAALYAATRIAARRELEGKKIVVLLPDTGERYLSTPLFPYDEGSNHF

SEQ ID NO: 39850 - DNA, 891 bp, Saccharophagus degradans 2-40
  CDS (1)..(891): transl_table=11
atggaataccccacaatagaagcaattattgggaataccccccttgttcgtttacagcgccttcctggttgcgagaaaaatacagttttagttaagttggaaggtaataaccctggtgggtccgtcaaagatcggcctgcactctcgatgattcagcgcgcagaagccgctggggcaataaaaccaggcgatacgattattgaggctaccagtggtaatacaggcatagccttagcaatggtggctgctgttaagggctataatatgatccttattatgcccgatcatatgacagaagagcgcaaagcggcaatgacggcttatggtgctaagcttatcttggtgtccaaagccgagggcatggagggcgcaagggatttggcgcaggcgatggcatcacgcggtgaaggggtggtgttagatcaatttagtaatacagataatcctcttgctcattttactggcactggcccagaaatttggcagcaaaccggcggtacggttactcattttgtaagctcgatgggtactacgggcaccatagtgggcacctctaagttcttaaaaagccaaaacccgaatgtacaggtggtcggtttgcaacctgcagaaggagcggctattcccggtattagagcatggccacaagagtatatgccgactatttttaccgatgaaaatattgatagcgttgtgcaaatgtcacaacaaaaagccgaagaaaccatgcgccttttagcaaaaaaagaaggtgtgttttgtggtgtttcttcaggcggagccgttgcggcagcgttagatatcgccgcgagtacagagggcgccgttatagtagctataatttgcgatcgcggagatcgctacttatcgtcaggtgtgtttaattcttaa

SEQ ID NO: 39851 - protein, 296 aa, Saccharophagus degradans 2-40
MEYPTIEAIIGNTPLVRLQRLPGCEKNTVLVKLEGNNPGGSVKDRPALSMIQRAEAAGAIKPGDTIIEATSGNTGIALAMVAAVKGYNMILIMPDHMTEERKAAMTAYGAKLILVSKAEGMEGARDLAQAMASRGEGVVLDQFSNTDNPLAHFTGTGPEIWQQTGGTVTHFVSSMGTTGTIVGTSKFLKSQNPNVQVVGLQPAEGAAIPGIRAWPQEYMPTIFTDENIDSVVQMSQQKAEETMRLLAKKEGVFCGVSSGGAVAAALDIAASTEGAVIVAIICDRGDRYLSSGVFNS

SEQ ID NO: 39852 - DNA, 954 bp, Saccharophagus degradans 2-40
  CDS (1)..(954): transl_table=11
atgctatacgacaatatattagccaccataggcaacaccccaatcgttcgtttaaataagctcgccccagaagggcagaatatttacgttaaggttgaatcgtttaaccctatggcgtcggtaaaagaccgcttggcatttgccattatcgacgacgccgaaaagcgcggtgtgcttaagccaggccaaaccgtagtagaagctacctcgggcaatactgggattgcattagcaatggtttgcgctgctaaaggctacccatttgtggcgactatggtagaaaccttctcggtagagcgccgtaaattaatgaaggcactcggcgcaaaagtaatccttaccccagctgccgaaaaagggactggcatggttaaaaaagctgcagagcttgccgaaaagcacggttggtttttagctagccaatttgagaacgaagccaaccctgcctaccaccgcaatacaacaggcccagaaatactgcgcgattttgcaggtaaagatttagattactttgttagtggttggggtaccggcggcaccatgacaggcgcaggccaaatgctaaaactggcccgcccagacctaaaagtgattgtggccgaaccacaaaatgcagccatgctaagcggcaacccttggtcaccgcataaagtacaaggctggacacccgattttgtgcctgcagtgctagacaaaaccgttgcagatgaaatagtaaccgtaagcgacgatgacgctatagccaccgccaaagctctggctacacaagagggtatattctgtggaatttcttctggcgccaccttagcggcaacgattgcctacgctaagcaagcacctactggcagtacgtttgtagtaatgctaccggataccggtgagcgctatttatctacgccactgtttgcagatattactgaagagtctgacgacgagtggttaagccagcagtaa

SEQ ID NO: 39853 - protein, 317 aa, Saccharophagus degradans 2-40
MLYDNILATIGNTPIVRLNKLAPEGQNIYVKVESFNPMASVKDRLAFAIIDDAEKRGVLKPGQTVVEATSGNTGIALAMVCAAKGYPFVATMVETFSVERRKLMKALGAKVILTPAAEKGTGMVKKAAELAEKHGWFLASQFENEANPAYHRNTTGPEILRDFAGKDLDYFVSGWGTGGTMTGAGQMLKLARPDLKVIVAEPQNAAMLSGNPWSPHKVQGWTPDFVPAVLDKTVADEIVTVSDDDAIATAKALATQEGIFCGISSGATLAATIAYAKQAPTGSTFVVMLPDTGERYLSTPLFADITEESDDEWLSQQ

SEQ ID NO: 39854 - DNA, 888 bp, Methylobacillus flagellatus KT
  CDS (1)..(888): transl_table=11
atgtacaaaaccctggatgatttcgtaggcaacaccccactggtcaagctgcagcgcatggcgggcaagaccagcaacaccatcttgctcaagctcgaaggcaacaacccggcaggttcggtcaaggatcggccagcgctttccatgatcaagcgcgcggaagcgcgcggcgacatcaagcccggcgataccctgatcgaggccacgtccggcaataccgggatcgcactggccatggtggcggcgatgcgtggttacaaaatggtgctggtcatgccggacaaccagagcgtggagcgccgccaaagcatgaaggcctacggcgccgaactagtcttgacgccacgcgacggcggcatggaactggcgcgcgacgtggcgaccaagctgcaggcggagggtgagggcatcgtgcttgaccagttcgccaaccaggacaacccgctggcgcattacgaaggcactggcccggaaatctggcgcgacacagcaggcaagatcacgcatttcgtctccagcatggggacgactggcaccatcatgggtacctcgcgctacctcaaggagcagaaccgcgatatccgcatcgtcggcgtgcagcctgaagaaggcgcgcagattcctggcatccgcaaatggccagaagaatacctgcccaaaatttatgatgccaagcgcatcgacgagctggtgtacgtcaaccaggaaaatgcggaaaaaaccacgcgcaggctggcgcaggaagaaggcatctttgccggcatttcctctggcggcgccttgtatgcggcattgcaactctcaaagcgtgtggagaatgccgtgatcgtgacgattgtgtgtgatcggggtgatcggtatctttccaccggcgtgtttccatcttaa

SEQ ID NO: 39855 - protein, 295 aa, Methylobacillus flagellatus KT
MYKTLDDFVGNTPLVKLQRMAGKTSNTILLKLEGNNPAGSVKDRPALSMIKRAEARGDIKPGDTLIEATSGNTGIALAMVAAMRGYKMVLVMPDNQSVERRQSMKAYGAELVLTPRDGGMELARDVATKLQAEGEGIVLDQFANQDNPLAHYEGTGPEIWRDTAGKITHFVSSMGTTGTIMGTSRYLKEQNRDIRIVGVQPEEGAQIPGIRKWPEEYLPKIYDAKRIDELVYVNQENAEKTTRRLAQEEGIFAGISSGGALYAALQLSKRVENAVIVTIVCDRGDRYLSTGVFPS

SEQ ID NO: 39856 - DNA, 948 bp, Burkholderia xenovorans LB400
  CDS (1)..(948): transl_table=11
gtgagcaattttcgcggagttatctacgacagcatcgtcgacacgatcggcgccacaccgctggtgcggttgagcaaactggcggccgcctgcgactgccgggccgatgtggtcggcaagctcgagtttttcaatccacttgcctcggtgaaggaccggatcggcatcgctttgatcgagacggccgagcgggccggcaggatcaagccaggcaccttgctgatcgagccgacctccgggaacacgggcatcgggctcgcattcgtcgccgcggctaagggatatccgctcgtgctgtgcatgccggagtccgcgtcgatcgagcgccgcaagatggtgggcttgctcggcgccaaagtggagctgacgccggcttccgaagggatgggcggcgcgatccgtcgcgcggaggcactgaagcggaatcacccggattcgctgattctccagcagttcgacaatccggcgaatcccgatgcgcaccgccacacgaccgccgaggaaatctggaacgataccgccggacgcgtcgatattatcgtgtcgggcatcggcaccggcggcacgatcaccggaatcggccagacgctgaaggcgcgcaaaccggagttgcagatgatcggcgtggagccttcgggcagcgcggtactctcggggggcaagccggggccgcacaagcagcaggggatcggctccggtttcctgtccagcatcctcgatctcagtgtggtcgacgagattgtcaccgcgaccgatgaggacgcgatccagacagcccggcaggctgctgcgctggaaggcgtacccatcggcatcagttcgggggcggcgctatcggtcgcgttgcgggtcgggcggcgcccgggtaacgcgggcaagctgatcgtcgtgatcgtgcccagtttcgcggagcgttatctgtcgaccgaactgttcgccgacgtctag

SEQ ID NO: 39857 - protein, 315 aa, Burkholderia xenovorans LB400
MSNFRGVIYDSIVDTIGATPLVRLSKLAAACDCRADVVGKLEFFNPLASVKDRIGIALIETAERAGRIKPGTLLIEPTSGNTGIGLAFVAAAKGYPLVLCMPESASIERRKMVGLLGAKVELTPASEGMGGAIRRAEALKRNHPDSLILQQFDNPANPDAHRHTTAEEIWNDTAGRVDIIVSGIGTGGTITGIGQTLKARKPELQMIGVEPSGSAVLSGGKPGPHKQQGIGSGFLSSILDLSVVDEIVTATDEDAIQTARQAAALEGVPIGISSGAALSVALRVGRRPGNAGKLIVVIVPSFAERYLSTELFADV

SEQ ID NO: 39858 - DNA, 903 bp, Burkholderia xenovorans LB400
  CDS (1)..(903): transl_table=11
atggcttacaaaacgattgaagacacgatcggcaatacgccgctcgtgcagctcgtccggctccccgacgacgagatccgcagccgcaacaacgtgatccttgcgaagctcgagggcaacaaccccgcgggttcggtgaaggatcgcccggcgttgtcgatgatcaagaaagcggaagcgcgcgggcgcatcaagcccggcgacacgctgatcgaatcgaccagcggcaacaccggcatcgcgctggctatggcggccgcgatccgtggctacaagatggtgctgatcatgccggaagatctgtcggtggaacgccgtcagagcatggccgcatacggtgcgcagatcgtgctcacgccggtcacgggcggcatggagtacgcacgcgatctggccgagcagatgcagcgcgaaggcaagggcatcatcctcgaccagtttgccaatcccgacaatccggccgcgcacgtcgaaggcacggggccggaaatctggcgcgataccgaagggcgcattacccacttcgtgtcgtcgatgggcacgaccggcacgatcatgggcgtgtccacctatctgaaagaacagaaccaggcgatcgagatcatcggcgcgcagcccgaagagggttcgcgcattccgggcatccgcaaatggccggaagcctatctgccgaagattttcgatcgcagccgcgtggatcgtgtggagaacgtgagccaggccgccgccgaggctatggcgcgccgtatggcgtcggtggagggcatctttgccggcatctcgtcgggcggcgcgtgcgaagtggcgctgcgcgtcgcgcggcaggtcgagaacgcgaccatcgtgttcatcgtttgcgatcgcggcgaccgttatctgtccacgggtgtgtttcccgcttaa

SEQ ID NO: 39859 - protein, 300 aa, Burkholderia xenovorans LB400
MAYKTIEDTIGNTPLVQLVRLPDDEIRSRNNVILAKLEGNNPAGSVKDRPALSMIKKAEARGRIKPGDTLIESTSGNTGIALAMAAAIRGYKMVLIMPEDLSVERRQSMAAYGAQIVLTPVTGGMEYARDLAEQMQREGKGIILDQFANPDNPAAHVEGTGPEIWRDTEGRITHFVSSMGTTGTIMGVSTYLKEQNQAIEIIGAQPEEGSRIPGIRKWPEAYLPKIFDRSRVDRVENVSQAAAEAMARRMASVEGIFAGISSGGACEVALRVARQVENATIVFIVCDRGDRYLSTGVFPA

SEQ ID NO: 39860 - DNA, 930 bp, Methanococcoides burtonii DSM 6242
  CDS (1)..(930): transl_table=11
atggaaaatatttacgaagatataacaaaaactgttggaaagacaccgcttgtacggttgaacagaataactgtaggatgctatgctactgtccttgtgaaagtggaggcttttaatccactgggttcgatcaaagaccgtattgccttgaatatgatagagaccgcagaaaaggacggaatgctcaaaaagggagccatcgttattgagccaacttccggaaacacaggtatcggactggcttttgtttgtgctactaaaggttacaggctgatattgacaatgcctgagaccatgagcgttgagaggagaaatatattgaaggtccttggagctgagatcgtgctcacccctggcccaaatggtatgaaaggagctatcgaggaagcggaaagaattggaaaggagacacctgattcttttatcccgcatcagttcatgaatccggcaaatcctgatatccaccgctgcactacagctggggagatatgggatgataccggaggaaaggtcgatatactggtagcaggcgttgggaccggaggaactattacgggtgtttcagaagaactaaagtctcgtaagcccgggtttaaagcaatagctgtggaaccaaaggattcagctgtactttccggcggcagtccggggcctcatatgatacaggggattggtgccggtttcgtgccggatgtgctgaacgtggatattattgatgaaattataacggtcagtaatgaagatgcctttgagacgacacgtgaacttgccaaaaaggaagggatactcgcaggcatctcatctggtgcagctctttttgcggctttggatgttgcaagacggaaggagaatgaaggaaagatgatagttgttgtccttccagatacaggggagcgatatcttagtacaacaattgtggaaaaggagtga

SEQ ID NO: 39861 - protein, 309 aa, Methanococcoides burtonii DSM 6242
MENIYEDITKTVGKTPLVRLNRITVGCYATVLVKVEAFNPLGSIKDRIALNMIETAEKDGMLKKGAIVIEPTSGNTGIGLAFVCATKGYRLILTMPETMSVERRNILKVLGAEIVLTPGPNGMKGAIEEAERIGKETPDSFIPHQFMNPANPDIHRCTTAGEIWDDTGGKVDILVAGVGTGGTITGVSEELKSRKPGFKAIAVEPKDSAVLSGGSPGPHMIQGIGAGFVPDVLNVDIIDEIITVSNEDAFETTRELAKKEGILAGISSGAALFAALDVARRKENEGKMIVVVLPDTGERYLSTTIVEKE

SEQ ID NO: 39862 - DNA, 936 bp, Ralstonia metallidurans CH34
  CDS (1)..(936): transl_table=11
atggcctgcgaaaaaccgaccgactccgcacccatggcatataaaacgattgaagacaccattggcaacacgccgttggtcagactccaacgcattcccggcaccgcgatcgaggcacgcggcaatgtgattctcggcaagcttgaaggcaataacccggcaggttcggtcaaggaccgtccggcggtgtcgatgatccgccatgccgaggcccgtggccgcatcaagcccggcgatacgctgatcgaagcaacttccggcaataccggcatcgcgctggccatggccgcggctatccgcggctatcgcatggtcctgatcatgcccgaggatctgagtctcgagcgtcgccagagcatggcggcgtatggcgccgagatcatcctgacgccggtcaagggtggaatggaatacgcccgcgatctggccgatgccatggagcgtgacggcaagggcgtgatcctcgaccagttcgccaatccggacaatccgctggcgcactacgagacgactggcccggagatctggaaggacaccgacggtcgcgtgacccacttcgtttcggcgatgggcaccacgggcacgatcaccggcgtgtcacgctatctgaaggaaaagaatccgctgatccagatcattggcgcgcagccggcggaaggttcgcgtatcccgggtatccgcaaatggccggaagcgtatctgccgaagatctacgatccgaagttcattgatcgccaggagcccgtaacgcaggccgatgcggagcatatggctcgccgcatggcgcgtgaggaaggtatctttgcaggtatctctgccgcaggcgccctgtgcgtggcgctgaggattgccgaagaagtcgagaatgcgacgatcgtgttcgtcgtgtgcgatcgcggcgaccgctatctgtcgacgggcgtgttcccggcctga

SEQ ID NO: 39863 - protein, 311 aa, Ralstonia metallidurans CH34
MACEKPTDSAPMAYKTIEDTIGNTPLVRLQRIPGTAIEARGNVILGKLEGNNPAGSVKDRPAVSMIRHAEARGRIKPGDTLIEATSGNTGIALAMAAAIRGYRMVLIMPEDLSLERRQSMAAYGAEIILTPVKGGMEYARDLADAMERDGKGVILDQFANPDNPLAHYETTGPEIWKDTDGRVTHFVSAMGTTGTITGVSRYLKEKNPLIQIIGAQPAEGSRIPGIRKWPEAYLPKIYDPKFIDRQEPVTQADAEHMARRMAREEGIFAGISAAGALCVALRIAEEVENATIVFVVCDRGDRYLSTGVFPA

SEQ ID NO: 39864 - DNA, 972 bp, Acidobacteria bacterium Ellin345
  CDS (1)..(972): transl_table=11
atgaaaatcgccaatgacgttaccgaattgatcggaaaaacgcccctcgtcttcctgcataaggtgatcggcggcagccaagcgctgatcgcggccaaacttgagggcttcaacccgtgcgcgagtgtgaaggaccgcatcggcgtgagcatgatcgaagaggccgagaaggccggacgcatcacgccagggaaaactgtgctgatcgagccgaccagcggcaataccggcatcgggctggcgtttgtcgcggcagtgaagggctatcggctgatcatcgttatgcccgacaccatgagccaggagcgtcgtgtactgctacgcgcattcggagcggaactcatcctgacgcccggcgcgaagggcatgaaaggcgctatcgccaaagccgagcaactcgcgaaggaaattcccgacagcttgatacttcaacagtttcgaaaccctgcaaatccaaagatccacttcgaaaccacgggtcccgagatttggaacgacactgacggcaaggtggacatcctgatctccggtgttggcacgggcggcacgatcacgggcgtgtcggaatatatcaagccgaagaaggcgtcgttcaaggcgatcgccgtcgagccaacggagagccctgtgctttctggcggagcgcccgggccgcacaagatccaagggctcggcgcgggcttcatccccgaggtcctcgacaccaagacgattgacgaggtcgtgcaggtaaacagcgaggaatcggtcgccatggcgcggcgactggcgaaagaagaaggcctgctggtcggtatctcctcgggtgctgcggtggtggcggcggtgaaggtcggtagtcgtccggagaacgccgggaagttgattgtcgtggtgctgcccagttacggcgagcgctaccttagcagtatcctcttccagaacctgcgcgacgaagttgcggcgcagcaggcggtcgaggtgccggtctaa

SEQ ID NO: 39865 - protein, 323 aa, Acidobacteria bacterium Ellin345
MKIANDVTELIGKTPLVFLHKVIGGSQALIAAKLEGFNPCASVKDRIGVSMIEEAEKAGRITPGKTVLIEPTSGNTGIGLAFVAAVKGYRLIIVMPDTMSQERRVLLRAFGAELILTPGAKGMKGAIAKAEQLAKEIPDSLILQQFRNPANPKIHFETTGPEIWNDTDGKVDILISGVGTGGTITGVSEYIKPKKASFKAIAVEPTESPVLSGGAPGPHKIQGLGAGFIPEVLDTKTIDEVVQVNSEESVAMARRLAKEEGLLVGISSGAAVVAAVKVGSRPENAGKLIVVVLPSYGERYLSSILFQNLRDEVAAQQAVEVPV

SEQ ID NO: 39866 - DNA, 948 bp, Acidobacteria bacterium Ellin345
  CDS (1)..(948): transl_table=11
atgaatacatctgagatgtccactctccgcgtcgccgaagatatttctgaactcgttggccagaccccgatgcttcacctgcgcaagatggtgccgccggagatcgccgacatctacgtaaaactcgagtttcttaacccgggcggaagcattaaagaccgcgctgccctgggcatgatcctgcgcgcggaaaaggaaggcgtgctcaagccgggcgcgacgattctcgaggcgacagcgggtaacaccggcgtcggcttggcgctgatcggcgtaagccgcggatacaaggtcgtcctcgccgtcccgcagaaattcagcaaagagaaagtcatgctgatggaggctcttggtgctcaggtgtatcggacgccggacgccgaaggcatggaaggcgcaatccggctcgtcaagaaattcctgaccgagattccgaactcgtggctagcagggcagttcgagaaccaggcgaatcctgatttccactatgagacgaccggacgcgagttatgggaacagatgggcggcaagattgatgccatcgcactcggtgcaggcacggcagggacgttcacgggagtggcgcgctacttgaaggagcggtcgccgcagacgctgtgcgtgctggtggagtcgcaggcgtcggtgtacggcggcggcaagagcgggccgcacgccgtagaaggtatcggcgcgagcttcattcccgcaaccttcgatcgcagcgtttgcgatgaagtgatcgccgtgaaagacgtggatgcgttccggacaatcaaagatctggcggccaaagaaggcgtactggcggggtcgagctcgggagcggcagtgtttgcgagtttagagttggcaaaacgcctggggccggggaagcgggtcgtcacgattattccggactcggctgagcggtacctgtctaaggatccgtatcacttcaacgaataa

SEQ ID NO: 39867 - protein, 315 aa, Acidobacteria bacterium Ellin345
MNTSEMSTLRVAEDISELVGQTPMLHLRKMVPPEIADIYVKLEFLNPGGSIKDRAALGMILRAEKEGVLKPGATILEATAGNTGVGLALIGVSRGYKVVLAVPQKFSKEKVMLMEALGAQVYRTPDAEGMEGAIRLVKKFLTEIPNSWLAGQFENQANPDFHYETTGRELWEQMGGKIDAIALGAGTAGTFTGVARYLKERSPQTLCVLVESQASVYGGGKSGPHAVEGIGASFIPATFDRSVCDEVIAVKDVDAFRTIKDLAAKEGVLAGSSSGAAVFASLELAKRLGPGKRVVTIIPDSAERYLSKDPYHFNE

SEQ ID NO: 39868 - DNA, 1185 bp, Silicibacter sp. TM1040
  CDS (1)..(1185): transl_table=11
atggttttgcgggcaagtcagacgcagtggaaccacggtcgcgccgaaatcgtccccgacaggcgaaacgccagcctgcgcgcgctctggacccttgtgatcgcgccggtgcccagctacatcagaggggaacgagcgaaagggaatttcatgcgcattgcacgcgatctggccgatgcggtcggccatacccctctgatccgactgaacaaagtcagcgaagaaaccggttgcgaaattcttggcaaggcggagtttctgaaccccggccaatccgtgaaggaccgcgccgcgctctacatcatcaaggacgctatcgcccgcggggaactcaaacccggcggcacgattgtagaaggtacagcgggcaataccggcattgggcttgcgctggtcggcgcctccatgggcttcaagaccgtgatcgtgatccctgaaacccagtccgaagaaaagaaggacatgctgcgtctggcgggggcacagttggttcaggtgcctgcagcgccttacaagaaccccaacaactatgtgcgctactccgagcgcctggcaaacgagctggccaagacagagccgaatggcgccatctgggccaatcagtttgacaatgtggccaaccgtcaggcccatgtggaaaccaccggtcccgagatctgggagcagacgggcggcaaggtggatggtttcatctgtgctgttggctccggcgggacgcttgccgggattgccgaggcgctgcagcccaagggcgtgaagatcggccttgccgatcccaatggcgccgcgctttattcctactacaccactggcgagctgaagtccgagggctcctcgatcacagaagggatcggtcagggccggatcaccaagaacctcgaggggctcaccccagatttcaactaccagattccggacgcagaggcgctgccttatgtgtttgaccttctgcacgaagaggggctggtgcttggcggatcttccggcgtgaacattgccggcgcagtgcgtctggccaaggaactggggccggggcacaccatcgttaccatcctgtgcgactatggaacgcgctatcagtccaagctctttaatccggaattcctcaaagacaagggcttgccggtccccgactggatgacccatactcctgcttcaattcccggagtattcgaggacatctga

SEQ ID NO: 39869 - protein, 394 aa, Silicibacter sp. TM1040
MVLRASQTQWNHGRAEIVPDRRNASLRALWTLVIAPVPSYIRGERAKGNFMRIARDLADAVGHTPLIRLNKVSEETGCEILGKAEFLNPGQSVKDRAALYIIKDAIARGELKPGGTIVEGTAGNTGIGLALVGASMGFKTVIVIPETQSEEKKDMLRLAGAQLVQVPAAPYKNPNNYVRYSERLANELAKTEPNGAIWANQFDNVANRQAHVETTGPEIWEQTGGKVDGFICAVGSGGTLAGIAEALQPKGVKIGLADPNGAALYSYYTTGELKSEGSSITEGIGQGRITKNLEGLTPDFNYQIPDAEALPYVFDLLHEEGLVLGGSSGVNIAGAVRLAKELGPGHTIVTILCDYGTRYQSKLFNPEFLKDKGLPVPDWMTHTPASIPGVFEDI

SEQ ID NO: 39870 - DNA, 966 bp, Myxococcus xanthus DK 1622
  CDS (1)..(966): transl_table=11
atgcgtcctccctgtcgccctcttcccgcggacggccgcttcctccaggccgtgggtcccactccgctcgtccccgtacgtctccacgaggagggccccaccatctggtgcaagctggagttcctcaaccccagcggctccaccaaggaccgcatcgcgcgctacatgctggagaaggcgtggcgccagggggagctcgtccccggcggcgaggtcatcgaggcgtccagcggctccacgagcatcgcccttgcgctggcttgcgcccagatgggcctgcgcttcacggcggtgatgccggagggcgtcaccggggagcgcatcctcaccatccgcgcctatggtggtgacgtggtgctggtgccgcgcgaagccggcgtgcacggcgccatcgtgaaggcggaggagctggcgcgtgagcgcaaggccttcgcgccgcgtcagttcgagaacctggacaacgccgaggcccaccgggtgtggacgggccaggagattctgtcgcaaatcccgggcgggctggtgcacggcgtggtcagcggcgtaggcacgggcggcaccgtggtgggcctgtaccaggccttcgcggaagcaggctgtccggtgacggccttcgtggcgcgccccatcgccggcctgggctgcgacatcgaatgttgcagcttcagcccccgcgtcccgggcgtggtggatggcatgtcccggctgtaccgcgaggccgacatgccgggccgcgttgaaatcgacgtgtcggacgacgtcgccatgagcaccgccagggcgctcatccgccgcggcttcccggtgggaccgtcgtccggcctcaactacgtcgccgcggtggaagccgcgaagcgactgggcccgggggcgcaggtggtgacggtgttccccgaccgcatggagcgctacttctccaccgagctcatccagcctaagcccgtgccagcacgcggcgcggcatga

SEQ ID NO: 39871 - protein, 321 aa, Myxococcus xanthus DK 1622
MRPPCRPLPADGRFLQAVGPTPLVPVRLHEEGPTIWCKLEFLNPSGSTKDRIARYMLEKAWRQGELVPGGEVIEASSGSTSIALALACAQMGLRFTAVMPEGVTGERILTIRAYGGDVVLVPREAGVHGAIVKAEELARERKAFAPRQFENLDNAEAHRVWTGQEILSQIPGGLVHGVVSGVGTGGTVVGLYQAFAEAGCPVTAFVARPIAGLGCDIECCSFSPRVPGVVDGMSRLYREADMPGRVEIDVSDDVAMSTARALIRRGFPVGPSSGLNYVAAVEAAKRLGPGAQVVTVFPDRMERYFSTELIQPKPVPARGAA

SEQ ID NO: 39872 - DNA, 921 bp, Myxococcus xanthus DK 1622
  CDS (1)..(921): transl_table=11
atgaaggtgaacaacatcctggagaccatcggaaacacgccgcacgtgcgcatcaaccggctgtttccgtcccgcgtgacggtccatatgaagctcgagcgcgccaacccgggcggcagcatcaaggaccgcatcgcgttgtccatgattgaggacgcggagcagcgcggcctgctcaagaaggacagcgtcatcatcgagccgaccagcggcaacaccggcatcggcctggccatggtggcggcggtgaagggctacaagctggtgctcgtcatgccggagtccatgagcgtcgagcgccgccggctgatggccgcctacggcgccaccttcgagctgaccccgcgcgcgcagggcatgaagggcgccatcgctcgcgccaatgaactgctgtcgcaggtgcccaactcgtggatgccgcagcagttcgagaacgaggccaacatcgaggtccaccgccgcacgacggtgcaggaaatcctcaaggacttcccggaagggctggactacctcatcaccggcgtgggcaccggcgggcacatcaccgcgtgcgccgaggagctgaagaaggtctggccgaagctgaaggtcttcgccgtggagcccaccaagtcgcccgtcatcagcggcggccagccgggcccgcaccccatccagggcattggcgccggcttcatcccgaagaacctgcacaaggacgcgctggacggcgccattcaggtgaccgaggaggacgccttcgagttcacccgccgcgccgcgcgtgaggagggcatcttcgtgggcatctccaccggcgccgcgctgtccgccgtgaatcagaagctgggcgagatgaccgacggcagccgcgtgctcgccttcaactacgacacgggcgagcgctacctctccatcgagccgctcttcccggcccagtag

SEQ ID NO: 39873 - protein, 306 aa, Myxococcus xanthus DK 1622
MKVNNILETIGNTPHVRINRLFPSRVTVHMKLERANPGGSIKDRIALSMIEDAEQRGLLKKDSVIIEPTSGNTGIGLAMVAAVKGYKLVLVMPESMSVERRRLMAAYGATFELTPRAQGMKGAIARANELLSQVPNSWMPQQFENEANIEVHRRTTVQEILKDFPEGLDYLITGVGTGGHITACAEELKKVWPKLKVFAVEPTKSPVISGGQPGPHPIQGIGAGFIPKNLHKDALDGAIQVTEEDAFEFTRRAAREEGIFVGISTGAALSAVNQKLGEMTDGSRVLAFNYDTGERYLSIEPLFPAQ

SEQ ID NO: 39874 - DNA, 1368 bp, Myxococcus xanthus DK 1622
  CDS (1)..(1368): transl_table=11
atggacatccacgagaacatcctcaccgccattggcaacacgccgctggtcaagctcaacaagcttgtcgggccgaacgacgcgaccgtgctggtcaagtgcgagttcatgaacccgggcgcgtccatcaaggaccgcatggcgctctacatcctcgagaaggccgagcgggaggggaagctcaagcccggcggcaccatcgtcgagaacacgtccggcaacaccggcatgggcgtggcgctggccgcggccgtcaaaggctacaagtgcatcttcaccatgccggacaagatgtccctggagaagatcaaccgcctcaaggcgctgggcgcgcaggtggtggtgacgccgacgaacgtgccggccgaggacccgcgcagctactacgagacggccaagcgcctgcaccgcgagacgccgggcgcgttcatgctcaaccagtaccacaaccccgacaacatcgaggcgcactacaacaccaccggtcctgagatctacaagcagaccgagggcaagttcgactacttcgtcgcgggcctgggcaccggcggcaccatgagcggcgccggcaagttcctgaaggagaagattcccggcctcaagaacgtgggcgtggacccggagggctccgtctacgagggctacttcaagacgggcaagctgaccgagccgcacgtctacaaggtggaaggcatcggcgaggacatgctgtgcggcgccatggacttcacccacctggacgacgtgcgccaggtcgatgaccgccagtgcttcatcgccgcgcgccgcctggcgcgtgaggaaggcatcttcgccggcggctcctcgggcgcggcgattcacgtcgcggtgcagctggccaaggaagtgggcaagggcaagacgattgtcgtcgtgctgccggactcgggcagcagctacatcagcaagttccactccgacgagtggatgcgcgacaacggcttcctggaggagaagggcgccggcaccatccgcgacatcctgggcgacaagcgcaaggacgtgaagacggcgcgccgcggtgacaaggtcgaccaggtggtcgagacgatgcgcggccacggcatcagccagatgccggtggtgggcgacgacggccgcacggtgggcatggtgcacgagtacgacctgctcaacgcgctggtcgccggcaaggcgaagttctccgacaccatcgacagcatcatcgcgccgctgcagggcgcgctgtcgctcgacaccagcatcgcccgcctgcgcgaagtcttcgctcaggacaacgtggcggtggtgaaggacggcgagaaggtggtcggcatcgtcaccaagatcgacctcatcgactacctgcaccgcacggcggcgtag

SEQ ID NO: 39875 - protein, 455 aa, Myxococcus xanthus DK 1622
MDIHENILTAIGNTPLVKLNKLVGPNDATVLVKCEFMNPGASIKDRMALYILEKAEREGKLKPGGTIVENTSGNTGMGVALAAAVKGYKCIFTMPDKMSLEKINRLKALGAQVVVTPTNVPAEDPRSYYETAKRLHRETPGAFMLNQYHNPDNIEAHYNTTGPEIYKQTEGKFDYFVAGLGTGGTMSGAGKFLKEKIPGLKNVGVDPEGSVYEGYFKTGKLTEPHVYKVEGIGEDMLCGAMDFTHLDDVRQVDDRQCFIAARRLAREEGIFAGGSSGAAIHVAVQLAKEVGKGKTIVVVLPDSGSSYISKFHSDEWMRDNGFLEEKGAGTIRDILGDKRKDVKTARRGDKVDQVVETMRGHGISQMPVVGDDGRTVGMVHEYDLLNALVAGKAKFSDTIDSIIAPLQGALSLDTSIARLREVFAQDNVAVVKDGEKVVGIVTKIDLIDYLHRTAA

SEQ ID NO: 39876 - DNA, 993 bp, Myxococcus xanthus DK 1622
  CDS (1)..(993): transl_table=11
atggcgcctcgcattggaacgctctgggactccgtcggaaacaccccgctgctgcgcatcggctcgctgagccggcagacggggtgtgaaatcctcgcgaaggccgagttcatgaaccccggcggcagcatcaaggaccgcgccgcgaaggggatgattcagtgcgccgaggcgcagggcctgctgaagccgggcggcgccatcttcgagggcaccgcgggcaacaccggcatcggcctggggctcttgggccgcgagcgcgggtaccgcgtggtcgtcaccatgccggacaaccaggcccgcgagaagtacgagctactggaggccatgggcgtggaggtccgaaaggtccccgcggtgcccttcgccaatccgaaccacttcttccaccaggcccgcgtgctggcggaagcgcagggcggcttctgggcgaaccagttcgagaacccggccaacggcgactaccactacgagacgacgggccctgaaatctgggagcagtgcgagggccgcgtggacgtgctggtggcgtccgtgggcagcggtgggacgatgggcggcgtcagccgttacctgaaggagaagaaccccgccgtgcgcgtggtgttggtggacccgccgggctcgggcctcttcacctacgtgcgcgaagggcgcatggaagggcccggttcttccatcaccgagggcattggcatcatgcgcctcacggagaacttccgccgggcccaggtggacgaggccatgcgcctgggggaccaggacatggtggagatgctctaccacctggcgcgcgaggacgcgctggtggtgggcacatcggcggccctcaacgtgcgcgccgcgtgggagctggcgcggcgtcatcggggcgaggggctgcgcatcgtcaccttcctgtgcgaccacggcagccgctacgcgtcgaaggtgttcaacccggagttcctcgcgtccaagcagttggaggtgaggccgcttcccgtggattga

SEQ ID NO: 39877 - protein, 330 aa, Myxococcus xanthus DK 1622
MAPRIGTLWDSVGNTPLLRIGSLSRQTGCEILAKAEFMNPGGSIKDRAAKGMIQCAEAQGLLKPGGAIFEGTAGNTGIGLGLLGRERGYRVVVTMPDNQAREKYELLEAMGVEVRKVPAVPFANPNHFFHQARVLAEAQGGFWANQFENPANGDYHYETTGPEIWEQCEGRVDVLVASVGSGGTMGGVSRYLKEKNPAVRVVLVDPPGSGLFTYVREGRMEGPGSSITEGIGIMRLTENFRRAQVDEAMRLGDQDMVEMLYHLAREDALVVGTSAALNVRAAWELARRHRGEGLRIVTFLCDHGSRYASKVFNPEFLASKQLEVRPLPVD

SEQ ID NO: 39878 - DNA, 918 bp, Rubrobacter xylanophilus DSM 9941
  CDS (1)..(918): transl_table=11
atgatcactaggattaagccggggaccggcataacggagcttgtagggaacacgcctctggtggagctctccaagatctctgcggagacgccgggggtaaggatctacgggaaggccgagtggtacaacccgggcgggtcggtcaaggaccgtccggcgttgtggatgatccgggacggggagcggagcggggcgctcacccccgagaagaccatcctcgacgccaccagcggcaacaccgggatagcctacgcctggataggggcggcgctcggctacagggtcaagctgtgcatgcccagcaacgccagcgaggagcgcaagaagatcctgcgggcctacggggtggacatcgtgctcaccgaccccggggagggctccgacggcgcgatccgggaggccaggaggctctacgccgaggatcccgagaggtacttctaccccgaccagtactccaacccggccaaccccagggcgcactacgagagcaccgggcccgagatctgggagcagaccggcggcgagataacgcacttcgtcgcgggcctgggcaccagcgggaccttcgtggggaccgcgcggcggctcaaggagttcaaccccgagataagggccatctccttcgagcccgactcccccttccacgggatagagggcatgaagcacatggagagcgccatcgtgcccgccatctacgaccccggcgtcgccgacgagaaccggcgggcctccacggaggaggcctacgccatggtcaagcgggtcgcccgcgaggagggcatcctcatcgggatctccgccggggctgcggtggctaccgccctgcgggtggcgagggagatagagtctggtaccatcgtgaccatcctgtgcgacggggcggacaagtacctctccgagagcttctgggaggaataa

SEQ ID NO: 39879 - protein, 305 aa, Rubrobacter xylanophilus DSM 9941
MITRIKPGTGITELVGNTPLVELSKISAETPGVRIYGKAEWYNPGGSVKDRPALWMIRDGERSGALTPEKTILDATSGNTGIAYAWIGAALGYRVKLCMPSNASEERKKILRAYGVDIVLTDPGEGSDGAIREARRLYAEDPERYFYPDQYSNPANPRAHYESTGPEIWEQTGGEITHFVAGLGTSGTFVGTARRLKEFNPEIRAISFEPDSPFHGIEGMKHMESAIVPAIYDPGVADENRRASTEEAYAMVKRVAREEGILIGISAGAAVATALRVAREIESGTIVTILCDGADKYLSESFWEE

SEQ ID NO: 39880 - DNA, 972 bp, Rubrobacter xylanophilus DSM 9941
  CDS (1)..(972): transl_table=11
atgcagggacagagcctgctccaccgggggctctcggagagcgtgctggaggccataggggacacaccgctcatagaggtagaggagggcatctacgcaaagctggagtacctcaacccctcaggctccataaaggcgcgcatcgccaagtacatcgtggagaaggccgaaagagaagggctgcttttgcccggccacaccatcgtagaggccacaagcggcaacaccggcaacgccttctcgatggttgcggccataaagggctacaggatggttgtgctcatgcccgaaggcctgagcaccgagcgggttgccataagccgcgcctttggcgcccacatagagcacgttggagagttctacgtaacggaggcgctaaagcgggcgagggagcttggcaagaaagagggctacttctgtcctgcgcagtttgactcggagtggaacgtggaggagaacagggagtggctggggaaggagatccttgggcagctggaggagggaggggttggggcacccgacgcgctggtgatgggggtaggcacgggagggacgctcataggggtggggcaggccttcagggagaagaacgcagaggcgaagctcattgcggtggagcctgaggagtcgtgcacgcttctgtgcggggagagtggcgtccacaagatagagggcatctccgatgggtttgtgccgggcatctacgagcggcacgcagagcggctgggtgtagatgaggtgtatgcggttggctctgaggaggcgcttggagcgatgaggtggctggcgaggcggagggggctctttgtcggtccctcgagcggtgcgaacctagttgcggcgaggaggctcaaggaggcgcatcctgagctaaagagcattgtgaccctcttctgtgacgagggggagaagtacatctcagagcacttcgccggtgagggccggaccctggagacaggggagagggcgtag

SEQ ID NO: 39881 - protein, 323 aa, Rubrobacter xylanophilus DSM 9941
MQGQSLLHRGLSESVLEAIGDTPLIEVEEGIYAKLEYLNPSGSIKARIAKYIVEKAEREGLLLPGHTIVEATSGNTGNAFSMVAAIKGYRMVVLMPEGLSTERVAISRAFGAHIEHVGEFYVTEALKRARELGKKEGYFCPAQFDSEWNVEENREWLGKEILGQLEEGGVGAPDALVMGVGTGGTLIGVGQAFREKNAEAKLIAVEPEESCTLLCGESGVHKIEGISDGFVPGIYERHAERLGVDEVYAVGSEEALGAMRWLARRRGLFVGPSSGANLVAARRLKEAHPELKSIVTLFCDEGEKYISEHFAGEGRTLETGERA

SEQ ID NO: 39882 - DNA, 1041 bp, Mesorhizobium sp. BNC1
  CDS (1)..(1041): transl_table=11
atgtaccagaccgtcatcgaagccattggcaatacgccacttatccgcctgaaacgggcttccgaggagaccggctgcgagatctatggtaaggcggagttcatgaatcccgggcagtccgtgaaggaccgggccgggctcttcatcattcgcgatgccgagaagcgtggcctgctgcggccgggcggcgtgatcgtggagggcacggccggaaatacggggattggccttaccgtcgtcgccaaggccctgggctatcgcaccgtaatcgtcattcccgatacgcaaagccaggagaagaaggatgcacttcgcatcctcggagcggagctgatcgaggtgccggctgtcccgtacaagaaccccaacaattacgtgaaggtttcgggccgcctcgccgaacagcttgcccgcaccgaggcgagcggcgccatctgggccaaccagtttgacaatgtggcgaaccgcgacggccacatccgcaccacagccgaagagatctggcgccagacgggcggcaaggtggacggcttcgtctccgccgttggtactggcggcacgcttgcgggcgtgtcggcgggcctcaaggccaggaacccggacgtcaaggtggcgctggccgatccgcttggcgctgcccttttcagctactacaccgctggcgaattgaaatcggaggggagttcgatcaccgaaggaatcgggcaggggcgcatcacggcgaatttggaagatttccagccggacttttcctttcagattcccgatgaggaggcgctgccgatcatcttttcgctcgtgcaggaagaagggctgtgcctgggcgggtcgaccggcatcaacatcgctggcgcgattcgaatggcaagggaactgggccccggccacacgatcgttacgattctggccgattacggcacgcgctatcagtcgaagctcttcaatcctgccttcctgcgtgaaaagaagcttcccgttcccgcctggatggaaggaagatcggaaataccggtgccattcgaacaggtggcggccagctaa

SEQ ID NO: 39883 - protein, 346 aa, Mesorhizobium sp. BNC1
MYQTVIEAIGNTPLIRLKRASEETGCEIYGKAEFMNPGQSVKDRAGLFIIRDAEKRGLLRPGGVIVEGTAGNTGIGLTVVAKALGYRTVIVIPDTQSQEKKDALRILGAELIEVPAVPYKNPNNYVKVSGRLAEQLARTEASGAIWANQFDNVANRDGHIRTTAEEIWRQTGGKVDGFVSAVGTGGTLAGVSAGLKARNPDVKVALADPLGAALFSYYTAGELKSEGSSITEGIGQGRITANLEDFQPDFSFQIPDEEALPIIFSLVQEEGLCLGGSTGINIAGAIRMARELGPGHTIVTILADYGTRYQSKLFNPAFLREKKLPVPAWMEGRSEIPVPFEQVAAS

SEQ ID NO: 39884 - DNA, 885 bp, Cytophaga hutchinsonii ATCC 33406
  CDS (1)..(885): transl_table=11
atggctaccctacttgattttattggcaatacgccccttgttgagattacccgcattttcaataaaccaaatgttaaaatatttgcaaagcttgaaggccataatccgggcggaagtgtaaaagaccgtgctgctttaggcatgatcaaaggtgcactggaacgcggcgagattaaacccggcatgaagctgatcgaagctacaagcggtaacacaggtattgccctggcgatgattgcccgtttatacaacctggatattgaactggtaatgcctgacaactctacgcgcgagcgtgtattaacgatggaagcatttggcgcaaaggttaccttaacacctgctgcggtaagtatagaaggttcgcgtgattatgccgaggcacaggtagcgaaaggcggcttctttatgctcaaccagtttgcaaacccggataattacatggcgcattatcactctaccggtccggagatctggagagatacaaatggcacggtaacacactttgtttcttctatgggaacaacaggaacgatcatggggacgtctaaatttttaaaagaaaaaaattcagcggtacagatcgttggtgtacagccaacggaaggctctaaaataccgggtatccgccgctggccggttgaatacctaccaaagatttacgacgattctcgtgtagacgtaaagatggacgtaagcgaagaagaatctgttgccatgacacgcaggcttgcccgtgaagaaggtatcttcggcggtatgagtagtggaggcgcaatggcagcagctataaaattaggaaacgaaattgaatccggcataattgtcagcatcgtatgcgaccgcggcgaccgttatttatccagcgatttatttggtgcgtag

SEQ ID NO: 39885 - protein, 294 aa, Cytophaga hutchinsonii ATCC 33406
MATLLDFIGNTPLVEITRIFNKPNVKIFAKLEGHNPGGSVKDRAALGMIKGALERGEIKPGMKLIEATSGNTGIALAMIARLYNLDIELVMPDNSTRERVLTMEAFGAKVTLTPAAVSIEGSRDYAEAQVAKGGFFMLNQFANPDNYMAHYHSTGPEIWRDTNGTVTHFVSSMGTTGTIMGTSKFLKEKNSAVQIVGVQPTEGSKIPGIRRWPVEYLPKIYDDSRVDVKMDVSEEESVAMTRRLAREEGIFGGMSSGGAMAAAIKLGNEIESGIIVSIVCDRGDRYLSSDLFGA

SEQ ID NO: 39886 - DNA, 1413 bp, Rhodococcus sp. RHA1
  CDS (1)..(1413): transl_table=11
atgaccatcctcgatccccctacagtcgacgctgcgagcctcggagtctacgactcgatcaccgacgccatcggcaacacacccctcgtccggttgaaccgggtaaccggaagcatctccgcgacggtgtatgccaagctcgagttcctcaaccccggcggaagtgtgaaggatcgcgccgccctggccatgatccacgcggccgaggaatccggggaactcctgcccggaggcaccgtcgtggagggcacgtcgggcaataccggggtcgggctgacattggtcgccgccgctcggggataccgttccgtagtcgtggtccccgacaagacgagcgtcgagaagatcgcattgctgcgggcgcacggggcgcaggtgcatgtgacaccgggcggcaggcccagccaccatcccgagttcgtacgcaacgtggccactcgtctcgcggcggagatccccggcggctggctcgccggccagtacgacaacccggccaatcccgacgcgcaccgcaccacgaccggaccggagatctggcgtcagacccgtggccgagtcactcatttcgtcgccggtgtcggaaccggtgggaccatcacggggacgggggagttcctgacgaagatctccggcggggccgtaaagatcatcggcgcggaccccgagacctccgtctacggcgggggagacggacgggcctggtacatcgaatccgtggggcatttcctgcacccgcagaccgagcacgacgagtggccggattcgtatcacccggacgtcgtcgaccgactcgagcggatcccggacatcgaggcgctcacggtgctgcaccggctcgcccgggaggaaggcctcctcgtcggaggttccgccggcaccgcggtcgccgccgccctgcgggtcgcgcggaccctcggcccggacgacgtcgtggtcgtgatcgtcccggactcgggccgggcctacctgtcgaagtacttcgacaacgagtggctgggacggctgggcttcccgctctaccacgcagcgaccggacccgttgtgcgtgacgcactgggcggccggggtatcgcaccccgggccgtgccgtccaccgcgacggtcgcggaggcgcgtgagttgctcgcggacaccccggccctacccgtcgtgctggcgcgcccggtcaccggtccggtcgtggtcgccgagatccaggggaccgtcagtgccgcggcgctgtcagacgctccggatgacgacccgatcggcgtgcacgtcgatcagccgttgcccgtcgtgggagtcaccgaagagctgtcggtggcggtgcgacgaatcgcggggcatcgagggccggtcgtcgtgtccgagaacgggcgggccgtagtgttggtcgacgccgacgtcgtccgcacctcgcccgtcgcgtga

SEQ ID NO: 39887 - protein, 470 aa, Rhodococcus sp. RHA1
MTILDPPTVDAASLGVYDSITDAIGNTPLVRLNRVTGSISATVYAKLEFLNPGGSVKDRAALAMIHAAEESGELLPGGTVVEGTSGNTGVGLTLVAAARGYRSVVVVPDKTSVEKIALLRAHGAQVHVTPGGRPSHHPEFVRNVATRLAAEIPGGWLAGQYDNPANPDAHRTTTGPEIWRQTRGRVTHFVAGVGTGGTITGTGEFLTKISGGAVKIIGADPETSVYGGGDGRAWYIESVGHFLHPQTEHDEWPDSYHPDVVDRLERIPDIEALTVLHRLAREEGLLVGGSAGTAVAAALRVARTLGPDDVVVVIVPDSGRAYLSKYFDNEWLGRLGFPLYHAATGPVVRDALGGRGIAPRAVPSTATVAEARELLADTPALPVVLARPVTGPVVVAEIQGTVSAAALSDAPDDDPIGVHVDQPLPVVGVTEELSVAVRRIAGHRGPVVVSENGRAVVLVDADVVRTSPVA

SEQ ID NO: 39888 - DNA, 963 bp, Rhodococcus sp. RHA1
  CDS (1)..(963): transl_table=11
gtggcgcggttcgattcgctgatcgacaccctcggcgacacacccctcgtcgggctgccccgcctgtcgccgagctggaacggcacagcgccggtccggctgtgggcgaagctcgaagaccgcaaccccaccggttcggtgaaggatcggcccgccctccgcatgatcgagcaggccgagaacgacggcaccctgacgcccggggcgacgatcctcgagccgaccagcgggaacaccgggatctcgctcgcgatggccgcgaaactcaagggctaccagctgatctgcgtgatgcccgagaacacgtccgtggaacgcaggcaactgctggcgatgttcggtgcgcagatcatcgactcacccgcgcgcggcggatcgaatcaggctgtggccgtggccaaggagctgtccgcggagcatcccgagtgggtgatgctgtaccagtacggcaatcccgcgaatgcgctggcccactacgagaccacaggccccgagatcctgcgcgaccttcccgagatcacccacttcgtcgcgggtctcggaaccaccggcaccctgatgggcgtggggcgctatctccgcgaacacgtcgacggcatcgagatcgtggcggccgagccccgctacggggaactcgtgtacggcctccgcaacatcgacgagggcttcgtccccgagttgtacgacgaatccgtcctcacctcgcggttctccgtcggccccgccgacgccgtccgccgcacccggcaactgatcgacaacgaaggcatcttcgcgggcatctcgaccggcgcgatcctccacgccgcgctgggggtcgcacgcaaggccgtcaaggccgaacgcgcggcgaacatcgcgttcatcgtcgccgacggcggatggaaatatctgtcgaccggcgcatacggcggtacggtcgaggaagcagaagaagcactggaagggcagttgtgggcatga

SEQ ID NO: 39889 - protein, 320 aa, Rhodococcus sp. RHA1
MARFDSLIDTLGDTPLVGLPRLSPSWNGTAPVRLWAKLEDRNPTGSVKDRPALRMIEQAENDGTLTPGATILEPTSGNTGISLAMAAKLKGYQLICVMPENTSVERRQLLAMFGAQIIDSPARGGSNQAVAVAKELSAEHPEWVMLYQYGNPANALAHYETTGPEILRDLPEITHFVAGLGTTGTLMGVGRYLREHVDGIEIVAAEPRYGELVYGLRNIDEGFVPELYDESVLTSRFSVGPADAVRRTRQLIDNEGIFAGISTGAILHAALGVARKAVKAERAANIAFIVADGGWKYLSTGAYGGTVEEAEEALEGQLWA

SEQ ID NO: 39890 - DNA, 963 bp, Trichodesmium erythraeum IMS101
  CDS (1)..(963): transl_table=11
atgcgtattgctcataatattacagaattagtaggtcgcactcccctggtacaattaaattctattcctaaagcagaaggttgtttagccaaaataatagtaaagctagaaggaatgaatcccgctgcctcagttaaggatcgtattggtgtaaatatgattaatgtagcggagcgcgaaggtttgattaaaccaggtaaaacaacattagttgaaccaacgtctggaaatacaggtattgctttggcaatggttgctgctgctagaggttacaagttaattttgactatgccagaaacaatgagcatggagcgtcgtgttatgttacgagcttatggggcagagttagtattaactccaggtagtgaaggtatgaaaggtgcaattaccaaagcacaagaaattgtggatttaagcagtaatggatattatatgttacagcaatttcagaatccagctaatccagaaattcatagcaaaactacagctctagaaatatgggaagatacggatggaaaggtagatattctggtggctggtgttggtactggtgggacagttacaggggtggcagagactattaaggcaagaaagcctgaatttcaagcgatcgctgttgaaccttctaatagcccagttttgtctgggggaaaaccaggaccacataaaattcagggaataggagctggttttgtgccagatgttttggatacgaagattattgatgaggtgatccaggttcctgatagtgaggcgatggtttatggtcgtcgtatagcaaaggaagaaggtattttatctggtatttctacgggagctgctctttgtgcggcgatcgaagtaggtaagcgtccagaaaatgatggtaagttaatagtcatgattcagcctagttttggggagcgttatttaagtactccattgtttcaagaactagggcctactctcgctgaagtcaggtag

SEQ ID NO: 39891 - protein, 320 aa, Trichodesmium erythraeum IMS101
MRIAHNITELVGRTPLVQLNSIPKAEGCLAKIIVKLEGMNPAASVKDRIGVNMINVAEREGLIKPGKTTLVEPTSGNTGIALAMVAAARGYKLILTMPETMSMERRVMLRAYGAELVLTPGSEGMKGAITKAQEIVDLSSNGYYMLQQFQNPANPEIHSKTTALEIWEDTDGKVDILVAGVGTGGTVTGVAETIKARKPEFQAIAVEPSNSPVLSGGKPGPHKIQGIGAGFVPDVLDTKIIDEVIQVPDSEAMVYGRRIAKEEGILSGISTGAALCAAIEVGKRPENDGKLIVMIQPSFGERYLSTPLFQELGPTLAEVR

SEQ ID NO: 39892 - DNA, 981 bp, Trichodesmium erythraeum IMS101
  CDS (1)..(981): transl_table=11
atggatattaaaccaggctttattggtacagttggtaatacaccattaattagattaaatagtttcagtgaagaaactggatgtgaaattttaggcaaagcagaatttcttaatccagggggttcggtaaaagatagagcagcactttatattattaaagatgcagaagaaaaaggtttattaaaacctggtggaacagttgtcgaaggaactgctggtaatacaggaataggtttggcgcatatttgtaatgcgaaaggttataagtgtttaattgttattcccgaaactcaatctgttgaaaaaatggatgctttgagaactttaggtgcagaagttaaacctgttccagcagttccctataaaaacccaaataactatgtaaaaatgtcaggtaaattagcatcaacaatagaaaatgctatttgggcaaatcagtttgataatttggcaaatagaatcgctcattatgaaacaaccggaccggaaatttgggaacaaactgatggaaaagtagatgcttgggtggctgctactggtacgggtggaacttttgctggtgtgtcattatttttaaaagaaaaaaatccgcaaattaaaactgttttagcagaccccatgggaagtggtctttatagttatgtgaaaactggagaaatttctagtgagggtaattctattactgagggtattggtaatagtcgaataactaaaaatatggaaaatgttatgattgatgatgcgattcgagttgatgataaagaggcggtaagagtagtttatcaactattaagaaaagacggtttatttatgggtggttctgtaggaattaatgttggtgcagcagtagctttagcaaaacaaatgggtcctggtcatactattgttactgtgttatgtgatagtggaactcgttatcaatcaaaattatttaatcgtgagtggttagctactaaaaatttattgccagatgaaagataa

SEQ ID NO: 39893 - protein, 326 aa, Trichodesmium erythraeum IMS101
MDIKPGFIGTVGNTPLIRLNSFSEETGCEILGKAEFLNPGGSVKDRAALYIIKDAEEKGLLKPGGTVVEGTAGNTGIGLAHICNAKGYKCLIVIPETQSVEKMDALRTLGAEVKPVPAVPYKNPNNYVKMSGKLASTIENAIWANQFDNLANRIAHYETTGPEIWEQTDGKVDAWVAATGTGGTFAGVSLFLKEKNPQIKTVLADPMGSGLYSYVKTGEISSEGNSITEGIGNSRITKNMENVMIDDAIRVDDKEAVRVVYQLLRKDGLFMGGSVGINVGAAVALAKQMGPGHTIVTVLCDSGTRYQSKLFNREWLATKNLLPDER

SEQ ID NO: 39894 - DNA, 1032 bp, Synechococcus sp. CC9311
  CDS (1)..(1032): transl_table=11
gtgccaatgctggcaattaaatttctagaaaataattccagcctcatgtctcgcgtctacgccgataacagccaagccatcggcaacaccccgctcgttcgcctcaaccacgtcaccaagggttgcaaggccaccgttttggccaaaatcgaaggtcgcaaccctgcttacagcgtgaagtgcaggatcggcgccaacatgatttgggacgctgaaaagcgtggtgttctctccgaagggaaaaccatcgtggagcccacctcaggcaatacaggcattgccctggccttcactgccgcggctcgtggttacaagctgatcctcacgatgccggaatcgatgtcgatcgaacgtcgacgggtgatggccgtgcttggcgctgaactgatcctgacggaagccgccaagggcatgcctggcgccatcgctaaggccaaggaaattgcagatagtgatccttccaagtacttcatgcctggacagttcgacaatcccgccaatccagagatccacgaaaagacaacaggtcctgagatctgggatgactgcgatggggcgatcgatgtgctcgtcgccggcgttggcaccggtggaaccattaccggtgtatcgcgttacatcaagcaggaaaaaggtaaggccatcacctcggtagccgttgagccaagccacagccctgtgatcacccaaaccatgaatggtgaagcgctcaagccaggcccacacaagattcaaggcatcggtgctggcttcattccgaacaacctcgacctctctgtggtcgatcgcgttgagcaagtcaccaatgaggagtcgattgaaatggccctacgtctggcccaggaggaaggcctcttagtagggatttcttgtggagcagcaaccgcagcggccattcgccttgcccaacaggatgaatttgctggcaaaacaatcgtggtggttctgcctgacctcgccgagcgttatctgtcctcagtgatgtttgcggacgtgccaacaggcatcatcgaacagcccgttcctgtctga

SEQ ID NO: 39895 - protein, 343 aa, Synechococcus sp. CC9311
MPMLAIKFLENNSSLMSRVYADNSQAIGNTPLVRLNHVTKGCKATVLAKIEGRNPAYSVKCRIGANMIWDAEKRGVLSEGKTIVEPTSGNTGIALAFTAAARGYKLILTMPESMSIERRRVMAVLGAELILTEAAKGMPGAIAKAKEIADSDPSKYFMPGQFDNPANPEIHEKTTGPEIWDDCDGAIDVLVAGVGTGGTITGVSRYIKQEKGKAITSVAVEPSHSPVITQTMNGEALKPGPHKIQGIGAGFIPNNLDLSVVDRVEQVTNEESIEMALRLAQEEGLLVGISCGAATAAAIRLAQQDEFAGKTIVVVLPDLAERYLSSVMFADVPTGIIEQPVPV

SEQ ID NO: 39896 - DNA, 969 bp, Synechococcus sp. CC9311
  CDS (1)..(969): transl_table=11
atgccaattgcatccgatatcaccgctctggtaggtcgcactcccttagtgcgccttaaccagctccctcagcgaagcggttgtttggctgaattggtggcaaagcttgagagcttcaatcccacagcttccgttaaagatcggattgcaggttcgatggttcaggccgctgaagaggccggcactatttctccagaacgaacagttctcattgagccaacaagtggaaatactggaattgccctagccatggttgctgcagctcgggggtaccggttgatcctcaccatgccagacacgatgagtaccgagcgtcgcgccatgctgagagcctatggagctgagcttcagctcaccccagggaatgaagggatgcagggggcgcttgatttagccgtagagctcgtttcagagatcccgcacgcctatctcctgcaacagtttgataacgctgccaatcctgcggtgcatgccgcgacgacggcagaagagatctggatggatactgatggtcagatcgatgcccttgtggctggtgttgggacaggtggcacgatcacaggctgtgccagggttctcaaacagcgcaatcctgatctgaaagtgattgcggtagaaccggctggaagtccagttttggcgggtggagcccctggcccccaccgcattcagggcattggtgctggttttgttcccgctgtctttgatcaaagcttgattgatgaaatccttggggtaagtgatcaggaagcgatggaagtggggcgccgtttggcccgggaagaaggcctgctctctggggtcagtagtggggctgctgttgctgctgccattcgtattggccaaaggcctgaaatggccgggaaacggatcgttgtgattctcgccagctttggtgagcgctatctgtccacacccatgttcagtgcatcggctgctacaccggcgtggcgggatggccagctttga

SEQ ID NO: 39897 - protein, 322 aa, Synechococcus sp. CC9311
MPIASDITALVGRTPLVRLNQLPQRSGCLAELVAKLESFNPTASVKDRIAGSMVQAAEEAGTISPERTVLIEPTSGNTGIALAMVAAARGYRLILTMPDTMSTERRAMLRAYGAELQLTPGNEGMQGALDLAVELVSEIPHAYLLQQFDNAANPAVHAATTAEEIWMDTDGQIDALVAGVGTGGTITGCARVLKQRNPDLKVIAVEPAGSPVLAGGAPGPHRIQGIGAGFVPAVFDQSLIDEILGVSDQEAMEVGRRLAREEGLLSGVSSGAAVAAAIRIGQRPEMAGKRIVVILASFGERYLSTPMFSASAATPAWRDGQL

SEQ ID NO: 39898 - DNA, 894 bp, Alkalilimnicola ehrlichei MLHE-1
  CDS (1)..(894): transl_table=11
atgtcataccccaccgtcgaggcctttgtaggcaacaccccgctggtgcgcctccagcgcatggtgccacccgagcgcaacaaccggatcctggccaagctggagggcaacaaccccgccggctcggtgaaggaccggccagctgtgcacatgatccgtcgcgccgaggaacggggccggatccggcccggcgacaccctgatcgaagccaccagtggcaataccggcatcgcgctggccatggcggccgccatcaagggctaccgcatggtcctgatcatgccggagaacatgagcaccgagcggcgtgcctccatggccgcctacggcgcggagctggtgctggtcagccaggaggagggcatggagggcgcacgggatctggccgcccgcatggccgaagagggccgggggctggtcctggaccagttcgccaaccctgataactcggccgcccactacgagagcaccggcccggagatctggcgcgacaccgagggcacgatcacccacttcgtcagctccatggggaccaccggcaccatcatgggctgctcccggttctttaaggagcagtcggaggcggtgcagatcgtcggtgtgcagccggaggacggctccagcatccccggtatccggcgctggccggaggcctacctgccgaagatctacgagccggcccgcgtggaccgcatcctcgatgtcagcagcgacgacgccatcaccaccacccgccggctggcggcggaggaggggatcatggcgggcatgtcgtccggtggttgcctgcacgcggccctgcgtctggagcgggaggtggagaacgccaccatcgtggtcatcatctgtgaccggggcgaccgttacctctccaccgggctgttcgaaggctga

SEQ ID NO: 39899 - protein, 297 aa, Alkalilimnicola ehrlichei MLHE-1
MSYPTVEAFVGNTPLVRLQRMVPPERNNRILAKLEGNNPAGSVKDRPAVHMIRRAEERGRIRPGDTLIEATSGNTGIALAMAAAIKGYRMVLIMPENMSTERRASMAAYGAELVLVSQEEGMEGARDLAARMAEEGRGLVLDQFANPDNSAAHYESTGPEIWRDTEGTITHFVSSMGTTGTIMGCSRFFKEQSEAVQIVGVQPEDGSSIPGIRRWPEAYLPKIYEPARVDRILDVSSDDAITTTRRLAAEEGIMAGMSSGGCLHAALRLEREVENATIVVIICDRGDRYLSTGLFEG

SEQ ID NO: 39900 - DNA, 1017 bp, Alkalilimnicola ehrlichei MLHE-1
  CDS (1)..(1017): transl_table=11
atgacagtgtgcgacggttttgccggggcggtgggcaacaccccactgatacgcctcaagcggctttccgaggagaccggctgcgagatcctgggcaaggccgagttcatgaacccgggcgggtcggtgaaggaccgcgccgcgctctacatcctcctggatgccgaacggcgcggcctgctgcgccccggtggcacggtggtggaggggaccgcgggcaataccgggatcggcttggcccacctgtgcaacgcccgcggctatcgctgtgtgatcgtcattcccgaaacccagacccaggagaagatcgacctcctgcgcaccctgggcgcggcggtgcacaccgtaccggcccggccctacaaggacccgaacaactaccagaaggtggccggccgcatggccgaggagatggacaacgcgatctgggccaaccagttcgacaacaccgccaaccgccaggcccactacgagaccaccgggcccgagatctggtcgcagaccggagggcggctggacggtttcgttgcggccaccggcaccggcggcaccctggccggcgtagcccgctacctcaaggcgcagtcgccggatgtgcgctgcgtactggccgacccgcacggcagcgcgctctacggctacgtcaagaccggtacgccggaggtgaccggcagcggctccatcaccgagggcatcggcagcacgcgggtcaccgccaatctggaggggacgcccatcgacgacgcctacagcatccccgaccaggaggccgtggatcgggtctatcaggcgctctaccaggaggggctgttcctgggcagctcctccggcatcaacctggctgccgctgtgcgcctggcccgcgagctggggccggggcacaccatcgccaccatcctctgcgacgggggcgcgcgctactactcgcggctgttcaacccggaatggttgcgcgagaaggggctgaccccggagactaaccgggaaacaggcagggatgacccggaggccccttga

SEQ ID NO: 39901 - protein, 338 aa, Alkalilimnicola ehrlichei MLHE-1
MTVCDGFAGAVGNTPLIRLKRLSEETGCEILGKAEFMNPGGSVKDRAALYILLDAERRGLLRPGGTVVEGTAGNTGIGLAHLCNARGYRCVIVIPETQTQEKIDLLRTLGAAVHTVPARPYKDPNNYQKVAGRMAEEMDNAIWANQFDNTANRQAHYETTGPEIWSQTGGRLDGFVAATGTGGTLAGVARYLKAQSPDVRCVLADPHGSALYGYVKTGTPEVTGSGSITEGIGSTRVTANLEGTPIDDAYSIPDQEAVDRVYQALYQEGLFLGSSSGINLAAAVRLARELGPGHTIATILCDGGARYYSRLFNPEWLREKGLTPETNRETGRDDPEAP

SEQ ID NO: 39902 - DNA, 984 bp, Hyphomonas neptunium ATCC 15444
  CDS (1)..(984): transl_table=11
atggccggaacagtgaaactcgagggcggcgtaacgctcgatggaccgcgcggccggatttacggctcgatccttgaaacggttggcgcgaccccgctcgttcgcgccgaaaagttcgccaaggccgagggcgttgacgccgacatcctcttcaagctggaattcttcaatcccctcgccagcgtcaaggaccggatcggcctcgcgatgatcctgggactggaggccgaaggcaagctgaagcccggcggtgtcctgattgagcctacctcgggcaataccggcattggcctcgccttcgtggcggccgccaaaggctaccgcctgatcctcaccatgccggagtccatgtctgtggagcggcgcaagatgctggcctatctcggcgccgagctggtgctgacgccgaaagaaaaaggcatgggcggggccatcgcgcgggccaatgaactgctcgccgaaatccctggcgccgtcagccccagccagttcgacaatccggcaaacccggcgatccatgagaagacaacggcagaggaaatctggtccgataccgccggcgctgtcgacgccattgtttcgggcatcggcacgggtggcacgttcacgggcgttgggcgcgtgctgaagccccgcaagccgagcctgaagatgtttgcgattgagcctgaagcctccccggtcttgtccggcggcgcacctggcccccatatgatccagggcatcggcgccggctttgtgccgggtaacgcggatacgagcctgattgacgagatcgtgaaagtctccaatgaggaatcctttgcgatggcccgtaagctcgccaagaccgaaggcattcccggtggtatttcttccggcgcggcagccgcggcagccgttcgcatcggcaagcggccggagatggcgggcaagacaatcgtggtcatcctggcaagctttgccgagcgctatctctcaacggctctgtttgacggcgtctga

SEQ ID NO: 39903 - protein, 327 aa, Hyphomonas neptunium ATCC 15444
MAGTVKLEGGVTLDGPRGRIYGSILETVGATPLVRAEKFAKAEGVDADILFKLEFFNPLASVKDRIGLAMILGLEAEGKLKPGGVLIEPTSGNTGIGLAFVAAAKGYRLILTMPESMSVERRKMLAYLGAELVLTPKEKGMGGAIARANELLAEIPGAVSPSQFDNPANPAIHEKTTAEEIWSDTAGAVDAIVSGIGTGGTFTGVGRVLKPRKPSLKMFAIEPEASPVLSGGAPGPHMIQGIGAGFVPGNADTSLIDEIVKVSNEESFAMARKLAKTEGIPGGISSGAAAAAAVRIGKRPEMAGKTIVVILASFAERYLSTALFDGV

SEQ ID NO: 39904 - DNA, 1074 bp, Hyphomonas neptunium ATCC 15444
  CDS (1)..(1074): transl_table=11
atgcctcagcccgcttccgctataacgccgcccgccgtttcgtccctcccttcggcgcgccagtgccaggaggcgcggctgaaggcgctctctgccctcatcggacgcacgccgatgctgtccattcggttacgcttcaggggccgggagcgtgttatccacgcaaaggcggagcattataatctgacgggctcgatcaaggatcgcatggcgctttcgatccttgcgtgcgcctatcgttcgggcgcccttcagcccggagacacgattgccgaagccaccagcggtaatgccggtattgccctcactgcgctgggccgcgcgcttggccatccggttgagattttcatgccagactggatgagcggtgaacgcaagaaccttctgcgcagccttggggcgaacctgaaccttctatcgagagaggcgggcggatttctgggcgccatcgccgcgaccgaaacccttgctgccagcaggaaggatgtatttctgccctgccagttttccaatggcgacaattccgccgcgcacgcccagaccactgcacgtgaactgatcaatcagctggccacgcttgatgcccgaccggatgcctttgtagccggtgttggaacaggtggcaccgtcatgggtgtcggacgtgcgttcaaatcggcatttccggacgtaaaggttcaccccctcgagccccaggaatctcccactttgtcgaccggctacaaggtgggccaacatcgcatccaggggatatccgatgactttatcccggccctcgtaaagctggaacaagtcgacgaggttattgccgtttcagacggggacgccatccggatggcgcaaaggctcgctcgtgagctcggcctgggagttggcatttcttcaggcgccaacctgatcggcgcgctgattgccgcagagaggctgggagacacagcttgcgtagcgacggtcttctgcgacgataacaagaagtatctctccggcgcactggcatgcgaagagccgcataaggagggccacctcacgccagagattgagttgctggacttcgaggcgacgatctgcggctag

SEQ ID NO: 39905 - protein, 357 aa, Hyphomonas neptunium ATCC 15444
MPQPASAITPPAVSSLPSARQCQEARLKALSALIGRTPMLSIRLRFRGRERVIHAKAEHYNLTGSIKDRMALSILACAYRSGALQPGDTIAEATSGNAGIALTALGRALGHPVEIFMPDWMSGERKNLLRSLGANLNLLSREAGGFLGAIAATETLAASRKDVFLPCQFSNGDNSAAHAQTTARELINQLATLDARPDAFVAGVGTGGTVMGVGRAFKSAFPDVKVHPLEPQESPTLSTGYKVGQHRIQGISDDFIPALVKLEQVDEVIAVSDGDAIRMAQRLARELGLGVGISSGANLIGALIAAERLGDTACVATVFCDDNKKYLSGALACEEPHKEGHLTPEIELLDFEATICG

SEQ ID NO: 39906 - DNA, 1008 bp, Hyphomonas neptunium ATCC 15444
  CDS (1)..(1008): transl_table=11
atgaccattcacaggtccgttatcgacctcatcggcaatacgccgctgctccggctcaatcgtgtgtcagatgagaccggatgcgagatcctgggcaagtgcgagtttctcaatcccggccagtcggtgaaggatcgcccggcgctgggcatcatccgtgaggccgaagagtccggcgcgctgaagcccggcggcaccatcgtggaaggcaccgccggcaataccggcattggcctggcgctggtcggcaaggcgctgggttaccgggtggtgatcgtcatgccgcgcacacagagccaggagaagaaggacgcgatccgccttctgggcgctgagctgatcgaggtggacgcggtgccctacgccaaccccaacaactatgtgcgctattccgggcgcctggccgaggagctggccgcgagcgagcccaatggcgcgatctgggcaaaccagttcgacaaccaggccaaccgccgcgcgcactacaacaccaccgcgaaggaaatctgggagcagacgagcggcaaggtggacgggttcatctgcgcggtgggctccggcggcacgctgggcggggtggcgctgggcctgaaggagcgcaacccgaagatcaccatcggcctggccgaccccggcggcgcggcgctctattcctattacacgaccggtgagctgaaagccgaaggcacttcgatcaccgagggcattggccaggggcgcattacggcaaacctggaaggcattccggtcgacaaggcgtggcgcatcaatgatgatgaggcgctgggctatatcttcggcctggtcgaggatgaggggctgtgccttggcggatcatcgggcgtgaatgtggcgggggctgtgcatctcgcccgtgagctggggccggggcacacgatcgtcacgatcctctgtgactacggcaaccggtatcagacgaaattgttcaacccggaattcctgcgctccaaaggcctgccggttccgtcctggatggaggcgaaataa

SEQ ID NO: 39907 - protein, 335 aa, Hyphomonas neptunium ATCC 15444
MTIHRSVIDLIGNTPLLRLNRVSDETGCEILGKCEFLNPGQSVKDRPALGIIREAEESGALKPGGTIVEGTAGNTGIGLALVGKALGYRVVIVMPRTQSQEKKDAIRLLGAELIEVDAVPYANPNNYVRYSGRLAEELAASEPNGAIWANQFDNQANRRAHYNTTAKEIWEQTSGKVDGFICAVGSGGTLGGVALGLKERNPKITIGLADPGGAALYSYYTTGELKAEGTSITEGIGQGRITANLEGIPVDKAWRINDDEALGYIFGLVEDEGLCLGGSSGVNVAGAVHLARELGPGHTIVTILCDYGNRYQTKLFNPEFLRSKGLPVPSWMEAK

SEQ ID NO: 39908 - DNA, 963 bp, Rhizobium leguminosarum bv. viciae 3841
  CDS (1)..(963): transl_table=11
atgtcgcacaagcccggccgcggccgcatctattcctcgatcaccgagaccatcggcgacacgccgctcgtgcgcttcgacaagctggcgcgggaaaaaggcgtcgtggcgaacctgatcggcaagctcgaattcttcaacccgatcgcctccgtgaaggaccgtatcggcgtcgcgatgatcgagggtctcgaagcgcaaggcaagatcacccccggcaagacggtgctgatcgagccgacctccggtaacaccggcatcgcgctcgcctttgccgccgccgccaagggttatcggctgatcctcaccatgccggagacgatgtcggtcgagcgccgcaagatgctggcgctgctcggcgccgaactggtgctgaccgagggcccgaagggcatgaagggcgccatcgccaaggccgaggaactggcctcatcgcttgacgatgccgtcattccgcagcagttcgagaaccctgataatccagagatccaccgcaagacgacggccgaggaaatctggaacgataccgacggaacggtcgatatcgtcgtctccggcatcggcaccggcggcacgatcaccggcgtcggacaggtgctgaagagccgcaagcccgagatcaagatcatcgccgtcgaaccggccgattcgccgatcctctccggcggcaatcccggcccgcacaagatccagggcatcggcgccggtttcgcgccgaagatcctcgataccggcatctatgacgaggtcgtcacggtgaccaatgacgaggccttcgaacaagcgcgcctggtcgcccggcttgaaggcgtgccggtcggcatctcctcgggtgctgcgctgaccgccgcaatcaaggtcggcatccgtcccgagaatgccggcaagaacatcgtcatcatcatcccctccttcgccgaacgctatctttcgacggcgctgtttgaggggctggggagctga

SEQ ID NO: 39909 - protein, 320 aa, Rhizobium leguminosarum bv. viciae 3841
MSHKPGRGRIYSSITETIGDTPLVRFDKLAREKGVVANLIGKLEFFNPIASVKDRIGVAMIEGLEAQGKITPGKTVLIEPTSGNTGIALAFAAAAKGYRLILTMPETMSVERRKMLALLGAELVLTEGPKGMKGAIAKAEELASSLDDAVIPQQFENPDNPEIHRKTTAEEIWNDTDGTVDIVVSGIGTGGTITGVGQVLKSRKPEIKIIAVEPADSPILSGGNPGPHKIQGIGAGFAPKILDTGIYDEVVTVTNDEAFEQARLVARLEGVPVGISSGAALTAAIKVGIRPENAGKNIVIIIPSFAERYLSTALFEGLGS

SEQ ID NO: 39910 - DNA, 1038 bp, Rhizobium leguminosarum bv. viciae 3841
  CDS (1)..(1038): transl_table=11
atgaccttccacccctccgtccttgaagccatcggcaacacgcccctgatcaaactcaagggtgcctcagaggcgaccggctgcaccattctcggcaaggcggagttcctgaaccccggccagtcggtcaaggatcgcgccgcgctctacatcatccgcgacgcagagcggaagggattgcttcgtccgggcggcgtcatcgtcgagggcacggccggcaataccggcatcgggctgacgctggtcgccaaggcgctcggttatcgcaccgtcatcgtcatcccggaaacgcagagccaggaaaagaaggacgcgctgaagctgctcggcgccgaactcgtcgaagtgcccgccgttccctacaagaacccgaacaactacgtgaaggtgtccgggcggttggcagagcaattggcgaagaccgagccgaacggggcgatctgggcaaaccagttcgacaacgtcgccaaccgccaggcgcatgtcgaaacgacggcaaaagaaatctggcaagacaccgacggcaaggtcgacggctttatctgctcggtcggttccggcggcacactggcaggggtggctgcgggcctcaaggctttcaaggcagacgtcaagatcggcatcgccgatcccgacggcgccgcactctatgaattctaccagaacggcgcgctgaaatccgagggatcctcgatcaccgagggcatcggccagggccgcatcaccgccaatctcgagggtttcacgcctgactatgcctatcggattccggatgccgaagcgcttccctatctcttcgacctcgtcgagaacgagggcctctgcctcggcggctcgacggcgatcaacattgccggcgcggtcaacctcgcccgggatctcggacctggtcacacggtggtgacgatcctctgcgattacggcaaccgctatcagtcgaagctcttcaacccggatttcctgacgtcgaaggggctgcccgttccgggctggatggccaaatcatcagatatccacgttccctacgagcccgtgtga

SEQ ID NO: 39911 - protein, 345 aa, Rhizobium leguminosarum bv. viciae 3841
MTFHPSVLEAIGNTPLIKLKGASEATGCTILGKAEFLNPGQSVKDRAALYIIRDAERKGLLRPGGVIVEGTAGNTGIGLTLVAKALGYRTVIVIPETQSQEKKDALKLLGAELVEVPAVPYKNPNNYVKVSGRLAEQLAKTEPNGAIWANQFDNVANRQAHVETTAKEIWQDTDGKVDGFICSVGSGGTLAGVAAGLKAFKADVKIGIADPDGAALYEFYQNGALKSEGSSITEGIGQGRITANLEGFTPDYAYRIPDAEALPYLFDLVENEGLCLGGSTAINIAGAVNLARDLGPGHTVVTILCDYGNRYQSKLFNPDFLTSKGLPVPGWMAKSSDIHVPYEPV

SEQ ID NO: 39912 - DNA, 975 bp, Pseudomonas aeruginosa UCBPP-PA14
  CDS (1)..(975): transl_table=11
atgagccgcatcttcgcagacaacgcgcagtccatcggcaacacgccgctggtccagatcaaccgcatcgccccgcgcggcgtcaccatcctggccaagatcgaagggcgcaaccccggctattcggtgaagtgccggatcggcgcgaacatgatctgggatgccgaagccagcggcagactgaagtccggcatgaccctggtcgagccgacctccggcaacaccggcatcggcctcgccttcgtcgccgccgcacgcggctacaaactgatcctgaccatgccggcgtcgatgagcctggagcgacgcaaggtgctcaaggcgctgggagcggagctggtcctgaccgaaccggcgaagggcatgaagggtgcgatccagaaggccgaggaactggtcgcgggggatcccgggaagtacttcatgccgcagcagttcgacaacccggccaacccggcgatccatgagaagaccaccggcccggagatctggaacgataccgagggcgcggtggacgtgctggtctccggggtcggcaccggcggcaccctcaccggcgtctcgcgctacatcaagaacacccggggcaagccgatcctcgccgtggcggtggagccggtgacctcgccggtgatcagccagaccctcgccggcgaggaggtcaagcccgccccgcacaagatccagggcatcggcgccggcttcgtgccgaagaacctcgacctgtcgttggtcgaccgggtcgagaagatcggcgacgacgaagcgaagaacatggcgctgcgcctgatgcaggaagaaggcatcctctgcggcatctcctccggcgcggcgatggccgccgcggtgcgcctggccgaggagccgaacatgcagggcaagaccatcgtggtgatcctccccgattccggcgagcgctatctttcgagcatgctcttcgacggcctgttcagcgaacaggaactgacccagtaa

SEQ ID NO: 39913 - protein, 324 aa, Pseudomonas aeruginosa UCBPP-PA14
MSRIFADNAQSIGNTPLVQINRIAPRGVTILAKIEGRNPGYSVKCRIGANMIWDAEASGRLKSGMTLVEPTSGNTGIGLAFVAAARGYKLILTMPASMSLERRKVLKALGAELVLTEPAKGMKGAIQKAEELVAGDPGKYFMPQQFDNPANPAIHEKTTGPEIWNDTEGAVDVLVSGVGTGGTLTGVSRYIKNTRGKPILAVAVEPVTSPVISQTLAGEEVKPAPHKIQGIGAGFVPKNLDLSLVDRVEKIGDDEAKNMALRLMQEEGILCGISSGAAMAAAVRLAEEPNMQGKTIVVILPDSGERYLSSMLFDGLFSEQELTQ

SEQ ID NO: 39914 - DNA, 912 bp, Oenococcus oeni PSU-1
  CDS (1)..(912): transl_table=11
atgttaattaataatctttaccagctaatcggcaagaccccactactgcgcctgaatatcgacgttccaaaccgtagtcgaatttatgccaaattggaaatgttcaatcccggcggtagtatcaaggaccgactgggaattgctttgatcgcttatggacggaagatcggcgccgtcaaagaaggcacaacaattatcgaaccaaccgccggaaacaccgggatcggtcttgctttggcagcccaacaatatcacttgccggtcaaattgattgtgccagaaaaattcagttttgaaaagcaaaccttgatgcgggccttaggggctgaagtgatcaatacaccggctgatgatgggatcaaaggggcgattgccaaagcccaatccttggcaaagacaatcaaaaattcttatgttccattacagtttcaaaatccagccaaccccgatatctactatcgaaccctgggtccggaaattttgcaggatttgtccgggcagaaaatcgatgcttttgttgccggttccggaagcggtggtacctttgtcggcacaacaaaattcctgcaggaacattatccgaaaatgcaggccgtgactgtcgaaccggaaggttcaattctaaacgggggaccagaacatccccaccgaatcgagggaatcggcgttgaatttgttccgcctttcttcgatcagattcgtgtggaccaggttaaaacaatcagtgacgatcgggcttttgaatatgttaaatggttggctgcgcacgtcggcctgttcgccggcagttcaagtggcgctgctttagcagcaagtttacagctggcaaaggagttgccgtccgattcaaccgttgtgactgtttttccggattcaagcgaacgttatttaagtaaaggtatctacgactaa

SEQ ID NO: 39915 - protein, 303 aa, Oenococcus oeni PSU-1
MLINNLYQLIGKTPLLRLNIDVPNRSRIYAKLEMFNPGGSIKDRLGIALIAYGRKIGAVKEGTTIIEPTAGNTGIGLALAAQQYHLPVKLIVPEKFSFEKQTLMRALGAEVINTPADDGIKGAIAKAQSLAKTIKNSYVPLQFQNPANPDIYYRTLGPEILQDLSGQKIDAFVAGSGSGGTFVGTTKFLQEHYPKMQAVTVEPEGSILNGGPEHPHRIEGIGVEFVPPFFDQIRVDQVKTISDDRAFEYVKWLAAHVGLFAGSSSGAALAASLQLAKELPSDSTVVTVFPDSSERYLSKGIYD

SEQ ID NO: 39916 - DNA, 915 bp, Leuconostoc mesenteroides subsp. mesenteroides ATCC 8293
  CDS (1)..(915): transl_table=11
atgctaatcaaaaacatacatcaattaattggccaaacaccgttaattgaactgcaaatacctgttccaaaccaaagtcgcatttttgcaaaactggagatgttcaatcctggtggtagcattaaagaccgtttaggacaattcttaatatcagatgcttggcagcgaaatctaattaatcaaaattcaacgattattgaaccgactgccggaaatactggtattggcttggcattagctgcgcaacaatataaattaccaaccattcttgttgtacctgagaaattcagcgctgaaaaacagcaactcatgaaagcattgggcgcaacaatcatcaacacaccttctaacgaaggtattaaaggtgccatttccaaagcaaaatcgatagcagcggaaattgaaaacagctacttgccaatgcaatttgctaatcctgctaatcctgaaacatattacaaaacgctagcaccagaaatcgttacagatttgaaaaacgaaaagattgatgcttttgttgctggtgctggtagtggtggaacttttgctggaattgccaaatatctgagtgaatatgatgcaactataaaaaatattgttgtagaacccgaaggatctattttaaatggtggcccagcacatgctcaccgtacagaaggtattggtgttgaatttgtaccaccattcttcgaatcaattcacattgacaaaacattaactattagcgatgacaatgcctttcagcaagttcgatatgctgccgagaacctaggactttttatcggtagttcaagtggcgcggccttggctgctagcctacagatggcagaaactttgccgccacaaagtaatattgtcacgatattcccagacagcagcgaacgttacatgagcacaaacatttatggaaactga

SEQ ID NO: 39917 - protein, 304 aa, Leuconostoc mesenteroides subsp. mesenteroides ATCC 8293
MLIKNIHQLIGQTPLIELQIPVPNQSRIFAKLEMFNPGGSIKDRLGQFLISDAWQRNLINQNSTIIEPTAGNTGIGLALAAQQYKLPTILVVPEKFSAEKQQLMKALGATIINTPSNEGIKGAISKAKSIAAEIENSYLPMQFANPANPETYYKTLAPEIVTDLKNEKIDAFVAGAGSGGTFAGIAKYLSEYDATIKNIVVEPEGSILNGGPAHAHRTEGIGVEFVPPFFESIHIDKTLTISDDNAFQQVRYAAENLGLFIGSSSGAALAASLQMAETLPPQSNIVTIFPDSSERYMSTNIYGN

SEQ ID NO: 39918 - DNA, 960 bp, Solibacter usitatus Ellin6076
  CDS (1)..(960): transl_table=11
ttgcgcgtctacgacgacaattcgctcagcattggccgcaccccgctggttcgtctgaaccgcgtcatcgatggcggaaaagccattgttctcgccaagatcgaaggtcgcaacccggcctacagcgtcaaatgccgcatcggcgccgccatggtctgggatgccgaaaaacgcggcgttctccacgccggcaaagagctggtggaacccacgagcggcaacaccggcattgctctcgccttcgtcgccgccgcccgcggctaccccatccacctcaccatgcccgaaaccatgtcggtggagcggcgcaaggtactgaaagccctcggcgccaacctcattctgacccccggctccgacggcatggccggctctatcgccaaggcagaggagatggtggccggcgatccccgccgttatattctcctgcaacaattcaaaaatcccgccaaccctgaaatccatttccgcactaccggacccgaaatctgggaagacaccgaaggtaccatcgacgtcctcgtctccggcatcggcaccggcggcaccatcagcggcgtctcccgttacataaagaaagatcgcggacgcaagatactcagcgtgggagtagaaccattcagcagtcaggtacttacccagcacatggcgggtaagcccctgaaacccggcccccacaagattcaaggcatcggcgcaggcttcattccggatacgctggatttgactatggtggaccgcgtcgagctgatcagcaacgaggaatccatcgaaatggcacgccgcctcgctaaggaggaaggtatcttgagtggtatctcctgcggcgccgccgccgcggtcgccgttcgccttggcaagctgccggagttcgccggcaaagtgatcgtcaccgtactgccagacgccgcggaacgttatctgagcacgacgttatttgaaggtatgttcgacgagtga

SEQ ID NO: 39919 - protein, 319 aa, Solibacter usitatus Ellin6076
MRVYDDNSLSIGRTPLVRLNRVIDGGKAIVLAKIEGRNPAYSVKCRIGAAMVWDAEKRGVLHAGKELVEPTSGNTGIALAFVAAARGYPIHLTMPETMSVERRKVLKALGANLILTPGSDGMAGSIAKAEEMVAGDPRRYILLQQFKNPANPEIHFRTTGPEIWEDTEGTIDVLVSGIGTGGTISGVSRYIKKDRGRKILSVGVEPFSSQVLTQHMAGKPLKPGPHKIQGIGAGFIPDTLDLTMVDRVELISNEESIEMARRLAKEEGILSGISCGAAAAVAVRLGKLPEFAGKVIVTVLPDAAERYLSTTLFEGMFDE

SEQ ID NO: 39920 - DNA, 891 bp, Magnetococcus sp. MC-1
  CDS (1)..(891): transl_table=11
atggccaccttggaatcattgatcggcaacacacctttggtagatcttgatcgtgtggtcaaggggtgtgtcgagggggttaagctgttggctaaggtggagggtaataatccgggggggtcggtcaaggatcgtgccgcctatggcatgttcatgggggcggagcagcggggtgtgctcaaccgggagacccgtatttttgaggccaccagtggcaataccggcatcgccttggcgatgatggcggcacgtcgcgggtaccagcttaccttggtcatgcccgagacgatgaccctggagcgccgcgccaccatggcggcttatggtgcggattttctgctggtcacggcggagcagggtatggagggggccattgatctggttaatgccaaggtcgccaatggcgaggggattaagctggaccaattttccaatgcggataattggggtgcccactaccgcaccacgggtccggaaatctggcgcgatacccaggggcagattacccattttgtgagcgccatggggaccacagggaccatcatgggggtttcgcgggccttaaaagagcgtaacccgcaaattcagattatcggtgtgcagccagatgaggggtcgcaaattgcgggcattcgtcgctggccacaagcctatatgccaaaaatctttgagccatcccgggtggataccattttggacgtcaacaccgccgaagcgcgagagatgacccgccgtttggcgcgggatgaagggcttttttgcggcctctcagcgggtggggcggtggcggcggcgctcaaggtttgccaggggttaagccagcccggcacggtggtggtgattattccagatcggggggatcgctacctttcgaccgatctgtttctctga

SEQ ID NO: 39921 - protein, 296 aa, Magnetococcus sp. MC-1
MATLESLIGNTPLVDLDRVVKGCVEGVKLLAKVEGNNPGGSVKDRAAYGMFMGAEQRGVLNRETRIFEATSGNTGIALAMMAARRGYQLTLVMPETMTLERRATMAAYGADFLLVTAEQGMEGAIDLVNAKVANGEGIKLDQFSNADNWGAHYRTTGPEIWRDTQGQITHFVSAMGTTGTIMGVSRALKERNPQIQIIGVQPDEGSQIAGIRRWPQAYMPKIFEPSRVDTILDVNTAEAREMTRRLARDEGLFCGLSAGGAVAAALKVCQGLSQPGTVVVIIPDRGDRYLSTDLFL

SEQ ID NO: 39922 - DNA, 936 bp, Magnetococcus sp. MC-1
  CDS (1)..(936): transl_table=11
atgggtcgaatctataacgatatcaccgaaaccatcggcaacacgccgctggtgcgcctgaatcgcatcagccaagggttggatgctgagattctggttaaattggagtatttcaaccccatggcttcgctcaaggaccgtattggtctggcgatgatccaagaggccgaggctaaggggctgatcactaaagatacgttgattattgagccaacctcgggcaataccggcatcgccctggcctttgtctgtgccgcgcggggttatcaattggtattaacgatgccagagtccatgtccatggagcggcgcaagctgtttgagttgctgggcgcgcaggtggtgttaacctcggccatggacggcatgaagggagccattgataaagcccaggagctgctggcggagaccgacaaagggtttatgcccaaccagtttgataatggcgccaacccagcggtccatgagaccaccaccgctgaggagatctggcgggataccgatggtcaattggacctgtttttggccggcgtgggcaccggtggttgtttaaccggggtggcgcgcacgctgaaaaaacgcataccccagttacgggtggtggcggtggagcccgaatcctctccggtgctctctgggggcatgcccggcccgcacaaaatccagggtattggggccggttttgtgccacgggtgctggatacccagttgatggatgaggtggtgcgggtgggggatcaagaagcctttgaagtggcccggcgcatggcccgagaagagggtatcgcctgtggtatctcctcaggggcggtggtggcggcggcgctgcaactggcccgtacaccccgctacgcaggcaaacggtttgtgctggtcttagccagctttgcggaacgctatctctccaccgagctgtttccctcacagctaccctaa

SEQ ID NO: 39923 - protein, 311 aa, Magnetococcus sp. MC-1
MGRIYNDITETIGNTPLVRLNRISQGLDAEILVKLEYFNPMASLKDRIGLAMIQEAEAKGLITKDTLIIEPTSGNTGIALAFVCAARGYQLVLTMPESMSMERRKLFELLGAQVVLTSAMDGMKGAIDKAQELLAETDKGFMPNQFDNGANPAVHETTTAEEIWRDTDGQLDLFLAGVGTGGCLTGVARTLKKRIPQLRVVAVEPESSPVLSGGMPGPHKIQGIGAGFVPRVLDTQLMDEVVRVGDQEAFEVARRMAREEGIACGISSGAVVAAALQLARTPRYAGKRFVLVLASFAERYLSTELFPSQLP

SEQ ID NO: 39924 - DNA, 879 bp, Shewanella sp. ANA-3
  CDS (1)..(879): transl_table=11
gtgtctgactttccgactattgaagcctgtattgggcaaactccgctggtacgtttgcagcggcttgattgtggtagctcaacggtattgttaaagctggaggggaataaccctgctggctcggtaaaggatcgcgcggcgctgaatatgattattcaggcggagcttcgccaagagatagcccccggggataccctgattgaagccaccagtggcaatacgggcatcgccttagccatggctgcggcgattaaaggctacaagatgatcctgatcatgccgtcaaattcgacccaagagcgtaaggatgccatgcaggcctatggcgccgagttgctgctggtggacaatatggaagccgcgcgggatttagccttagatcttcaggcacaaggcaaaggtaaggtgctggatcagttcaataatcaagataatgccaacgcccattttcagactactggccccgaaatttggcagcagagccaaggtaagatcactcactttgtctctagcatgggtaccacaggcactattatgggcgtgtctaaatacttaaagagtcgtaatcccgatatcactattgtcgggctacaacccgccgatggcagttcgattccggggattcgccgctggccgcaggaatatctaccgggtattttcgatgctgcccgtgtcgatgccgtgatggacattgaggagcaagacgccaaagctatggcgagaaccttggcccgtgaagaaggtatttgtgctggcgtgagttctggcggcgcggtatttgcggcgctcgagattgcgaggcagaatccggggtccgttgtagtcgcaattgtgtgtgataggggcgaccgttatctgtcatcagggttattttcttaa

SEQ ID NO: 39925 - protein, 292 aa, Shewanella sp. ANA-3
MSDFPTIEACIGQTPLVRLQRLDCGSSTVLLKLEGNNPAGSVKDRAALNMIIQAELRQEIAPGDTLIEATSGNTGIALAMAAAIKGYKMILIMPSNSTQERKDAMQAYGAELLLVDNMEAARDLALDLQAQGKGKVLDQFNNQDNANAHFQTTGPEIWQQSQGKITHFVSSMGTTGTIMGVSKYLKSRNPDITIVGLQPADGSSIPGIRRWPQEYLPGIFDAARVDAVMDIEEQDAKAMARTLAREEGICAGVSSGGAVFAALEIARQNPGSVVVAIVCDRGDRYLSSGLFS

SEQ ID NO: 39926 - DNA, 1407 bp, Mycobacterium avium 104
  CDS (1)..(1407): transl_table=11
atgcggatcgcgcagcacatcagtgacctcatcggcggcacgccgctggtgcggctgaactccgtcgtgcccgacggcgcgggcatcgtggcggccaaggtcgaatacctcaaccccggcggcagctccaaggaccggatcgcggtcaggatgatcgacgccgccgaggccagcggggcgctgaagcccggcggcaccatcgtcgaacccacctcgggcaacaccggcgtggggctggcgctggtggcccagcagcgcggctacaagtgcgtgttcgtctgcccggacaaggtcggtgaggacaagcgcaacgtgttgatggcgtacggcgccgaggtggtggtgtgcccgacggcggtgccgcccgagcatccggacagctactacagcgtctcggaccggctggtcaccgagatcgagggcgcctggaagcccgaccagtacgccaacccggagggcccggccagccactacgccaccaccggcccggagatctgggccgacaccgacggcaaggtcacccatttcgtcgccggcatcggcaccggcggcaccatcaccggcgcgggccgctacctcaaggaggtgtccggcggccgggtccgcgtcatcggcgccgaccccgagggatcggtgtattccggcggcaccggccggccctatctggtcgagggtgtcggcgaggacttctggccgcaggcctacgaccgcacggtgcccgacgagatcatcgcggtctccgactccgactcgttcaacatgacccggcggctggcccgcgaggaggcgatgctggtcggcgggtcctgcggcatggccgtggtggcggcgctgcgggtggccgagcaggcaggccccgacgcgctggtggtggtgctgctgcccgacggcgggcgcggctacatggcgaagatcttcaacgacgcctggatgtcctcctacgggttcctgcgcacccggctggacgggtcgaccgaccagtcccgcgtcggcgacgtgttgcgccgcaagtccggtgagctgcccgacctggtgcacacccacccgtcggaaaccgtgcgcgacgccatcggcatcctgcgcgagtacggggtgtcccagatgccggtggtcggcgccgagccgccggtgatggccggcgaggtcgccggcagcgtctccgaacgtgagctgctgtcagcggttttcgagggccgggcgaagctggccgacgcggtctcgctgcacatgagcccgccgctgccgatgatcggcgccggcgaatcggtcagcgcggcgggcaaggcgctgcgcgattgggacgccctgatggtggtcgaggagggcaagccggtgggtgtgatcacccgctacgacttgctcggtttcctctccgaggggccccgcggatcgggcgggcggcgctag

SEQ ID NO: 39927 - protein, 468 aa, Mycobacterium avium 104
MRIAQHISDLIGGTPLVRLNSVVPDGAGIVAAKVEYLNPGGSSKDRIAVRMIDAAEASGALKPGGTIVEPTSGNTGVGLALVAQQRGYKCVFVCPDKVGEDKRNVLMAYGAEVVVCPTAVPPEHPDSYYSVSDRLVTEIEGAWKPDQYANPEGPASHYATTGPEIWADTDGKVTHFVAGIGTGGTITGAGRYLKEVSGGRVRVIGADPEGSVYSGGTGRPYLVEGVGEDFWPQAYDRTVPDEIIAVSDSDSFNMTRRLAREEAMLVGGSCGMAVVAALRVAEQAGPDALVVVLLPDGGRGYMAKIFNDAWMSSYGFLRTRLDGSTDQSRVGDVLRRKSGELPDLVHTHPSETVRDAIGILREYGVSQMPVVGAEPPVMAGEVAGSVSERELLSAVFEGRAKLADAVSLHMSPPLPMIGAGESVSAAGKALRDWDALMVVEEGKPVGVITRYDLLGFLSEGPRGSGGRR

SEQ ID NO: 39928 - DNA, 933 bp, Mycobacterium avium 104
  CDS (1)..(933): transl_table=11
atgagcatcgccgagaacgtcacgcagctgatcggaaacaccccgctggtccggttgaaccgggtcaccgaaggtgcggtcgccgacgtcgtcgccaagttggaattcttcaacccgggcaacagcgtgaaggaccgtatcggggtggccatgatcgatgcggccgagcaggcgggcctgatcaaaccggacaccatcattctcgagccgacgagcggcaacaccggtatcgcgctggcgctggtggccgcggcgcgcggctaccgctgcgtgctcaccatgccggagacgatgagcgtggagcggcgaatgttgttgcgcgccttgggcgccgagatcgtgctgacgccgggcgccgacggcatgccgggcgcgatcgccaaggccgaggaattggccaagagcgacgaccggtatttcgtgccgcagcagttcgagaacccggccaacccggcgattcaccgcagcaccaccgcggaggaagtgtggcgcgacaccgacggcaaggtcgacatcttcgtcgccggcgtcggcaccggcggcaccatcaccggtgtcgcccaagtcatcaaggaacgcaagccgtcggcgcagttcatcgccgtggagccggccgcgtcgccggtgttgtccggcggccagaaggggccgcatccgatccagggtctcggcgctgggttcgtgccgccggtgcttgccatggatctggtcgacgaggtcatcgccgtcggcaacgaggagtcgatcgcgctggcccgccggctggccgccgaggaggggctgctggtcggcatctcctcgggggcggcgctggtggccgccctgcaggtggcccgccggcccgagaacgccggcaagctggtggtcgtcgtgctccccgacttcggtgagcggtacctgagcacgccgctgttcgccgacctggccgattag

SEQ ID NO: 39929 - protein, 310 aa, Mycobacterium avium 104
MSIAENVTQLIGNTPLVRLNRVTEGAVADVVAKLEFFNPGNSVKDRIGVAMIDAAEQAGLIKPDTIILEPTSGNTGIALALVAAARGYRCVLTMPETMSVERRMLLRALGAEIVLTPGADGMPGAIAKAEELAKSDDRYFVPQQFENPANPAIHRSTTAEEVWRDTDGKVDIFVAGVGTGGTITGVAQVIKERKPSAQFIAVEPAASPVLSGGQKGPHPIQGLGAGFVPPVLAMDLVDEVIAVGNEESIALARRLAAEEGLLVGISSGAALVAALQVARRPENAGKLVVVVLPDFGERYLSTPLFADLAD

SEQ ID NO: 39930 - DNA, 1392 bp, Mycobacterium smegmatis str. MC2 155
  CDS (1)..(1392): transl_table=11
atgcgcatagccaggcacatcagtgagctcatcggtaacaccccgctggtccagctgaactcggtggtccccgaaggggcaggcctggtggcggcgaaaatcgagtacctcaaccccggcggcagctccaaggaccgcatcgcgctcaagatgatcgaggccgccgaggtcagcggtgagctcaaaccgggcggcaccatcgtcgaacccacctcgggcaacaccggcgtcggcctggccctggtggcccagcagcgcggctacaagtgcgtcttcgtctgccctgacaaggtcagcgaggacaagcggaatgtcctgcgcgcgtacggcgccgaggtcgtggtgtgcccgacggcggttccgccggaccatccggacagctactacagcgtctccaaccgcctggtcaccgagatcgagggcgcctggaagcccgaccagtactccaaccagatgggcccggagagccactacgagaccaccggccccgagatctgggccgacaccgaaggcaagatcacacacttcgtcgcgggtgtgggcaccggcgggaccatcaccggcaccggccgctacctcaaggaggtctcgggcggcaaggtcaaggtcatcggcgccgatcccgagggctcggtgtactcgggcggcacgggccggccctacctcgtcgaaggtgtcggcgaggacttctggcccacggcctacgatccttcggtccccgacgagatcatcgcggtgtccgacgccgactcgttcgagatgacccggcgactcgcacgtgaagaggccctgctggtcggcggatcgtgcggcatggccgtcgtcgccgccatcgaggtggcccgcaaggccgggcccgacgccgtggtcgtggtgctgctgcccgacggtggacgtggttatctgtcaaagattttcaacgacgcgtggatgtcgtcctacggtttcctgcgcacccgcctcgacggcagcgtcgagaagaccgtcggtgacgtgttgcgcggcaagtcgggtgcactgcccgacctggtgcacacgcatccgtcggaaaccgtgcgcgacgcgatcgggatcctgcgcgagtacggcgtctcccagatgcccgtcgtcggcgcggagccgcccgtgatggcaggcgaggtggcaggcagcgtctccgagcgcgaactgctctcggcggtgttcgagggccgcgccaagctggccgacgcggtcgccgagcacatgagcccgccgctgccgctgatcggcgccggtgaactggtcagcacggccgccaagacccttcgtgaatccgacgccgtgatggtggtcgaggacggcaagcccgtcggtgtgctgaccaggcacgacctgctggggttcctgtccgagggcggttaccggcactag

SEQ ID NO: 39931 - protein, 463 aa, Mycobacterium smegmatis str. MC2 155
MRIARHISELIGNTPLVQLNSVVPEGAGLVAAKIEYLNPGGSSKDRIALKMIEAAEVSGELKPGGTIVEPTSGNTGVGLALVAQQRGYKCVFVCPDKVSEDKRNVLRAYGAEVVVCPTAVPPDHPDSYYSVSNRLVTEIEGAWKPDQYSNQMGPESHYETTGPEIWADTEGKITHFVAGVGTGGTITGTGRYLKEVSGGKVKVIGADPEGSVYSGGTGRPYLVEGVGEDFWPTAYDPSVPDEIIAVSDADSFEMTRRLAREEALLVGGSCGMAVVAAIEVARKAGPDAVVVVLLPDGGRGYLSKIFNDAWMSSYGFLRTRLDGSVEKTVGDVLRGKSGALPDLVHTHPSETVRDAIGILREYGVSQMPVVGAEPPVMAGEVAGSVSERELLSAVFEGRAKLADAVAEHMSPPLPLIGAGELVSTAAKTLRESDAVMVVEDGKPVGVLTRHDLLGFLSEGGYRH

SEQ ID NO: 39932 - DNA, 1389 bp, Nocardioides sp. JS614
  CDS (1)..(1389): transl_table=11
gtgaactcactcctcgacctgatcggcaacaccccgctgctgaggctctcgacgtccatgggctccctgaacggcgcgaagggaccgatcgtcctcgccaaggtggagtacctcaaccccggcggctccgtgaaggaccgcatcgccacccggatgatcgaggcggccgaggcgtccggggagcttcagcccggcggcaccatcgtcgagccgacgtccggcaacaccggcgtcgggctggcgatggtcgcccaggcgaagggctacaggtgcgtcttcgtctgcccggacaaggtcagcgaggacaagcgcaacgtgctgaaggcgtacggcgcggaggtggtcgtctgcccgaccgcggtcgagccggagcaccccgactcctactacaacgtctccgaccggctcgcctcgcagccgggtgcctggaagccggaccagtactccaacccgcacaacccgcggtcgcactacgagacgaccggcccggagatctgggcgcagaccgaggggcgggtcacccacttcgtcgccggcgtcggcaccggcggcaccatcagcggcaccgggcgctacctcaaggagcagaactcctcggtccaggtcatcggggccgacccggcgggctcggtctactccggcggcaccggccggccctacctcgtcgagggagtgggcgaggacttctggccggaggcctacgatcgcgacgtcgccgaccggatcatcgaggtctccgacgccgactcgttcgcgatgacgcggcggctggcccgcgaggaggccctgctggtcggcggttcctccggcatggccgtgcacgcggcggtccagctcgcccacgagctcgccggcacccccgagggcgaggacgcggtgatcgtcgtactcctcccggactccggccgcggctacctcacgaaggtcttcaacgacgactggctcgcgcagtacggattcccggtcgacggcgccgagcgctccgtgcagtccgtcggggaggtgctccgcggcaagagcgggcggctgcccgacctcgtgcacacccacccgaacgagaccatcgccgaagccgtcgcgatcctccaggagtacaacgtctcccagatgccggtcgtgcgcgcggagcctccggtggtggccgccgaggtcgtcggatcggtctccgagcggaccctgctcgacctgctgttcaccggctcggccaagctcaccgacagcgtcggcgagcacatggcgcccccgctgccgacgatcggctccaccgagcccgcctccgaggccgtcgccgcactcgagggcgccgacgccctgttggtgcacgaggacggcaagcccgtcggcgtcgtcacccgccacgacctgctggcctacctcgcgcgcggctga

SEQ ID NO: 39933 - protein, 462 aa, Nocardioides sp. JS614
MNSLLDLIGNTPLLRLSTSMGSLNGAKGPIVLAKVEYLNPGGSVKDRIATRMIEAAEASGELQPGGTIVEPTSGNTGVGLAMVAQAKGYRCVFVCPDKVSEDKRNVLKAYGAEVVVCPTAVEPEHPDSYYNVSDRLASQPGAWKPDQYSNPHNPRSHYETTGPEIWAQTEGRVTHFVAGVGTGGTISGTGRYLKEQNSSVQVIGADPAGSVYSGGTGRPYLVEGVGEDFWPEAYDRDVADRIIEVSDADSFAMTRRLAREEALLVGGSSGMAVHAAVQLAHELAGTPEGEDAVIVVLLPDSGRGYLTKVFNDDWLAQYGFPVDGAERSVQSVGEVLRGKSGRLPDLVHTHPNETIAEAVAILQEYNVSQMPVVRAEPPVVAAEVVGSVSERTLLDLLFTGSAKLTDSVGEHMAPPLPTIGSTEPASEAVAALEGADALLVHEDGKPVGVVTRHDLLAYLARG

SEQ ID NO: 39934 - DNA, 963 bp, Nocardioides sp. JS614
  CDS (1)..(963): transl_table=11
atgaggtacgacaacctcctcgcctccgtcgggaacaccccgctcgtcgggttgccgcggctctccgcccaactcgctggccccggtgccgacgtacggctctgggcgaagctggaggaccgcaacccgacgggctcgatcaaggaccgtccggccctgaagatgatcgaggaggccgagaaggacggcaccctgcggccggggtgcaccatcctcgagccgacctctggcaacaccggcatctcgctggcgatggcggcgaagctcaagggctaccggatcgtctgcgtgatgccggagaacacctccgaggagcgccgccagctgctgcggatgtggggggccgagatcgtgtcctcgccggccgccggcgggtccaacgaggccgtccgggtcgccaagcggatcgccaccgagcaccccgactgggtgatgctctaccagtacggcaacgccgccaacgcgctcgcccacgaggagggcaccggcccggagctgctcgccgacctgccgtcgatcacccacttcgtcgcggggctcgggaccacggggacgctgatgggtgtcagccgcttcttccgagcccacaaggcggacgtccggatcgtggcggcggagccgcgctacggcgagctcgtctacggcctgcgcaacctcgacgagggcttcgtgccggagctgtacgacgcggacctgatcgactcgcgcttctcggtcggcccccgcgacgccgtacgccgggtccgcgagctgctcgagctcgagggcatcttcgcgggtatctcgaccggcgcgatcctgcacgccgccctgggccaggccgcgaaggcggtcaaggccggggagagcgccgacatcgccttcgtcgtcgctgacggcggctggaagtacctctcgaccggtgcctacgagggcaccgtcgacgaggccgaggaccgcctcgagggccagctctgggcctga

SEQ ID NO: 39935 - protein, 320 aa, Nocardioides sp. JS614
MRYDNLLASVGNTPLVGLPRLSAQLAGPGADVRLWAKLEDRNPTGSIKDRPALKMIEEAEKDGTLRPGCTILEPTSGNTGISLAMAAKLKGYRIVCVMPENTSEERRQLLRMWGAEIVSSPAAGGSNEAVRVAKRIATEHPDWVMLYQYGNAANALAHEEGTGPELLADLPSITHFVAGLGTTGTLMGVSRFFRAHKADVRIVAAEPRYGELVYGLRNLDEGFVPELYDADLIDSRFSVGPRDAVRRVRELLELEGIFAGISTGAILHAALGQAAKAVKAGESADIAFVVADGGWKYLSTGAYEGTVDEAEDRLEGQLWA

SEQ ID NO: 39936 - DNA, 930 bp, Nocardioides sp. JS614
  CDS (1)..(930): transl_table=11
atgaacatctacgacgacgtcacccagctcgtcggcaacaccccgctcgtccggctcaaccgggtcgtcggcgatgccggcgccaccgtgctggccaagctcgagttctacaaccccgccaacagcgtcaaggaccggatcggcgtcgcgatgatcgacgccgccgaggccgccggggtgctcgccccgggcggcaccgtcgtcgaggccacctccggcaacaccggcatcgccctcgccatggtcggcgccgcccgcggctaccgcgtggtgctgaccatgcccgagacgatgtctcgcgagcgccgcgcgctgctgcgggccttcggcgccgagctggtgctgacccccggcagcgagggcatgaccggcgcggtgcgcaaggcagaggagatcgccgagacgaccggagcggtgccggtgcggcagttcgcgaacgccgccaacccggccatccaccgcgacaccaccgccgaggagatctggaaggacaccgacggcgaggtcgacatcctggtcgccggcatcggcaccggcggcaccatcaccggcgtcgggcagctgctcaaggagcgcaagcccgacgtgcaggtgatcggcgtcgagccggccgagtcgccgatcctcaacggcggcgccccgggcccgcacaagatccagggcctcggcgccaacttcgtccccgagatcctcgacaccaccgtgtacgacgaggtgctcgacgtacccgtcgaggaggccgtgacctgggcccggcgggcggcgaccgaggagggcctgctggtcggcctgtcgtcgggcgccgcgatctcggcggccgtccaggtggcgcagcgacccgagaacgccggccgcaccatcgtggtgatcgtgccgtccttcggcgagcgctacctctcgaccctgctgttcgaggggctggtggactga

SEQ ID NO: 39937 - protein, 309 aa, Nocardioides sp. JS614
MNIYDDVTQLVGNTPLVRLNRVVGDAGATVLAKLEFYNPANSVKDRIGVAMIDAAEAAGVLAPGGTVVEATSGNTGIALAMVGAARGYRVVLTMPETMSRERRALLRAFGAELVLTPGSEGMTGAVRKAEEIAETTGAVPVRQFANAANPAIHRDTTAEEIWKDTDGEVDILVAGIGTGGTITGVGQLLKERKPDVQVIGVEPAESPILNGGAPGPHKIQGLGANFVPEILDTTVYDEVLDVPVEEAVTWARRAATEEGLLVGLSSGAAISAAVQVAQRPENAGRTIVVIVPSFGERYLSTLLFEGLVD

SEQ ID NO: 39938 - DNA, 891 bp, Azoarcus sp. BH72
  CDS (1)..(891): transl_table=11
atggaattcaagacgctcgaggactacgtcggcaagaccccgctggtgcgcatgaagcggatcaccgcggggcataacaacgtcattctcgccaagctcgagggtaacaatccggcgggatcggtgaaggaccggccggcgttgtccatggtcgtccgcgcagaggcacggggcgacatcaagcctggcgacacgctcatcgaggcgaccagcggtaataccggcatcgcgcttgccatggcggcggcgatgcgcggctaccggatgatcctggtgatgcccgagaaccagagcgtcgagcgccggcagacgatgcgcgctttcggggccgaactcgtgctgacgcccaaggagggcggcatggagatggcgcgtgacgtcgccgagaagatgcgcgacgaaggcaagggcatcatccttgaccagttcgccaaccccgacaatccgctcgcccactacgaaggaaccgggcccgagttgtgggagcagacggcgggacgcatcactcatttcgtcagcagcatgggtacgacggggaccatcatgggtacgtcccgattcctcaaggagatgaacccggcgatccggatcgtcgggtgccagccggaggagggatcccagattccgggaatccgcaaatggcccgaagcctatcttccggcgatctatcaccgcgagtcggtggacagcctggagtacgtcagccaggccgatgcggaggagatgacccggcggttggcgcgcgaagaggggctctttgccggcatttcgtccggcggtgcgatgcatgtcgccctgcgtatcgcggcacaggtcgaaaacgcggtgatcgtttcggtgatctgcgaccgcggcgaccgctatctctccaccggggtgttccccgcctga

SEQ ID NO: 39939 - protein, 296 aa, Azoarcus sp. BH72
MEFKTLEDYVGKTPLVRMKRITAGHNNVILAKLEGNNPAGSVKDRPALSMVVRAEARGDIKPGDTLIEATSGNTGIALAMAAAMRGYRMILVMPENQSVERRQTMRAFGAELVLTPKEGGMEMARDVAEKMRDEGKGIILDQFANPDNPLAHYEGTGPELWEQTAGRITHFVSSMGTTGTIMGTSRFLKEMNPAIRIVGCQPEEGSQIPGIRKWPEAYLPAIYHRESVDSLEYVSQADAEEMTRRLAREEGLFAGISSGGAMHVALRIAAQVENAVIVSVICDRGDRYLSTGVFPA

SEQ ID NO: 39940 - DNA, 981 bp, Azoarcus sp. BH72
  CDS (1)..(981): transl_table=11
atgacccactggtacgaagacaacgcccgctccatcggccatacgccgctggtgcgcctcaaccgcgtcaccgacggcgcgcccgccaccatcctggccaagatcgagggccgcaaccccggctactcggtcaagtgccgccttggtgcggcgctgatctgggatgccgagaagcgtggcctgctcggccccggcaaggaactggtggagccgacctccggcaataccggcatcgcgctcgccttcgtcgccgccgcgcgcggcatccccatcacgctgacgatgccggaaacgatgagcatcgagcgccgcaagctgctgctcgcctacggcgccaagctggtgctgacggagggccccaagggcatgagcggcgcggtcgccaaggccgaggaaatcgccgcgtccgacccctcgcgctacgtgctgctgcagcagttcaagaacccggccaacccggccatccatgaagaaaccaccggcccggaaatctggaacgacaccgaaggggcggtggacatcttcgtctccggcgtcggcaccggcggcaccatcaccggcgtcagccgctacctgaagaagacgcgcggcaaggacgtgctgtcggttgcggtcgaacccgctgcgagccccatcctcacccaaaagcgcagcggccaggaactgaagcccgccccgcacaagatccagggtatcggcgccggcttcgtgcccgaggtgctggatctgtcgctggtcgaccaggtggaaaccgtgggcaacgaggaagcggtggactacgcccgccgcctcgcccgcgaagaaggcatcctgtccggcatctccagcggcgccgcggtggccgccgcggtgcgtctggcgcgcgacccgcagcatgccggcaagaccatcgtcgtcgtgctgcccgactccggcgaacgctatctcagctcggtgctgttcgaaggcgtgttcgacgccaccggcctgcccaccgcctga

SEQ ID NO: 39941 - protein, 326 aa, Azoarcus sp. BH72
MTHWYEDNARSIGHTPLVRLNRVTDGAPATILAKIEGRNPGYSVKCRLGAALIWDAEKRGLLGPGKELVEPTSGNTGIALAFVAAARGIPITLTMPETMSIERRKLLLAYGAKLVLTEGPKGMSGAVAKAEEIAASDPSRYVLLQQFKNPANPAIHEETTGPEIWNDTEGAVDIFVSGVGTGGTITGVSRYLKKTRGKDVLSVAVEPAASPILTQKRSGQELKPAPHKIQGIGAGFVPEVLDLSLVDQVETVGNEEAVDYARRLAREEGILSGISSGAAVAAAVRLARDPQHAGKTIVVVLPDSGERYLSSVLFEGVFDATGLPTA

SEQ ID NO: 39942 - DNA, 1395 bp, Mycobacterium sp. KMS
  CDS (1)..(1395): transl_table=11
atgcgcatcgcccagcacgtcagtgagctcatcggcaacacccctctggtacagctgaattctgttgtccccgagggggctggcacggtcgcggcgaagatcgaatacctcaaccccggcggcagctccaaggaccggatcgcggtcaagatgatcgacgccgccgaggccagcggtgagctcaaaccgggcggcacccttgtcgaaccgacatcgggcaacaccggcgtcgggctcgcgctggtcgcccagcagcgcggctacaagtgcatcttcgtctgccccgacaaggtcagcgaggacaagcgcaacgtgttgcgcgcctacggcgccgacgtggtggtgtgcccgacggccgtggcccccgacgatccggacagctactacagcgtctccaaccgcctcgtcaccgagatcgagggcgcgtggaagcccgaccagtactccaacccgatggggccggagtcccactacgagaccaccgggccggagatctggcgcgacaccgacggcaaggtcacccacttcgtggccggcgtcggcaccggcggcaccatcaccggcgccgggaggtacctcaaggaggtctccggcgggaaggtccgcgtcatcggcgccgaccccgagggctcggtgtactccggaggcaccggtcgcccgtatctggtcgagggtgtcggcgaggacttctggccgtcggcctacgaccccgccgtgccggacgagatcatcgccgtctcggacgccgactcgttcgacatgacgcgccggttggcccgcgaggagggcctgctggtgggcggctcgtgcgggatggccgtggtggccgcgatcgaggtcgcgcagaaggccggtccggacgcgttggtggtggtgttgctgcccgacggcggccgcggctacctgtcgaagatcttcaacgactcgtggatgtcgtcctacggattcctgcgcaaccggctggacgggtcgatcgaacagccgaccgtcggagatgtgttgcgcggcaagtccggtgagctgcccgacctggtgcacacccatccgtcggagacggtgcgcgacgccatcgggatcctgcgcgagtacggcgtctcgcagatgcccgtcgtcggcgccgaaccacccgtgatggccggtgaggtcgcgggcagcgtgtcggaacgcgagctgctgtcggcggtcttcgaaggccgcgccaagctggccgatgcggtggccgagcacatgagcccgcccatgccgctcatcggtgcgggcgagttggtcagcaccgccgccaagaccctgcgcgagtgcgatgcgctgatggtggtcgaggagggcaaaccggtcggtgtggtcacccgccacgacctgctcggcttcctgtcggacggcagcacgcggcgttag

SEQ ID NO: 39943 - protein, 464 aa, Mycobacterium sp. KMS
MRIAQHVSELIGNTPLVQLNSVVPEGAGTVAAKIEYLNPGGSSKDRIAVKMIDAAEASGELKPGGTLVEPTSGNTGVGLALVAQQRGYKCIFVCPDKVSEDKRNVLRAYGADVVVCPTAVAPDDPDSYYSVSNRLVTEIEGAWKPDQYSNPMGPESHYETTGPEIWRDTDGKVTHFVAGVGTGGTITGAGRYLKEVSGGKVRVIGADPEGSVYSGGTGRPYLVEGVGEDFWPSAYDPAVPDEIIAVSDADSFDMTRRLAREEGLLVGGSCGMAVVAAIEVAQKAGPDALVVVLLPDGGRGYLSKIFNDSWMSSYGFLRNRLDGSIEQPTVGDVLRGKSGELPDLVHTHPSETVRDAIGILREYGVSQMPVVGAEPPVMAGEVAGSVSERELLSAVFEGRAKLADAVAEHMSPPMPLIGAGELVSTAAKTLRECDALMVVEEGKPVGVVTRHDLLGFLSDGSTRR

SEQ ID NO: 39944 - DNA, 987 bp, Neisseria meningitidis FAM18
  CDS (1)..(987): transl_table=11
atgcctatggggattgcgccttactgtcgaaaccttattattcaggagcagaagatgaaaattgcaaacagcatcaccgaactaatcggcaacacgcctttggtcaaactgaaccgtctgaccgaaggtttgaaggcggaggttgccgtgaaactggaatttttcaatccaggcagcagcgtcaaagaccgcattgccgaagcaatgatcgagggtgccgaaaaagcgggcaaaatcaacaaaaacaccgtcattgtcgaagcaaccagcggcaatacgggtgtcggtttggcaatggtatgtgccgcacgcggctacaagctggcgattaccatgccggaaagcatgagtaaggagcgcaaaatgctgttgcgcgcgtttggtgcggagctgattctgacccctgccgccgaaggtatggcgggcgcgattgccaaagcgaaatccttggtggacgcgcatcccgacacttattttatgccgcgccagttcgacaatgaggcaaaccccgaagtccaccgcaaaacaaccgccgaggaaatttggcgggatacggacggcaaagtcgatgtcttcgttgccggcgtcggcacgggcggtacgattaccggcgtgggcgaagtgttgaaaaaatacaaacccgaagttaaagtggttgccgtcgagcctgaagcttcacccgtattgagcggcggcgaaaaaggcccgcacccgattcaaggcatcggcgcaggctttattccgaccgttttgaataccaaaatttacgacagcattaccaaagtgtcgaacgaagcggcttttgaaaccgcccgcgcaatagcggaaaaagaaggcattttggtgggtatttcttccggtgcggcggtttggagtgcgttgcagcttgccaaacagcctgaaaacgaaggcaagctgatagtcgtgctgctgccttcttatggcgaacgctatctctctacgccactttttgcagatttggcataa

SEQ ID NO: 39945 - protein, 328 aa, Neisseria meningitidis FAM18
MPMGIAPYCRNLIIQEQKMKIANSITELIGNTPLVKLNRLTEGLKAEVAVKLEFFNPGSSVKDRIAEAMIEGAEKAGKINKNTVIVEATSGNTGVGLAMVCAARGYKLAITMPESMSKERKMLLRAFGAELILTPAAEGMAGAIAKAKSLVDAHPDTYFMPRQFDNEANPEVHRKTTAEEIWRDTDGKVDVFVAGVGTGGTITGVGEVLKKYKPEVKVVAVEPEASPVLSGGEKGPHPIQGIGAGFIPTVLNTKIYDSITKVSNEAAFETARAIAEKEGILVGISSGAAVWSALQLAKQPENEGKLIVVLLPSYGERYLSTPLFADLA

SEQ ID NO: 39946 - DNA, 906 bp, Acidovorax sp. JS42
  CDS (1)..(906): transl_table=11
atgaagacctaccccaccattgaagacgcgatcggacacacgccgctggtcgcactgcagcgcatcggtgcacaggacaacgcggcacgcggcaatgtcattctgggcaagctagaaggcaataacccggcgggttcggtgaaggataggccggcactgtcgatgatccgccgggccgaagagcgcggcgagatcaaaaccggcgatacgctgatcgaggcgacgtcgggcaacaccggcattgccctggcgatggctgcggccatcaagggttaccgcatggtgttgatcatgccggaggatctgtccgtggagcgcgcgcagaccatgaaggccttcggcgcggagctggttctcacgcccaagagcggggggatggaatacgcgcgggatctggccgaccagatggtggcgcagggtaagggcgtggtgctggaccagtttgccaacccggacaacccccgcatccactacgagaccaccggccccgaactgtgggagcagaccgaggggcgcatcacccatttcgtgagcgccatgggcaccacgggcaccatcacgggcgtcgcgcgcttcctgcgcgagaagaaccccgcggtgcgcatcgtgggtgcgcagccgcaggaaggctcgcgtatcccgggcattcgcaagtggcccgaggaatacctgcccaagatctacgagccccagttggtggacgaattggtgctggtgagccaggacgatgccgaggacatggcacggcgcctggcgcgcgaagagggcatctttgccggcatctccgcagccggcgcctgctgggtggcgcagcagatcgcgcaacgcgaggaaaacgccaccatcgttttcgtggtgtgcgaccggggcgaccgctacctctccaccggcgtcttcccggcgtga

SEQ ID NO: 39947 - protein, 301 aa, Acidovorax sp. JS42
MKTYPTIEDAIGHTPLVALQRIGAQDNAARGNVILGKLEGNNPAGSVKDRPALSMIRRAEERGEIKTGDTLIEATSGNTGIALAMAAAIKGYRMVLIMPEDLSVERAQTMKAFGAELVLTPKSGGMEYARDLADQMVAQGKGVVLDQFANPDNPRIHYETTGPELWEQTEGRITHFVSAMGTTGTITGVARFLREKNPAVRIVGAQPQEGSRIPGIRKWPEEYLPKIYEPQLVDELVLVSQDDAEDMARRLAREEGIFAGISAAGACWVAQQIAQREENATIVFVVCDRGDRYLSTGVFPA

SEQ ID NO: 39948 - DNA, 918 bp, Acidovorax sp. JS42
  CDS (1)..(918): transl_table=11
atgcgagtcgacaacatcctgcacaccatcggcaacaccccccatgtgcgcatcaatcgcctgttcggcgcgggcgccaacgtgtgggtgaagtccgagcgcgccaaccccggcggttccatcaaggaccgcatcgccctggcgatggtcgaggcggccgagcgcagtggcgctctgcagccaggcggcaccatcatcgagcccacctcgggcaacaccggcattggcttggcgctggtagcggccgtcaagggctaccagctggtgctggtgatgcctgacagcatgtccatcgaacgccgccgcctgatgctggcctacggcgcccgcttcgacctcacgcccaaggaaaagggcatgaaaggcgccatcgcccgcgcgcaggaactggtggccgcgacacccggcagttggatgccccaacagttcgaaaacccggccaacgtcgaggtgcacatgcgcaccacggcgcaggaaatcgccgccgacttccccgacgggctggacgcactcgtcaccggtgtgggcacgggcgggcacatcacgggcgtggcgcgcgtgctcaaggcgcagtttccgcagctcaaggtgttcgcggtggagccttcgcaatcgcccgtgctgtcgggcggccagcccggcccgcaccccatccagggcctgggcgcgggcttcgtgccgcagatcatggacaccagcctgctggacggcgtgatccaggtcgaggccgagcccgcgcgtgaatacgcccgccgcgccgcgcgcgaggaagggctgctggtgggcatttcctccggcgccacactggccgccattgcccagaagctgcccgagttgcccgcgggcgcgcgggtgctgggcttcaactacgacaccggcgaacgctatctgtcggtcgagggtttcctgcccgcctga

SEQ ID NO: 39949 - protein, 305 aa, Acidovorax sp. JS42
MRVDNILHTIGNTPHVRINRLFGAGANVWVKSERANPGGSIKDRIALAMVEAAERSGALQPGGTIIEPTSGNTGIGLALVAAVKGYQLVLVMPDSMSIERRRLMLAYGARFDLTPKEKGMKGAIARAQELVAATPGSWMPQQFENPANVEVHMRTTAQEIAADFPDGLDALVTGVGTGGHITGVARVLKAQFPQLKVFAVEPSQSPVLSGGQPGPHPIQGLGAGFVPQIMDTSLLDGVIQVEAEPAREYARRAAREEGLLVGISSGATLAAIAQKLPELPAGARVLGFNYDTGERYLSVEGFLPA

SEQ ID NO: 39950 - DNA, 1047 bp, Magnetospirillum magnetotacticum MS-1
  CDS (1)..(1047): transl_table=11
atgtccgcacatcccgccgtctcgcccgacgtgctcgccgcggtcggcggcacgcccctgatccggctgcgccgcgcctccgaagagaccggctgcacgatcctcggcaaggccgagttcctcaatcccggcttgtcggtgaaggaccgggccgccctgtcgatcgtgcgggatgcggaggcgcgcgggctgatccggccgggcggcaccatcgtcgagggcacggccggcaataccggcatcggtctggcgctggtcgccgccgtgcgcggctaccgcacggtcatcgtcatccccgagacccagtcggcggagaagaaggagacgctgcgtctggccggcgcccgcctcgtcgaggtgcccgcggtccccttcgccaacccgaacaactacgtccatgccgcccgccgcctcgccgagcggctggcgcagacggaggaggccggcgccttcttcgccgaccagttcgacaacaccgccaaccgcgccgcccatatcgagacgaccggtcccgagatcgtggcgcagaccggcggcacggtcgacggcttcgtctgcgccgccggcaccggcggcacgctcgcgggcgtggccgaggccctgcgggcgcaaaagccgggggtgacgatcgccctgtccgatccggaagggtcggcgcttcacgcctactacaccaccggcacgctcaaggccgaaggctcctcgatcaccgaggggatcggccagggccgcatcacgaagaacctcgaaggcttcaagcccgatctctccttccggatcccggatgcggaggcgctcggcatcatcttccgcctgatgcgcgaggaggggctgtcgctcggcggctcgtcgggcatcaacgtggccggcgcgatccgcctcgcccgggaactcgggcccggccacaccatcgtgacgatcctctgcgacggggccgcgcgctacgcctcgaagctgttcaaccccgccttcctgacggagcgcggcctgccggtgccgggctggctcgggcaatccggcgaggccctgcccgattggcgggcctga

SEQ ID NO: 39951 - protein, 348 aa, Magnetospirillum magnetotacticum MS-1
MSAHPAVSPDVLAAVGGTPLIRLRRASEETGCTILGKAEFLNPGLSVKDRAALSIVRDAEARGLIRPGGTIVEGTAGNTGIGLALVAAVRGYRTVIVIPETQSAEKKETLRLAGARLVEVPAVPFANPNNYVHAARRLAERLAQTEEAGAFFADQFDNTANRAAHIETTGPEIVAQTGGTVDGFVCAAGTGGTLAGVAEALRAQKPGVTIALSDPEGSALHAYYTTGTLKAEGSSITEGIGQGRITKNLEGFKPDLSFRIPDAEALGIIFRLMREEGLSLGGSSGINVAGAIRLARELGPGHTIVTILCDGAARYASKLFNPAFLTERGLPVPGWLGQSGEALPDWRA

SEQ ID NO: 39952 - DNA, 975 bp, Nostoc punctiforme PCC 73102
  CDS (1)..(975): transl_table=11
atggatattaaaaatggcttcgtcggcgctgttggcaacacacccctgattcgcttaaacagcttcagtgaagaaacagggtgtgaaatcctcgcaaaagctgaatttctcaatcctggcggttccgtcaaagaccgcgccgcactttacatcatcgaagatgcagaaaagaaaggtttactcaaacccggtggtacggttgtagaaggaactgctggtaatactggcattggactggcgcatatttgcaacgccaaaggctacaaatgcctaattattattcccgatacccaatcacaagaaaaaatagacgcactgatcgcattaggcgcagaagtccgtcgcgttcctgccgtaccctacaaagacccaaataactacgtcaagctatctggaagagtcgctgctgagttggaaaatgctatttgggcgaatcagtttgataacctagccaatcgccacgcccactacgaaaccacagggccagaaatttggaaacagacagatggtaaaatagatgcatggacagcttcaactggtactggtggtacttatgctggtgtggcgttgtacttaaaagaacaaaatccaggaatcaaatgcgttgttgccgatccactgggtagcgcactttatagctatgtcaaaaccggcgaaatcaatataaaaggaaattccatcaccgaaggtatcggaaatggtcgtgtcacagccaatatggaaggcgcacctgctgatgatgccatccaaatcgatgacaaagaagctttacgagtagtttaccaactgctaaggaaagatgggctgctaatgggcggctcaacggggattaatgttggcgcagctgttgctctagcgaagcaattgggcccaggacataccattgtcaccatcttgtgtgatagtggttcacggtatcagtcgcggatattcaaccctgaatggctagcttcaaaaggactttcaatagattag

SEQ ID NO: 39953 - protein, 324 aa, Nostoc punctiforme PCC 73102
MDIKNGFVGAVGNTPLIRLNSFSEETGCEILAKAEFLNPGGSVKDRAALYIIEDAEKKGLLKPGGTVVEGTAGNTGIGLAHICNAKGYKCLIIIPDTQSQEKIDALIALGAEVRRVPAVPYKDPNNYVKLSGRVAAELENAIWANQFDNLANRHAHYETTGPEIWKQTDGKIDAWTASTGTGGTYAGVALYLKEQNPGIKCVVADPLGSALYSYVKTGEINIKGNSITEGIGNGRVTANMEGAPADDAIQIDDKEALRVVYQLLRKDGLLMGGSTGINVGAAVALAKQLGPGHTIVTILCDSGSRYQSRIFNPEWLASKGLSID

SEQ ID NO: 39954 - DNA, 963 bp, Nostoc punctiforme PCC 73102
  CDS (1)..(963): transl_table=11
atgcggatagcgaaagatatcacagagttaatcggacggactcctttagttcaattaaacaaaattccccaagcttcaggagcggttgctcggattgtggtgaagctagaaagcatgaatccggcatcttctgtgaaagatcggattggcgcgagtatggtggaaatggcggaagaagcaggcttgattcaccccggaaaaactgttttagtagagccgacttctgggaatacaggaattgcgctagcgatggtggcggccgctaaggggtaccatctcattctaacgatgcctgacacaatgagccacgaaagacgatcgatgctcaaagcttatggcgctcaattagagttaacgccaggggtagaagggatgcgaggagcgatcggtcgtgcagagcagattttagctcaaacgcccaatgcttatatgttgcagcagttccgcaaccccgccaacccgaaagttcacgccgaaaccacagcagaagaaatctggaatgataccgatggagaggtggatattctagtggcgggagtgggtactggtgggacgattacaggagttgcagaagttattaaaggacggaagccaagttttcaagcgatcgcagttgaaccaagcagcagtccggtattaacgggtgggaaatcagggcctcacaaaattcagggtatcggcgcgggatttgtcccagcaatttaccgtccagaattggtggatgaagtgattcaggtagcggatgagcaagcgatcgcttacagccgtcgcctagcaaaagaagaaggattgttatcgggcatttctactggcgctgctttatatgcggctattcaagtagcacaacgtccagaaaatgcaggtcgtctaatcgtcatgatccagcctagcttcggcgaacgctacctcagcacctcactatttaaagatccagaagagaatgagtggttgagtaaagtttga

SEQ ID NO: 39955 - protein, 320 aa, Nostoc punctiforme PCC 73102
MRIAKDITELIGRTPLVQLNKIPQASGAVARIVVKLESMNPASSVKDRIGASMVEMAEEAGLIHPGKTVLVEPTSGNTGIALAMVAAAKGYHLILTMPDTMSHERRSMLKAYGAQLELTPGVEGMRGAIGRAEQILAQTPNAYMLQQFRNPANPKVHAETTAEEIWNDTDGEVDILVAGVGTGGTITGVAEVIKGRKPSFQAIAVEPSSSPVLTGGKSGPHKIQGIGAGFVPAIYRPELVDEVIQVADEQAIAYSRRLAKEEGLLSGISTGAALYAAIQVAQRPENAGRLIVMIQPSFGERYLSTSLFKDPEENEWLSKV

SEQ ID NO: 39956 - DNA, 963 bp, Nostoc punctiforme PCC 73102
  CDS (1)..(963): transl_table=11
atgcgaattgctcgtaacattacagaacttgttggtcgtacacccctagttcagttgaaccgcattcctcaaacagaaggatgtgttgcggaaattgtggtgaaactggaaagtctcaacccatcggcatcagtcaaagaccggattggggtcagcatgattaacgctgccgaagaggaggcgctgattactcctgagaagacaatattagtagaacccacttctggaaatacgggaattgctctagcaatgacagcagcagctaagggttatcgattaattttgacaatgccagagaccatgagtggggaacgtcgggcaatgttgcgggcttatggagcagaactggaactaacgccaggtatggaaggcatgagtggggcaattagacgagcgcagcaaatagttaatagtacgccaaatacctatatgttgcagcagttccgcaatccagctaatgcaaaagtgcatcgggaaactacagctctggaaatttgggaagatactgatggacaagtagatatagttgtggcgggtgtgggcactggtggtacgatcactggggtagcagaagtgattaaagcacgcaaacctagttctaaagcgatcgcagttgaaccagccaatagccctgttttatctgggggacagccagggccacacaaaatccaaggaattggcgctgggtttattccccaagtactcaagctaaaattgatagatgaagtgattaccatcaccgatgaagaagcgatcacttatagtcggcgcttggcaaaagaagaagggctactatctggcatttccagtggggccgctttatgtgcagcaattcgcgttgctcaacgtgaagaaaacaaagagcgtttaattgtgatgattcagcccagctttggtgagaggtatctgagtacacccttgttccaagatctggaggcaaggttgcccgctagcgttggttaa

SEQ ID NO: 39957 - protein, 320 aa, Nostoc punctiforme PCC 73102
MRIARNITELVGRTPLVQLNRIPQTEGCVAEIVVKLESLNPSASVKDRIGVSMINAAEEEALITPEKTILVEPTSGNTGIALAMTAAAKGYRLILTMPETMSGERRAMLRAYGAELELTPGMEGMSGAIRRAQQIVNSTPNTYMLQQFRNPANAKVHRETTALEIWEDTDGQVDIVVAGVGTGGTITGVAEVIKARKPSSKAIAVEPANSPVLSGGQPGPHKIQGIGAGFIPQVLKLKLIDEVITITDEEAITYSRRLAKEEGLLSGISSGAALCAAIRVAQREENKERLIVMIQPSFGERYLSTPLFQDLEARLPASVG

SEQ ID NO: 39958 - DNA, 960 bp, Nostoc punctiforme PCC 73102
  CDS (1)..(960): transl_table=11
atgcggattgctcaagatataacagaactgatcggacgaactcctttagttcaactgaataagatacctcaagctgagggagtagtagcaaggatagttgtcaaattagaaggtatgaacccagcagcctcggtaaaagaccgcattgggttaagtatggtactttcagcagaagcggctggctcaattcagcctggaaagactattttagttgagcctacttcaggtaatacaggaattgctctagcgatggtagcagcagcacgtggctaccgtttaattttgacaatgccagagacgatgagccaagaacgacgggctatgttgagagcttatggcgcgtctttagagttaacaccaggcgcggaaggaatgcggggagctattcgcaaagccgaagagattgtggctaatactcctgatgcttttatgctgcaacagttccgcaaccctgccaatcctaaagttcaccaggaaactaccgccgaagaaatttggacagatacagacggagaagtcgatattgttattgctggggtaggtactggtgggacgattaccgggattgcagaggtacttaaaggtcgtaagaagacttttaaggcgatcgcagttgaacccagcaacagcccagttctctcaggtggtgaagccgggccacacagaattcaaggtattggtgccggatttatccccgatgttcttcgcctagaattggttgatgaagtaattagagtcagcgatgaacaagcgatcgcttacgggcgacgtttggcaaaagaagaaggcttattatctggcatatcctctggtgcagctttgtgtgctgccattcaagtaggtaaacgtccagaaaatgccggacgtttaatcgtaatgattcagccttccttcggcgaacgttacctcagcacccccatgtttcaagacttgtctttagaaactgctggcgtgcgttaa

SEQ ID NO: 39959 - protein, 319 aa, Nostoc punctiforme PCC 73102
MRIAQDITELIGRTPLVQLNKIPQAEGVVARIVVKLEGMNPAASVKDRIGLSMVLSAEAAGSIQPGKTILVEPTSGNTGIALAMVAAARGYRLILTMPETMSQERRAMLRAYGASLELTPGAEGMRGAIRKAEEIVANTPDAFMLQQFRNPANPKVHQETTAEEIWTDTDGEVDIVIAGVGTGGTITGIAEVLKGRKKTFKAIAVEPSNSPVLSGGEAGPHRIQGIGAGFIPDVLRLELVDEVIRVSDEQAIAYGRRLAKEEGLLSGISSGAALCAAIQVGKRPENAGRLIVMIQPSFGERYLSTPMFQDLSLETAGVR

SEQ ID NO: 39960 - DNA, 951 bp, Haemophilus somnus 2336
  CDS (1)..(951): transl_table=11
atgacaatttatgcagataattcctattctattggtaatacaccattagttcgtttaaaaaactttggtaataacggcaacattatagcgaaaattgaagggagaaaccccagctttagcgtgaaatgccgcattggtgccaatatggtatggcaagcagaaaaagatggtattttaaccaaagataaagaaattattgatgcaaccagtggtaatacaggtattgctttagcttatgttgctgcagcacgtggctataaaatcacgttaactatgccggagactatgagttccgaacgtaaacgcttattgcgaggtttaggggtaaatttagtgttgactgaaggtgtcaacggtatgaagggggctattgctaaagcagaagaaattgttgcttcaaatccaaatcactatgtaatgctaaaacagtttgaaaaccctgcaaatccagccattcatcaacaaacaacaggacctgaaatttggtcaggcactgaaggtaaaattgatgtattggtagctggtgttggtactggcggaacaattagtggaattagccgttacattaagcaagatcaaggcaaaaaaattattaccgtagccgttgaacctgaagaatcaccagtgataactcaaacgcttgcaggtgaagaaaccaaaccgggtccacataaaattcaaggtattggtgcggggttcattccgaaaaacttagatttatctttagtagatcaaatagaaaaagtcagtagtgaaacagcgattataacggctcgtcgcctaatggcagaagaaggtattctcggagggatctcatccggtgcagcactcgctgtagccgatcgaattgcacaacgtccggaattttccgataaactcattgttgttatcttaccttctgcatcagaacgatatttaagcacagccttgtttgacggcttcgaaggataa

SEQ ID NO: 39961 - protein, 316 aa, Haemophilus somnus 2336
MTIYADNSYSIGNTPLVRLKNFGNNGNIIAKIEGRNPSFSVKCRIGANMVWQAEKDGILTKDKEIIDATSGNTGIALAYVAAARGYKITLTMPETMSSERKRLLRGLGVNLVLTEGVNGMKGAIAKAEEIVASNPNHYVMLKQFENPANPAIHQQTTGPEIWSGTEGKIDVLVAGVGTGGTISGISRYIKQDQGKKIITVAVEPEESPVITQTLAGEETKPGPHKIQGIGAGFIPKNLDLSLVDQIEKVSSETAIITARRLMAEEGILGGISSGAALAVADRIAQRPEFSDKLIVVILPSASERYLSTALFDGFEG

SEQ ID NO: 39962 - DNA, 918 bp, Bacillus cereus G9241
  CDS (1)..(918): transl_table=11
atgaaattatgtgaaaacgtaacagaattaataggagatacacctgtcgtccgattatctaaatttattccagaagacgcagcagatgtgtatgtaaaactagaaatgtttaatccatcgcgcagtgtgaaagaccgtgctgcttataatttactgcacgttgcagaagaaaatggtctcatcaaaccaggagatacaattattgaaccgacaagtggaaatacaggaataggcttagcaatgaatgcagccgcaaaaggatataaagcgattttaattatgccagataatatgtcaaaagagcgtataaatttattaaaagcatacggagcagaagtagttttaacaccggcagaacaaagaatgccaggagcaattgcgaaggcgttagaattgcaaaagcaaattccaaatagttttattccgcaacaatttgaaaatccagcaaatccaaatattcatcgttatacaactgcacttgaaatttatgaacaaatggatggagagcttgatgcattcgtagcaacggcaggaactggcggaacgattactgggactggtgaaacgttaaaagagaaactaccaaatttatatgttgcagtagtagaaccgaaaggatctcctgttttatcaggcggtgttcccggtcctcataaactagtaggaacaagtccagggtttatcccgaaaaacttaaatacggaagtgtataacgaaattattcaaattgcagacgaagaggctttaacgacaatgagaaacttagctagacaagagggattattagttgggccgtcttctggtgcttctgtttacgcagcgattatgatcgcgaaacgattaggtgctggtaaaaaagttttatgtattgcacctgatacaggtgagaggtatttgagtatgggattatttgaatga

SEQ ID NO: 39963 - protein, 305 aa, Bacillus cereus G9241
MKLCENVTELIGDTPVVRLSKFIPEDAADVYVKLEMFNPSRSVKDRAAYNLLHVAEENGLIKPGDTIIEPTSGNTGIGLAMNAAAKGYKAILIMPDNMSKERINLLKAYGAEVVLTPAEQRMPGAIAKALELQKQIPNSFIPQQFENPANPNIHRYTTALEIYEQMDGELDAFVATAGTGGTITGTGETLKEKLPNLYVAVVEPKGSPVLSGGVPGPHKLVGTSPGFIPKNLNTEVYNEIIQIADEEALTTMRNLARQEGLLVGPSSGASVYAAIMIAKRLGAGKKVLCIAPDTGERYLSMGLFE

SEQ ID NO: 39964 - DNA, 924 bp, Bacillus cereus G9241
  CDS (1)..(924): transl_table=11
atgaatgtatatcgtggagttcatgagttaattggtcatacaccaattgtagaaattactcgtttttcacttccagaaggggttcgtttatttgcaaagcttgaattttataacccaggcggaagcgttaaggatcgcttaggaagagaattaattgaagatgcgctcgaaaaagggcttgttacccagggtggaacaattattgaaccgactgctgggaatactggtattggactggcacttgcagcgttacaacatgatttacgtgttattgtttgtgtaccagagaaatttagtattgaaaaacaagagttaatgaaagcactaggtgcaacggtcgtgcatacaccgactgagcaaggaatgaccggtgcaattgctaaagcaaaagagttagtaaatgaaataccgaattcatactctccaagtcagttcgcaaatgaggcaaatcctcgtgcatattttaaaacattaggacccgaactgtgggatgcattgaatggagagattgacatatttgttgctggagcaggaactggcggtacgtttatggggactgcatcttacttgaaagaaaaaaatatagatattaaaacagttatcgtagagccagaaggatctattttaaatggtggtaaagctggctcacatgaaacagaagggattggccttgaattcatcccgccatttttgaaaacatcttattttgatgaaattcatacaatttctgatcgaaatgcatttttacgagtgaaagaattagcgcagaaggaaggtcttctcgttggaagctcttcaggagcagcatttcatgcaagcttacttgaagcggagaaagcggcgccaggtacaaatattgtaacgatttttcctgatagtagtgagcgctatttaagtaaagacatatacaaaggatgggaataa

SEQ ID NO: 39965 - protein, 307 aa, Bacillus cereus G9241
MNVYRGVHELIGHTPIVEITRFSLPEGVRLFAKLEFYNPGGSVKDRLGRELIEDALEKGLVTQGGTIIEPTAGNTGIGLALAALQHDLRVIVCVPEKFSIEKQELMKALGATVVHTPTEQGMTGAIAKAKELVNEIPNSYSPSQFANEANPRAYFKTLGPELWDALNGEIDIFVAGAGTGGTFMGTASYLKEKNIDIKTVIVEPEGSILNGGKAGSHETEGIGLEFIPPFLKTSYFDEIHTISDRNAFLRVKELAQKEGLLVGSSSGAAFHASLLEAEKAAPGTNIVTIFPDSSERYLSKDIYKGWE

SEQ ID NO: 39966 - DNA, 963 bp, Crocosphaera watsonii WH 8501
  CDS (1)..(963): transl_table=11
atgaaaattgctcacaatatcactgagttaattggccataccccccttgttcaattaaatcgcattcctcaagcagaaggttgtaaagcgcagatcgttgtcaaattagaaggcatgaacccggcagcatccgtcaaagatagaattggcgtgaatatgattaatgctgccgaaaaagaaggatttatcattcccggtaaaaccctcttagttgaacccacttccgggaatacaggtattgccctggcaatggcagcagcggccaaaggatacaagttaattttaaccatgcccgaaaccatgagccaagaacgccgggctatgttaaaagcttatggagcgcagctagaactaaccccaggtagcgaggggatgggcggttgtattcgtcggggccaagaattagcagaaaccctgcccaacgcctatatgttacaacaattcaataatccagctaaccccgaaattcaccgtttaaccaccggcgaggaaatttgggaagataccgatggacgggtagattttttgatcgctggcgtaggaaccggtggcacccttaccggtgtagctgaagtaattaagcagaaaaaacccagttttcaggcgatcgcagttgaacccaccagcagccccgttttatcaggaggcagcccaggaggacacaaaatacaagggatcggtgccggttttgtgcctggggtgttgaaagtggaattgatcgatgaagttgtcaccgtcaccgatgaggaagcaatgagttatgggcgacgtttagctaaagaagaaggactattatccggtatttctacgggggctgctttatgcgctgccattaaagttgggcaaagacccgaaaatatcggtaaactgatcgtaatggttcaacccagttttggagaacgttacttaagtacacctcttttccaagatgtcgaaccgcctcaactggctatggttcattaa

SEQ ID NO: 39967 - protein, 320 aa, Crocosphaera watsonii WH 8501
MKIAHNITELIGHTPLVQLNRIPQAEGCKAQIVVKLEGMNPAASVKDRIGVNMINAAEKEGFIIPGKTLLVEPTSGNTGIALAMAAAAKGYKLILTMPETMSQERRAMLKAYGAQLELTPGSEGMGGCIRRGQELAETLPNAYMLQQFNNPANPEIHRLTTGEEIWEDTDGRVDFLIAGVGTGGTLTGVAEVIKQKKPSFQAIAVEPTSSPVLSGGSPGGHKIQGIGAGFVPGVLKVELIDEVVTVTDEEAMSYGRRLAKEEGLLSGISTGAALCAAIKVGQRPENIGKLIVMVQPSFGERYLSTPLFQDVEPPQLAMVH

SEQ ID NO: 39968 - DNA, 954 bp, Exiguobacterium sibiricum 255-15
  CDS (1)..(954): transl_table=11
atggtcatgcgcattgcgaattcagtattggatttagtcggccgcacgccgattgttaaattaaatcatttgacaggaccggaagatgcggacgtgtatttgaaattggaatatatgaatccggggtcaagcgtcaaagaccggatcgctttagcgatgatcgaatcggcagaatcagcgggtcatttaaaagcaggcgataccatcattgagccgacaagtggaaacacgggaatcggactcgcaatggtcgctgctgctaaaggataccgttcgattcttgtcatgccggaaacgatgagcatggaacgtcgaactctacttcgtgcgtacggtgcggagttgattttaacagccggcccggaaggaatgaagggtgcgattgctcgagcgacggcagaagcggaagaacatggttatttcatgccgcaacagttcaataatgaatcaaaccctgttgttcatgaaaagacgactggaccggaaatcgttgaagcatttgaaggattgacacttgatgcgttcatcgccggtatcggtacgggcggtacgatcacaggggcgggaaaagtattgcgcgaggctttcccgggcatcgaaatcattgcggttgaaccaaccgattctcctgttctttcaggcggaaaaccgggaccgcataaactgcagggaatcggagccggatttgtcccgtcgattctcgatacgcagatttacgacagcgtcgagcaggtgacgacggaagaagcgtttgatcatgcccgtcgtgcagcgaaatcgaacggagttctcggaggtatttcttccggtgctgcgattgcggctgctttaaaaacagcgaagcgtctcggcaaaggaaaaacggttctggcgatcatcccgtcaaacggagaacgttatctcagtacgccactgtatcaagtggaagaagagacggacagttcgaaactgtaa

SEQ ID NO: 39969 - protein, 317 aa, Exiguobacterium sibiricum 255-15
MVMRIANSVLDLVGRTPIVKLNHLTGPEDADVYLKLEYMNPGSSVKDRIALAMIESAESAGHLKAGDTIIEPTSGNTGIGLAMVAAAKGYRSILVMPETMSMERRTLLRAYGAELILTAGPEGMKGAIARATAEAEEHGYFMPQQFNNESNPVVHEKTTGPEIVEAFEGLTLDAFIAGIGTGGTITGAGKVLREAFPGIEIIAVEPTDSPVLSGGKPGPHKLQGIGAGFVPSILDTQIYDSVEQVTTEEAFDHARRAAKSNGVLGGISSGAAIAAALKTAKRLGKGKTVLAIIPSNGERYLSTPLYQVEEETDSSKL

SEQ ID NO: 39970 - DNA, 924 bp, Exiguobacterium sibiricum 255-15
  CDS (1)..(924): transl_table=11
atgatcgcgaaatcagtccgcgacctcgtcggaaatacgccgctctacgagattacttcattcgatttgcctgctggtacgcggattttggcgaagctcgaatggatgaaccctgggggcagcgtcaaagaccgcctgggcattcaactcgttgatgccgcgatcgaacagggatatgtgacacgaggcggaacgatcatcgaaccgactgccggcaacaccggcatcggtttggcgctcgccgctaaaaaatatgaccttcaagtcatctgtgtcgttccggaaaagttcagccaggagaaacagacgttgatgcgggcactcggcgcgactgtcgtcaacacaccgactgagctcgatatgcagggtgcgatcgataaagccaaagaactcggacaaacgattccaaacagctatgttccgcttcaattcgaaaacgaagaaaatccggttacgtatcagcggacacttggtcctgagctgatggcggagctggatcagattgattggttcgttgcgggatgcggatcaggtggaacgtttgccggaacagcggcgtatttaaaagaacgtctcgggacaaaaggtgcaatcgttgaaccggaaggctcagtcctcaacgggggaccggccggaccgcataagacggaaggcatcgggacggccaaatggccaagtctcgtttcccgtgacttagtggatgaaattcatacgatttccgatcatgacgcttttacgaaagtccatgagctagcggcccgtgaaggattgctcgtcggcagttcggccggcgcggcactcgttgcagcacttgatctggcacatcgttttcccggcagtaccatcgtcaccgtctttgcggacagtgccgaacggtatttaagccaacaaatctttgaaaaggtggacgagacacatgcgtaa

SEQ ID NO: 39971 - protein, 307 aa, Exiguobacterium sibiricum 255-15
MIAKSVRDLVGNTPLYEITSFDLPAGTRILAKLEWMNPGGSVKDRLGIQLVDAAIEQGYVTRGGTIIEPTAGNTGIGLALAAKKYDLQVICVVPEKFSQEKQTLMRALGATVVNTPTELDMQGAIDKAKELGQTIPNSYVPLQFENEENPVTYQRTLGPELMAELDQIDWFVAGCGSGGTFAGTAAYLKERLGTKGAIVEPEGSVLNGGPAGPHKTEGIGTAKWPSLVSRDLVDEIHTISDHDAFTKVHELAAREGLLVGSSAGAALVAALDLAHRFPGSTIVTVFADSAERYLSQQIFEKVDETHA

SEQ ID NO: 39972 - DNA, 927 bp, Prosthecochloris aestuarii DSM 271
  CDS (1)..(927): transl_table=11
atgaatgtctacgagagcataacagagacggtcggtcgcacacctcttgtgcgcattcgtcgtatggcggatcattcgtatgctgatgtctatgccaagctggaatccttcaatccgctttcaagcgtcaaagaccgcgtcggtgtcgccatgatcgaggatgcggaacgaaacggcctgataggcccggagacgaccattattgagccgaccagcggcaatacgggaatagcgcttgcgtttagctgtgcatcgaggggataccggcttattctcaccatgccggataccatgagcgtcgaacgtcgcaggcttctgaaaattctgggagccgaacttgttctgacggaaggtgcagcaggaatgaaaggcgccatagcggaagctgagcggcttgtcgattcgattcctcacagcctgatgctgcagcagttcaataaccctgccaacccggagacgcaccgcaggacaacagcgagagaaatatgggacgataccgacggtcaggttgatatatttattgccggagttggaacgggcggtactattaccggtgtcggcagcgtactcagggagctgaaaccaggggttcatattgtggctgtcgagccagacgattcgccggttatttccggaggcgaacccgggccgcataaaattcaggggatcggagccggttttgttcctggaaatcttgacccttcggttatagacgagatcataaccgtctcaaatcaggatgccgccgagacagcaagaaagcttgcccgcaaagagggtatcctttgcgggatctcttcgggagccgccatgtgggcggcaatgagcgttgctgcccgacctgctatggagggtaaaaatattgttgtacttttgcctgatacaggggagcgctatctttcaacctggttgtttgccgatgagtaa

SEQ ID NO: 39973 - protein, 308 aa, Prosthecochloris aestuarii DSM 271
MNVYESITETVGRTPLVRIRRMADHSYADVYAKLESFNPLSSVKDRVGVAMIEDAERNGLIGPETTIIEPTSGNTGIALAFSCASRGYRLILTMPDTMSVERRRLLKILGAELVLTEGAAGMKGAIAEAERLVDSIPHSLMLQQFNNPANPETHRRTTAREIWDDTDGQVDIFIAGVGTGGTITGVGSVLRELKPGVHIVAVEPDDSPVISGGEPGPHKIQGIGAGFVPGNLDPSVIDEIITVSNQDAAETARKLARKEGILCGISSGAAMWAAMSVAARPAMEGKNIVVLLPDTGERYLSTWLFADE

SEQ ID NO: 39974 - DNA, 960 bp, Xylella fastidiosa Dixon
  CDS (1)..(960): transl_table=11
atgactatctacaacactatcctggacacgattggccacacacccgtggttaaattgaaccgcattgctccggcacacgtggatctatacatcaaggttgaatcattcaatccaagcggctcggtcaaagaccgtctggcactggccatcattctcgacgccgaacaacaggggttattgaaacccggcgacaccatcgtcgaagccacttcgggaaataccggcgtcgccctggccatgatcgccgctgcccgcggctacacgttcgtcgccaccatggtcgaaaccttttcgatcgagcggcgcaaactgatgcgcgcttacggtgccaaagtcatcctcaccccagccaccgaacgcggtagcggcatggtacgcaaagccaaagaactcgccgaacagcatggctggttcctcgccagccaattttccaacccagccaacccggcctatcaccgcaacaccaccgccgcggaaatcctacgagactttgccggacgccgcctcgaccacttcgtcagcggatggggcaccggcggcacgcttactggcgttggtgaagtactgaaaatcgcgcgaccagacatcaaaatcaccgccagcgaacccgccaacgcagcactgctccaagggaaggaatggcaaccccacaagattcagggatggacacccgatttcgtaccggaggtactgaatcgttccgttccacaccacatcctcagtgttaccgacgacgatgcaatcacggtggcccgtcgcctggccgcggaggaaggtgttttctcggggatctccggcggtgcctccgtcgcaacagcactgcagatcgcacaacaggccgaaccgggtgccgtgatcctcgccatgctgccagataccggcgaacgttacttctccacccctctgttcgctgacatcaatgagcattcagacgacgcgtggttagccagtctcggctga

SEQ ID NO: 39975 - protein, 319 aa, Xylella fastidiosa Dixon
MTIYNTILDTIGHTPVVKLNRIAPAHVDLYIKVESFNPSGSVKDRLALAIILDAEQQGLLKPGDTIVEATSGNTGVALAMIAAARGYTFVATMVETFSIERRKLMRAYGAKVILTPATERGSGMVRKAKELAEQHGWFLASQFSNPANPAYHRNTTAAEILRDFAGRRLDHFVSGWGTGGTLTGVGEVLKIARPDIKITASEPANAALLQGKEWQPHKIQGWTPDFVPEVLNRSVPHHILSVTDDDAITVARRLAAEEGVFSGISGGASVATALQIAQQAEPGAVILAMLPDTGERYFSTPLFADINEHSDDAWLASLG

SEQ ID NO: 39976 - DNA, 960 bp, Xylella fastidiosa Ann-1
  CDS (1)..(960): transl_table=11
atgactatctacaacactatcctggacacgattggccacacacccgtggttaaactgaaccgcattgctccggcacacgtggatctatacatcaaggttgaatcattcaatccaagcggctcggtcaaagaccgtctggcactggccatcattatcgacgccgaacaacaggggttattgaaacccggcgacaccatcgtcgaagccacttcgggaaataccggcgtcgccctggccatgatcgccgctgcccgcagctacacgttcgtcgccaccatggtcgaaaccttttcgatcgagcggcgcaaactgatgcgcgcttacggtgccaaagtcatcctcaccccagccgccgaacgcggtagcggcatggtacgcaaagccaaagaactcgccgaacagcacggctggttcctcgccagccaattttccaacccagccaaccctgcctatcaccgcaacaccaccgccgcggaaatcctacgagactttgccggacgccgcctcgaccacttcgtcagtggatggggcaccggcggcacgcttactggcgttggtgaagtactgaaaatcgcgcgaccagacatcaaaatcaccgccagcgaacccgccagcgcagcactgctccaagggaaggaatggcaaccccacaagattcagggatggacacccgatttcgtaccggaggtactgaatcgttccgttccacaccacatcctcagtgttaccgacgacgatgcaatcacggtggcacgtcgtctggccgcggaggaaggtgttttctcggggatctccggcggtgcctccgtcgcaacagcactgcagatcgcacaacaggccgaacagggtgccgtgatcctcgccatgctcccagataccggcgaacgttacttctccacccctctgttcgctgacatcaatgagcattcagacgacgcgtggttagccagtctcggctga

SEQ ID NO: 39977 - protein, 319 aa, Xylella fastidiosa Ann-1
MTIYNTILDTIGHTPVVKLNRIAPAHVDLYIKVESFNPSGSVKDRLALAIIIDAEQQGLLKPGDTIVEATSGNTGVALAMIAAARSYTFVATMVETFSIERRKLMRAYGAKVILTPAAERGSGMVRKAKELAEQHGWFLASQFSNPANPAYHRNTTAAEILRDFAGRRLDHFVSGWGTGGTLTGVGEVLKIARPDIKITASEPASAALLQGKEWQPHKIQGWTPDFVPEVLNRSVPHHILSVTDDDAITVARRLAAEEGVFSGISGGASVATALQIAQQAEQGAVILAMLPDTGERYFSTPLFADINEHSDDAWLASLG

SEQ ID NO: 39978 - DNA, 978 bp, Croceibacter atlanticus HTCC2559
  CDS (1)..(978): transl_table=11
atgaacgctacacttacattacctataaccaaccacacagtatatgagtccatactaactacaattggccatacgccattagttaagttaaaaaaattatctgcggagttaggctttcaagtttatggaaagcttgagatgacaaatcctggtggaagtattaaagataggacatcattaaacattattgaagaagaaattgccaaagggaacattacaaaaaatactacacttgttgaaagtagtagtggcaatatggcgataggtttggcacaggtttgttcttatcataatatacctttagtaattgttgtagatccaaaagctaataagcatactttaaaaatattagatgcttatggagtaaaagtagatatggttgaaaaagctagccaaaatggaggttatcttggtgctcgcttacaaagagtacaagagcttgtggcacaacttccaaatgctatatggacaaatcaatatggaaataaagccaacccgaaagcacattggcaaactatgaaagagatttatgaagatttacctgatgtagattatgttttttctgccactagtacttgtgggacattaatgggttgtgcagattttattaactctgaacatttaaatacaaaacttattgcagtagatgctaagggaagtgtgatttttggagaacaaccagaagaacgacatattcctggtcatggtgctggtttaccatctcaatttttagataaaaatgccattcatgatgtggttcatactacagataaagaatgtgtaactggttgtcacaaactacttaaattagaaagtattttagctggcggatcttctggtgcagttacaacagctatagaaaaattaaaacataaaatccctaaacacagcacgtgtgttctcatactttgtgatcgcggcgaacgctatatagatactatttataataaagattgggtagctcaaaaactagggtaa

SEQ ID NO: 39979 - protein, 325 aa, Croceibacter atlanticus HTCC2559
MNATLTLPITNHTVYESILTTIGHTPLVKLKKLSAELGFQVYGKLEMTNPGGSIKDRTSLNIIEEEIAKGNITKNTTLVESSSGNMAIGLAQVCSYHNIPLVIVVDPKANKHTLKILDAYGVKVDMVEKASQNGGYLGARLQRVQELVAQLPNAIWTNQYGNKANPKAHWQTMKEIYEDLPDVDYVFSATSTCGTLMGCADFINSEHLNTKLIAVDAKGSVIFGEQPEERHIPGHGAGLPSQFLDKNAIHDVVHTTDKECVTGCHKLLKLESILAGGSSGAVTTAIEKLKHKIPKHSTCVLILCDRGERYIDTIYNKDWVAQKLG

SEQ ID NO: 39980 - DNA, 966 bp, Roseovarius nubinhibens ISM
  CDS (1)..(966): transl_table=11
atgatcctgccctcggtcatcgacgccatcggggacacgccgctcgtgtctctcgatcgtgtcgtgaccgagctggggctttcgggccgcattctggccaagctcgactatctcctgccgggcttttccaagaaagaccgcgccgcccgcaccatcatcgaggcggcccgcgcctcgggcgagctgcgcgacgggcagccggtgatcgaactgacctccggcaatatgggcaccgggctcgccatcgtctgtggcgtgctcggccatcccttcatcgcggtgatgagcgaaggcaattcccccgaacgcgcccgcatgatgcgcgcgctgggggccgaggtggtgctcgtcccgcaggccaagggcagccgcccgggcgaggtttcgggcgccgatctggcccgcgtcgaagaggccgcgcagaggatcacccgcgagcgcgccgcctttcgcgccgatcaattcgcccgccccggcaacccagcggcgcattttcacggaaccgccccggaaatctgggcgcaatccggtgaaacagtctctgtttttgccgatttcgcaggctccggcggcacgctcgcgggctgcgccgcctatctcgccccacgcggcgtacgctgctacgcggtcgaacctacgggcgccgaggccatcggcggcggcgaccgttccaccccggcccacccgatccagggtggcggctatgacatggacgcgctcgcccatctgaaatccacagattcggctggaacagtgactgtttccggcaacgaggcgcgcgatcacgcccggcttctcgcgcgccgcgaaggcatctttggcggcttttcctcgggcgccaatctcgccgccgccgtgcagctcctgcgcgggcccgaacgcggcggcaccattgccatcgtgatctgcgacagcggcctcaaatacctctcaaccgatctctgggacgatcccccaccccaatag

SEQ ID NO: 39981 - protein, 321 aa, Roseovarius nubinhibens ISM
MILPSVIDAIGDTPLVSLDRVVTELGLSGRILAKLDYLLPGFSKKDRAARTIIEAARASGELRDGQPVIELTSGNMGTGLAIVCGVLGHPFIAVMSEGNSPERARMMRALGAEVVLVPQAKGSRPGEVSGADLARVEEAAQRITRERAAFRADQFARPGNPAAHFHGTAPEIWAQSGETVSVFADFAGSGGTLAGCAAYLAPRGVRCYAVEPTGAEAIGGGDRSTPAHPIQGGGYDMDALAHLKSTDSAGTVTVSGNEARDHARLLARREGIFGGFSSGANLAAAVQLLRGPERGGTIAIVICDSGLKYLSTDLWDDPPPQ

SEQ ID NO: 39982 - DNA, 1032 bp, Roseovarius nubinhibens ISM
  CDS (1)..(1032): transl_table=11
atgcgtattgcacaggatttggccgctgcggtcggcaacacacccctcatccggctgcgccgggccagtgaagagacagggtgtaacatcctgggcaaggctgaatttctgaaccccggtcagtcggtcaaggaccgcgccgccctctatatcatcaaggatgcggtggcgcgcggcgatctcaagcccggtggcacgattgtcgaaggcaccgcgggcaacaccggcatcggtctggcgcttgtcggcgcgtcgatggggtttcgcacggtcatcgtgatccccgagacgcagagccaggaaaagaaggacatgatccggctggcgggggccgagctggtgcaagtgcccgccgcgccctatcgcaaccccaacaattatgtgcgctattccggccgtctggccgaagagatggcgcggcattccaatgagggcgtgatctgggccaaccagttcgacaatgtcgccaaccggcaggcccatatcgagaccaccggcccggaaatctgggaacagaccggcggcaaggtcgacgggttcgtctgtgccgtgggctcgggcgggacgctggcaggggtcggcatggcgctgcagcccaagggcgtcaagatcggcctcgccgatcccgatggcgcgacgctttataatttctacaaacatggcgagcataaatccgaagggtcttcgatcaccgaaggcatcgggcaggggcggatcactgccaatctcgaagggtttacgccggacatggcctggaacattcccgacagcgaagcgctgcccatcgttttcgacctgctggccgaagaggggctctgccttggcggatcgtcggggatcaacgtggccggggcgatccgcatggcccgcgaaatggggccgggccacacgatcgtgacgccgctgtgcgattacggcacgcgctatcagtcgaagctcttcaaccccgaattcctgcgcgagaaaggcctgccggtgcctggctggctctcggaagcgccgcgctcgatccccggggtgtttgaagaatga

SEQ ID NO: 39983 - protein, 343 aa, Roseovarius nubinhibens ISM
MRIAQDLAAAVGNTPLIRLRRASEETGCNILGKAEFLNPGQSVKDRAALYIIKDAVARGDLKPGGTIVEGTAGNTGIGLALVGASMGFRTVIVIPETQSQEKKDMIRLAGAELVQVPAAPYRNPNNYVRYSGRLAEEMARHSNEGVIWANQFDNVANRQAHIETTGPEIWEQTGGKVDGFVCAVGSGGTLAGVGMALQPKGVKIGLADPDGATLYNFYKHGEHKSEGSSITEGIGQGRITANLEGFTPDMAWNIPDSEALPIVFDLLAEEGLCLGGSSGINVAGAIRMAREMGPGHTIVTPLCDYGTRYQSKLFNPEFLREKGLPVPGWLSEAPRSIPGVFEE

SEQ ID NO: 39984 - DNA, 969 bp, Prochlorococcus marinus str. MIT 9211
  CDS (1)..(969): transl_table=11
atgccaattgcatctgatatcaccactttagtcggcaagactcctttggtaaggcttaatcgcttaccaaaagcatttggatgcgaagcagaattaatcgcaaaactagaaagctttaaccctacagcctcagtcaaagaccgtattgcaggtgcaatggttgctgctgcagaaaaagatagaactattgtgcctggtaaaaccgtcttagtagaacctactagcggaaatacaggcatagctcttgcaatggttgcggctgctaaaggttatcggttaatcctaacgatgcccgacacaatgagtatcgaaaggcgatcaatgcttagggcatatggtgcagagctacaactcacgccaggaaaagaaggaattcagggagctatcactttggctcaagaaattgtttcttcgctaccggatgcttatttactacaacaatttgataatccttctaaccctgaagtacatgaacaaacaaccgcagaagaaatttgggttgattgtgatggtcaaatcgacgggctggttgttggtgtaggaacaggaggaaccatcaccggttgtgcaaaattgctaaaacaaaggaatccaaaaattttaatttatgcagtagagccatctgctagtgccgttctctctggtaaaagcgctaatccacatcacattcaaggcattggtgcaggttttattccaagtgttttagatactgcattaatagatgaagttattgaagttgatgataatcaagcaatggaaattggtcggcaattagctcgtcaagaaggattacttagcgggattagtagtggagcagctgttgcagcagcacttaaagtaggttcacgaaaagaaatgaaaaacaaacgccttttagttgttcttcctagttttggcgaacgctatttatctacatctatgtttaatagtgtttcatccataccaccccggccagatggctacatctaa

SEQ ID NO: 39985 - protein, 322 aa, Prochlorococcus marinus str. MIT 9211
MPIASDITTLVGKTPLVRLNRLPKAFGCEAELIAKLESFNPTASVKDRIAGAMVAAAEKDRTIVPGKTVLVEPTSGNTGIALAMVAAAKGYRLILTMPDTMSIERRSMLRAYGAELQLTPGKEGIQGAITLAQEIVSSLPDAYLLQQFDNPSNPEVHEQTTAEEIWVDCDGQIDGLVVGVGTGGTITGCAKLLKQRNPKILIYAVEPSASAVLSGKSANPHHIQGIGAGFIPSVLDTALIDEVIEVDDNQAMEIGRQLARQEGLLSGISSGAAVAAALKVGSRKEMKNKRLLVVLPSFGERYLSTSMFNSVSSIPPRPDGYI

SEQ ID NO: 39986 - DNA, 1023 bp, Erythrobacter sp. NAP1
  CDS (1)..(1023): transl_table=11
atgaacatcactcaaccattcggcgacacgctcgccctgattggaaatacgccgctcgttcgccttgctggacccagcgaggcggcgggctgtgacatctggggcaagtgcgaattcgccaaccccggctcaagcgtgaaggatcgcgcggcgctctatatgatccgcgatgcggaaggccgcggcgagctgaagcccggcggaacggttatcgaaggcacggctggcaacaccgggatcggcattgcgcttgttgccaatgcgctgggctataagacgatcatcgtcatgcccgacaaccagtcgaaggagaagatggacacattgcgcgcattgggcgccgagctggtccttgttcctccgaccaaatacgctgatccctgccacttccagcacgtctcgcgccgcatggccgaagagaccgaaggcgcgatctgggcaggccagttcgacaacaccgccaaccgtcgcgctcatatcgaaggcactgcgatcgagctgtgggagcaaaccggcggcaagatttccggcttcacctgcgcggctggcaccggcggtacgattgcgggtgtgggtatggggctgaaggaaaaaaaccccgacatccgcattgcgctgaccgatccgcatggcgcggcgctctacaattattacgcgcatggcgaattgaagggcgaaggctcttcggtcgccgaagggatcgggcagggacgcatcaccgcgaacctcgaaggcgcgccaatcgacacgcaatttcgcatttcggacgaagaaggcctagtctgggtcgagcatctgctgcgcaaggaagggctgtgccttggtctttcgagcgggattaacgtcgcaggcgcgattgaactgggcaagcaactggtcgcggacggtgtcgagaacccgcaggtcgcgacgatcctgtgcgacactggcttccgctatctctcgacgctctacaacgccgagtggctcgcttcgaagaacctgccggtgttcgactggctcacccaaaaccaaagcgattaa

SEQ ID NO: 39987 - protein, 340 aa, Erythrobacter sp. NAP1
MNITQPFGDTLALIGNTPLVRLAGPSEAAGCDIWGKCEFANPGSSVKDRAALYMIRDAEGRGELKPGGTVIEGTAGNTGIGIALVANALGYKTIIVMPDNQSKEKMDTLRALGAELVLVPPTKYADPCHFQHVSRRMAEETEGAIWAGQFDNTANRRAHIEGTAIELWEQTGGKISGFTCAAGTGGTIAGVGMGLKEKNPDIRIALTDPHGAALYNYYAHGELKGEGSSVAEGIGQGRITANLEGAPIDTQFRISDEEGLVWVEHLLRKEGLCLGLSSGINVAGAIELGKQLVADGVENPQVATILCDTGFRYLSTLYNAEWLASKNLPVFDWLTQNQSD

SEQ ID NO: 39988 - DNA, 921 bp, Erythrobacter sp. NAP1
  CDS (1)..(921): transl_table=11
atgaaagccacgagcattctcgagaccatcggcaacaccccgcacattcgcctgtcgcgcatgttccccgatcacgaagtctggttgaaatcagagcgcgccaatcccggcggctcgatcaaggatcgcattgcgcttgccatggtggaggatgcagaggcttcgggagcactcaagccaggtggcaccatcgtcgaaccgaccagcggcaacaccggcatcggtcttgcgatggttgcggcggtcaagggctacacgctcgtgctcgtcatgcccgaatcgatgtcgatcgaacgtcgacgcctgatgctcgcatacggagcgaccttcgacctgacgcccaaggaaaagggcatgaagggcgcaatcgagcgcgcgaccgagatcgtcgagacaaccgaaggcgcatggatgccgagccagttcgataacggctcgaaccccgcggttcatgcgcgcacaacggccaaggaaatccttggcgacttcgccgacaaccccatcgatgtgatgatcaccggggttggaactggcggccatctcacaggctgcgcagaggagctcaagaaaagctggtccgacttcaaagcctatgcggtcgagcccgtcggctctcccgtcatcagcggcggagagcctggcccccacccgatccagggcattggcgctggcttcatccccggcaacctccacaccaacgcaatcgacggcgcgatcaaggtcgatcccgaagacgccaaggagatggcccgcagggcagcgcgcgaagaaggaatgctgatcgggatctctagcggtgccacgctcgcggcaattgcacagaagctgcctgacctcgccgccggcacccggatcatgggcttcaactacgacacgggcgagcgttacctgtccgtaccggacttcctgccggtggagtaa

SEQ ID NO: 39989 - protein, 306 aa, Erythrobacter sp. NAP1
MKATSILETIGNTPHIRLSRMFPDHEVWLKSERANPGGSIKDRIALAMVEDAEASGALKPGGTIVEPTSGNTGIGLAMVAAVKGYTLVLVMPESMSIERRRLMLAYGATFDLTPKEKGMKGAIERATEIVETTEGAWMPSQFDNGSNPAVHARTTAKEILGDFADNPIDVMITGVGTGGHLTGCAEELKKSWSDFKAYAVEPVGSPVISGGEPGPHPIQGIGAGFIPGNLHTNAIDGAIKVDPEDAKEMARRAAREEGMLIGISSGATLAAIAQKLPDLAAGTRIMGFNYDTGERYLSVPDFLPVE

SEQ ID NO: 39990 - DNA, 969 bp, Synechococcus sp. RS9917
  CDS (1)..(969): transl_table=11
atgccgatcgccgacgacatcactgcgctggtgggtcgcacccccttggtgcggctcaaccgtttaccggccgcctgcggttgccaggcggagatcctggcgaagctggaaagtttcaatcccaccgcctcggtgaaagatcggatcgccggggcgatggtgcaggcagcggaggccagtggcacgatccagcccgggcgcaccgtgctggtggagcccaccagtggcaacaccggcatcgctctggccatggtggccgccgcccgcggctaccggctgatcctcaccatgcccgacacgatgagcacggagcgccgttccatgctccgggcctacggcgccgaacttcagctcactccaggggtggagggaatgcagggggcgattgcccttgcgcgtcagctcgtggcggagatccccggggcctatctgctgcagcagttcgacaatccggccaaccctgccgtccatgcggccaccaccgctgaagaaatctgggctgacaccggccgcgccctggatgccttcgtggccggcgttggcaccggcggcaccctcaccggctgcgcccaggtgctcaagcgccgttgcccgggcctgcaggtggtggcggtggagcctgcggcgagccaggtgctggcgggtggggcccccggcccccaccggatacagggcatcggcgccggttttgtgcctccggtgctcgaggctgggttgatcgatgagattctggccatcagcgatgaggaggcgatggcgatgggtcgccgtctggcccgggaggagggactgctcagtggcgtcagcagtggtgcggcggtggcggcagcgctccggatcggccagcgtccggcgatggccggccgccgcatcgtggtgatcctcgccagcttcggggagcggtatctctccacgccgatgttcagcagcgcgcctgcgccaccagcccgtggggatggtcagttgtga

SEQ ID NO: 39991 - protein, 322 aa, Synechococcus sp. RS9917
MPIADDITALVGRTPLVRLNRLPAACGCQAEILAKLESFNPTASVKDRIAGAMVQAAEASGTIQPGRTVLVEPTSGNTGIALAMVAAARGYRLILTMPDTMSTERRSMLRAYGAELQLTPGVEGMQGAIALARQLVAEIPGAYLLQQFDNPANPAVHAATTAEEIWADTGRALDAFVAGVGTGGTLTGCAQVLKRRCPGLQVVAVEPAASQVLAGGAPGPHRIQGIGAGFVPPVLEAGLIDEILAISDEEAMAMGRRLAREEGLLSGVSSGAAVAAALRIGQRPAMAGRRIVVILASFGERYLSTPMFSSAPAPPARGDGQL

SEQ ID NO: 39992 - DNA, 987 bp, Synechococcus sp. RS9917
  CDS (1)..(987): transl_table=11
atgtctcgcgtttacgccgataacagccaggccatcggcaacacccccctggttcgcctcaaccacgtgaccaagggttgcaaagccaccgtgctcgccaaggttgagggccggaaccccgcctacagcgtcaagtgccggatcggcgccaacatgatttgggacgccgagaaacgcggcgtgctcagcgaaggcaaaacgatcgttgagcccacctccggcaacaccggcatcgccctggccttcaccgctgcagcccggggttacaaactcgtactcaccatgccggagtcgatgtcgatcgagcgtcgccgcgtgatggcggtgcttggcgccgagatcgtgctcaccgaagccgccaagggcatgccgggcgcgatcgccaaggccaagcagatcgccgagagcgatccggccaagtacttcatgcccggtcagttcgagaaccccgccaaccccgagattcacgagaaaaccaccggtcctgaaatctggaacgactgcgacggcgccatcgatgtgctcgtggccggtgtcggcaccggcggcacgatcaccggcgtgtcgcgctacatcaagaaccaggccggcaaggcgatcgaatccgtggcggtggaaccggcccacagccccgtgatcacccagaccctcaatggggaagaggtgaagcctggtccccacaaaatccagggcatcggcgccggcttcattcccaagaacctcgatctctccgtggtcgacaaggtggagcaggtcaccaacgaggaatcgattgcaatggcccttcgcctcgccaaagaagaaggtctgctggtgggcatctcctgtggtgctgccgctgcagccgccatccgcctcgcccagcaggacgcctacgccggcaaaacgatcgtggtggtgctgcccgacctggccgagcgctatctctcctcggtgatgttcgcggatgtgcccaccggcatcatcgagcagcctgtcgccgtctga

SEQ ID NO: 39993 - protein, 328 aa, Synechococcus sp. RS9917
MSRVYADNSQAIGNTPLVRLNHVTKGCKATVLAKVEGRNPAYSVKCRIGANMIWDAEKRGVLSEGKTIVEPTSGNTGIALAFTAAARGYKLVLTMPESMSIERRRVMAVLGAEIVLTEAAKGMPGAIAKAKQIAESDPAKYFMPGQFENPANPEIHEKTTGPEIWNDCDGAIDVLVAGVGTGGTITGVSRYIKNQAGKAIESVAVEPAHSPVITQTLNGEEVKPGPHKIQGIGAGFIPKNLDLSVVDKVEQVTNEESIAMALRLAKEEGLLVGISCGAAAAAAIRLAQQDAYAGKTIVVVLPDLAERYLSSVMFADVPTGIIEQPVAV

SEQ ID NO: 39994 - DNA, 1026 bp, Synechococcus sp. WH 5701
  CDS (1)..(1026): transl_table=11
atgggcatccgccagggaccctgcacccaggcaggcatcagccagggttttgttgaagccgtcggcaacacccccctgattcgtctgcgcctgctcagcgacctgaccggttgcgagatcctcggcaaggcggagttcatgaaccccgggggctccgtcaaagaccgcgctgccctcggcatcctgctggaagcggaggagtcgggcgctctgcaaccgggcggcaccgtggtcgaaggcacggccggcaacaccggcatcggcctcacccacctctgcaatgcccgcggctaccgcagcttgatcgtcatccccgacacccagtcggctgagaagatcgggctgctgcgcagccttggcgcggaggtgcgcaccgtcccggcggtgccctaccgcgaccccaacaactacgtgaagctctcgggccgcatcgccgccgaaatcccgggtgccatctgggccaatcagttcgacaacctggccaaccgccgcgcccattacgccagcaccggccctgagatctgggagcagaccggcggccgcatcgacgcctgggtgtcggccaccggcaccggcggcacctatgccggcgtggccctgttcctgaaggagcgctccgagcgggtgcgctgcgtgctggccgatccccacggcagcgccctccatgcctgggccaccggcgccgggctgaaggccgagggcagctcgatcaccgagggcatcggcaacagccgcgtcaccgccaacctcgagggggcaccgatcgacgatgcggtgcgcatcgacgaccagagcgccctcgagaccatctaccagttgctctggcgggaagggctgttcatgggcggctcggtgggcatcaacgtggcggcggcggtggaaacggcccgccggctcgggcccggccacacgatcgtcaccgtgctctgcgacagcggtgatcgctaccgctcccgcctctacgatgccgactggctcgcctcccgcggactgagccagccccgccgagagcgggttccggcctga

SEQ ID NO: 39995 - protein, 341 aa, Synechococcus sp. WH 5701
MGIRQGPCTQAGISQGFVEAVGNTPLIRLRLLSDLTGCEILGKAEFMNPGGSVKDRAALGILLEAEESGALQPGGTVVEGTAGNTGIGLTHLCNARGYRSLIVIPDTQSAEKIGLLRSLGAEVRTVPAVPYRDPNNYVKLSGRIAAEIPGAIWANQFDNLANRRAHYASTGPEIWEQTGGRIDAWVSATGTGGTYAGVALFLKERSERVRCVLADPHGSALHAWATGAGLKAEGSSITEGIGNSRVTANLEGAPIDDAVRIDDQSALETIYQLLWREGLFMGGSVGINVAAAVETARRLGPGHTIVTVLCDSGDRYRSRLYDADWLASRGLSQPRRERVPA

SEQ ID NO: 39996 - DNA, 987 bp, Synechococcus sp. WH 5701
  CDS (1)..(987): transl_table=11
atggcgtcgatttttgctgacagcagcctgagcatcggccgcacgcccctggtgaagctgaaccgggtggtcggcgacagccgcgccaccgttctcgccaagatcgagggccgcaatcccgcttattcggtcaagtgccgcatcggcgccgcgatgatctggcaggccgagaaagatggccggctcggtccgggcaaggagctgatcgagcccaccagcggtaacaccggcatcgccctggcctttgtggccgcatccagggggatccccctcaccctgacgatgccggaatcgatgagtctggagcggcgcaagctgctcacggcctacggcgccaagctcgtactcaccgagggcaaactcggcatgaccggtgcggtgggccgggcccatgagatcgccgcctccgatcccgagcgttacgtgctgctgcagcagttcgccaacccggccaacccccagatccaccacgacaccaccggcccggaaatctggaacgacaccgatggtcaggtggatgtgctggtggcgggggtgggcacaggtggcaccatcaccggcgtcagccgttatttcaagaccacccggggccagaagctgctctcagtggcggtggagcctgtgaacagcccagtgatcgcccaggccagggcaggcgagccaccccagcccgggccccacaagatccaggggatcggtgccggtttcgtccccgagaacctcgatctggatctggtggaccgggtcgaagcggtcagcgaccaggaggccgtggccatggccagacgcctgatgcgcgaagagggcatcctggctggcatctcctgcggggccgccaccgtggccgccctgcggctggccgccgaggaggaattcgccggcaagacgatcgtggtggtcctgccggactccggggagcgctatctgagctcggtgctgtttgagggggtgttcgatgcggccggtctggctccggtcgagcggtga

SEQ ID NO: 39997 - protein, 328 aa, Synechococcus sp. WH 5701
MASIFADSSLSIGRTPLVKLNRVVGDSRATVLAKIEGRNPAYSVKCRIGAAMIWQAEKDGRLGPGKELIEPTSGNTGIALAFVAASRGIPLTLTMPESMSLERRKLLTAYGAKLVLTEGKLGMTGAVGRAHEIAASDPERYVLLQQFANPANPQIHHDTTGPEIWNDTDGQVDVLVAGVGTGGTITGVSRYFKTTRGQKLLSVAVEPVNSPVIAQARAGEPPQPGPHKIQGIGAGFVPENLDLDLVDRVEAVSDQEAVAMARRLMREEGILAGISCGAATVAALRLAAEEEFAGKTIVVVLPDSGERYLSSVLFEGVFDAAGLAPVER

SEQ ID NO: 39998 - DNA, 951 bp, Synechococcus sp. WH 7805
  CDS (1)..(951): transl_table=11
atggcgattgccccaaacatcacaaccctggtggggagaactccaatggttcggctcaaccgcctgcctcaggcctggggatgcacggccgacatcgtggccaagttggagagtttcaatcccacggcgtcggtgaaggatcggattgccggcgccatggtggaagccgcagagaacgacggcacgattgcagcggagcggaccgttctggtggaacccactagtggcaacaccggaattgccttggcgatggtggccgcggctcgcggataccggttgatcctcacgatgcccgacaccatgagcaccgaacgtagggcgatgctcagagcctatggcgctgagcttcagctcacacctggtgagcagggcatgcaaggggcgatcgaacgggcccgggaactcgtgcaggagatccccggggcctatctgcttcagcagttcgacaatcccgctaatcctgcggtgcatgctgcatcaacggcggaggagatctgggcggatacagatggtgccttggatggactcgtggccggggtcggcaccgggggcaccatcaccggttgtgcccgggtcctcaagagtcgactcccaaagcttcgggtggtcgccgtggagccggccgccagtccggtgctgggcggcggcgtcgccggaccgcatcgtcttcagggaatcggcgctggattcattcctcctgtcttggatatggatctgatcgatgaggtcatcgcggtgagcgacgatgaagccatggaggttggtcggcgtctcgctcgtgaagaggggctgctttgcggcgttagcagcggtgccgtcgtcgctgctgctcttcagatcgggcagcgtccggttatggagggacggcgcattgtggtgatcctggccagctttggtgagcgctacctttccacaccgatgttcagcgcagcaggtgatcctgatgcctga

SEQ ID NO: 39999 - protein, 316 aa, Synechococcus sp. WH 7805
MAIAPNITTLVGRTPMVRLNRLPQAWGCTADIVAKLESFNPTASVKDRIAGAMVEAAENDGTIAAERTVLVEPTSGNTGIALAMVAAARGYRLILTMPDTMSTERRAMLRAYGAELQLTPGEQGMQGAIERARELVQEIPGAYLLQQFDNPANPAVHAASTAEEIWADTDGALDGLVAGVGTGGTITGCARVLKSRLPKLRVVAVEPAASPVLGGGVAGPHRLQGIGAGFIPPVLDMDLIDEVIAVSDDEAMEVGRRLAREEGLLCGVSSGAVVAAALQIGQRPVMEGRRIVVILASFGERYLSTPMFSAAGDPDA

SEQ ID NO: 40000 - DNA, 987 bp, Synechococcus sp. WH 7805
  CDS (1)..(987): transl_table=11
atgtcccgcgtttacgccgacaacagccaggccatcggcaacacacccctggtgcgtctgaatcacgtgaccaaaggctgcaaagccaccgtgctcgccaaggtagaagggcgcaaccccgcctacagcgtgaagtgccgcattggcgccaacatgatctgggacgctgaaaagcgtggggagctaacagatggcaaggtaattgttgagcccacctcagggaataccggaatcgccttagcgttcaccgcagcggcccgcggttacaagctcgtactcaccatgccggagtcgatgtcgatcgagcgtcggcgtgtgatggccgttctcggagctgagattgttctcaccgaagccgccaaaggtatgcccggggccatcgccaaggccaaggaaatcgctgacagcgatccagccaagtacttcatgcctggtcagttcgataatccggctaacccggatatccatttcaaaaccactggccctgaaatctggaacgactgcgacggagccattgatgtactggtgtcgggggtcggcaccggcggcacgatcaccggcgtgtcccgttacatcaagaatgaggctggcaaagccatcgaatctgtggctgtggaacccagtcacagccctgtgatcacccagaccctcaacggtgaggaagtgaagccaggtccccacaagatccagggcattggcgctggtttcatccccaaaaacctcgatctctccatcgtcgacaaggtggagcaggtcacgaacgaggaatcgatcgccatggctctgcgcttggccaaggaagaaggcttgcttgtcggcatctcctgcggcgcggcggcggccgccgccattcgtctggctcagcaagacgactacgccggcaaaactatcgtggtggtgctgcctgatctagccgagcgttacctgtcttcagtgatgttcgctgaagtccccgctggaatcatcgagcaacctgtccctgcctga

SEQ ID NO: 40001 - protein, 328 aa, Synechococcus sp. WH 7805
MSRVYADNSQAIGNTPLVRLNHVTKGCKATVLAKVEGRNPAYSVKCRIGANMIWDAEKRGELTDGKVIVEPTSGNTGIALAFTAAARGYKLVLTMPESMSIERRRVMAVLGAEIVLTEAAKGMPGAIAKAKEIADSDPAKYFMPGQFDNPANPDIHFKTTGPEIWNDCDGAIDVLVSGVGTGGTITGVSRYIKNEAGKAIESVAVEPSHSPVITQTLNGEEVKPGPHKIQGIGAGFIPKNLDLSIVDKVEQVTNEESIAMALRLAKEEGLLVGISCGAAAAAAIRLAQQDDYAGKTIVVVLPDLAERYLSSVMFAEVPAGIIEQPVPA

SEQ ID NO: 40002 - DNA, 969 bp, Pseudoalteromonas tunicata D2
  CDS (1)..(969): transl_table=11
atgtctaagatttttaatgataattcacttacgattggtaatacacctcttgtcaaattaaaccgcgttactactggtaatgtcttcgctaaaatcgaagcccgtaatccaagtttcagcgtgaagtgccgcattggcgcatcaatgatttgggaagctgagaaatcaggccaacttaccaaagataaagaaattattgagccaacatctggtaatacaggtatagcacttgcttttgttgcagcttcacgtggttacaagttaacactcacaatgccaagcaccatgagcttagaacgccgtaaattattaaaagcgttaggcgctaatttagtattaactgaagggccaaaaggaatgaaaggtgcaattgaaaaagcacaagaaatccaacaagccgagccaaataagtttgttttattacaacaatttgaaaatccagccaatcctaaaattcattttgaaacaactggacctgaaatctttgaagcaaccgatggcaacattgatttcttcgtagccggtgttggtactggtggtacgattacaggtgtaagccgttatcttaaacttgaaaaaggcttagccgttaaagctatcgctgttgaacctgttgattcaccagttatttctcaaaaattagcaggacaagaaatcaaacctggtccacacaaaattcaggggattggtgcaggttttattcctggcaaccttgatttagaaatgctggatggtgttgaacaagtatcaaatgaagaagcgattgctacggcgcatcgtttaatgaaagaagaaggcattttagctggtatttcatcaggcgctgctgttgctgctgcaatccgtattgctgaaaaaccggaaaatgcaggtaagaatattgtggttatattaccaagctctgcagagcgctatttatcttctccattattctcagaagagtttagcgatcaagaacttgtacagtaa

SEQ ID NO: 40003 - protein, 322 aa, Pseudoalteromonas tunicata D2
MSKIFNDNSLTIGNTPLVKLNRVTTGNVFAKIEARNPSFSVKCRIGASMIWEAEKSGQLTKDKEIIEPTSGNTGIALAFVAASRGYKLTLTMPSTMSLERRKLLKALGANLVLTEGPKGMKGAIEKAQEIQQAEPNKFVLLQQFENPANPKIHFETTGPEIFEATDGNIDFFVAGVGTGGTITGVSRYLKLEKGLAVKAIAVEPVDSPVISQKLAGQEIKPGPHKIQGIGAGFIPGNLDLEMLDGVEQVSNEEAIATAHRLMKEEGILAGISSGAAVAAAIRIAEKPENAGKNIVVILPSSAERYLSSPLFSEEFSDQELVQ

SEQ ID NO: 40004 - DNA, 969 bp, Oceanospirillum sp. MED92
  CDS (1)..(969): transl_table=11
atgaacatttacgaagataactcccttacgattggtaacacgccactggttcacctgaagcgactggctccaggcctgaatattttcggtaagattgaatctcgcaacccagcaggctcggtaaaatgtcgtatcggtgcaaatatgatctggtcagccgagaaaagtggcgcccttaagccgggcatgaccatggttgagccaacaagtggcaacaccggtatcgcattggcatttgtcgctgcatcccgaggctatgacattgtattcacgatgccttcttccatgagcctggaacgacgtaagatcatgaaagcactgggggctacgattgttctgacagaacctgctaaaggcatgaaaggtgcaattgagaaagctcaggagatcgttgatcaaaaccctgacacccatatgatgctgcagcagttcgagaatcctgctaaccctgagatccatgagaaaacaacgggtcctgagatctggaatgataccgatggcaccgttgatattctggttgctggtgtaggtactggcggtactatcacgggtacctcccgctacattaagaaagaacagggtaaagcgatcacctctgttgctgttgaacctgtggactctcctgttatcacacaaacaattaatggcgatgaagttaaaccttctccgcacaagattcagggcattggggcaggctttgtaccaaagaaccttgatcttgagctcgtcgatcaggttgaacaggttagcaatgaagacgctattgctaccgcacgcctgctgatggaaaaagagggtattatggcgggtatctcttgtggcgcggctctgtgcgcagcccttcgtgtagcaaaacaaccgggtaacgaaggcaaaaacattgtcgttattttgccagactctggtgagcgatacctttcttccgctctgtttgaaggtatgttcagcgataacgagatggttcaataa

SEQ ID NO: 40005 - protein, 322 aa, Oceanospirillum sp. MED92
MNIYEDNSLTIGNTPLVHLKRLAPGLNIFGKIESRNPAGSVKCRIGANMIWSAEKSGALKPGMTMVEPTSGNTGIALAFVAASRGYDIVFTMPSSMSLERRKIMKALGATIVLTEPAKGMKGAIEKAQEIVDQNPDTHMMLQQFENPANPEIHEKTTGPEIWNDTDGTVDILVAGVGTGGTITGTSRYIKKEQGKAITSVAVEPVDSPVITQTINGDEVKPSPHKIQGIGAGFVPKNLDLELVDQVEQVSNEDAIATARLLMEKEGIMAGISCGAALCAALRVAKQPGNEGKNIVVILPDSGERYLSSALFEGMFSDNEMVQ

SEQ ID NO: 40006 - DNA, 900 bp, Oceanospirillum sp. MED92
  CDS (1)..(900): transl_table=11
atgagcacttacttcccgaccatcgaagattatgttggcaaaacgccgcttgtacgtttgcaacgtatcggtcaggccaatggcaatattattctctgtaaactggaagggaacaatccggccggatcggtaaaagaccgccctgcattgagtatgatccagcgagctgaggatcgtgggcaaataaagcctggtgatactttgatagaggctacttctgggaataccgggatcgctttggcgatggcagcagccattaaaggctacaagatgaaactgatcatgcctgacaatagcagcgaggagcgtaaggcttcgatgactgcttatggtgctgagctaattccagtcactaaagaagaaggtatggaaggtgcgcgtgatctggccttggcgatgcaggagcgtggtgaagggatcgtactggatcaattttccaatatggataacccagaggctcactattgtggaactgggcctgaaatctgggaacagacccaaggcaaagtaactcactttgtaagttcgatggggaccacaggcactattatgggcacttcgcgcttccttaaagagcaaaacccggatgtgcagattgtaggcctgcaacctagcgaaggtgctcaaataccggggattcgtcgctggccacaagaatatctccctaaaatattcgatgagaaccgagtggaccgcattttagatattaatcaggatgatgctgagaatacgatgcgtgctttggcacaggaagagggtattttctgtggtgtttcttccggagggtccgtagctggagccttacgcttagctgaagaggtagaaaatgcggttatcgtttgcattatctgtgatcgtggcgaccgttacctgtccacaggcgtgtttaatcagaactaa

SEQ ID NO: 40007 - protein, 299 aa, Oceanospirillum sp. MED92
MSTYFPTIEDYVGKTPLVRLQRIGQANGNIILCKLEGNNPAGSVKDRPALSMIQRAEDRGQIKPGDTLIEATSGNTGIALAMAAAIKGYKMKLIMPDNSSEERKASMTAYGAELIPVTKEEGMEGARDLALAMQERGEGIVLDQFSNMDNPEAHYCGTGPEIWEQTQGKVTHFVSSMGTTGTIMGTSRFLKEQNPDVQIVGLQPSEGAQIPGIRRWPQEYLPKIFDENRVDRILDINQDDAENTMRALAQEEGIFCGVSSGGSVAGALRLAEEVENAVIVCIICDRGDRYLSTGVFNQN

SEQ ID NO: 40008 - DNA, 987 bp, Xanthobacter autotrophicus Py2
  CDS (1)..(987): transl_table=11
atggcaggacctgccgccaagatcgtgcccgccgcccagcctcgtccggggcgcggccgcgtctatgattccatcaccgagaccataggcaacacgccgctggtgcggctgaagcgcctcgccgagctgcgcggggccaaagccgagattctggccaagctcgaattcttcaatcccatctccagcgtcaaggaccgcatcggcgtcgccatgatcgaggcgatggaggcggccggcgtgctggaccaggacacggttctggtggagcccacttccggcaataccggcatcgcgctggccttcgtggcagcggcccgcggctaccggctgatcctggtgatgcccgagagcatgtcggtggagcgccgcaagatgctcgccattctcggcgccgagctggtgctgaccccggcgaacctgggcatgaagggcgccgtcgcccgcgccgagcagctcatcgccgagttgcccaaggcggccatgccccagcagttcaagaacaaggccaacccggacatccaccgccgcaccacggccgaggagatttggaacgacaccgacggcaaggtggacgcggtggtggccggtgtcggcaccggcggcaccatcaccggcatcggccaggtgctgaagccgcgcaaggcctcgctcaagatgatcgcggtggagcccgaggattccccggtgctgtccggcggctcccccggcccccacaagatccagggcatcggcgccggcttcgtgccggacgtgctcgaccgctccatcatcgacgaggtggtgacggtgggcaaccagaccgcgttcgacaccgcgcgggcgctggcccgctacgagggcatccccggcgggatctcctccggcgcggccgtggcggcggcgctggagatcgcggtgcgcgacgacatggccggcaagtccatcgtggtgatcgtgccgtccttcgccgagcgctatctctcgacggccctgttcgaaggcctctga

SEQ ID NO: 40009 - protein, 328 aa, Xanthobacter autotrophicus Py2
MAGPAAKIVPAAQPRPGRGRVYDSITETIGNTPLVRLKRLAELRGAKAEILAKLEFFNPISSVKDRIGVAMIEAMEAAGVLDQDTVLVEPTSGNTGIALAFVAAARGYRLILVMPESMSVERRKMLAILGAELVLTPANLGMKGAVARAEQLIAELPKAAMPQQFKNKANPDIHRRTTAEEIWNDTDGKVDAVVAGVGTGGTITGIGQVLKPRKASLKMIAVEPEDSPVLSGGSPGPHKIQGIGAGFVPDVLDRSIIDEVVTVGNQTAFDTARALARYEGIPGGISSGAAVAAALEIAVRDDMAGKSIVVIVPSFAERYLSTALFEGL

SEQ ID NO: 40010 - DNA, 888 bp, gamma proteobacterium HTCC2207
  CDS (1)..(888): transl_table=11
atgcagtacccaactattgatcaaggcataggtaacaccagacttgtgcagttacagcgtatgccgggcaatacctcgaatactattcttgcgaaactggagggggataaccctgctggctcagtcaaagatcgtccggccctgagtatgataaaaaaggctcaggcgcggggagagattaagcctggagaccgtctgatcgaggccaccagtggcaatactggaatcgctctggctatggttgcggcgatgatgggctaccgtatgacccttattatgccggccaatgcaacggatgagcgcaaatgggccatgaccgcctacggcgccgaattgattgaagtgagcaaagagcagggcatggaaggtgcccgtgatttggcccgacagatgcaagagcaggggctgggcaaagtattggatcaatttaataatccggacaatcctctggcccactatgagggtaccgggccagaaatctggcgtgacactcagggctctataacccactttgttagttcgatgggcaccactggtaccattatggggacttcagcttatttaaagcagcagaatccggatattcaaattgttggcctacagccccaagagggtgcctctattcccggcattcgacgttggcctgcagcttatatgccgagtatttttgatgccgccaaagtagatcaaaccttagatatttctcagcaagcggccgaacagaccatgcgccgcttggcgacagaggaagggattttctgtggtgtttcagctgggggttctgtatccgccgcactagaaatcagtaagcaggtggaaaatgccgttatcgttgctattatttgcgatcggggtgatcgttacctctcatccggaatttacggataa

SEQ ID NO: 40011 - protein, 295 aa, gamma proteobacterium HTCC2207
MQYPTIDQGIGNTRLVQLQRMPGNTSNTILAKLEGDNPAGSVKDRPALSMIKKAQARGEIKPGDRLIEATSGNTGIALAMVAAMMGYRMTLIMPANATDERKWAMTAYGAELIEVSKEQGMEGARDLARQMQEQGLGKVLDQFNNPDNPLAHYEGTGPEIWRDTQGSITHFVSSMGTTGTIMGTSAYLKQQNPDIQIVGLQPQEGASIPGIRRWPAAYMPSIFDAAKVDQTLDISQQAAEQTMRRLATEEGIFCGVSAGGSVSAALEISKQVENAVIVAIICDRGDRYLSSGIYG

SEQ ID NO: 40012 - DNA, 939 bp, delta proteobacterium MLMS-1
  CDS (1)..(939): transl_table=11
atgagcgcaagccctgaaatcccggccagcgtggccggcctggtgggcgacaccccgctgttacgactggaacatatgagccgggagtgcggcgccgagattctggtcaagctggagtcacacaacccgatcttcagtgtcaaggaccgcattgccctggccatgctgacggcggcccgtcggcaggggctgatccagcccaccaccaccatcatcgaacccaccagcggcaacaccggcattgccctggccatgctctgcgccgcccaaagcctgcgcctgactttgaccatgccggaaaccatgagcgtggagcggcgggccctgctgcgccatctgggcgccaaactggtactgacccccggcccggaagggatgaaaggggccattgcccgggccgaggagttggccgccgccgacaccgacaccttcatccccaaccagttcaccaaccccgccaatccggagatccaccgccggaccaccgccgaggagatctggcgggccaccggcggggagcttgacctgttcgtggccggggtcggcaccggcggcaccatcaccggggtgggcgaagtcatcaaggagcgcctgcccggcttcaaggccttcgccgttgaacccgccgcttccccggtgctctccggcggcgctccgggaccgcataagatccagggcatcggggccggctttatcccggcggtgctcaacaccggcatcatcgacgaggtcatccaggtcagcaacgaggacgccattgccagcgcccggttgctggcggcccgggaaggggtgctggccggaatttcctccggggccaatctttacgccgccatgcagatcgccgcccgccccgagtttaaaggcaaacggatcgtcaccgtggtctgcgacaccggcgagcgctatctgagcaccgatctattccttaccgagtaa

SEQ ID NO: 40013 - protein, 312 aa, delta proteobacterium MLMS-1
MSASPEIPASVAGLVGDTPLLRLEHMSRECGAEILVKLESHNPIFSVKDRIALAMLTAARRQGLIQPTTTIIEPTSGNTGIALAMLCAAQSLRLTLTMPETMSVERRALLRHLGAKLVLTPGPEGMKGAIARAEELAAADTDTFIPNQFTNPANPEIHRRTTAEEIWRATGGELDLFVAGVGTGGTITGVGEVIKERLPGFKAFAVEPAASPVLSGGAPGPHKIQGIGAGFIPAVLNTGIIDEVIQVSNEDAIASARLLAAREGVLAGISSGANLYAAMQIAARPEFKGKRIVTVVCDTGERYLSTDLFLTE

SEQ ID NO: 40014 - DNA, 894 bp, Rickettsiella grylli
  CDS (1)..(894): transl_table=11
atgattttaaattctattttacgatcaataggcaatacgccactcgttaaattagaaaaaatagttccttttaagcaggttacacttttagccaaatgtgaatttaccaatccaagtgggagtatcaaagatagaattgttgattatattattactgatgctgaacaacggggggtattacagccgggggggagcattgtcgaaaatacttccggtaatacgggcgctgcaattgctttattagcggcgataaaaggttacgcggccattttgacgatgcccgataaagtgagtttagaaaaacaaaatgctttacgcgcttatggtgccaaaatagtcattaccccaacggctgtacttccagattcccctgaacattatgtcaatgtggctaagcgtattgccgctgaaacaccgaatagttttcgaatcgatcaatatgacaaccctaaaaaccccgaagcgcattatctcagcacagctccagaaatatggcagcaaacatcgggtaatattgatatttttattgcttcagggagcactggcggaacggtttcgggtattggtcgttttctcaaagaaaaaaatccgactataaaagtgttgatgcccgatccgattggatcagtttattacgactattttaaaacaggaaaaatttataaaaaaagaaacaataattatttcgttgaaggggttggtgaagatcatattgcaaaagcattggacttttccgttttggatgatgttattccctttagtgatccggatgcgtttatgatggcacggcgtttggcgaaagaagaaggcctgttagtaggcggctcctcaggcgctaatgtatgggctgcattaaaaattgctgccgaatgcaatcacccacgacaattgtaa

SEQ ID NO: 40015 - protein, 297 aa, Rickettsiella grylli
MILNSILRSIGNTPLVKLEKIVPFKQVTLLAKCEFTNPSGSIKDRIVDYIITDAEQRGVLQPGGSIVENTSGNTGAAIALLAAIKGYAAILTMPDKVSLEKQNALRAYGAKIVITPTAVLPDSPEHYVNVAKRIAAETPNSFRIDQYDNPKNPEAHYLSTAPEIWQQTSGNIDIFIASGSTGGTVSGIGRFLKEKNPTIKVLMPDPIGSVYYDYFKTGKIYKKRNNNYFVEGVGEDHIAKALDFSVLDDVIPFSDPDAFMMARRLAKEEGLLVGGSSGANVWAALKIAAECNHPRQL

SEQ ID NO: 40016 - DNA, 894 bp, Oceanobacter sp. RED65
  CDS (1)..(894): transl_table=11
atggattatcccactattgccgactttgttggcaacaccccattagttaagcttcagcgattggggcgtcagtctagcaataccattcttctaaagcttgagggtaataacccggcaggttcagttaaggatagaccagcgttaagtatgatcacggaagctgaagcccgtggagacatccaacctggcgataacctaatagaatctactagtggtaatacgggtattgcgctagccatggcagcagcgatgaaaggttacaatatgacattgatcatgcccgataacctgagcatggagagacgctgggcaatggaagcatacggagcggagctcatattggtgaccaaagacgaaggtatggagggggctcgcgacctggccttgaagatgcaagaggaaggtaaggggaaggtgttggatcaattcggtaatcaagataacccgcttgcccattataagggcacgggtcccgagatctggcgagatacaaaaggtactattacccactttgttagttccatgggaacaactggcactatcatgggcaccagtcgttatttgaaagaacagaacccaaatattcagattgtcggcttgcagccaaaagaaggcgctgcaattcctggtattcgtcgttggccagaagcttatttgccaaaaatatttgacgctacccgtgttgaccaagtgttagacattggtcaagaagaagcagaagtcaccatgcgagaattggccatgaaagaaggtattttctgcggggttagttctggtggttcggtagcagcggcattaaagttagatgaagagttggaaaatgcggtgattgtttgcattatttgtgacagaggcgaccgttatttatccactggcgttttttctacagagtga

SEQ ID NO: 40017 - protein, 297 aa, Oceanobacter sp. RED65
MDYPTIADFVGNTPLVKLQRLGRQSSNTILLKLEGNNPAGSVKDRPALSMITEAEARGDIQPGDNLIESTSGNTGIALAMAAAMKGYNMTLIMPDNLSMERRWAMEAYGAELILVTKDEGMEGARDLALKMQEEGKGKVLDQFGNQDNPLAHYKGTGPEIWRDTKGTITHFVSSMGTTGTIMGTSRYLKEQNPNIQIVGLQPKEGAAIPGIRRWPEAYLPKIFDATRVDQVLDIGQEEAEVTMRELAMKEGIFCGVSSGGSVAAALKLDEELENAVIVCIICDRGDRYLSTGVFSTE

SEQ ID NO: 40018 - DNA, 936 bp, Desulfitobacterium hafniense DCB-2
  CDS (1)..(936): transl_table=11
atgtcgaaaatcgccagaagtttaactgacctaattggcaataccccattattggaactgtccaattacaataggaccactgaattagaggctaaggtcatagcaaaacttgaatactttaaccctctttccagcgtcaaagacagaattggctacgccatgatcaaagacgcggaagagaaaggattgctgaacaaggatacggtcattattgagcccaccagtggcaatacaggaattgccttggcttttgtatccgctgcccgtggctatcgcttgattttaaccatgcctgaaaccatgagcgtggaaagaaggaacctgctcaaggctttgggagcggagctggtgctgactccaggaccggccggcatgaaaggagctattcaaaaagctgaggaattagctgctgaatataagaattcctttataccacagcagttcaacaatccggctaacccggaaattcataggcaaaccaccgctgaagagatctggagagatacagatggagaagtggatatctttgtggccggagtgggcaccggcggaacggtaaccggtgtgggtgaagccctgaagcagaagaaaccgggggtaaaagttatcgcggtggaaccggcagattcaccggtgctgtcgggaggaactcccggagctcataagattcagggtattggtgccggatttgtccccggtgtctatagctcagaagtcatcgatgaaattttccaggtcaaaaatgaggaagcttttgagacctctcgaaaactttcgaagacggaaggtctgctggttgggatttcctcaggtgctgcggcttatgcggcgacccaaatcgccaagagaccggaaaataaaggaaagaacatcgtcgttctactcccggatacgggggaaagatatctctccacggtcttattccaagaaggttga

SEQ ID NO: 40019 - protein, 311 aa, Desulfitobacterium hafniense DCB-2
MSKIARSLTDLIGNTPLLELSNYNRTTELEAKVIAKLEYFNPLSSVKDRIGYAMIKDAEEKGLLNKDTVIIEPTSGNTGIALAFVSAARGYRLILTMPETMSVERRNLLKALGAELVLTPGPAGMKGAIQKAEELAAEYKNSFIPQQFNNPANPEIHRQTTAEEIWRDTDGEVDIFVAGVGTGGTVTGVGEALKQKKPGVKVIAVEPADSPVLSGGTPGAHKIQGIGAGFVPGVYSSEVIDEIFQVKNEEAFETSRKLSKTEGLLVGISSGAAAYAATQIAKRPENKGKNIVVLLPDTGERYLSTVLFQEG

SEQ ID NO: 40020 - DNA, 969 bp, Synechococcus sp. RS9916
  CDS (1)..(969): transl_table=11
atggtgattgcctccgacatcacggccctggtgggacgcacgcctttggtgcgtctcaatcgtttgcctgcagccagtggttgcagggctgagctggtggcaaagctggaaagtttcaaccccaccgcctcggtcaaagaccggatcgccggggccatggtgcaggcggcagaagaggcgggcacgatctcaccagggcgcacggtgctggtggagcccaccagcggcaacaccgggatcgccttggcgatggtggcagcagcccgggggtaccgcctgattctcaccatgcccgacaccatgagcaccgagaggcgggcgatgttgcgggcctacggggcagaactgcagctcactccgggtactgaagggattcagggggcgattgacctggctcgggaactggtggatgaaatccctgaggcctacctgctgcagcagttcgccaaccctgccaaccccgcgatccacgcccgcaccaccgctgaagagatctgggctgacaccgaaggccagctggatgtgctggtggcaggggtgggcactggaggcacgatcaccggttgcggacgtctgctgaagcagcgtcatccaggtttgaaggtggtggcggtggagcctgcgggcagcgcggtgctcagcggtcagcccccaggcccccatcgcattcagggcatcggtgccggttttgtccccccagtgctggaccgtgacctcattgatgaggtgatggctgtcagtgatgaggaggcgatggtgatcggtcgtcgcctggcccgggaggaagggttgctcagtggtgtcagcagtggtgcggccgtggcggctgctcttcaactcggtcagcggccggagctggaaggcaaacggattgtggtgatcctcgccagcttcggtgagcgctatctctccacaccgatgttcagctcggccctgccgttgcccccgcggctggatggtcagttgtga

SEQ ID NO: 40021 - protein, 322 aa, Synechococcus sp. RS9916
MVIASDITALVGRTPLVRLNRLPAASGCRAELVAKLESFNPTASVKDRIAGAMVQAAEEAGTISPGRTVLVEPTSGNTGIALAMVAAARGYRLILTMPDTMSTERRAMLRAYGAELQLTPGTEGIQGAIDLARELVDEIPEAYLLQQFANPANPAIHARTTAEEIWADTEGQLDVLVAGVGTGGTITGCGRLLKQRHPGLKVVAVEPAGSAVLSGQPPGPHRIQGIGAGFVPPVLDRDLIDEVMAVSDEEAMVIGRRLAREEGLLSGVSSGAAVAAALQLGQRPELEGKRIVVILASFGERYLSTPMFSSALPLPPRLDGQL

SEQ ID NO: 40022 - DNA, 987 bp, Synechococcus sp. RS9916
  CDS (1)..(987): transl_table=11
atgtctcgcgtttacgccgataacagccaggcgatcggcaacacccctctggtgcgcctgaacaatgtcaccaagggctgcaaagccaccgtgctggccaaaatcgaaggccgcaaccccgcctacagcgtcaagtgccgcatcggcgcgaacatgatctgggacgccgagaagcgtggcgcgctcacggctgacaaaaccatcgtcgagcccacctccggcaacaccggtatcgctctggcttacaccgcagcagcccggggttacaagctgatcctgacgatgcccgagtcgatgtcgatcgagcgtcgccgcgtgatggccgctctgggtgctcagctgatcctcactgaagctgccaaaggcatgcctggcgccatcgccaaggccaaggaaatcgctgaaagcgattcagccaaatacttcatgcccggtcagttcgagaatcccgccaaccccgagattcacgaaaagaccaccggccctgaaatctggaacgactgcgacggtgccatcgacgtgctcgtgtctggcgtgggcaccggcggcaccatcaccggcatctcccgctacatcaagaacagcgctggcaaagcgatcgaatcggtcgcggtggagcccagccacagcccggtgatcacccaaaccatgaatggtgaggaggtgaagcccgggccccacaagatccagggcatcggtgccggcttcatccccaaaaacctcgacctttccgtggtcgacaaggtggagcaggtgaccaacgaggagtcgattgagatggctctgcgcctcgcccaggaggaaggccttctagtgggtatctcctgcggtgccgctgctgctgctgccatccgcctcgcccagcaggacgcctacgccggcaaaaccatcgtggtgatcctgcccgacctggccgagcgttatctctcctccgtgctgtttgccgacgtacccgcaggcatcatcgaggagcctgttgccgtctga

SEQ ID NO: 40023 - protein, 328 aa, Synechococcus sp. RS9916
MSRVYADNSQAIGNTPLVRLNNVTKGCKATVLAKIEGRNPAYSVKCRIGANMIWDAEKRGALTADKTIVEPTSGNTGIALAYTAAARGYKLILTMPESMSIERRRVMAALGAQLILTEAAKGMPGAIAKAKEIAESDSAKYFMPGQFENPANPEIHEKTTGPEIWNDCDGAIDVLVSGVGTGGTITGISRYIKNSAGKAIESVAVEPSHSPVITQTMNGEEVKPGPHKIQGIGAGFIPKNLDLSVVDKVEQVTNEESIEMALRLAQEEGLLVGISCGAAAAAAIRLAQQDAYAGKTIVVILPDLAERYLSSVLFADVPAGIIEEPVAV

SEQ ID NO: 40024 - DNA, 969 bp, Alteromonadales bacterium TW-7
  CDS (1)..(969): transl_table=11
atgtctactatttttgaagataactcacttagtatcggtaatacaccactggtaaaacttaaacgtgttacaggtgggaatgtattcgctaaagtggaagcgcgtaacccaagctttagtataaaatgccgcattggtgcatcgatgatttgggaggctgaaaaagcaggtcagctaactgagggtaaagaacttatcgagcctacatcaggtaatacaggtattgcattggccttcgttgccgcagcacgtggttataaactaacgcttaccatgcctaacactatgagcttagagcgtcgtaaacttctaaaagcactgggtgccaaccttgtgcttacagacggcgctaaaggtatgaatggtgcaatccaaaaagcaaaagagattcaagccaccgatcctgaaaagtatatcttgctacagcagtttgagaatccagcaaacccaaaaatacactttgagactacaggtccagaaatttttgatgctcttgacggaaaagtagattactttgtagcaggcgtaggtactggcgggactataacaggtgttagtcgctaccttaaaacagagaaaggtctaaatgttaagtctattgctgttgagccaactaattcgccagtgatcagccaaacactcgccggtgaagaagttaagcctgggccacataaaatccaaggtattggcgcaggatttatccctggaaacctagacatgagcctaatagatgctgcagagcaagtatctaacgaagatgcaattgcaatggcacatgagctaatgaaaaaagaaggtatactagtgggtatttcatcgggcgctgctgtagtggcagcaaaacgtattgctgaaaaaccagaaaatgccgacaaaaatattgttgttattttaccaagtgccactgaacgttacttatcaagcccgctatttgatgaggaatttagtgaccaagagcttgttcaataa

SEQ ID NO: 40025 - protein, 322 aa, Alteromonadales bacterium TW-7
MSTIFEDNSLSIGNTPLVKLKRVTGGNVFAKVEARNPSFSIKCRIGASMIWEAEKAGQLTEGKELIEPTSGNTGIALAFVAAARGYKLTLTMPNTMSLERRKLLKALGANLVLTDGAKGMNGAIQKAKEIQATDPEKYILLQQFENPANPKIHFETTGPEIFDALDGKVDYFVAGVGTGGTITGVSRYLKTEKGLNVKSIAVEPTNSPVISQTLAGEEVKPGPHKIQGIGAGFIPGNLDMSLIDAAEQVSNEDAIAMAHELMKKEGILVGISSGAAVVAAKRIAEKPENADKNIVVILPSATERYLSSPLFDEEFSDQELVQ

SEQ ID NO: 40026 - DNA, 966 bp, marine gamma proteobacterium HTCC2143
  CDS (1)..(966): transl_table=11
atggccgcttttaatgacaacagtttagcaataggtcaaacccctttggtgcgattaaaccgaataggtgatggcaacattttcgccaaggtagagagccgcaaccccgccaactgcgtgaagtgccgtatcggctccaatatgatttgggaagccgaaaagtcaggcttactgaaacctggaatggaaatcgttgaacccaccagcggcaataccggcattgcactgtcatttgttggcgctgccagaggttacaaagtcacattggttatgcctcacacaatgagcctagagcgacgccagctgatgaaagctcttggtgccaatgttgttatcaccgacgctgcgaaaggcatcaaactttgcatcgataccgcccaacaattagtcgctgaggcacccgaccagcgctggatgcccagtcaatttgataatcctgccaatcccgctatccatgagcaaacaacggggcccgagatctgggaagatactgatggcggcgttgatgttctcatctgcggtgttggcacaggtggcacgctaaccggtatctcgcgctaccttaaaaacactcggggtaaagcgataacctcagttgctgttgaacctatgtcgacaacgatgatcaccgcagccaaagccggtgaagagcccgtacatggccctcacaaagtccagggcatcggtgccggatttgttcccgccaaccttgatctggacatggttgatcaagttgagcaggtcagcgacgaagacgctatcgagtatgcccatcgattaatgaaagaagaaggcatactcgccggcatatccagtggcgccgctgcggccatcgcccatcgcgtttcacagcagcccgaacacaaaggtaaaaccatcgttgtgatcttacccgactcagcagaacgctacctttcaacccccttatttgaaggtcagtttagtgacaatgaaacagttcaataa

SEQ ID NO: 40027 - protein, 321 aa, marine gamma proteobacterium HTCC2143
MAAFNDNSLAIGQTPLVRLNRIGDGNIFAKVESRNPANCVKCRIGSNMIWEAEKSGLLKPGMEIVEPTSGNTGIALSFVGAARGYKVTLVMPHTMSLERRQLMKALGANVVITDAAKGIKLCIDTAQQLVAEAPDQRWMPSQFDNPANPAIHEQTTGPEIWEDTDGGVDVLICGVGTGGTLTGISRYLKNTRGKAITSVAVEPMSTTMITAAKAGEEPVHGPHKVQGIGAGFVPANLDLDMVDQVEQVSDEDAIEYAHRLMKEEGILAGISSGAAAAIAHRVSQQPEHKGKTIVVILPDSAERYLSTPLFEGQFSDNETVQ

SEQ ID NO: 40028 - DNA, 1008 bp, marine gamma proteobacterium HTCC2143
  CDS (1)..(1008): transl_table=11
atgacaagtcataacacgttaccggatatgatcggcaatacaccgctggtctatttgcgcgaggtttcggaagcaaccggctgcgaaatttacgggaaggccgaattccttaatcccggcggatcaatcaaggaccgaaccgcactggggatcatccgcgatgctgaaaccaaaggacaattgcatcctggtggcactattgtcgagggcacagcgggtaatacaggcattgggttaacactaattgccaatgctttaggctacaaaagtgttgtcgttatgccgcaaactcagagcaaagaaaagatcgaaatactcgatttatatggtgccgacttacggctggtcaaagccgcccgttacgacgaccccaaacactatgttcaccaagcccaacgattggccgaaaagctaaataaaacctgtgaaaacggcgccatttgggcagggcagttcgacaacctggctaatatggacatacatagccgtacaaccggtgaagaaatatggcaacaaactaacggtaaagtggatggatttatctgcgccgctggcacgggaggaaccttagcaggtgtttctaatgcgctgaagactcatagttcagccatcaaaattggcattgccgacccaatgggctcgtctctttacaattactacaacagcggtgaactcaagtcagaggggcgttcaatatccgaagggatcggcatcagtattgttacggaaaacattaaacaggcaatcgttgacatggcctaccaaataagtgatgaagaagcgctaccctatatttacagccttcttaaacatgaaggtctctgtctcggtggctcttcagccatcaatattgcaggggcagtccatctcgccaatgaaatggggcccgggcacaccatagtcaccatactatgcgactacgggaatcgataccaaagcaaattatataaccctgcttttttgcgaagaatgaaattacccgtcccgcaatggctcgatgataaatag

SEQ ID NO: 40029 - protein, 335 aa, marine gamma proteobacterium HTCC2143
MTSHNTLPDMIGNTPLVYLREVSEATGCEIYGKAEFLNPGGSIKDRTALGIIRDAETKGQLHPGGTIVEGTAGNTGIGLTLIANALGYKSVVVMPQTQSKEKIEILDLYGADLRLVKAARYDDPKHYVHQAQRLAEKLNKTCENGAIWAGQFDNLANMDIHSRTTGEEIWQQTNGKVDGFICAAGTGGTLAGVSNALKTHSSAIKIGIADPMGSSLYNYYNSGELKSEGRSISEGIGISIVTENIKQAIVDMAYQISDEEALPYIYSLLKHEGLCLGGSSAINIAGAVHLANEMGPGHTIVTILCDYGNRYQSKLYNPAFLRRMKLPVPQWLDDK

SEQ ID NO: 40030 - DNA, 906 bp, marine gamma proteobacterium HTCC2143
  CDS (1)..(906): transl_table=11
atggaattcccaacgattgaagattatgtgggcggcagtcctcttgttagattgcagcgtattaacggcactacgtcctctaatactattctccttaaactagagggtaataacccggccggttcagttaaagatagacctgcgctcagtatgataaatcgggcggaagcgcgcggtgatattaaagcaggggacacgctaatagaggcgacaagcggcaatactggtattgcactagcgatggtggcagcaatcaaagggtacaacctaaagctgattatgccatcccacatgagccaggagagaaaattagcgatggctgcatacggtgcagagcttatcgatgtaacccagaaagagggcatggaaggagccagagatttggcgttgcagatgcaagctgatggtcagggcgtcgttttggaccagtttgctaatgtggataatccaatggcacattacgagggaacggggcctgaaatatggcgtcaatcgcaaaaaagagttacccattttgtcagttctatggggacaacaggcacgattatgggtgtgtcgaaatttttaaaagagcaaaatcccaacatcgaaattgtcggattgcagccctgtgacggatcaagtattccggggatacggcgctggccagaggcgtatcttcctagtattttcgaacgcacgcgtgttgaccgggttatagatgtcgatcagcgggatgctgaagtaatgatgaagcgacttgcggcagaagagggtgttttttgcggtgtgtcgtccggagggtccgttgttggtgctctgaagattgccgaacatgttgaaaatgcagtgattgttgcaattatctgcgatcgtggtgatcgctatctgtcaacgggtgtttttgattcaacgttacagaaatga

SEQ ID NO: 40031 - protein, 301 aa, marine gamma proteobacterium HTCC2143
MEFPTIEDYVGGSPLVRLQRINGTTSSNTILLKLEGNNPAGSVKDRPALSMINRAEARGDIKAGDTLIEATSGNTGIALAMVAAIKGYNLKLIMPSHMSQERKLAMAAYGAELIDVTQKEGMEGARDLALQMQADGQGVVLDQFANVDNPMAHYEGTGPEIWRQSQKRVTHFVSSMGTTGTIMGVSKFLKEQNPNIEIVGLQPCDGSSIPGIRRWPEAYLPSIFERTRVDRVIDVDQRDAEVMMKRLAAEEGVFCGVSSGGSVVGALKIAEHVENAVIVAIICDRGDRYLSTGVFDSTLQK

SEQ ID NO: 40032 - DNA, 906 bp, marine gamma proteobacterium HTCC2080
  CDS (1)..(906): transl_table=11
atgaatcccgctgaaaattcgtaccccacgattgagagtgttgtgggggaaacccctttagtacgtttgcagaggctggtgcagaactccagtaaccatgtgctttgtaaactcgagggcaataatcccgcaggttctgtgaaggataggcctgcgttgagtatgattgttgaggctgaagctcggggcgatattcaacctggggatacgttgattgaggcgactagtggtaacacgggaattgccctggctatggctgctgcgattcggggctaccatatgcgcttgattatgcccgctcacatgagttcggagcgaaaattggcgatggcggcttatggcgccgagcttattcaggtggctcgagaggagggtatggagggtgcaagagacctggcggaggctatgcaggctcgaggagagggcacggttcttaatcagtttggaaactttgataacccgttggcgcattaccgtggcaccggaccagaaatttggcgccagaccggtggacaagtaacgcactttattagctcgatgggcaccacgggaactatcatgggagtctcagcctttttaaaggaacaaaatcccgacattgagatcattggcttacaacctcaagatggctctcagatcccaggaataaggcgttggtcagaggcgtatcggccaacaatttttcagtcagcgaaggtcgaccgtaccattgacatttctcaggcggaatccgaagttatgatgcgccggctcgccagtgaggaggggatttttgctggagtctcttccgggggggcaatcagtgctgcactgcaagtcagtcaggaagttgagggcgcaaccattgtcgcgatcgtttgtgatcgaggcgatcgctatctttcgacgggtgtttacgaaatttga

SEQ ID NO: 40033 - protein, 301 aa, marine gamma proteobacterium HTCC2080
MNPAENSYPTIESVVGETPLVRLQRLVQNSSNHVLCKLEGNNPAGSVKDRPALSMIVEAEARGDIQPGDTLIEATSGNTGIALAMAAAIRGYHMRLIMPAHMSSERKLAMAAYGAELIQVAREEGMEGARDLAEAMQARGEGTVLNQFGNFDNPLAHYRGTGPEIWRQTGGQVTHFISSMGTTGTIMGVSAFLKEQNPDIEIIGLQPQDGSQIPGIRRWSEAYRPTIFQSAKVDRTIDISQAESEVMMRRLASEEGIFAGVSSGGAISAALQVSQEVEGATIVAIVCDRGDRYLSTGVYEI

SEQ ID NO: 40034 - DNA, 1053 bp, marine gamma proteobacterium HTCC2080
  CDS (1)..(1053): transl_table=11
gtgtctgacatttatcaaacgcaaggccgagggcaactttacggagatataacacgtacggtaggcgacacaccctgcgtcaagctcaatcgcatagcacccgatcacgtcgaggtttacgtcaaggtcgaatccttcaacccgttgggctcagtgaaggaccggcttgcgctgaatataattgaggcggcagagcgcagcggccaactcaagccggggcaaactgttgtcgaggccacctcggggaataccggcatcggactggcgatggtttgtgccgcgcgaggttaccccctggtgatcaccatggcagacagcttttccattgagcgccgtcggcttatgcggttcctaggtgccaaagttgttctcaccccaaaggccgaaaaaggcattggcatgtatcgcaaagcgcgccagcttgcagccgacaatggctggttctttgcggcccagtttgaatcgaacgccaatgcggatattcatgaggcgacaacgggccccgagatcgtggctgattttgccgattcacgacttgattactgggtctcgggttatggcactggcgggacggtttcaggcgtcgcgcgggtacttcgcaaagagcggcccgaatgcaaaatcattctttccgagccccataccgcgaccttgataggatcaggagaggctcaggtgcgcaacgatgacggatcacccaacggcagtcaccccgcttggtctccccacctcattcagggctggacacccgactttattccactggtcctacaggaaagcattgatcacaacggcttcgatgagattcttccggtcgatgccgaagacgggatgacttgggccaaaaggctggccactgaagaaggcatactcaccggtgtctcggggggctccactttagcaaccgccatggaggttgctgctggtgccgaagccggctcagtcatgttggttatgttgcccgatacgggggaacgctatctctcaacaccactgtttgaagctatccccgctgaaatgacgccagaggagcaggcgctagccgacagctaa

SEQ ID NO: 40035 - protein, 350 aa, marine gamma proteobacterium HTCC2080
MSDIYQTQGRGQLYGDITRTVGDTPCVKLNRIAPDHVEVYVKVESFNPLGSVKDRLALNIIEAAERSGQLKPGQTVVEATSGNTGIGLAMVCAARGYPLVITMADSFSIERRRLMRFLGAKVVLTPKAEKGIGMYRKARQLAADNGWFFAAQFESNANADIHEATTGPEIVADFADSRLDYWVSGYGTGGTVSGVARVLRKERPECKIILSEPHTATLIGSGEAQVRNDDGSPNGSHPAWSPHLIQGWTPDFIPLVLQESIDHNGFDEILPVDAEDGMTWAKRLATEEGILTGVSGGSTLATAMEVAAGAEAGSVMLVMLPDTGERYLSTPLFEAIPAEMTPEEQALADS

SEQ ID NO: 40036 - DNA, 990 bp, Escherichia coli B
  CDS (1)..(990): transl_table=11
atggcaaggtttgtaacctgtaggcctgataagacgcgcaagcgtcgcatcaggcaacaccacgtatggatagagatcgtgagtacattagaacaaacaataggcaatacgcctctggtgaagttgcagcgaatggggccgaataacggcagtgaagtgtggttaaaactggaaggcaataacccggcaggttcggtaaaagatcgtgcggcgctttcgatgatcgtcgaggcggaaaagcgcggggaaattaaaccgggtgatgtgttaatcgaagccaccagtggtaacaccggcattgcgctggcaatgattgccgcgcttaaaggctatcgcatgaaattgctgatgcccgacaacatgagccaggaacgccgtgcggcgatgcgtgcttatggtgcggaactgattcttgtcaccaaagagcagggcatggaaggtgcgcgcgatctggcgctggagatggctaatcgtggtgaaggaaagctgctcgatcagttcaataatcccgataacccttacgcccattacaccactaccgggccggaaatctggcagcaaactggcgggcgcattacccattttgtctccagcatgggaacaaccggcactatcaccggcgtttcacgctttatgcgcgaacaatccaaaccggtgaccattgttggcctgcagccggaagagggcagtagcattcccggcattcgccgctggcctgcggaatatctgccggggattttcaacgcttctctggtggatgaggtgctggatattcatcagcgcgatgcggaaaacaccatgcgcgaactggcggtgcgggaaggaatattctgtggcgtcagctccggcggcgcggttgccggagcactgcgggtggcaaaagctaaccctggtgcggtggtggtagcgatcatctgcgatcgtggcgatcgctacctttccaccggggtgtttggggaagagcattttagtcagggggcggggatttaa

SEQ ID NO: 40037 - protein, 329 aa, Escherichia coli B
MARFVTCRPDKTRKRRIRQHHVWIEIVSTLEQTIGNTPLVKLQRMGPNNGSEVWLKLEGNNPAGSVKDRAALSMIVEAEKRGEIKPGDVLIEATSGNTGIALAMIAALKGYRMKLLMPDNMSQERRAAMRAYGAELILVTKEQGMEGARDLALEMANRGEGKLLDQFNNPDNPYAHYTTTGPEIWQQTGGRITHFVSSMGTTGTITGVSRFMREQSKPVTIVGLQPEEGSSIPGIRRWPAEYLPGIFNASLVDEVLDIHQRDAENTMRELAVREGIFCGVSSGGAVAGALRVAKANPGAVVVAIICDRGDRYLSTGVFGEEHFSQGAGI

SEQ ID NO: 40038 - DNA, 939 bp, Pseudomonas putida GB-1
  CDS (1)..(939): transl_table=11
atgataggcgcccctgccgtccggattgtgaaatacgccatgaccttgcagtacccaaccatcgccgattgcgtcggcaatacgcccctggttcgcctgcagcgcattgctggtgaaaccagcaacaccctcctgctcaagctcgaaggtaacaatcctgccggctcggtgaaggaccgcccggcgctgtcgatgatcacccgcgccgaactgcgtgggcagatcaagcctggcgacaccctgatcgaagccacatccggtaacaccggcatcgccctggcgatggcggcggcgatcaagggctacaagatgatcctgatcatgcccgacaactccactgccgagcgcaaggccgccatgaccgcctatggcgccgagctgatcctggtgaccaaggaggagggcatggaaggcgcccgcgacctggccgagaagctgcaggccgaaggtcgtggcctggtgctcgatcagttcgccaacggcgacaacccaattgcccactacaacagcaccgggcccgagatctggcagcagacccagggcagcattacccatttcgtcagctccatgggcaccaccggcaccatcatgggctgctcgcagtacctcaaggagcaaaacccggcggtgcagatcatcggcctgcaaccgatggaaggctcggccattccaggtatccgccgctggcccgaggaatacctgccaaagatcttcgacgccacccgcgtcgaccgtgtggtcgacatgtcgcagcaggaagccgaagacaccacccgtcgccttgcccgtgaagagggcattttctgcggtgtgtcctccggtggtgcggtcgctgccatgctgcgcctgtcccgcgaagtggaaaatgccgtgatggtcgcgatcatctgcgaccgtggcgaccgttacctgtccaccggcctgtttgacccgagctaa

SEQ ID NO: 40039 - protein, 312 aa, Pseudomonas putida GB-1
MIGAPAVRIVKYAMTLQYPTIADCVGNTPLVRLQRIAGETSNTLLLKLEGNNPAGSVKDRPALSMITRAELRGQIKPGDTLIEATSGNTGIALAMAAAIKGYKMILIMPDNSTAERKAAMTAYGAELILVTKEEGMEGARDLAEKLQAEGRGLVLDQFANGDNPIAHYNSTGPEIWQQTQGSITHFVSSMGTTGTIMGCSQYLKEQNPAVQIIGLQPMEGSAIPGIRRWPEEYLPKIFDATRVDRVVDMSQQEAEDTTRRLAREEGIFCGVSSGGAVAAMLRLSREVENAVMVAIICDRGDRYLSTGLFDPS

SEQ ID NO: 40040 - DNA, 894 bp, Marinobacter sp. ELB17
  CDS (1)..(894): transl_table=11
atgtattttccaaccattgaagattatgttggtaaaaccccgctggttcgcctgcagcgcctgccaggcgataccagtaatgtcatccttgccaaactggaaggtaataatccggccggttcggtcaaagatcggcccgcgattagcatgatccaacaagccgaaatccgcggcgacatcaagcccggcgataccctgatcgaagccaccagcggtaataccggtattgccctggctatggcggcggcgataaagggttaccgcatggtgttgattatgccctccaatatgagcgaagagaggcgcgcgtccatgcgcgcttatggcgccgaaattattgcggtgagcaaggaagacggtatggaaggcgcccgcgatctggccgaacgcatgcaggccgaaggcaaaggcaaggttctggaccagttcgccaatgctgacaacccactggcgcactaccgcaccaccggccctgaaatctggcagcagaccaatggccgggtaacccatttcgtggcctctatgggcaccacgggcacggttatgggcgtgtcccgctatttgaaagagcgcaaccccgacgtccgcattgttggcctgcaaccgagcgagggcgcggccataccgggcattcggcgctggccagaagcctatatgcctaaaatttttgatgccaaggcggttgatcaggtaatggatattggtcaggtcgaggccgaaaccacgatgcgcgcgctggccgaaaaagaaggtattttttgcggtgtatcgtctggcggttccatcgccgcggcgctgcgactttcccaaacgcttgaaaacgccgttatcgtgggcattatctgtgaccgtggtgaccgctacctgtctaccggcgtatttcctggcgcctga

SEQ ID NO: 40041 - protein, 297 aa, Marinobacter sp. ELB17
MYFPTIEDYVGKTPLVRLQRLPGDTSNVILAKLEGNNPAGSVKDRPAISMIQQAEIRGDIKPGDTLIEATSGNTGIALAMAAAIKGYRMVLIMPSNMSEERRASMRAYGAEIIAVSKEDGMEGARDLAERMQAEGKGKVLDQFANADNPLAHYRTTGPEIWQQTNGRVTHFVASMGTTGTVMGVSRYLKERNPDVRIVGLQPSEGAAIPGIRRWPEAYMPKIFDAKAVDQVMDIGQVEAETTMRALAEKEGIFCGVSSGGSIAAALRLSQTLENAVIVGIICDRGDRYLSTGVFPGA

SEQ ID NO: 40042 - DNA, 918 bp, Sporosarcina halophila
  CDS (1)..(918): transl_table=11
atgagttatgtcaggaatgttcaatcgttaatcggtcatacaccgatgatcgagcttactcactcggacatcccgaatcaagcgcgtatttttgctaagcttgaattcatgaacccaggcggtagtataaaagaccgtctgggtttaaaactgattgaggacgccttgaatagagggctactaaagccgggcggaacgattattgaagctaccgcaggcaacacaggcattggagttgcccttgctgctgttggaaaaggataccgcgttgtgtttgtcacccctgaaaagttcagtcaagagaaacagacactgatgagggctctcggcgcagaagtgattaacactcccacagaagaagggatgcgcggagccatcaaaaaagcggatgaattggttaatgacattccagattcatttaatctgcagcagtttaataatcaagcaaaccccgatgcatactacgaaacgttaggacctgagatacacacagatttgaatggagaaattgacattttccttgctggtgctggaacaggtggaacctttatgggaacttcccgctatttaaaagagcagaatccagcgatcaagacagtaattgtcgaaccagaaggctctgtcattaatggagggaaggctggtccgcatgatacagaagggattggcatggaattcctgcctttttatatggacacctcttattttgatgctattcatacgattccggattccattgcctttcaacgtgtaaaggaactggcattaaatgaagggctgcttgtagccagctcatccggagcagcttttgaagcggctctgcgtgaagcggagcaagctgaacctggtgccagaattgtaacggtctttccggatagcagtgaacgatacttaagccaagggatatatgaggagtga

SEQ ID NO: 40043 - protein, 305 aa, Sporosarcina halophila
MSYVRNVQSLIGHTPMIELTHSDIPNQARIFAKLEFMNPGGSIKDRLGLKLIEDALNRGLLKPGGTIIEATAGNTGIGVALAAVGKGYRVVFVTPEKFSQEKQTLMRALGAEVINTPTEEGMRGAIKKADELVNDIPDSFNLQQFNNQANPDAYYETLGPEIHTDLNGEIDIFLAGAGTGGTFMGTSRYLKEQNPAIKTVIVEPEGSVINGGKAGPHDTEGIGMEFLPFYMDTSYFDAIHTIPDSIAFQRVKELALNEGLLVASSSGAAFEAALREAEQAEPGARIVTVFPDSSERYLSQGIYEE

SEQ ID NO: 40044 - DNA, 1290 bp, Glycine max
  CDS (128)..(1105)
gaaggcagaaacaggcaaagagctcatagaaattctcgtcctcttcctacataagtcttctcttatcataaacgcgtgttgctcggataaggttgtgctgcggtgattcactcgtactttgcttaatatggcggttgagaagttgagcattgcaaaagatgtgactgaattaattggcaaaactccattggtatatctcaaccgcatcgtggatggctgtgttgccaaagttgctgcgaagctagaaatgatggaaccttgctccagtgtcaaagacaggatagggtatagcatgattgtagatgctgaggagaaaggattcatcacaccgggtgaaagtgtcctcattgagcctactagtggaaacacgggcataggtttggcattcatggcagctgctaagggttataaacttattataaccatgccttcttcgatgagtctcgaaagacgaaccattcttcgggcttttggagctgagttagtcctcactgatcccgccaaaggtatgaaaggagctgttcagaaggcagaagagattcgggataagactccaaattcttatattcttcagcaatttgaaaatcctgccaacccaaagatccattatgaaaccactggaccggagatctggaagggctctagtgggaaggttgatgctcttgtctctgggattgggactggaggtacaataacaggtgctggaaaatatctgaaagatcagaaccctgatataaagctatatggcattgaaccagtagaaagtccaatactgtctggaggaaaacctggccctcataagatccaaggaattggtgctggcttcatccctggtgttctggatgtcgatttacttgatgaagttgttcaaatttcaagtgaagaagccattgaaactgctaaacttcttgctttgaaagaaggtttgctggtgggaatatcatctggtgcagctgcagctgctgcaattaagatagcaaagaggccagaaaatgctggaaaactcattattgcggtcttcccaagctttggagagcgttatttatcatctgtgctctttgaatccgtgaggcgagaagcagagagcatggtcttcgagccttgaatatgaagttatacgagccatttgctgcttttcaggttgcattctctccttgggttgtgtatctattttttctcttatggatctgaaaaataaaaaatggtttatgtttggttgttaattgactacgatttaataaaaaatataagatgtttgctggaaaaaaaaaaaaaaaaaaaaaaaaaagt

SEQ ID NO: 40045 - protein, 325 aa, Glycine max
MAVEKLSIAKDVTELIGKTPLVYLNRIVDGCVAKVAAKLEMMEPCSSVKDRIGYSMIVDAEEKGFITPGESVLIEPTSGNTGIGLAFMAAAKGYKLIITMPSSMSLERRTILRAFGAELVLTDPAKGMKGAVQKAEEIRDKTPNSYILQQFENPANPKIHYETTGPEIWKGSSGKVDALVSGIGTGGTITGAGKYLKDQNPDIKLYGIEPVESPILSGGKPGPHKIQGIGAGFIPGVLDVDLLDEVVQISSEEAIETAKLLALKEGLLVGISSGAAAAAAIKIAKRPENAGKLIIAVFPSFGERYLSSVLFESVRREAESMVFEP

SEQ ID NO: 40046 - DNA, 1287 bp, Glycine max
  CDS (128)..(1105)
tggcaccaactgatttagcaaaatttccaaagcaagaaaaataataatacaagtatctacagtattaaatatagacagattttttgttaaatcacaccatttccaaagcattgtaggagctgatatcatggcagttgaaaagtctggaatagccaaagatgtttttttactgattggcaaaaccccaatagtatatctgaataaaatcgcagacggttctgttgcccgggttgctgccaaactggaattgatggagccatgctctagtgtaaaagacaggattgcctatagtatgattgctgatgcagagaagaagggacttatcacacctggacagagtatcctcattgagccaacaagtggtaatactggtattggattagcattcctggcagcagccaagggctacaagcttataattacaatgcctgcttcaatgagtcttgaaagaagaaccattcttctgtcttttggagctgagttggttctgacagatcctgcaaagggaatgaaaggggcagttccaaaagcagaagagatattagataagactcccaacgcctacatacttcagcaatttgaaaaccctgccaatcctaaggtacattatgaaaccactggtccagagatatgggaaggcacaagagggaaagttgatgcacttgttagtggtataggcactggtggtaccataacaggtgcagggaaatttcttaaagagaagaatcctaatataaagctctatggtgtggaaccagttgaaagtccagtactctctggaggaaaacctggtccacacaagattcaagggattggtgctggttttgtccctggagtattggaagttagccttgtagatgaagtagttcaaatatcaagtgatgaagcaatagaaactgcaaagcttcttgcacttcaagaaggcctatttgttggaatatcatctggagctgcagctgcagctgccattaagatagcaaaaagaccagaaaatgctggaaagcttattgttgttattttcccaagctttggtgagagatacctatcctctgtgctgtttgagtcagtcagacgggaagctgaaagcctgacttttgaatcctgatttcaagtggtggattttaactggcgaaaccagtgatccttgtgatacagattgtgattcttaaataaacattacttcaaaagaaaagaaaggaaaatttgtcattatgcaacatacttctgaaataatttagaaggccactttattaatggaatatgatgttatccgaaaaaaaaaaaagg

SEQ ID NO: 40047 - protein, 325 aa, Glycine max
MAVEKSGIAKDVFLLIGKTPIVYLNKIADGSVARVAAKLELMEPCSSVKDRIAYSMIADAEKKGLITPGQSILIEPTSGNTGIGLAFLAAAKGYKLIITMPASMSLERRTILLSFGAELVLTDPAKGMKGAVPKAEEILDKTPNAYILQQFENPANPKVHYETTGPEIWEGTRGKVDALVSGIGTGGTITGAGKFLKEKNPNIKLYGVEPVESPVLSGGKPGPHKIQGIGAGFVPGVLEVSLVDEVVQISSDEAIETAKLLALQEGLFVGISSGAAAAAAIKIAKRPENAGKLIVVIFPSFGERYLSSVLFESVRREAESLTFES

SEQ ID NO: 40048 - DNA, 972 bp, Glycine max
  CDS (1)..(972)
atggagccacagtgtgcaatcaagaaagatgccactgaattgataggtaataccccaatggtatacctgaacaacatagtggaggggtgtatggcccgcattgctgctaagttagagtccatgcaaccttgcttcagtatcaaagataggacagcatttagcatgatcaaagatgctgaggataaaggcctcattacaccgggaaagagtgttcttgttgaggctacaagtgggaacacgggcattggaatggcattcgtagcaacattgaaggggtataaagtcatagtggctatgccagcttctgtgagtcttgagagaaaaattgtacttcgagcctttggagctgaagtctatctcactgaccctgccaaaggaaccgatgcagttcttaggaaggccgaggagatagtgaataacacgcccggaagttacatgctccgccagatagataatcctgctaatccaaaaattcattacgagaccactggtcctgagatttggagagactccggagggaaagttgatgctttggttgcaggggtaggaaccgggggtaccataacgggtgctggcagattcctcaaggagagaaaccccaatgtcaagctgtacggcatagaaccggttgaaagtacagtcctcagtggaggaccgccaggtgatcacctaatccaagggattggtaatggtctcattccaagtgtactggattttaatctcctagatgaagttattcagatatcaagtgaagaagctatagaaactgctaagcttcttgctttaaaagaaggtttgttgatgggaatttcatcaggagccgcagctgcagctgccataaaattggggaagagaccagaaaatgccggaaaactcatcgttgtggtatttcctagttacggggagcgttatttatcttcaccattgtttgaatccattcggcatgaagctgaacatatgacatttgattaa

SEQ ID NO: 40049 - protein, 323 aa, Glycine max
MEPQCAIKKDATELIGNTPMVYLNNIVEGCMARIAAKLESMQPCFSIKDRTAFSMIKDAEDKGLITPGKSVLVEATSGNTGIGMAFVATLKGYKVIVAMPASVSLERKIVLRAFGAEVYLTDPAKGTDAVLRKAEEIVNNTPGSYMLRQIDNPANPKIHYETTGPEIWRDSGGKVDALVAGVGTGGTITGAGRFLKERNPNVKLYGIEPVESTVLSGGPPGDHLIQGIGNGLIPSVLDFNLLDEVIQISSEEAIETAKLLALKEGLLMGISSGAAAAAAIKLGKRPENAGKLIVVVFPSYGERYLSSPLFESIRHEAEHMTFD

SEQ ID NO: 40050 - DNA, 1172 bp, Glycine max
  CDS (19)..(993)
tgttattgagcagatagcatggaggagcctcaatgtgcaatcaagaaggatgccactgaattggtagggaataccccaatggtatttctgaacaacattgttgtcgggtgtgtagcccgtattgctgctaaactggagtacatgcaagcgtgctgtagtgtcaaagataggattgctttgagcatgattgaagatgctgagaaaaaaggccttattacacctggaaagactgttctggttgagtatacaagtggtaacaccggcataggattggcattcatagcagcattgaggggttataaacttcaggtgactatgccgtcttacgtgagtcttgagaggaaaattatactgcgagcctttggagctgaggtatatcttacagaccctgccaaaggaattgatggggttattcagaaggcagaagaactaatagccaagacgcctgatagttttatgctcaaccaatttgaaaatcctgccaatccaaatattcattacgagacaacaggccctgagatttggagggactcgggagagaaaattgatgctttggtttcaggaataggaactgggggttcaatagcaggagctggaagattcctcagggagaaaaacccggatattaagctgtatggtgtggagccagctgaaagtccagttttgaatggaggacagccaggtaagcacctgattcaaggaattggtgctggtatcattcccaaagttctggatgtaaatctcctagatgaagttattcaggtttcaagtgaagaggctatagaaactgttaagctgcttgccttgaaagaaggtttgctgatgggaatttcatcaggagctgctgcagcagcggcaataaaggtggggaagagaccagaaaatgcaggaaagctcattgttgtgattttccccagttttggagaacgttacttatcttcaccactgtttgaatccattaggaaagaagctgaacaaatgacatttgattaaggtgcataaatagcttaggctagtactcactgagtacccgttaagcaagcactattgtcggtatagtgtggtttaaaataagttgaataacatctggattgacacttcaagcttcaatttcttgcttatgaaaataacccaacattacccaaaaaaaaaaaaaaaaaaaaaaaaaaagt

SEQ ID NO: 40051 - protein, 324 aa, Glycine max
MEEPQCAIKKDATELVGNTPMVFLNNIVVGCVARIAAKLEYMQACCSVKDRIALSMIEDAEKKGLITPGKTVLVEYTSGNTGIGLAFIAALRGYKLQVTMPSYVSLERKIILRAFGAEVYLTDPAKGIDGVIQKAEELIAKTPDSFMLNQFENPANPNIHYETTGPEIWRDSGEKIDALVSGIGTGGSIAGAGRFLREKNPDIKLYGVEPAESPVLNGGQPGKHLIQGIGAGIIPKVLDVNLLDEVIQVSSEEAIETVKLLALKEGLLMGISSGAAAAAAIKVGKRPENAGKLIVVIFPSFGERYLSSPLFESIRKEAEQMTFD

SEQ ID NO: 40052 - DNA, 1005 bp, Magnetospirillum gryphiswaldense
  CDS (1)..(1005): transl_table=11
atggccaagattcgtgccgatttcaacgacaccatcggcaacacccccctgatcaagctgaagcgggcgtcggagatcaccggttgcaccatcctgggcaaggcggaattcctcaatcccggcggttcggtcaaggaccgcgcagccctggccatcatcaccgacgccgaggacaaaggcctgctgaagcccggcggggtgatcgtcgagggcacggcgggcaataccggtatcggcctggccctggtcgccaatgcgcgcggctatcgcaccgtcatcgtcatgccggaaacccaaagtcaggaaaaaaaggacatgctgcggctggtgggcgccgatctgcggctggtccccgccctgccctacgccaatcccggcaattacgtgcgctattcggaaaccctggccaaggaactggcggccaatgagccggcgggggtgttgtgggccaaccagttcgacaacacggccaaccgtatgggccattatcgcacgacgggaccggaaatctgggagcagaccgacggcaaggtcgacgccttcacctgcgcggtgggcaccggcggcaccctggccggcatcgggttggcgctgaaggagcgcaacaaggatatccgtatcgtgctggccgaccccatgggctctacgctttacaattactatgccaatggcgaattgaaggccgagggaacgtccatcaccgaaggcatcggccagggccgcatcacccaaaatctggtgggtgcccccatcgacggtcaagtccaggtgaccgacgaggaagccttaccggtgattttcgacctgatcaaggaagagggtttggtggtcggcgggtcgagcggcatcaacatcatggccgccatcaaggtggctcgcgacctcggtccggggcatacggtggtgacagtgctgtgcgattatggtacgcgctatcaaagtaaattgttcaacccggccttcctgcgggaaaagaacctacccgtaccggaatggctggcataa

SEQ ID NO: 40053 - protein, 334 aa, Magnetospirillum gryphiswaldense
MAKIRADFNDTIGNTPLIKLKRASEITGCTILGKAEFLNPGGSVKDRAALAIITDAEDKGLLKPGGVIVEGTAGNTGIGLALVANARGYRTVIVMPETQSQEKKDMLRLVGADLRLVPALPYANPGNYVRYSETLAKELAANEPAGVLWANQFDNTANRMGHYRTTGPEIWEQTDGKVDAFTCAVGTGGTLAGIGLALKERNKDIRIVLADPMGSTLYNYYANGELKAEGTSITEGIGQGRITQNLVGAPIDGQVQVTDEEALPVIFDLIKEEGLVVGGSSGINIMAAIKVARDLGPGHTVVTVLCDYGTRYQSKLFNPAFLREKNLPVPEWLA

SEQ ID NO: 40054 - DNA, 1035 bp, Rhodobacter sphaeroides
  CDS (1)..(1035): transl_table=11
atgcgcatccaacgtgaccttgccgaagcgatcggcaacacccccctcatccgcctccgcaaggcgtcggagctcacgggctgcgagatcctcgggaaatgcgagttcctgaacccgggccagtcggtcaaggaccgcgccgcgctctacatcatccgcgatgcggtggcgaaggggctcctgcaaccgggcggcaccatcgtcgaggggacggccggcaacaccgggatcggcctgtcgctggtgggcgcctcgatgggcttccgcacggtcatcgtcatccccgagacccagagccaggagaagaaggacatgctgcgccttgcgggcgcgcatctcgttcaggttccggcggggccctaccgcaatccgaacaactacgtccgctattcgggccgcctcgccgaggcgctggcccgcaccgaagagcgcggggcgatcttggccaaccagttcgacaataccgcgaaccgtcaggcccatgtcgagacgaccgggcccgagatctgggagcagaccgacggcaaggtcgacggcttcatctgtgccgtgggctcgggcggcacgctcgcgggcgttgccatggcgcttcagcccaggggcgtgaagatcggcctcgccgatcccgagggcgcggcgctgcacagcttctacaccgaaggcaccttcgaggcgcccggcagctcgatcaccgaaggcatcgggcagggccggatcaccgccaacctcgaggggctgacccccgacttcagctaccgcatccccgatgccgaggcgctgccgatcatcttcgacctgatgcaggaagagggcctctgcctcggcggctcgtcgggcgtgaacatcgccggcgcgatccgcatggcgcgcgagatggggccgggccaccggatcgtgaccgtgctctgcgactacggcaaccgctaccagtccaaactcttcaatccgcagttcctgcgcgacaaggggctgcccgtgccgcaatggctcgacgaggcgcccccggcgatccctgcggtgttcgaggatctctga

SEQ ID NO: 40055 - protein, 344 aa, Rhodobacter sphaeroides
MRIQRDLAEAIGNTPLIRLRKASELTGCEILGKCEFLNPGQSVKDRAALYIIRDAVAKGLLQPGGTIVEGTAGNTGIGLSLVGASMGFRTVIVIPETQSQEKKDMLRLAGAHLVQVPAGPYRNPNNYVRYSGRLAEALARTEERGAILANQFDNTANRQAHVETTGPEIWEQTDGKVDGFICAVGSGGTLAGVAMALQPRGVKIGLADPEGAALHSFYTEGTFEAPGSSITEGIGQGRITANLEGLTPDFSYRIPDAEALPIIFDLMQEEGLCLGGSSGVNIAGAIRMAREMGPGHRIVTVLCDYGNRYQSKLFNPQFLRDKGLPVPQWLDEAPPAIPAVFEDL

SEQ ID NO: 40056 - DNA, 1492 bp, Chlamydomonas reinhardtii
  CDS (73)..(1131)
ttgagttgcagtttagcgcaatcgcgttaggcaggggcttagagccacgaaggaccaactgccaaagatttcatgctttgcggttgcgggggcgcgaaacaggtttctcgagttgccctggtccccaaggccgtcgctgctcccgagaaggctgctgttaagatgaacatcgccaccgatgtcaccgagctgattggcaagacccctatggtctacctgaacaaggtggccacgggcacgcacgccaagatcgccgccaagctggagatcatggagccctgctgctccgttaaggacaggatcggctacagcatgatctcgagcgcggagaaggagggcctcatcaccccgggcaagactgtcctggtggagcccacctcgggtaacaccggcatcggtctggccttcatcgccgccgcccgcggctacaagctcatcctgaccatgcccgcctccatgtccctggagcgccgcatcctgctgcgtgccttcggcgccgagctggtgctgactgaccccgccaagggcatgaagggcgccgtggccaaggccgaggagatcctggcctccacgccggacgccttcatgctgcagcagttccagaaccccaacaaccccaaggtgcactacgagaccaccggccccgagatctggagcgccaccgacggcaaggtcgacatcctggtgtcgggcgtgggcaccggcggcaccatcaccggcaccggccgctacctgcgcgagaagaagtcggacgtgcagctggtggctgtggagccggccgagagccccgtgctcagcggcggcaagcccggcccccacaagatccagggcatcggcgccggctttgtgcccgcggtgctggacaccgcgctgatcagcgaggtggtgcaggtgtccagtgacgacgccatcgacatggctcgccgcctggcgctggaggagggcctcatggtgggcatcagctcgggcgccgcggtgcaagccgccatcaaggtggccagccgccccgagaacgagggcaagctggtggtggtggtgctgcccccgttcggcgagcgctacctgtcgtcggtgctgttccagcagctgcgcgacgaggcgtccaagatgaccttcgagccctccgcctgaagcgggacgcggacgcaactggacgacagcagcacggcaccgcggcgcgcggattggccgcgcaggatgcgggcacgaggtgcttcatttatgcccaggccctcctggaagctgatcagcgctaataagcaggatgctgtgatagcgctttaacaacctatggctggctgcaagcaaacacgcggtgcatcatgagtcggaatgacggcatgcgtgttggaagccgatgcagggggactactaatgggtggggttggggggaggctgtgggtcgcgctcctcaattgagaggctatactcgcggtgtagaccaaactgtaataaccccggtttcaaaaaaaaaaaaaaaaaaaaaaaaaaa

SEQ ID NO: 40057 - protein, 352 aa, Chlamydomonas reinhardtii
MLCGCGGAKQVSRVALVPKAVAAPEKAAVKMNIATDVTELIGKTPMVYLNKVATGTHAKIAAKLEIMEPCCSVKDRIGYSMISSAEKEGLITPGKTVLVEPTSGNTGIGLAFIAAARGYKLILTMPASMSLERRILLRAFGAELVLTDPAKGMKGAVAKAEEILASTPDAFMLQQFQNPNNPKVHYETTGPEIWSATDGKVDILVSGVGTGGTITGTGRYLREKKSDVQLVAVEPAESPVLSGGKPGPHKIQGIGAGFVPAVLDTALISEVVQVSSDDAIDMARRLALEEGLMVGISSGAAVQAAIKVASRPENEGKLVVVVLPPFGERYLSSVLFQQLRDEASKMTFEPSA

SEQ ID NO: 40058 - DNA, 1323 bp, Ostreococcus tauri
  CDS (1)..(1323)
atgcatcggcgagaccgcatccatcgacggccgcggtcgagcgacgcgcgcgcgtcggtgcgtcgcgggcgcgacgggcgcgtcgacggcgtcataccgctcgaatcgatcgtcgatcgcatcgtcaccgcgctcgtgacgatggtgggcgtgttgtcggcgcaacgatggctcggggggacggcggtgcgcgcgaacgatcgcgcgcgcgcgcggcgcgcgggcgcgcggcgagggatcgcgcccgaggcgaggatttacgagaacatcctggagacggtgggggatacgccggtgattaaaattaaccgtctcgccccggagggggtggagatgtacgtcaaggcggagtactttaacccgttgagcagcgtgaaggatcgattggcggtggcggtgatcacggatgctgaaagacgcggattgctcaagcccggggacaccgtcgtggaggcgacgagcgggaacacgggcatcgcggtggcgatggcgtgcgcgcagcgaggctatcgctgcgtcatctgcatggccgaaccgttctccgtcgagcggagaaagatcatgcgcatgctcggggcgaaggtgatcgtgaccccgaaagcgggcaagggcaccggcatggtggcaaaggctgaggaactcgcggctaagcacgggtggttcctgtgccgacaattcgagaacgaagcgaatccggcgtaccacgcctcgacgacgggcccggagatcgttcgagacttcgccggtaagaagctcgattactttgtcaccggttacggtaccgggggtacgttccagggcgtctctcgcgtgctcagggagtcccgtccggacacgaagatcgtgttgctcgaacccgaagccgcggcgctcgtgtcgagcggcatcaagacggagcgcaaggacactggtgctcccgccggatcgcatccggcgttcgcggcgcacccggtgcagggctggaccccggatttcatcccgctcgttctcgaaaacggtttgaacatgaacctgtacgacgaactcgtcaagattgaaggcggcgacgccgtccagacggcgcaggcgctcgcgagaaacgaaggcatctttaccggtatctccggcggcgccacgttcgccggcgcgctcaccgtcgccaagaaggcgccgaagggttccgtcatcctcgccatgctcccggatacgtccgagcgctacatgagcacccctctgtacgagaccatcgacgccgagatgaacgacgaagagcttgagatcgccaagagcacgccgtcgtttcaactcattccaggacaagacccgactcttctggtgcaataa

SEQ ID NO: 40059 - protein, 440 aa, Ostreococcus tauri
MHRRDRIHRRPRSSDARASVRRGRDGRVDGVIPLESIVDRIVTALVTMVGVLSAQRWLGGTAVRANDRARARRAGARRGIAPEARIYENILETVGDTPVIKINRLAPEGVEMYVKAEYFNPLSSVKDRLAVAVITDAERRGLLKPGDTVVEATSGNTGIAVAMACAQRGYRCVICMAEPFSVERRKIMRMLGAKVIVTPKAGKGTGMVAKAEELAAKHGWFLCRQFENEANPAYHASTTGPEIVRDFAGKKLDYFVTGYGTGGTFQGVSRVLRESRPDTKIVLLEPEAAALVSSGIKTERKDTGAPAGSHPAFAAHPVQGWTPDFIPLVLENGLNMNLYDELVKIEGGDAVQTAQALARNEGIFTGISGGATFAGALTVAKKAPKGSVILAMLPDTSERYMSTPLYETIDAEMNDEELEIAKSTPSFQLIPGQDPTLLVQ

SEQ ID NO: 40060 - DNA, 1464 bp, Arabidopsis thaliana
  CDS (1)..(1464)
atgcataccctccccaacaaagaattggaagtcactgagcctggggagcaaaaacttggtagctccctcaatacccttcttgaagacagcttgatcttcttcgctgagcttgggtgtcaaaagcttaatgtatttcttaatgtaagcgatgaatcccttcttgtcataagttggttgctcctgaagtctgaaggtgtcgacaatgtcaacaaccttttgagtagagtcatcaacaccttcatcctcaccaccttcttcagcagatggattggcaccaatgttaacatctacagctcccacagtaacccactttccttctacttcccagaggattccattctcaatctccttgtaagggaaagagtcagacagaagctcatcaccggtgagaagatcttggtacaccaacatggtcgcttattgattgttttctctctccgatggatgcgaataaacgaaaatcgaaggttgcgggagagagacgcagcgacgaggcggttctcgagaattgctaaagatgtgactgaattgattgggaacactccattggtgtatttgaacaatgttgctgaaggatgtgttggtcgtgttgctgctaagcttgagatgatggaaccgtgctctagcgtcaaagacaggattggttttagcatgatttctgatgcagaaaagaagggtcttatcaaaccaggagagagtgtgctgattgagccaacaagtggaaacactggagttgggttagcattcacggcagctgccaaaggctacaagcttattattacaatgccagcttctatgagtactgagagaagaatcattctcttagcttttggagttgagttggttttaactgacccagctaagggcatgaaaggagctatcgcaaaggcggaagagattttggcgaaaacacccaatggttacatgcttcagcagtttgagaaccctgccaaccctaagatccactatgagactacgggacctgagatatggaaaggcactggtggcaaaatcgatggctttgtttctgggattggtactggtggtaccattacaggtgctgggaagtatcttaaagaacagaacgcaaacgtcaagctgtatggagtggagccagttgaaagtgctattctatccggtgggaagccaggtcctcacaagattcaagggataggagctggttttataccaagtgtattgaatgttgatcttattgacgaagttgttcaggtttcaagtgatgaatccattgacatggcaaggcagcttgctcttaaagaaggtcttcttgtgggaatatcatccggtgcagcagctgctgcagcaattaaacttgcacagaggccagaaaacgctgggaagctatttgtggcgatattcccgagtttcggggagaggtatctatcaacggtacttttcgatgcgacaaggaaagaagcggaagccatgaccttcgaggcttga

SEQ ID NO: 40061 - protein, 487 aa, Arabidopsis thaliana
MHTLPNKELEVTEPGEQKLGSSLNTLLEDSLIFFAELGCQKLNVFLNVSDESLLVISWLLLKSEGVDNVNNLLSRVINTFILTTFFSRWIGTNVNIYSSHSNPLSFYFPEDSILNLLVRERVRQKLITGEKILVHQHGRLLIVFSLRWMRINENRRLRERDAATRRFSRIAKDVTELIGNTPLVYLNNVAEGCVGRVAAKLEMMEPCSSVKDRIGFSMISDAEKKGLIKPGESVLIEPTSGNTGVGLAFTAAAKGYKLIITMPASMSTERRIILLAFGVELVLTDPAKGMKGAIAKAEEILAKTPNGYMLQQFENPANPKIHYETTGPEIWKGTGGKIDGFVSGIGTGGTITGAGKYLKEQNANVKLYGVEPVESAILSGGKPGPHKIQGIGAGFIPSVLNVDLIDEVVQVSSDESIDMARQLALKEGLLVGISSGAAAAAAIKLAQRPENAGKLFVAIFPSFGERYLSTVLFDATRKEAEAMTFEA

SEQ ID NO: 40062 - DNA, 972 bp, Klebsiella pneumoniae
  CDS (1)..(972): transl_table=11
atgagtaagatttttgaagacaactccctgactatcggtcatacgccgctggtacgactgaaccgcatcggtaatggccgtatcctggcaaaggtagaatctcgtaacccgagctttagcgtaaaatgccgtatcggcgccaatatgatctgggatgctgaaaagcgcggcgttctgaaacctggcgtggaactggtcgagccgaccagcggcaacaccggtatcgccctcgcctacgtggcggcggcccgcggctacaaactgacgctaaccatgccggaaaccatgagcatcgagcgtcgtaagctgctgaaagccctgggcgccaacctggtgctgaccgaaggcgccaaaggcatgaaaggcgctatccagaaagcggaagagattgtcgccagcaacccggaacaattcctgctactgcagcagttcagcaacccggctaacccggaaatccacgagaagactaccggcccggaaatctgggaagataccgatggtcaggtggatgtgtttatctccggcgtaggtaccggcggaacgctgaccggcgtcagccgctatatcaaaaacaccaaaggtaaaaaagatcttatcaccgtcgccgttgaaccgaccgattccccggtgatcgcccaggcgctggcgggggaagagctcaagccgggtccgcacaaaattcagggtatcggcgccggcttcattcctggcaacctggatctgaagctggtcgacaaagtgatcggcattaccaacgaggaagctatctccacggcgcgccgcctgatggaagaagaaggcatcctggcgggtatctcttccggggccgccgttgccgccgcgctgaagctgcaggaagatgaggcctttaccaataagaatattgtggttatcctgccttcctctggtgagcgttatttaagcaccgcgctgttcgccgatctcttcactgagaaagagctgcaacagtag

SEQ ID NO: 40063 - protein, 323 aa, Klebsiella pneumoniae
MSKIFEDNSLTIGHTPLVRLNRIGNGRILAKVESRNPSFSVKCRIGANMIWDAEKRGVLKPGVELVEPTSGNTGIALAYVAAARGYKLTLTMPETMSIERRKLLKALGANLVLTEGAKGMKGAIQKAEEIVASNPEQFLLLQQFSNPANPEIHEKTTGPEIWEDTDGQVDVFISGVGTGGTLTGVSRYIKNTKGKKDLITVAVEPTDSPVIAQALAGEELKPGPHKIQGIGAGFIPGNLDLKLVDKVIGITNEEAISTARRLMEEEGILAGISSGAAVAAALKLQEDEAFTNKNIVVILPSSGERYLSTALFADLFTEKELQQ

SEQ ID NO: 40064 - DNA, 1128 bp, Malus domestica
  CDS (1)..(1128)
atggctgccctaaggagctttctcaagaaaagatcctctgtgctttgcaatggaggagcagtgagacacaggctcttctccgctcaggtgtcccaacccatccccgattctccatctttcgctcagagaatcggaaatctccccaaggatcttcctgccacccaaatcaaaacccaagtttcccaactcattggtagaactcccattgtttatcttaacaaagtcactgagggatgtggagctttcattgctgtcaagcaagagatgttccaacccaccgctagcatcaaggacagaccggcactttctatgatcaacgatgcagaagagaagggcttgataactcccggggagacaacgctgatcgagccaacgtcggggaatatgggaatcagcatggcttttatggcggccatgaaagggtataagatggttctaactatgccgtcttacactagtttggagagaagggtgtgtatgagatgctttggagctgatttaattctcactgatccaaccaaggggatgggagggactgttaagaaggcgtatgatcttttggaatctacgccgaatgcctttatgctccaacaattctcaaatcccgccaatactaaggtgcattttgaaactacgggccctgagatatgggaggataccaacggacaagttgacatcttcgtaatgggaattggtagcggaggcactgtctctggggtcgggcagtatctcaaatctaaaaatcctaatgttcagatatacggagtggagcctgctgaaagtaatgtgctgaatggtggtaaaccaggtcctcattcaatcacgggcaacggggttggattcaaaccagatatattggacatggatatgatggaaagagtgattgaggttcgtagcgaagatgcagtaaacatggcaagacaattggcactgaaagaagggcttatggtgggaatatcgtctggagccaacacagtggcagcaatggagcttgctaaaaagcctgaaaacaaaggcaaactcattgtgactgttcacgcgagctttggggagcgatacttgtcatctgttctatttcaagacctgaggcaggaagccgaaaacatgcaaccagttgcagtcgactaa

SEQ ID NO: 40065 - protein, 375 aa, Malus domestica
MAALRSFLKKRSSVLCNGGAVRHRLFSAQVSQPIPDSPSFAQRIGNLPKDLPATQIKTQVSQLIGRTPIVYLNKVTEGCGAFIAVKQEMFQPTASIKDRPALSMINDAEEKGLITPGETTLIEPTSGNMGISMAFMAAMKGYKMVLTMPSYTSLERRVCMRCFGADLILTDPTKGMGGTVKKAYDLLESTPNAFMLQQFSNPANTKVHFETTGPEIWEDTNGQVDIFVMGIGSGGTVSGVGQYLKSKNPNVQIYGVEPAESNVLNGGKPGPHSITGNGVGFKPDILDMDMMERVIEVRSEDAVNMARQLALKEGLMVGISSGANTVAAMELAKKPENKGKLIVTVHASFGERYLSSVLFQDLRQEAENMQPVAVD

SEQ ID NO: 40066 - DNA, 1497 bp, Malus domestica
  CDS (107)..(1237)
ggcacgaggctcaatttctacttgagtttatatctatatacatatattatatatacatatatccatcagtacttggcagcacagtagtactagctagcatccatcaatggcggctttaaggagctttctgaagaaaaggtcctctgtgctctgcaatggagccatgagacggaaactgttctccaccgaggtgtcccaacccctcactgattctccatcttttgctcagagaatcagaaatctccccaaggatcttcctggcacccaaatcaaaacccaagtttcccaactcattggtagaactcctattgtttatcttaacaaagtcactgagggatgtggagcgtatattgccgtcaagcaagagatgttccaacccaccgccagcatcaaggacagaccggcactttctatgatcaacgatgcagaagagaagggcttgataactcctggggagacaatactgatcgagccaacatcaggaaatatgggaatcagcatggcgtttatggcggccatgagagggtataaaatggttttaaccatgccatcttacacaagcttggagagaagggtgtgtatgagatgctttggagctgatttgattctcactgatccaaccaaggggatgggaggaactgttaagaaggcgtatgatcttctggaatccacgcccaatgcctatatgctgcaacaattctcaaatcccgccaatactaaggtacattttgaaactacaggccctgagatatgggaggataccaacggacaagttgacatcttcgtaatgggaatcggtagtggaggcactgtctctggagtcgggcagtatctcaaatctaaaaatcctaatgttcagatatatggagtggagcctgctgaaagtaatgtgctgaatggcggtaaaccaggtcctcattcaatcatgggcaacggggttgggttcaaaccagatatattggacttggatatgttggaaagagttattgaggttaccagtgaagatgcagtaaacatggcaagacaattggcattgaaagaagggcttatggttggaatatcgtctggagccaacactgtggcagcaatggagcttgctaaaaagccagaaaacaaaggcaaactcattgtgactgttcacccgagctttggggagcgatacttgtcatccgttctatttcaagagctgaggcaggaagccgaaaacatgcaaccagttgccgtcgactatccctaagtactccaaggctctctatgtgacatgcaaaaccatcaatggacgctttgacgtctgttgcagtgatacaaggccgtgtgccttaaaataagtttttgtgcttggaacattgtctgcaataaggaatttacatttcttgtgaaacttgtgttgtgaatctgtgagagtgtaatgtaatgcagttcatttttggttctgcagagcgtatatgtaccaccagataacacctttgtgagaaaaaaaaaaaaaaaaaaaaaaaa

SEQ ID NO: 40067 - protein, 376 aa, Malus domestica
MAALRSFLKKRSSVLCNGAMRRKLFSTEVSQPLTDSPSFAQRIRNLPKDLPGTQIKTQVSQLIGRTPIVYLNKVTEGCGAYIAVKQEMFQPTASIKDRPALSMINDAEEKGLITPGETILIEPTSGNMGISMAFMAAMRGYKMVLTMPSYTSLERRVCMRCFGADLILTDPTKGMGGTVKKAYDLLESTPNAYMLQQFSNPANTKVHFETTGPEIWEDTNGQVDIFVMGIGSGGTVSGVGQYLKSKNPNVQIYGVEPAESNVLNGGKPGPHSIMGNGVGFKPDILDLDMLERVIEVTSEDAVNMARQLALKEGLMVGISSGANTVAAMELAKKPENKGKLIVTVHPSFGERYLSSVLFQELRQEAENMQPVAVDYP

SEQ ID NO: 40068 - DNA, 1143 bp, Medicago truncatula
  CDS (1)..(1143)
atggcttctctaatgagtttcctcaagagaacctcttcttcatcatcatcatcattagcagttgcatgccagcatccaatgatgatgaggagattgatgacaacaacagcaaccagtgctgattcttcatcttttgctcagagaatcagagatttgcctaaagatcttcctggtaccaacatcaaaaaacatgtttcacagcttattggtaggaccccactggtttatcttaacaaagtaactgaaggatgtggagcttatattgctgttaagcaagagatgatgcagcctactgctagcatcaaagacagaccggcacttgctatgatggaagatgctgagaaaaagaatttgattactcctggaaagacaattctgatagagccgacatcaggcaacatgggtatcagtttggcatttatggctgccatgaagggatataagatggttttgactatgccatcttacacaagcttggaaagaagggtttgcatgagagcatttggagctgaattgattctcactgatccaacgaaaggaatgggaggaacagtgaaaaaggcttatgaccttttggagtccacaccaaatgcttttatgctacaacaattttccaacccagccaatactaaggtgcatttcgaaacaacaggtcctgagatatgggaggatacaaatggacaagttgacatatttgttatgggaataggtagcggaggcacggtttccggggtcggacaatatcttaaatcacaaaaccctaatgttaagatatatggagtggagccatctgaaagtaatgtgctgaatggtggtaaacccggtcctcatcaaataactggaaatggtgttggattcaaaccagacatattggacatggatgtgatggaaaaagtcctagaagttagcagtgaagatgcagttaacatggctagaacattggccttgaaagaaggactcatggttggtatatcgtctggagcaaacacagtcgcagcactcagattggctagtcttcctgagaacaaaggcaaacttattgtgactgttcatccaagtttcggggagcgatacctgtcatctgtcttgttccaagaccttcggacagaagctgagaacatgcagccagtctcggtcgattaa

SEQ ID NO: 40069 - protein, 380 aa, Medicago truncatula
MASLMSFLKRTSSSSSSSLAVACQHPMMMRRLMTTTATSADSSSFAQRIRDLPKDLPGTNIKKHVSQLIGRTPLVYLNKVTEGCGAYIAVKQEMMQPTASIKDRPALAMMEDAEKKNLITPGKTILIEPTSGNMGISLAFMAAMKGYKMVLTMPSYTSLERRVCMRAFGAELILTDPTKGMGGTVKKAYDLLESTPNAFMLQQFSNPANTKVHFETTGPEIWEDTNGQVDIFVMGIGSGGTVSGVGQYLKSQNPNVKIYGVEPSESNVLNGGKPGPHQITGNGVGFKPDILDMDVMEKVLEVSSEDAVNMARTLALKEGLMVGISSGANTVAALRLASLPENKGKLIVTVHPSFGERYLSSVLFQDLRTEAENMQPVSVD

SEQ ID NO: 40070 - DNA, 1152 bp, Medicago truncatula
  CDS (1)..(1152)
atggcttctacttccttaatcaactcattgacttttacctctcgcacccccactcttcactacttaacccgcctcacccccacctcatcacaccgattcgctatctccccccgttccatctcaaccagaatctcttcccccgttctatgcaaggccgtctccgtcaattcccaaaccaccatcgaaggtctcaacattgccgatgatgttacgcagctcataggaaaaacaccaatggtttatctgaatagcatcgcaaagggttccgttgctaatattgctgctaagcttgagattatggagccttgttgtagtgtcaaagacaggataggttacagtatgatacttgatgctgagaagaaaggagccataacacctgggaagagtgttttggtggaacctactagtgggaacacaggaattggtcttgcctttatagcagcttctaaaggttataaactcattttaacaatgcctgcttccatgagtttggaaagacgagttcttttgaaagcatttggagctgagcttgttttgactgaggctgcgaagggtatgaatggagcagttcaaaaagctgaagaaattgtaaaaagtacacctgatgcatacatgcttcaacaatttgacaatccttcaaatcccaagatacattttgagacaactgggccagagatatgggaagatacaagaggcaaaatagatattttagttgcagggattggaactggtggaaccatttctggaaccggtcgattcctaaaacaacaaaattcaaaagtacaggttattggtgtagagcctctcgaaagcaacatactttcaggtggaaagccaggacctcacaaaattcagggtattggggctggttttgtgcccaggaatttggatgaagaagtgcttgatgaagttatagcgatatccagtgatgaagctattgaaactacaaagcaaatagcacttcaggaaggcttgctggtgggaatttcttcaggtgctgctgctgcagctgcattgcaggttgcaaagaggcctgaaaatgagggaaagcttattggggttgtattcccaagctttggtgaaagatatttgtccactgttcttttccagaaaattcgagaagaatgtgagaacatgcaaccggagccatga

SEQ ID NO: 40071 - protein, 383 aa, Medicago truncatula
MASTSLINSLTFTSRTPTLHYLTRLTPTSSHRFAISPRSISTRISSPVLCKAVSVNSQTTIEGLNIADDVTQLIGKTPMVYLNSIAKGSVANIAAKLEIMEPCCSVKDRIGYSMILDAEKKGAITPGKSVLVEPTSGNTGIGLAFIAASKGYKLILTMPASMSLERRVLLKAFGAELVLTEAAKGMNGAVQKAEEIVKSTPDAYMLQQFDNPSNPKIHFETTGPEIWEDTRGKIDILVAGIGTGGTISGTGRFLKQQNSKVQVIGVEPLESNILSGGKPGPHKIQGIGAGFVPRNLDEEVLDEVIAISSDEAIETTKQIALQEGLLVGISSGAAAAAALQVAKRPENEGKLIGVVFPSFGERYLSTVLFQKIREECENMQPEP

SEQ ID NO: 40072 - DNA, 1005 bp, Medicago truncatula
  CDS (1)..(1005)
atggcttcttcctccttagtcaagtctttgacttgtgctttgcgtgctggccgtatcagccactgtttcagctccaccaggatcttttcgtcttccactgtttatgtcgaatcccaaactagcaacgatgttctcaatattgccgatgatattacacaggtcggaaaaacgccaatggtttacctgaagagtatcactaagggctcagttgctaacattgctgcaaagcttgaggttatggagccttgttgtagtgtcaaagacaggataggttatagcatgatccttgatgcagagcaaaaaggactcataacacctggtaaaagtattttggtagaacctaccggtgggaacacaggaattggtcttgcctttgtcgcagctactaaaggttataaactcattttgacaatgcctgtttcaatgagtttagaaaaaagagttcttatgaaagcatttggagctgagcttgttttgaccgaatattccaaggctataagtggagcaattcaaaaagctgaagaaattgtaaaaaatacacctaatgtatacatgcttcaacaatttgataatccttcaaatcctaaggtgcattttgagaataccgggccagagatatggaaagatacaaaaggaaaagtagatattttagtcgtgggaattggaactggtggaactctttctggagctggtagattcctaaaacaacaaaatccaaaaataaagtgtatcggtgtagagcctctcgaatgcaacgtactttcaggtggaaagccaggacctcacataattcatggtattggatctggttttgtgcccaagaatttggataaaaaaatccttgatgaagttatagcgatatccggggaagaatctgtcaaaactgaaaagctaatagcactccaggaaggcatgctggtgggaatttcttcaggtgctgctaagagacctgaaaatgagggaaagcttattgtggtatgcatatttcctcacaaaaaaaaataa

SEQ ID NO: 40073 - protein, 334 aa, Medicago truncatula
MASSSLVKSLTCALRAGRISHCFSSTRIFSSSTVYVESQTSNDVLNIADDITQVGKTPMVYLKSITKGSVANIAAKLEVMEPCCSVKDRIGYSMILDAEQKGLITPGKSILVEPTGGNTGIGLAFVAATKGYKLILTMPVSMSLEKRVLMKAFGAELVLTEYSKAISGAIQKAEEIVKNTPNVYMLQQFDNPSNPKVHFENTGPEIWKDTKGKVDILVVGIGTGGTLSGAGRFLKQQNPKIKCIGVEPLECNVLSGGKPGPHIIHGIGSGFVPKNLDKKILDEVIAISGEESVKTEKLIALQEGMLVGISSGAAKRPENEGKLIVVCIFPHKKK

SEQ ID NO: 40074 - DNA, 1095 bp, Medicago truncatula
  CDS (1)..(1095)
atggtttcttcctccttagtgaagtctttgtcttgtgcttttcgtgcctgccgtatcagccactctttcagctccaccaggatcttttcgtcttccattgtctctgtcgaatcccaaactagcaacgatgatctcaatattgccgatgatattacacagctcataggaaaaacgccaatggtttacctgaagagtatcactaagggctcagttgctaatattgctgctaagcttgagcttatggagccatgttgtagtgtcaaagacaggataggttatagcatgatccttgatgccgagcagaaaggactcataacacctgggaagagtattttggtagaacctaccggtgggaacacaggaattggtcttgcctttatagcagctactaaaggttataaactcattttgacaatgcctgtttcaatgagtttagaaagaagagttcttatgaaagcatttggagctgagcttgttttgaccgaatattctaaggctatgagtggagcagttcaaaaagctgaagaaattgtaaaaaatacacctaatgcatacatgcttcaacaatttgataatccatcaaatcctaaggtgcattttgagaatactgggccagagatatggaaagatacaaaaggaaaagtagatattttagtcgcgggaattggaactggtggaactctttctggagctggtagattcctaaaacaacaaaatccaaaaataaagtgtatcggtgtagagcctctcgaaagcaacatactttcaggaggaaagccacgaccgcacataattcagggtattggagctggttttgtgcccaagaatttggataaagaaatccttgatgaagttatagcgatatccggcgaagaatctgtcaaaactgcaaagcaaatagcactacaagaaggcttgctggtgggaatttcttcaggttgtgctgctacagctgcattgcaggttgctaagagacctgaaaatgagggaaagcttattgtggttgtattcccaagcttcggtgaaagatatgtgtctacttctctttttcaagaagctcgagaagaatgtgaaaaaatgcaaccggagccatga

SEQ ID NO: 40075 - protein, 364 aa, Medicago truncatula
MVSSSLVKSLSCAFRACRISHSFSSTRIFSSSIVSVESQTSNDDLNIADDITQLIGKTPMVYLKSITKGSVANIAAKLELMEPCCSVKDRIGYSMILDAEQKGLITPGKSILVEPTGGNTGIGLAFIAATKGYKLILTMPVSMSLERRVLMKAFGAELVLTEYSKAMSGAVQKAEEIVKNTPNAYMLQQFDNPSNPKVHFENTGPEIWKDTKGKVDILVAGIGTGGTLSGAGRFLKQQNPKIKCIGVEPLESNILSGGKPRPHIIQGIGAGFVPKNLDKEILDEVIAISGEESVKTAKQIALQEGLLVGISSGCAATAALQVAKRPENEGKLIVVVFPSFGERYVSTSLFQEAREECEKMQPEP

SEQ ID NO: 40076 - DNA, 978 bp, Medicago truncatula
  CDS (1)..(978)
atggcggtcgaaaggtctggaattgctaaagatgttacagaattgattggcaaaaccccgttagtgtatctaaatagacttgcagatggttgtgttgctcgagttgctgccaaactggaattgatggagccatgctctagtgtaaaagacaggattggctacagtatgattgctgatgcagaagagaaggggcttatcacacctggacagagtgtcctcattgaaccaacaagtggtaatactggcattggattagccttcatggcagcggccaagggatacaagctcataattaccatgcctgcttcaatgagtcttgaaagaagaatcattctattagcttttggagctgaattggttttgacagaccctgcaaagggaatgaaaggagctgttcagaaagctgaagagctgttggctaagacacccaatgcctacatacttcaacaatttgaaaaccctgccaatcccaaggtacattatgaaaccaccggtccagagatatggaaaggcacggatgggaaaattgacgcatttgtttctgggataggtactggtggtaccataaccggtgctgggaaatatcttaaagagcaaaattccaatataaagctgattggtgtggaaccagtagagagtccagtgctctcagggggaaaacctggtcctcacaagattcaagggattggtgctggctttgtccctggtgtcttagaagttaatcttattgatgaagtcgttcaaatatcaagtgatgaagcaatagaaactgcgaagcttcttgctcttaaagaaggcctatttgtgggaatatcttctggagctgcagctgccgctgcgattaagatagccaaaaggccagaaaatgctgggaagcttattgttgtcgtttttccaagctttggcgagaggtacctgtcctctgtgctatttgagtcagtgagacgggaagctgaaaccatgactttcgagccctga

SEQ ID NO: 40077 - protein, 325 aa, Medicago truncatula
MAVERSGIAKDVTELIGKTPLVYLNRLADGCVARVAAKLELMEPCSSVKDRIGYSMIADAEEKGLITPGQSVLIEPTSGNTGIGLAFMAAAKGYKLIITMPASMSLERRIILLAFGAELVLTDPAKGMKGAVQKAEELLAKTPNAYILQQFENPANPKVHYETTGPEIWKGTDGKIDAFVSGIGTGGTITGAGKYLKEQNSNIKLIGVEPVESPVLSGGKPGPHKIQGIGAGFVPGVLEVNLIDEVVQISSDEAIETAKLLALKEGLFVGISSGAAAAAAIKIAKRPENAGKLIVVVFPSFGERYLSSVLFESVRREAETMTFEP

SEQ ID NO: 40078 - DNA, 960 bp, Azospirillum brasilense
  CDS (1)..(960): transl_table=11
atgccgggttccgagtttcgcggtaagatctacgacagcattctcgacaccgtcggcgccacgccgctggtgcgcgtcaaccggctggccgaggacgccggggccaaggcccagatcgtcggcaagctggagttcttcaacccgctggccagcgtgaaggaccgcatcggcttcgcgatgatcgacgcggcggagcgcgccggcaccatcgagcccggccgcaccaccctggtcgagccgacgtcgggcaacaccggcatcgcgctggccttcgtcgccgccgccaagggctaccggctgatcctgaccatgccggaaagcatgtcggtcgagcgccgcaagatgctgaagctgctgggcgccgagctggtgctgaccccggcggcggagggcatgaagggcgccatccgccgggccgacgagatcgtcgccaccgatccgaacgcctacatgctccagcagttcaagaacgccgccaacccggagatccaccgcaacacgacggcggaggagatctggaaggacaccgacggcaaggccgatttcctgatttccggcgtcggcaccggcggcacgctgaccggcgtgtcggaggtcctgaaggcccgcaagccgggcttccgcaccatcgcggtggagccggaggacagccccgtcctgtccggcggcatgcccggcccgcacaagatccagggcatcggcgccggcttcgtgccggacgtcctgaagaaggacctgatcgacgaggtcgtgcgcatctccaaccagcgcgccttcgagacggcccgcaaggtggcgaagctggaaggcatcccggtcggcatctcctcgggcgcggcgctggccgcggcgctggagatcggctcccgtccggagaacgagggcaagctgatcgtcgtgatcctgccatccttcgccgagcgctatctctccaccgccctgttcgaggggctggaataa

SEQ ID NO: 40079 - protein, 319 aa, Azospirillum brasilense
MPGSEFRGKIYDSILDTVGATPLVRVNRLAEDAGAKAQIVGKLEFFNPLASVKDRIGFAMIDAAERAGTIEPGRTTLVEPTSGNTGIALAFVAAAKGYRLILTMPESMSVERRKMLKLLGAELVLTPAAEGMKGAIRRADEIVATDPNAYMLQQFKNAANPEIHRNTTAEEIWKDTDGKADFLISGVGTGGTLTGVSEVLKARKPGFRTIAVEPEDSPVLSGGMPGPHKIQGIGAGFVPDVLKKDLIDEVVRISNQRAFETARKVAKLEGIPVGISSGAALAAALEIGSRPENEGKLIVVILPSFAERYLSTALFEGLE

SEQ ID NO: 40080 - DNA, 1020 bp, Aspergillus oryzae
  CDS (1)..(1020)
atgtcctgcattaccacgccagccattcctccggtggctcttgaatcaatcactcaacacattggtaacacgcccctcgtgcgcttgaacagacttccacgtagccttgggattgaggcaactgtctatgcgaaattggaatatttcaatgctggaggaagtgtaaaagataggattgctctgcgcatgatcgaagaggccgaacgatcagggcgcataaagcctggtgatactctcatcgaacccactagcggtaacactggaattggtttggcgctcgtcggcgctgtaaagggatacaagaccataattactctcccggagaagatgtcagctgagaaggtggctgtactgaaagcgttgaatgcaactatcatccgcactcctaatgaagcggcgtatgattcaccggaatctcacatcggtgtcgccaagcgtcttgagaaggaactcccgaacgcgcacatcctggaccaatatggtaacgaaaacaacccgctggcccacgaattgggtacagcggaagaagtctggacgcagaccaagggccaaattaaggctatcgtcgccggtgcaggaactggtggaacaatcactggactgtctcggggcctgaagaagcataaccccgctatcaaggttattgcggctgatccccatggttccatcttagctttgccgccttcactaaatgaagatcatgtaaacgaaccatacaaggtcgaaggaattggatatgatttcattccccaagtgctcgaccagcaggccgtggaccagtggtacaaaactggagataaggattcattccagtacgctcggcggttaattgctgaagagggcctccttgtaggaggaagcagtgggagcgccatatcggctctggcgcaagcggcaaaggactacaacttcgggaaggatgatgtggttgttgtcattttgcctgatagcatcagaagctatttaactaaggtcattgaacttcctaatggctggttgaggacttgttgcgctaactaa

SEQ ID NO: 40081 - protein, 339 aa, Aspergillus oryzae
MSCITTPAIPPVALESITQHIGNTPLVRLNRLPRSLGIEATVYAKLEYFNAGGSVKDRIALRMIEEAERSGRIKPGDTLIEPTSGNTGIGLALVGAVKGYKTIITLPEKMSAEKVAVLKALNATIIRTPNEAAYDSPESHIGVAKRLEKELPNAHILDQYGNENNPLAHELGTAEEVWTQTKGQIKAIVAGAGTGGTITGLSRGLKKHNPAIKVIAADPHGSILALPPSLNEDHVNEPYKVEGIGYDFIPQVLDQQAVDQWYKTGDKDSFQYARRLIAEEGLLVGGSSGSAISALAQAAKDYNFGKDDVVVVILPDSIRSYLTKVIELPNGWLRTCCAN

SEQ ID NO: 40082 - DNA, 1116 bp, Aspergillus oryzae
  CDS (1)..(1116)
atgttccgacaaagtattcggcgcttcggcaccactgcgctccgcgcagcagaaggatcgaccgcctatagcgtccgggtgtcgcaagctcagggctacgttaacggtcttacagaagcaattggaaacacaccacttatccgattgaagcgcctctccgaggagactggctgcaacatcctcggtaaagctgagttccagaaccccggaggcagtgtgaaggaccgtgcagcattgttcgtcgtcaaggatgccgaggagaagggacttttgaagcctggtggtacagtggttgagggaacagctggtaacactggaattgggttggcgcacgtgtgtaggtcaaagggctacaagcttgtcatctacatgcccaacacgcagtcccagggtaagattgacttgttgcggctgttgggagcggaggtctaccctgtgccggccgtcgctttcgacaacccgcagaactacaaccaccaggcaaggagacatgccgaatccctggataacgccgtatggacgaaccagttcgacaacactgccaatcgccaggcccacattgagatgaccgggccggaaatctgggcccagactggcggacaggtcgatgctttcacttgtgctactggaaccggaggaacattggccggtattacccgctatctgaagaccgcttccgacggccgggtgaagtgcttccttgccgaccccccgggcagtgttctgcacagctacatccagagcggcggaaacctaatcgagcgctcgggaagcagtatcacggagggtattggtcagggccgcgtcacggacaaccttcagcccgacattgatcttttggatgggtctttgaacattagcgatgagaagtcgatcgagatggtctaccgctgcctcgatgaggaaggtctctatcttggagctagctctgcgctcaacgttgttgcggccaaggaagttgccgaaaagctcggcaagggtaagaccgtcgtcaccattctgtgtgatggcgcctaccgctacgccgaccgtctgttctccaacaactggctccagagcaagggtctgagaaccgctatccctaagcacttggagaagtacatcgtgctcccctga

SEQ ID NO: 40083 - protein, 371 aa, Aspergillus oryzae
MFRQSIRRFGTTALRAAEGSTAYSVRVSQAQGYVNGLTEAIGNTPLIRLKRLSEETGCNILGKAEFQNPGGSVKDRAALFVVKDAEEKGLLKPGGTVVEGTAGNTGIGLAHVCRSKGYKLVIYMPNTQSQGKIDLLRLLGAEVYPVPAVAFDNPQNYNHQARRHAESLDNAVWTNQFDNTANRQAHIEMTGPEIWAQTGGQVDAFTCATGTGGTLAGITRYLKTASDGRVKCFLADPPGSVLHSYIQSGGNLIERSGSSITEGIGQGRVTDNLQPDIDLLDGSLNISDEKSIEMVYRCLDEEGLYLGASSALNVVAAKEVAEKLGKGKTVVTILCDGAYRYADRLFSNNWLQSKGLRTAIPKHLEKYIVLP

SEQ ID NO: 40084 - DNA, 1020 bp, Allium sativum
  CDS (1)..(1020)
atgggagaaagaacgggacttgcttcttttattgctgcacacaacgaagatgcctccgaaaatattgttcaagacataactcagcttgttggatggacaccactgatagaaatcaaaagcataacaaaagctgacagcgttggtgcccgaatcattgcaaagctggagtcatatcagccttctaattccgttaaagaccgcagtgctctcagaatgattgaagaggctgaagagaaaggtttaatcaaaccaggtgttaccactctattagagccaactagcggaaaccttgggattgctttggcttacattggtttgaaaaaaggttacaagttccttggagttatgccctcccattattcgatcgaacgaaggatgttgctcaagtatttgggcgctgatcttgcgttaactgatactaatcttgggttcaagggagtgcttgacaaggtagcagagctgagtgcaagtgatccaaatttttacgttctcaatcagttttctaactcagcaaaccctggagcacattatgccaccactggacctgaaatatggaaagatacagctggcaaggtcgatatttttgtagtgggttctggatcaggaggtacggtttccggtgctggcaagtatctcaaagagaagaatccaaatgtgaaagtagtctgtgttgaaccagccgaaagtgctgtcattgcaggtgggccacctggtccccatggcatccaaggatttggtcctggttttgttcctgataatgttgattattctgtgatcgatgaatttttgtctgtcacaacccaagaggctctggcttgtgcaagaaggatagcaaaagaagaaggtttacttatgggcatttcctctggtgctaacttagttgcttgcttgagggtaggagcaaggcctgaaaacaaaggcaaaatgattgtgacaaccttctcaagtggaggagaaagatacatgagcacccagttgtctgatgaggtcagggaagaatgcattaacatgacattttaa

SEQ ID NO: 40085 - protein, 339 aa, Allium sativum
MGERTGLASFIAAHNEDASENIVQDITQLVGWTPLIEIKSITKADSVGARIIAKLESYQPSNSVKDRSALRMIEEAEEKGLIKPGVTTLLEPTSGNLGIALAYIGLKKGYKFLGVMPSHYSIERRMLLKYLGADLALTDTNLGFKGVLDKVAELSASDPNFYVLNQFSNSANPGAHYATTGPEIWKDTAGKVDIFVVGSGSGGTVSGAGKYLKEKNPNVKVVCVEPAESAVIAGGPPGPHGIQGFGPGFVPDNVDYSVIDEFLSVTTQEALACARRIAKEEGLLMGISSGANLVACLRVGARPENKGKMIVTTFSSGGERYMSTQLSDEVREECINMTF

SEQ ID NO: 40086 - DNA, 1296 bp, Allium sativum
  CDS (125)..(1096)
  misc_feature (1229)..(1229): n is a, g, c or t
aagcccgttcatcgaaagattcaactaccgacagtaacttcaccactcaagttcagaaaagtggcacagcattttctctcatttactcttttcagttcaccagactttttttttcttctgagaaatgggttccgactcgatcgcgcaaaatgtcaccgagttgattgggaacactccattggtgtatctgaaccatgtagttggtggatgtagagcgcgaattgctgctaagttagagatcatggagccctgttctagtgtcaaagataggattgcgttgagcatgatcaatgatgcagaggagaaaggcctcattacacctggagtgagtactttgattgagcctacaagcggtaacacagggatcgggctggcattcatagcagctgcgaagggttataagcttataattacaatgcctgcatcatttagtcttgaaagaaggatcatcataaaagcctttggtggtcagttggttcttaccgatccattgttgggaatcaaaggttgcattcaaaaggcggaggaaattgctgcaaaaacacctaactcgtatgttcttcaacaattttcaaacccagccaatccaaagattcactatgagacaactggccccgagatctggaatgggtctggggggaaaattgatgcttttgttgctggtattggaactggtggtacgattactggaacggggagatatttaaaagagcaaaatcccaatataaaggtgtatggtgtggagccggctgaaagtgcagttttaaatggaggaaaacctggtccacataagatccaagggatcggtgctggttatattcctccagttttggatgtcagcctcattgaagaaactcttccgatttcaggtgatgaatctattgaaatggcaaagctccttgccgtgaaagaaggcttgctggttgggatatcatcaggagcagctgccgtagcagctgttaggattgccaagaggccagaaaatgaggggagactaattgtggttgtttttccgagttttggcgagcgctacctttcttccgtactgtttgaatccataaagaaagaagctgaaaacatgatttatgaatcctgaagtttgaagctccttttgagtaaatgcttcctgccatttatggtacatttttcattatatatcaataaacgttcacactatatgtgatactgtaggcgcttttatttttatggtggattcgtctgttctcgtnatatctatcttgactcacctcttgtaatattacgttgaattctaatgctaatgatttttcgcttggc

SEQ ID NO: 40087 - protein, 323 aa, Allium sativum
MGSDSIAQNVTELIGNTPLVYLNHVVGGCRARIAAKLEIMEPCSSVKDRIALSMINDAEEKGLITPGVSTLIEPTSGNTGIGLAFIAAAKGYKLIITMPASFSLERRIIIKAFGGQLVLTDPLLGIKGCIQKAEEIAAKTPNSYVLQQFSNPANPKIHYETTGPEIWNGSGGKIDAFVAGIGTGGTITGTGRYLKEQNPNIKVYGVEPAESAVLNGGKPGPHKIQGIGAGYIPPVLDVSLIEETLPISGDESIEMAKLLAVKEGLLVGISSGAAAVAAVRIAKRPENEGRLIVVVFPSFGERYLSSVLFESIKKEAENMIYES

SEQ ID NO: 40088 - DNA, 1424 bp, Allium sativum
  CDS (36)..(1187)
ggttaaacgacctttagaaatttccaaaggtcgccatggctgctctctctcaagctctcttacctcgattcactctttctcaatccatcaagccaaaatctcgcagctcagctttcttctcctgtaatcaatattcaactgcgataaagatcacaccttgtgctagcagttcgcggattctgtgtaaagccgtgtccattaaacctgatactgagatagaggggcttaacatagctgaagatgtcactcagcttattggaaaaacacccatggtctatttaaatagtattgcgaagggttgcgttgcaaacgtcgctgccaagcttgaaagcatggagccatgctctagtgttaaagacagaataggatatagtatgatatcagatgccgaacaaaaggggcttataactcccggaaagagtgtattggtggaacctacaagtggaaatactggcattgctcttgcatttgtagctgcttcgaaaggatataaactaatcctgacgatgcctgcatcaatgagcatggaaagaagagttttgtttaaagcttttggtgcagaacttgtacttactgatgctgctaagggcatgaagggagctattcaaaaggccgaagatatcgtaaagaagacaccaaatggttacatgcttcaacaatttgacaatcctgctaatccaaagatacactttgagacaactggaccagaaatttgggaagatacaaatgggaagatcgatatttttattgcgggaattggaactggtggaaccatcactggtgttggccgctttctaaagagcaaaaacccaaggataaaggtaattggtattgggccaactgaaagcaatgtactctcgggaggaaagcctggcccacacaagattcaaggcattggtgcgggattcataccaagtattctagacagtaaagttattgatgaaattttagaggtgtccagcgaggaagcaattgaaactgcaaagcagctggcacttcaagaagggttattagttggaatttcttctggagcagcagctgctgctgctatgaaagtcgcaaaaagacctgaaaatgcagggaaactcataacggttgtcttcccaagctttggtgaaagatatctttctactgctctcttccagtcgatacgcgaagaatgtgagaagatggaacctgagccttgatccattttaatatcagaattgttcattagcactgtaacacaataaggaaaattacgtatgaagtatatcagatgtcatacacttgatttgtgtccttaattacatgaattatttgtatctttccttcaatacaaattagtttacacgctttttgttgcacgagagcttgtaatgaaacaattcaagttgtacacttcttgttatatctttttttgattataaaattgtttgcttcag

SEQ ID NO: 40089 - protein, 383 aa, Allium sativum
MAALSQALLPRFTLSQSIKPKSRSSAFFSCNQYSTAIKITPCASSSRILCKAVSIKPDTEIEGLNIAEDVTQLIGKTPMVYLNSIAKGCVANVAAKLESMEPCSSVKDRIGYSMISDAEQKGLITPGKSVLVEPTSGNTGIALAFVAASKGYKLILTMPASMSMERRVLFKAFGAELVLTDAAKGMKGAIQKAEDIVKKTPNGYMLQQFDNPANPKIHFETTGPEIWEDTNGKIDIFIAGIGTGGTITGVGRFLKSKNPRIKVIGIGPTESNVLSGGKPGPHKIQGIGAGFIPSILDSKVIDEILEVSSEEAIETAKQLALQEGLLVGISSGAAAAAAMKVAKRPENAGKLITVVFPSFGERYLSTALFQSIREECEKMEPEP

SEQ ID NO: 40090 - DNA, 1256 bp, Nicotiana tabacum
  CDS (55)..(1032)
ttcaaccaggctcctttcttgtcattgtcaaatcccagaattaacttgacaaatatggcgggagaaaagaatggaattgccaaggatgtaactgaattgatcggtaacactcctttggtgtacctgaataatgttgtggatgggtgtgttgctcgcgttgctgccaagctcgaaagcatggagccgtgctctagtgttaaggataggattggttatagtatgattacggatgctgaggagaaaggcctgatcaaacctggcgagagtgtcctcattgaacctacaagtggaaacactggagtaggattggcatttatggctgctgctaaaggctacaaactcatcataacgatgccttcttcaatgagtcttgagaggagaattattctgcgtgcttttggtgctgagttggtgcttacagatccagcaaaagggatgaaaggttctattcagaaggctgaagagattaaggccaaaacacctaactcctttattcttcagcaatttgaaaaccctgcaaacccaaaggtacactatgagaccactggtcctgagatctggaaaggctcaaacgggaaagtagatgctctcgtctctggaattggaacaggaggcacaataacaggttcaggcaagtatttaagagagcagaaccccgacataaagctctatggtgtggaaccagttgaaagtgctattctttctggaggaaagcctggtccgcataagattcaggggattggtgctggtttcattcctggtgttttggaagttggtcttattgatgaagtaattcaagtttcaagtgaagaagccatagaaactgcaaagcttctggcattgaaggaaggtttgcttgtgggcatatcatctggtgcttctgctgctgcagcaatcaaacttgctaagcgccctgaaaatgctgggaagctcattgttgttgttttcccaagcttcggggagcgatatctttcctctgtgctctttgaatctgttagacgggaagcagagaacatgaccgtggagccttgaacattttgtccttcgactaccataccatagtctcgagagggttttccgatcaaagcagaatgttcttgtctgaaccttttcctttccggtttgctgaaacttctaaaaataaggcctttttcttttttttagtggccattcaagtatgtcttagtgcttttgtaagtttactgtttctacaacacttgtgacagtggatttataacaggaatttcaagagctgt

SEQ ID NO: 40091 - protein, 325 aa, Nicotiana tabacum
MAGEKNGIAKDVTELIGNTPLVYLNNVVDGCVARVAAKLESMEPCSSVKDRIGYSMITDAEEKGLIKPGESVLIEPTSGNTGVGLAFMAAAKGYKLIITMPSSMSLERRIILRAFGAELVLTDPAKGMKGSIQKAEEIKAKTPNSFILQQFENPANPKVHYETTGPEIWKGSNGKVDALVSGIGTGGTITGSGKYLREQNPDIKLYGVEPVESAILSGGKPGPHKIQGIGAGFIPGVLEVGLIDEVIQVSSEEAIETAKLLALKEGLLVGISSGASAAAAIKLAKRPENAGKLIVVVFPSFGERYLSSVLFESVRREAENMTVEP

SEQ ID NO: 40092 - DNA, 1107 bp, Spinacia oleracea
  CDS (1)..(1107)
atggcaactgtgtcaagctgtttgctgaggagatcaagaacagcctcacggatctttaaaacatcactcagatgtttctccaccacttcttcttctgcacaaactgtttctggttcatctccctttccttttactgggactaatattaaaaccaatgtttcccaacttattgggagaactcccctagtttatctaagcaaaattagtgaaggatctggagcttacatagccgtcaagcaagagatgatgcagcctactgctagtgttaaagatagacctgcattggctatgattgaagatgcagagaaaaagggattaatttctccaggaaagacggtgttgatcgagccaacatcaggaaacatgggaataagcatggcgttcatggcggctatgaagggatacaaaatggtattgacaatgccatcatacacaagcatggaaagaagggtagtaatgagggcttttggtgctgatcttattctcactgaccctgacaaaggaatggggggaactgtcaaaaaggctaaccagcttttagactccacccctgatggtttcatgcttcaacaatttaataatcctgctaatactcaggttcattttgagacgacaggtcctgaaatatgggaggatactcaagggaaagtggacatctttgtcatgggaatcggaagtggaggcactgtttctggtgttggacgctatctcaaatctcaaaatcctaatgtgaagatctatggagttgaaccagctgaaagcaacatactcaatggaggcaaaccaggtcctcaccttataactggaaacggggttgggtttaaaccagagattttagacatggatgtaatggatgcagttctcgaggttaaaagtgacgatgctgttaagatggccaggcagttggcattacaggaaggacttttggttgggatatcatcaggggctaatacaattgctgcccttgatcttgctaagaggccagaaaacaagggcaaactaattgtgacgattcacccgagttttggagagcgatatctgtcgtctgccttgttcaaggagctgagggaagaggctgaaaacatgcaaccagtccctgttgaatga

SEQ ID NO: 40093 - protein, 368 aa, Spinacia oleracea
MATVSSCLLRRSRTASRIFKTSLRCFSTTSSSAQTVSGSSPFPFTGTNIKTNVSQLIGRTPLVYLSKISEGSGAYIAVKQEMMQPTASVKDRPALAMIEDAEKKGLISPGKTVLIEPTSGNMGISMAFMAAMKGYKMVLTMPSYTSMERRVVMRAFGADLILTDPDKGMGGTVKKANQLLDSTPDGFMLQQFNNPANTQVHFETTGPEIWEDTQGKVDIFVMGIGSGGTVSGVGRYLKSQNPNVKIYGVEPAESNILNGGKPGPHLITGNGVGFKPEILDMDVMDAVLEVKSDDAVKMARQLALQEGLLVGISSGANTIAALDLAKRPENKGKLIVTIHPSFGERYLSSALFKELREEAENMQPVPVE

SEQ ID NO: 40094 - DNA, 975 bp, Arabidopsis thaliana
  CDS (1)..(975)
atggcctcgagaattgctaaagatgtgactgaattgattgggaacactccattggtgtatttgaacaatgttagcctgaagggatgtgttggtcgtgttgctgctaagcttgagatgatggaaccgtgctctagcgtcagcgtcaaagacaggattggttttagcatgatttctgatgcagaaaagaagggtcttatcaaacaaggagagagtgtgctgattgagccaacaagtggaaacactggagagttgctgttagcattcacggcagcctgcaaaggctacaagcttattattacaatgccagcttctatgagtactgagagaagaatcattctcttagcctttggagttgaagttgttttaactgacccagctaagggcatgaaaggaagctatcgcaaagcgcaagagattttggccaaaacacccaatggttacatgcttcagcagtttgagaacccggccaacccagaaatccactatgagccgacgggacctgagatatggaaaggcactggtgctaaaatcgatggctttgtttctgggattggtactggtggtaccattacaggtgctgggaagtatcttaaagaacagaacccaaacttcaagctgtatggagtggagccagttgaaagtgctattctatccggtgggaagccaggccctaccaagattcaagggataggagctggttttataccaagtgtattgaatgttgatcttattgacgaagttgttcaggtttcaagtgatgaatccattgacatggcaaggcagcttgctcttaaagaaggtcttcttgtgggaatatcatccggcgctgctgcagcaattaaacttgcacagaggccagaaaacgctgggaagctatttgtggccatattcccgagtttcgggagaaggtatctatcaacgtaccttttcgatgccgacaaggaaagaagtcggaacatgccttcaaggccttga

SEQ ID NO: 40095 - protein, 324 aa, Arabidopsis thaliana
MASRIAKDVTELIGNTPLVYLNNVSLKGCVGRVAAKLEMMEPCSSVSVKDRIGFSMISDAEKKGLIKQGESVLIEPTSGNTGELLLAFTAACKGYKLIITMPASMSTERRIILLAFGVEVVLTDPAKGMKGSYRKAQEILAKTPNGYMLQQFENPANPEIHYEPTGPEIWKGTGAKIDGFVSGIGTGGTITGAGKYLKEQNPNFKLYGVEPVESAILSGGKPGPTKIQGIGAGFIPSVLNVDLIDEVVQVSSDESIDMARQLALKEGLLVGISSGAAAAIKLAQRPENAGKLFVAIFPSFGRRYLSTYLFDADKERSRNMPSRP

SEQ ID NO: 40096 - DNA, 1134 bp, Oryza sativa subsp
  CDS (1)..(1134)
atggagagggctctgatgagcctcatgaggcggcgctccctcctccagagcggcggacgagcaccgccggcgatggccgccgccgccggtggctcaccattcttctccaccctgcagcaagcagccgccgcagacccggtccagtcgcctggcatcttgccagggctcaagatcagggactctgcgtcacagctgattgggaggacacccatggtttacctgaacaaggtcactgaaggatgtggggcccggattgctgctaagctcgagttcttgcagccgtccttcagcgtcaaggacagaccagcaatttcaatgttggaagatgctgaaaagaaggggttgatcaccccaggcaagaccacactgatcgagccgacatcagggaacatgggtattggcctggcattcatggctgctcttaaagggtatgaactcatactcacaatgccttcatacaccagccttgagaggagggtgaccatgagggccttcggcgcaaaactcgtccttaccgacccaacaaaaggtatgggaggcacggtgaggaaggccgccgagctgtatgagaaccatcctagcgcgttcatgctgcagcagtttgagaatcctgcaaatgtcaaggtacactatgagacaactggtccagaaatctgggaggatacacttgggcaggttgatatttttgtcatgggaatcgggagcggcggcaccgtcactggtgttggcaagtatcttaaggagaagaaccccaatgcaaagatctatggagttgaacctgctgaagcaaatgttttgaatggtggcaaaccaggtcctcacctcatcactggaaatggagtgggatttaagccggaaattttgaatatggatataatggaaaaggttcttgaggtgaaaggtgaggatgctgttaagatggctcgagaattggcactgaaggagggtcttctggttggaatatcatcaggagctaacacagttgctgctcttgaactagcaaagaagccagaaaacaaagggaagctcattgtgactgttcttccgagtttaggggagagatacctgtcatctgcattgtttgaggaattgagagcggaggctgaggccatgcagccagtgccagtggactaa

SEQ ID NO: 40097 - protein, 377 aa, Oryza sativa subsp
MERALMSLMRRRSLLQSGGRAPPAMAAAAGGSPFFSTLQQAAAADPVQSPGILPGLKIRDSASQLIGRTPMVYLNKVTEGCGARIAAKLEFLQPSFSVKDRPAISMLEDAEKKGLITPGKTTLIEPTSGNMGIGLAFMAALKGYELILTMPSYTSLERRVTMRAFGAKLVLTDPTKGMGGTVRKAAELYENHPSAFMLQQFENPANVKVHYETTGPEIWEDTLGQVDIFVMGIGSGGTVTGVGKYLKEKNPNAKIYGVEPAEANVLNGGKPGPHLITGNGVGFKPEILNMDIMEKVLEVKGEDAVKMARELALKEGLLVGISSGANTVAALELAKKPENKGKLIVTVLPSLGERYLSSALFEELRAEAEAMQPVPVD

SEQ ID NO: 40098 - DNA, 1411 bp, Hevea brasiliensis
  CDS (60)..(1172)
ggcacgagggcgggttttgatagtactgtggagtgtgggaagagctcaagttttcatcaatggctactcttaggaacttgttgaagaaaaaatctttaacgtccaacgagcttgctataaggaggttcgtctcttccgaggctgctgctgaatctccttcttttgctcaaagaatcagggatctgcccaagaatctccctggaactaaaatcaagactgaagtttctcaacttattgggagaactccccttgtttatcttaacaaaatgagtgaaggatgtggagcttacatagccgtcaagcaagagatgatgcaaccaactgccagcatcaaagacaggccggcgttttcaatgatcaatgatgcagaaaagaagaatttaatcactcccgggaagacggtcttgatagagccaacatctggtaatatggggattagtatggcttttatggcagccatgaaaggatacaagatggttctaaccatgccctcttacacaagcttggagagaagggtgactatgaaggcatttggagctgagctaattgtcactgatcccaccaaggggatgggtggaacagttaagaaggcctatgatcttttggaatccacaccaaatgctttcatgctacaacaattttcaaatcctgcaaattctaagatccattttgaaacgacaggtcctgaaatttgggaggatacacttggtcatgttgacatctttgtaatgggaataggcagtggaggaacagtctctggcgttgggcagtaccttaaatctcaaaatcctaatgttaagatatatggggtggagcctgctgaaagtaatgtgctcaacggtggtaaaccaggtcctcatcaaattatgggtaacggagttggatttaaaccagacatattggacatggatgtaatggaaaaggttcttgaggttagcagtgaagatgcagtaaaaatggctaggagattggcattggaggaggggcttatggtgggaatatcatctggagccaacacagttgctgcacttagacttgctagaatgccagagaacaaaggaaaactcatcgtgactgttcatccaagttttggggagcgatacttgtcatctgtcctgtttgaagaactgagaaatgaggctgcaaccatgcaaccagttccagttgactaagtgctttgggatggggtgctctataaataatattaaatctcttgtatgcaatcatttgttgacttcatattacttaataggtttcttgggtgaaaaactatgtctgcagaatattggttgtgataaaagcttattatctggtagaagtcctgtattatggcatcaattctcacttcaccctgaatctgaatggcatcagagtgttcaagaaatgtttggcaaaaaaaaaaaaaaaaaaa

SEQ ID NO: 40099 - protein, 370 aa, Hevea brasiliensis
MATLRNLLKKKSLTSNELAIRRFVSSEAAAESPSFAQRIRDLPKNLPGTKIKTEVSQLIGRTPLVYLNKMSEGCGAYIAVKQEMMQPTASIKDRPAFSMINDAEKKNLITPGKTVLIEPTSGNMGISMAFMAAMKGYKMVLTMPSYTSLERRVTMKAFGAELIVTDPTKGMGGTVKKAYDLLESTPNAFMLQQFSNPANSKIHFETTGPEIWEDTLGHVDIFVMGIGSGGTVSGVGQYLKSQNPNVKIYGVEPAESNVLNGGKPGPHQIMGNGVGFKPDILDMDVMEKVLEVSSEDAVKMARRLALEEGLMVGISSGANTVAALRLARMPENKGKLIVTVHPSFGERYLSSVLFEELRNEAATMQPVPVD

SEQ ID NO: 40100 - DNA, 1047 bp, Oryza sativa subsp
  CDS (1)..(1047)
atggcgatggcggctgcggcggtggaggtggaagaggggaggacggggatcccttctctgctgcggctctccgccgtgggggaggaggccatcgcctccaatgtcgctcagctgataggctggacgccactgattgagatgaagaacatcgccaagaaagaaggcatccaagctcgtttggttggaaagatggaagcataccaaccccttttctcggtcaaggacagaactgctctcggtatggttgaagatgcagaggagaaaggcttgattacacctggtgttacgacgctgattgaaccaactggtggtaatcttggtaccggtttggtattggttgctattcagagaggctacaggttcattgctgttatgcctgctggatattcacttgacaagcagatgctactgaggtttttgggtgctgaagtgatattaacagatcctgcaggtggattcaagggtatgatggacaaagtggaagagctcaccaaggtcatgccaaattatcactgttttaaccaatcaattaacccagcgaacccagatgcacacttcaaatggactggacctgagatctggaaggatacagccggcaaagttgatatctttgtaaccgccgctggaacagggggcacactgtcaggtgtaggaaggtacctgaagatgaaaaatccatctataaatatagtgtgcgtggaaccttcagaaagcgctgtaatttcaggtggttcaccaggttttcacaagattcaaggcactgggccaggtttcataccggaaaatttggatagatctatcatcgatgaagttgtgaccgtaagctcggaggaatccataacaatggccagaaggcttgcaaaggaggaggggctgcttgttggcatatcttctggtgcaaatgtgtctgcttgcatcaagattgcagctagagaggagaacaagggtaagatgattgttacaatgctgccgagtgggggtgaaagatacatgaactctgatctctttgcagatgtaagggaggaatgtgctaatatgaccttctaa

SEQ ID NO: 40101 - protein, 348 aa, Oryza sativa subsp
MAMAAAAVEVEEGRTGIPSLLRLSAVGEEAIASNVAQLIGWTPLIEMKNIAKKEGIQARLVGKMEAYQPLFSVKDRTALGMVEDAEEKGLITPGVTTLIEPTGGNLGTGLVLVAIQRGYRFIAVMPAGYSLDKQMLLRFLGAEVILTDPAGGFKGMMDKVEELTKVMPNYHCFNQSINPANPDAHFKWTGPEIWKDTAGKVDIFVTAAGTGGTLSGVGRYLKMKNPSINIVCVEPSESAVISGGSPGFHKIQGTGPGFIPENLDRSIIDEVVTVSSEESITMARRLAKEEGLLVGISSGANVSACIKIAAREENKGKMIVTMLPSGGERYMNSDLFADVREECANMTF

SEQ ID NO: 40102 - DNA, 1011 bp, Rhizobium sp
  CDS (1)..(1011): transl_table=11
atgctgcacacgaccgtaacgcaactgatcggccagacgccggtcatgtcgatcgacgtaccggaacgcgacgccaccctggtgctgaagatcgagaagaacaatccgggcggctcaatgaaggaccgcatggcgcgcagcatggtggttgccgcacttgaggacgggcgcctggcacccggcggcacgatcgtcgaatcctcctccggaaacaccggtaccggcctggcgctggcggcgctggaattcggcctgcgtttcatcgccgtggtcgatcaccatgcggcacccgacaagatccggatgatgcgggcgctcggcgccgagatccgctacgtcgaaggcgattttgccgaggaccaggtcgccgtcgtcgagcggcagcgcctcgccgcgcagcttggcgcccagcttcccggcgcgatgttcatgaaccagtccgacaacccggcgaatccggacggctatgccggcctcgtcgacgaactgatcgcccagcttccgggcggcatcgatgccttcgtcggctgcgtcgggaccggaggatcgatgaccggcatcgcgcaacgcctcaagcgacacaacccggcggtgcgcacgatcgccgtggaaccggccggatcgatcgtcttcggcaagcccgggcatccttactatcaatccggcacgggcacgcccgccggcgacgaggtcggcaaggtgctcgactacggctgcatcgacgagggggtccaggtgaccgacgtgcaggccttcgagacggcgcgctatatcgcccgccgcaagggactgctcgttggcggttcgaccggcggtgccatcttcaaggcactggagttcatcgtcgaaggcaagctgaccggcacggtcgtgaccaccgtcgccgatggcggcgagaagtatctcggcacgatctttgacgatgagtggatggcgaagcgccgcctgctcgaacccgccatcgccgcccagctcgacggttggctcgccggaagggcgcgtgccgcatga

SEQ ID NO: 40103 - protein, 336 aa, Rhizobium sp
MLHTTVTQLIGQTPVMSIDVPERDATLVLKIEKNNPGGSMKDRMARSMVVAALEDGRLAPGGTIVESSSGNTGTGLALAALEFGLRFIAVVDHHAAPDKIRMMRALGAEIRYVEGDFAEDQVAVVERQRLAAQLGAQLPGAMFMNQSDNPANPDGYAGLVDELIAQLPGGIDAFVGCVGTGGSMTGIAQRLKRHNPAVRTIAVEPAGSIVFGKPGHPYYQSGTGTPAGDEVGKVLDYGCIDEGVQVTDVQAFETARYIARRKGLLVGGSTGGAIFKALEFIVEGKLTGTVVTTVADGGEKYLGTIFDDEWMAKRRLLEPAIAAQLDGWLAGRARAA

SEQ ID NO: 40104 - DNA, 999 bp, Spinacia oleracea
  CDS (1)..(999)
atggagggagagtgcagcattgcaaaagatgtgactgaactggtgggaaacacacctgtagtttatcttaatcatgtcgcagagggttgtgttgcacgcattgcagccaagcttgaaatgatggaaccatactccagtgttaaagacaggattgcagttagtatgatcaaagatgctgaagaaaaaggcttgatttctcctgagaagactgttctcatagaaatgacaagtggtaatactggcattggattggcgtttattgctgctgcaaagggctataagctaatcattgtaatgccttcgtatgtgagtcttgagagaagagtaatccttctagccttgggagcagagttgcacctcatgggtccaacaaaaagctttcctgatttcgtggccaaagctagagaattattggacaaaactccaggcggctattacattaatcaattcgaaaaccctgggaatccaaagactcattttgaaactacggggccagagatctggagagccacggaagggaaagtggatgcatttgtctctggcatagggactggtggtaccgtcactggggcaggaagattccttaaggagaaaaattctgctatcaaggtctatggtgtagagccaactgaaagtgcagtcctaaatggagaaaagcctggcaagcataaaatccaagggattggtgctggtgtcatccctccattactggactttgacataattgaggaagttgtaaaggtatctagtgacgaagcctttgaaactgctaagcttcttgcattgaaagaaggtttgctggttgggatatcgtcgggagctgccgttgctgctgctattaagctagcaaaaaagcctgagtttgctgagaaattgattgttgtgcttatccctagctttggagagcgttatttatctaccgagttgtttgcttcagagaggcaagaagtggaggctttgacttatgaaagggccgatttgccactttcccccttgtga

SEQ ID NO: 40105 - protein, 332 aa, Spinacia oleracea
MEGECSIAKDVTELVGNTPVVYLNHVAEGCVARIAAKLEMMEPYSSVKDRIAVSMIKDAEEKGLISPEKTVLIEMTSGNTGIGLAFIAAAKGYKLIIVMPSYVSLERRVILLALGAELHLMGPTKSFPDFVAKARELLDKTPGGYYINQFENPGNPKTHFETTGPEIWRATEGKVDAFVSGIGTGGTVTGAGRFLKEKNSAIKVYGVEPTESAVLNGEKPGKHKIQGIGAGVIPPLLDFDIIEEVVKVSSDEAFETAKLLALKEGLLVGISSGAAVAAAIKLAKKPEFAEKLIVVLIPSFGERYLSTELFASERQEVEALTYERADLPLSPL

SEQ ID NO: 40106 - DNA, 1116 bp, Penicillium chrysogenum
  CDS (1)..(1116)
atgtttcgtcaaagtgttcggcggttcgccactacggcggctcgtgctgccgagggatccactgcctactgcacccgggtgtcaacagcccagggcgttgtcaatggactgaccgaggcgattggcaacaccccacttatccgattgaagaagctctccgagcaaaccggttgcaatgttctcggaaaggcagagttccaaaaccccggaggtagcgtgaaggaccgagcagcgctctttgtggtcaaaaacgccgaggagaagggactcctgaagcccggtggcaccgtggttgaaggaacggctggaaacactggtattggactggcgcatgtgtgtcggtcaaagggctacaagctcgtgatctatatgcccaacacccagtcccagggcaagattgacttgctccgtctgctgggagcggaagtatacccggtccccgcagtggccttcgacaacccccagaactacaaccaccaggcgcgccgacacgccgagtcactagacaacgcagtctggaccaaccagttcgacaacgttgcgaaccgtcaagcacacatcgaaactaccgggcccgagatctgggcacagacccagggcaagattgacgcctttacctgcgctaccggaaccggaggtaccctggctggtactacgcgctatctgaagactgtcagtgatggacgtgtaaagagcttcctcgccgatcctccgggcagtgttctccacagctacatccaaagtggtggcacactgatcgatcgttctggcagcagtatcactgagggtatcggccagggacgtgtgacagataaccttcagcccgatattgacttgctagatggctctgtgaacatcagtgacgagaagactatcgagatggtttaccgctgtctggatgaggagggcctgtaccttggtgccagttccgcgatgaacgtcgtggccgccaaggaggttgccgagaagttgggcaagggtaacaccgttgtgaccattctctgtgacggtgcttatcggtatgcggatcgcttgttctccagcaaatggctcgagagcaagaacctgcttggctccattccgaagcacctgcagaagtacgttgtgttgccttag

SEQ ID NO: 40107 - protein, 371 aa, Penicillium chrysogenum
MFRQSVRRFATTAARAAEGSTAYCTRVSTAQGVVNGLTEAIGNTPLIRLKKLSEQTGCNVLGKAEFQNPGGSVKDRAALFVVKNAEEKGLLKPGGTVVEGTAGNTGIGLAHVCRSKGYKLVIYMPNTQSQGKIDLLRLLGAEVYPVPAVAFDNPQNYNHQARRHAESLDNAVWTNQFDNVANRQAHIETTGPEIWAQTQGKIDAFTCATGTGGTLAGTTRYLKTVSDGRVKSFLADPPGSVLHSYIQSGGTLIDRSGSSITEGIGQGRVTDNLQPDIDLLDGSVNISDEKTIEMVYRCLDEEGLYLGASSAMNVVAAKEVAEKLGKGNTVVTILCDGAYRYADRLFSSKWLESKNLLGSIPKHLQKYVVLP

SEQ ID NO: 40108 - DNA, 1056 bp, Solanum tuberosum
  CDS (1)..(1056)
atggcgtccttactaaggagaaggttttattcgagtgaatcatcatttgctcagaggctaagagatctgccaaagtatcttcctggtaccaacatcaaaactcaagtttctcaactcattgggaaaacaccattggtgtatcttaacaaagtgagtgaaggatgtggtgcttatattgctgttaaacaagaaatgatgcaacctacttctagtatcaaagatagaccagcatttgctatgataaacgatgcagaaaagaaaggattaatcacccctgggaaaacaacactaatcgagccaacatcagggaatatgggaataagtatggcatttatggctgccatgaaaggctacaaaatgattttgacaatgccatcctatacaagcttggagaggagggtgaccatgagagcattcggagctgatttagtgaccactgatccaactaaaggaatgggaggaactattaagaaagcgtatgatcttttggaatctacacctaatgcttatatgcttcaacaattctccaatccagccaatactcaagctcattttgagactactggccctgaaatttgggaagatactcaaggtaatgttgacatctttgtcatgggaataggaagcggaggcacagtctctggtgttggacagtatctgaaatcgaaaaatcctaatgtcaagatatatggaattgagccaactgaaagcaatgtattgaatggtggaaacccaggtcctcacgaaataactggcaatggggttggattcaagccggatatccttgacatggatgtaatggaagaagttctgatggtttcgagcgaagaatcggtaaacatggctagggaattggcgttgaaggaaggccttatggttggtatatcatcaggagcaaatacagtagctgcacttagactcgccaacaggccagaaaacaaaggaaaactcatagtgacaatacatccaagttttggagagaggtacttgtcatctgttctgtatgaagatatcaggaaagaggcacagaatatgcaacctgtatcagttgattaa

SEQ ID NO: 40109 - protein, 351 aa, Solanum tuberosum
MASLLRRRFYSSESSFAQRLRDLPKYLPGTNIKTQVSQLIGKTPLVYLNKVSEGCGAYIAVKQEMMQPTSSIKDRPAFAMINDAEKKGLITPGKTTLIEPTSGNMGISMAFMAAMKGYKMILTMPSYTSLERRVTMRAFGADLVTTDPTKGMGGTIKKAYDLLESTPNAYMLQQFSNPANTQAHFETTGPEIWEDTQGNVDIFVMGIGSGGTVSGVGQYLKSKNPNVKIYGIEPTESNVLNGGNPGPHEITGNGVGFKPDILDMDVMEEVLMVSSEESVNMARELALKEGLMVGISSGANTVAALRLANRPENKGKLIVTIHPSFGERYLSSVLYEDIRKEAQNMQPVSVD

SEQ ID NO: 40110 - DNA, 927 bp, Propionibacterium freudenreichii subsp
  CDS (1)..(927): transl_table=11
atgatctaccacgatgtcaccgaggtagtgggacgcactccgcttgtgcggctcaaccatgtgaacgacacggacgccgtcgtgctggccaaacttgagttctacaacccggcgaactccgtcaaggaccgcatcggggtgtccatcgtggacgccgcggagaaatcgggcgcgctgggggccggcggcaccatcgtcgaggccaccagcgggaacaccgggatcgcgctcgcgatggtgggcgccgcccgcggctaccacgtggtgatcaccatgccggcgtcgatgagcagggaacgccgcgccgtgttgcacgccctgggcgccgagctcgtgctcacccccgccgtggaggggatgcggggtgcggtcacggccgccgagcgcatcgccgccgagcgtggtggcgtgctggccagccagttcgccaacgccgcgaaccccgcggcacaccacgcgaccaccggcccggagatctggaatgacaccgacggcgaggtggcggcactggtgtccggcgtcggaaccggtggcaccgtcagtggtgcgggacgctatctgaaggagcaggatccgcgcgtcgacgtgtacgccgtggagcccgacgagtcgcccctgctgtcgcgcggcagggccgcggcccatggcatccagggcatcggcgccaacttcgtgcccgacacctatgacgccgctgtggtcgatgaggtgctgtcggtgaccaccgaccaagccctcgcgatggcgaggcgtctggccgccgaggaaggcatcctggcaggcatctcatcgggcgccgcggtagcggcagcactcgaagtcggggcacgtccgcagtatcgcggccggacgatcgtggcaatcatccctgatttcggtgaacgctatttgtccacgcccctgtttgccggtttgatggactcgtga

SEQ ID NO: 40111 - protein, 308 aa, Propionibacterium freudenreichii subsp
MIYHDVTEVVGRTPLVRLNHVNDTDAVVLAKLEFYNPANSVKDRIGVSIVDAAEKSGALGAGGTIVEATSGNTGIALAMVGAARGYHVVITMPASMSRERRAVLHALGAELVLTPAVEGMRGAVTAAERIAAERGGVLASQFANAANPAAHHATTGPEIWNDTDGEVAALVSGVGTGGTVSGAGRYLKEQDPRVDVYAVEPDESPLLSRGRAAAHGIQGIGANFVPDTYDAAVVDEVLSVTTDQALAMARRLAAEEGILAGISSGAAVAAALEVGARPQYRGRTIVAIIPDFGERYLSTPLFAGLMDS

SEQ ID NO: 40112 - DNA, 1059 bp, Betula verrucosa
  CDS (1)..(1059)
atgaagaggatgctctccacccaaccccttgctgattctgatccgtcttttgctcaaagaatcagggatctccctaaacatgttcctggaaccaacatcaaaaatgaagtttctcaactcattgggagaactcctcttgtatatcttaacaaagtcactgaaggctgtggagcttatattgctgtcaagcaagagatgatgcaacccactgctagcatcaaagacagaccagcatatgccatgatgatggatgcagaaaagagaaacttaattactcctgggaagacaacactcatagagcccacatcaggaaatatggggatcagtttggcatttatggcagccatgaaaggatacaaaatggttctaacaatgccctcttacacaagcttggagaggagggtgacaatgagagcatttggagctgatttagttctcaccgatcccaccaaggggatgggtggaacagttaagaaggcatacgaccttttggaatctacaccaaatgctttcatgctccaacaattttcaaatcccgtcaacacccagggtgcatttgaaactacgggtcctgagatatgggaggatacaaatggacaagttgacatttttgtcatgggaataggtagtggaggcactgtctctggggtcggacagtaccttaaatcccaaaatcctaatgttaagatatatggagtggagcctactgaaagtaatgttttgaatggtggtaaaccaggtcctcatcaaattactggcaatggggttggattcaaaccagatattttggacatggatgttatggaaagagttcttgaggttagtagtgaagattcagtaaatatggcaaggcaattagcactgaaggagggacttctggtgggaatatcatctggagccaatacaattgcagcactcagactcgctagaatgccagagaacaaaggcaaactcattgtgactgtgcatccaagtttcggggagcgatacttgtcatctgtcctgtttgaggagctgaggaaagaggctgaaaacatgcaaccagtttcagttgactga

SEQ ID NO: 40113 - protein, 352 aa, Betula verrucosa
MKRMLSTQPLADSDPSFAQRIRDLPKHVPGTNIKNEVSQLIGRTPLVYLNKVTEGCGAYIAVKQEMMQPTASIKDRPAYAMMMDAEKRNLITPGKTTLIEPTSGNMGISLAFMAAMKGYKMVLTMPSYTSLERRVTMRAFGADLVLTDPTKGMGGTVKKAYDLLESTPNAFMLQQFSNPVNTQGAFETTGPEIWEDTNGQVDIFVMGIGSGGTVSGVGQYLKSQNPNVKIYGVEPTESNVLNGGKPGPHQITGNGVGFKPDILDMDVMERVLEVSSEDSVNMARQLALKEGLLVGISSGANTIAALRLARMPENKGKLIVTVHPSFGERYLSSVLFEELRKEAENMQPVSVD

SEQ ID NO: 40114 - DNA, 927 bp, Bacillus stearothermophilus
  CDS (1)..(927): transl_table=11
atggcacgcacagtcaactcgataaccgaattgatcggcgatacgccggccgtgaaacttaacaggatcgtggatgaggatagcgcggatgtgtatttgaaactggaatttatgaacccgggcagcagcgtcaaagaccggattgcgttggcgatgattgaagcggcggaaaaagcgggcaagctgaagccgggcgacacgatcgttgagccgacaagcggcaacactgggatcggattggcgatggtcgcggcggcgaaaggatataaggcggtattagtcatgccggatacgatgagcttggagcgccgcaacctgctgcgggcgtatggagccgagcttgtgctcacaccgggtgcacaagggatgcgcggaccaatcgcaaaggcggaagagctcgtccgcgagcacggctactttatgccacagcaatttaaaaacgaggcgaacccggaaatccatcgcttgacgaccgggaaagagatcgtggagcaaatgggggaccaactcgacgccttcgttgccggcgttggcacgggcggaacgaccaccggagcaggcaaagtgttgcgcgaagcttacccaaacattaaaatttacgccgttgaaccggccgattccccagtcttgtcgggaggaaaaccgggcccgcacaaaatccaagggatcggcgctggctttgttccagatattttggatacgagcatttacgatggggttattacggtaacgacggaagaagcgtttgcggcggcccgccgcgcggctcgcgaggaaggcattctcggcggcatttcgtccggcgctgcgattcatgcggcattgaaagtggcgaaagagctcggcaaagggaaaaaagtgctcgccatcatcccgagcaacggcgaacgttatttgagcacgcctctttaccaatttgaagactaa

SEQ ID NO: 40115 - protein, 308 aa, Bacillus stearothermophilus [sequence omitted]

SEQ ID NO: 40116 - DNA, 1041 bp, Bacillus thuringiensis subsp
  CDS (1)..(1041): transl_table=11
atgatgctaagagaaaacatagtagatgcgattggaaacacgccgttagtacaacttcaattagattcgtcagctagagggaacgtctttgcaaaattagaaatgctaaatccttttgggatgaaggatcgtgccgcaaagaaagtcattttagaggccaaaaagaatggagttttaaaagatggtgctccaattattgaaagttcttcggggaccatggcattgggacttgcaatggttggaacttatttagggcatccggttcatattgtaacggacaaacgtacggatcaaatgactcttgcaaaattaaaatcacttggttgtaaattggaaatagttacagaaatgacgcatttaggatggcaaagtgctcgtcttgatagactagaagaaattcttaaggagaataaagaagcattctgtcctcgtcagtatgaaaattctgataaccccaatgcctatgagtcattggcggatgaagctcttgaagagctaggacatatagatattttagtagcttctgtaggaagtgggggatcactttgtggcacggcacgagctttaaaaaaagcgaatcctgacttacgtgttgtagcagtagatgcggtaggaagtgttatttttaatcaaccagatattccagggcgtttacaaggaggacatggaaatagtgtaattccaaaaaatgtagatttctcaataattgatgaagttcattggttaaacgatgaagaatgttatgcagctaatttagaattagctaagtgtgaaaagctatttgcaggtaatagctcagcggcatcatatgcagtttcacgatttttaagtagtagatgttcagaagaaacgaatattctaactatctttccagatagaggggatcgctattataaaacagtttataatgaggaatatcgtaaagaaaagggtatgactaatcttaacctacacaaacaacctaaaaaagtttcttatggcatgacggtgacttcctggtcttatgctagtttacaagataataagatgcttacgttttaa

SEQ ID NO: 40117 - protein, 346 aa, Bacillus thuringiensis subsp
MMLRENIVDAIGNTPLVQLQLDSSARGNVFAKLEMLNPFGMKDRAAKKVILEAKKNGVLKDGAPIIESSSGTMALGLAMVGTYLGHPVHIVTDKRTDQMTLAKLKSLGCKLEIVTEMTHLGWQSARLDRLEEILKENKEAFCPRQYENSDNPNAYESLADEALEELGHIDILVASVGSGGSLCGTARALKKANPDLRVVAVDAVGSVIFNQPDIPGRLQGGHGNSVIPKNVDFSIIDEVHWLNDEECYAANLELAKCEKLFAGNSSAASYAVSRFLSSRCSEETNILTIFPDRGDRYYKTVYNEEYRKEKGMTNLNLHKQPKKVSYGMTVTSWSYASLQDNKMLTF

SEQ ID NO: 40118 - DNA, 921 bp, Fusobacterium nucleatum
  CDS (1)..(921): transl_table=11
atgttagcaaattctgtaattgatttaattgggaacaccccattagtaaaaattaataatattaatacttttggaaatgaaatatatgtaaaactagaaggttcaaatcctggtagaagtacaaaagacagaattgccttaaaaatgattgaagaagctgaaaaagaaggtttaattgataaagatactgttattatagaagctacaagtggaaatacaggaattgggcttgctatgatatgtgcagttaaaaactataagttaaagattgttatgcctgatactatgagtgttgaaagaattcaacttatgagagcctatggaactgaagttatacttactgatggttcttttggaatgaaagcttgtttagaaaaattagaagaacttaaaaaacaagaaaagaaatattttattcctaaccaatttactaatgtaaataatccaaaagctcactatgaaactacagctgaggaaattttaagagatatggataataaagttgatgtatatatttgtggaacaggaacaggaggaagtttttctggaactgctaaaaaattaaaagaaaaattacctaatattaaaacttaccccgttgaacctgcgtcatctcctttactttcaaagggatatataggtccacataaaattcaaggtatgggaatgagtataggtggtataccagttgtctacgatggtagtttagctgatggaattttagtttgtgaagatgatgaagcctttaaaatgatgagagaattaagctttaaagaaggtatcttagctgggatttcaacaggtgctactctaaaagcagctcttgattattcaaaagaaaatgctaataaaagtttaagaatagttgttctttctactgactcaggagaaaaatatctatctagttctcatggcttataa

SEQ ID NO: 40119 - protein, 306 aa, Fusobacterium nucleatum
MLANSVIDLIGNTPLVKINNINTFGNEIYVKLEGSNPGRSTKDRIALKMIEEAEKEGLIDKDTVIIEATSGNTGIGLAMICAVKNYKLKIVMPDTMSVERIQLMRAYGTEVILTDGSFGMKACLEKLEELKKQEKKYFIPNQFTNVNNPKAHYETTAEEILRDMDNKVDVYICGTGTGGSFSGTAKKLKEKLPNIKTYPVEPASSPLLSKGYIGPHKIQGMGMSIGGIPVVYDGSLADGILVCEDDEAFKMMRELSFKEGILAGISTGATLKAALDYSKENANKSLRIVVLSTDSGEKYLSSSHGL

SEQ ID NO: 40120 - DNA, 1386 bp, Rhodococcus erythropolis
  CDS (1)..(1386): transl_table=11
atgcgcatcgcggaacacgtcgtcgacctcatcggcaacaccccactcgtcaagctcacgtccgtcacgggcgaaaacttcggcacggtggcagccaaggtcgaatacctcaaccctggcggtagctccaaggaccgcatcgccgtcaagatgatcgacgcagccgaggcttcgggtgaactgaagcctggcggcaccatcgtcgagccgacttcgggcaacaccggaatcggcttggcactcgtggcgcaaaagcgtggatacaagtgcgttttcgtctgcccagacaaggtcagcgaagacaagcgcaacgtcctgcgtgcctacggcgccgaggtggtcgtgtgccccacggccgtcgcaccggacaacccgaacagctactacagcgtctccgaccgcctcacccgtgagatccccggcgcctggaagcccaaccagtactccaacccgggcggaccggagagccactacgagaccaccggtcccgagatctgggccgacaccgacggcaagatcacgcacttcgtcgcgggcgtcggcaccggcggcaccatcaccggcaccggccgctacctcaaggaagtttcgggcggcaaggtcaaggtcatcggcgcagaccccgaaggctccgtctactccggtggcaccggtcgcccgtacctggtcgaaggcgtcggcgaagacttctggccgtcggcatacgacccgtccatcccggacgagatcatcgccgtctcggatgccgattccttcgagatgacgcgtcgcctcgcccgcgaagagggactgctggtcggcggttcctgcggtatggccgtcgtcgctgccctcgaagtagccaagcgcgaaggccccgacgctctgatcgtcgtcctcctcccggacggcggccgcggctacctgtccaagatcttcaacgatcagtggatggcgtcgtacggattcctgcgcaccccactcgacggcaagaccaacgtccccaccgtcggcgacgtcctgcgcggcaagtcgggcgagctgccggacctcgttcacactcacccgtcggagactctgcgcgacgcgatcgagatcctgcgcgagtacggcgtgtcccagatgcccgtcgtcggtgcggaaccgccggtcatggcaggcgaggtcgccggaagcgtgtccgagcgagatctgctgagcgcggtattcgaaggccgtgcgcaccttgcggattccgtcgagaagcacatgagcaagccgttcccgctcatcggttccggcgagccggtctcggctgccacgaaggcgctcggtgacaccgacgcactcatggtcgtcgacgacggcaagccggtcggtgtcatcacgcgccacgatctcctgggtttcctgagttcggattcctga

SEQ ID NO: 40121 - protein, 461 aa, Rhodococcus erythropolis
MRIAEHVVDLIGNTPLVKLTSVTGENFGTVAAKVEYLNPGGSSKDRIAVKMIDAAEASGELKPGGTIVEPTSGNTGIGLALVAQKRGYKCVFVCPDKVSEDKRNVLRAYGAEVVVCPTAVAPDNPNSYYSVSDRLTREIPGAWKPNQYSNPGGPESHYETTGPEIWADTDGKITHFVAGVGTGGTITGTGRYLKEVSGGKVKVIGADPEGSVYSGGTGRPYLVEGVGEDFWPSAYDPSIPDEIIAVSDADSFEMTRRLAREEGLLVGGSCGMAVVAALEVAKREGPDALIVVLLPDGGRGYLSKIFNDQWMASYGFLRTPLDGKTNVPTVGDVLRGKSGELPDLVHTHPSETLRDAIEILREYGVSQMPVVGAEPPVMAGEVAGSVSERDLLSAVFEGRAHLADSVEKHMSKPFPLIGSGEPVSAATKALGDTDALMVVDDGKPVGVITRHDLLGFLSSDS

SEQ ID NO: 40122 - DNA, 975 bp, Arabidopsis thaliana
  CDS (1)..(975)
atggaggaggaccggtgttcgatcaaggatgatgcaactcaattgataggtaacaccccaatggtatatctgaacaacattgtggatggttgtgtagctcgtattgcagctaagcttgaaatgatggagccttgctctagtgtcaaggagcgaattgcttatggtatgattaaagatgcagaagacaagggattgattactcctgggaagagcacactgattgaggctacctctggtaacaccgggattggtttagccttcatcggtgcagctaaaggttacaaagtggtcctcacaatgccctcatcaatgagccttgagagaaaaatcattcttttagcattaggtgcggaggttcacctcacagatcctagtaaaggcgttcaaggaataatcgacaaagctgaagagatatgtagcaaaactccagatagtatcatgctagaacagttcaaaaatccttcaaacccgcaaactcattatcgaaccacgggtccagagatatggagagactctgcaggggaagtagacatattggttgccggtgttggaactggtggaacgctttccggatcaggaagattcctcaaggagaagaataaagactttaaggtttatggtgtggaacctacagaaagtgcggtaataagtggaggcaaaccgggtacacatttgatccaaggtattggggctggactcatcccagacaatttggatttcaacgttcttgatgaagtcatccaagtgacaagtgtggaagcaattgaaacagccaaacttcttgccctgaaagaaggattactggtgggaatatcttctggagctgctgcagccgctgcgataaaggtggcaaagcggccagaaaacgccggcaaactcatagttgtgattttccctagcggtggggaacgttacctatcgacctcattgttcgaatcagtcagacatgaagcagagaatttgccaattcaatga

SEQ ID NO: 40123 - protein, 324 aa, Arabidopsis thaliana
MEEDRCSIKDDATQLIGNTPMVYLNNIVDGCVARIAAKLEMMEPCSSVKERIAYGMIKDAEDKGLITPGKSTLIEATSGNTGIGLAFIGAAKGYKVVLTMPSSMSLERKIILLALGAEVHLTDPSKGVQGIIDKAEEICSKTPDSIMLEQFKNPSNPQTHYRTTGPEIWRDSAGEVDILVAGVGTGGTLSGSGRFLKEKNKDFKVYGVEPTESAVISGGKPGTHLIQGIGAGLIPDNLDFNVLDEVIQVTSVEAIETAKLLALKEGLLVGISSGAAAAAAIKVAKRPENAGKLIVVIFPSGGERYLSTSLFESVRHEAENLPIQ

SEQ ID NO: 40124 - DNA, 972 bp, Arabidopsis thaliana
  CDS (1)..(972)
atggaagatcggtgcttgatcaagaacgatgtcactgaattggttggtaacacaccaatggtgtatctgaacaatgttgttgatggttgcgtggctcgtatcgctgcaaagcttgagatgatggagccttgttctagcgtcaaagacagaatcgcgtatagtatgatcaaagatgcagaagaaaaaggattgattactcccggaaagagtacattgatagagccaactgctggtaacaccgggattggtttagcttgcatgggagctgcaagaggctataaagtgatccttgtgatgccttcaactatgagcttagagagaagaatcattctgagggcactaggtgcagaccttcatctctcggaccagcgcataggccttaaaggaatgttggagaaaactgaagcgattttaagcaaaactcctggtggttacattccacaacaatttgaaaatcctgcaaaccccgagattcattaccgaaccacgggaccggaaatatggagagattcagccgggaaagtagatatattggtcgctggcgtagggactggtggaactgctactggagtagggaagttcctcaaggagcagaacaaagacatcaaggtttgtgtggtggaaccagtagaaagtccggtacttagcggaggtcaaccaggtccacatttgattcagggaattggctctggtatcgtcccattcaatttggacttaaccattgttgatgaaattattcaagtggcaggtgaagaggctattgaaacagccaagcttcttgccctcaaagaaggattactggtgggaatatcctctggagccgcagcagcggctgcgttaaaggttgcaaagcggccagaaaacgcggggaaactcattgtggtggtttttcctagtggaggagaacgttatttatcgactaaactgttcgattcgattagatatgaagcagagaatttgcctattgaatga

SEQ ID NO: 40125 - protein, 323 aa, Arabidopsis thaliana
MEDRCLIKNDVTELVGNTPMVYLNNVVDGCVARIAAKLEMMEPCSSVKDRIAYSMIKDAEEKGLITPGKSTLIEPTAGNTGIGLACMGAARGYKVILVMPSTMSLERRIILRALGADLHLSDQRIGLKGMLEKTEAILSKTPGGYIPQQFENPANPEIHYRTTGPEIWRDSAGKVDILVAGVGTGGTATGVGKFLKEQNKDIKVCVVEPVESPVLSGGQPGPHLIQGIGSGIVPFNLDLTIVDEIIQVAGEEAIETAKLLALKEGLLVGISSGAAAAAALKVAKRPENAGKLIVVVFPSGGERYLSTKLFDSIRYEAENLPIE

SEQ ID NO: 40126 - DNA, 1602 bp, Magnaporthe grisea
  CDS (1)..(1602)
atggctgccaacaccatggccgcgcggggcgcgcagagtgtcaccgagtcggccaccgatctcatcggaaacacgcccttggtgcggctcaacaagattccacagtcgctggggatcaaggctcaggtctttggcaagttggagcttatgaacacgggtggcagcgtcaaggacagaatagccttgcgcatgattgaggaggccgagaaggaaggcagaattaagcccggagacacactgattgagcccacgagtggcaacaccggtatcggcttggccctcgtcggcgccgtcaagggctacaagaccatcatcacgcttcccgagaagatgtcggccgaaaaggtctctgtcctcaaggctctcggtgccaccatcatccgaacacccacacaagccgcctgggacgctcccgaatcgcacatcggcgtggcaaaacgcctgctcaaggagatccccaactcgcacatccttgaccagtactcgaaccccaacaacccgctcgctcacgagcacggcaccgcagaggagatctgggctcagaccggcggaaagatcaccgccgtggttgcaggcgctggcacgggtggtaccatctctggactcgccaggggactgaggaaacactcaaagacggtcaaggtcatcgccgcggatcccatcggcagtattcttgccttgcctgaaagcttgaatgacaatggcgtgaacgagccgtacaaggtcgagggtatcggctacgacttcattcctgacgttctggaccgcgagttggtagacaagtggtacaagactgaagatcgcgagtcattcatgtacgctcgtcgtctgatcgctgaggagggcttgcttgtcggaggttcatcgggctccgcgatggcagccatggttcgagccgtcaaggacttgaacctgggcgaggacgacgttgtggttgtcgtcctcccggatagcatccgcagctacctctccaagtttgccgacgatgattggctggccgccaacgacctcctccttcccacacccgacagcagcgtgaacggtgacacgctcgacagccccgcagttgccgaagcccaagctctgcacaagtctcgggcgcggagggccagcaacccctacggtggagcgacggtgcggtcgttgcgccttaagcccgtgacatccgtgctggccgacagcaagtgctccgaggccattgagacgatgcgcgacaagggctttgaccagctgcctgtggtgcgcgacaacaagctcgttgggttggttacacttggaaacatgctgagctacgtttctcgcggccgcgtcaagaccaatagccctgtcagcgacgtcatgtttgactttggccgacttgacgaggttatcaccgatcctcgcgatgttgagggcgcagccaagatgtcgaccgcacatggccgcaagaagcgcaactttgtcgagatcaccatgaacactcccctcgacgtgctcagcaagttcctcgagtggaacagcgcggccatcgtcactgagaagagcggcgaagtgtccaagcctgtggctgttgtcaccaaggttgacctcctgacctggatgatgaaggagctgaaggcttag

SEQ ID NO: 40127 - protein, 533 aa, Magnaporthe grisea
MAANTMAARGAQSVTESATDLIGNTPLVRLNKIPQSLGIKAQVFGKLELMNTGGSVKDRIALRMIEEAEKEGRIKPGDTLIEPTSGNTGIGLALVGAVKGYKTIITLPEKMSAEKVSVLKALGATIIRTPTQAAWDAPESHIGVAKRLLKEIPNSHILDQYSNPNNPLAHEHGTAEEIWAQTGGKITAVVAGAGTGGTISGLARGLRKHSKTVKVIAADPIGSILALPESLNDNGVNEPYKVEGIGYDFIPDVLDRELVDKWYKTEDRESFMYARRLIAEEGLLVGGSSGSAMAAMVRAVKDLNLGEDDVVVVVLPDSIRSYLSKFADDDWLAANDLLLPTPDSSVNGDTLDSPAVAEAQALHKSRARRASNPYGGATVRSLRLKPVTSVLADSKCSEAIETMRDKGFDQLPVVRDNKLVGLVTLGNMLSYVSRGRVKTNSPVSDVMFDFGRLDEVITDPRDVEGAAKMSTAHGRKKRNFVEITMNTPLDVLSKFLEWNSAAIVTEKSGEVSKPVAVVTKVDLLTWMMKELKA

SEQ ID NO: 40128 - DNA, 1267 bp, Glycine max
  CDS (82)..(1059)
ccacgcgtccggccgatgtgcttgtcttagtgtgtcagtcattcctgttcctcaagtcaagctttgtagtgagcagatataatggctgttgaaaggtccggaattgccaaagatgttacggaattgattggtaaaaccccattagtatatctaaataaacttgcggatggttgtgttgcccgggttgctgctaaactggagttgatggagccatgctctagtgtgaaggacaggattgggtatagtatgattgctgatgcagaagagaagggacttatcacacctggaaagagtgtcctcattgagccaacaagtggtaatactggcattggattagccttcatggcagcagccaggggttacaagctcataattacaatgcctgcttctatgagtcttgagagaagaatcattctattagcttttggagctgagttggttttgacagatcctgctaagggaatgaaaggtgctgttcagaaggctgaagagatattggctaagacgcccaatgcctacatacttcaacaatttgaaaaccctgccaatcccaaggttcattatgaaaccactggtccagagatatggaaaggctccgatgggaaaattgatgcatttgtttctgggataggcactggtggtacaataacaggtgctggaaaatatcttaaagagcagaatccgaatataaagctgattggtgtggaaccagttgaaagtccagtgctctcaggaggaaagcctggtccacacaagattcaagggattggtgctggttttatccctggtgtcttggaagtcaatcttcttgatgaagttattcaaatatcaagtgatgaagcaatagaaactgcaaagcttcttgcgcttaaagaaggcctatttgtgggaatatcttccggagctgcagctgctgctgcttttcagattgcaaaaagaccagaaaatgccgggaagcttattgttgccgtttttcccagcttcggggagaggtacctgtcctccgtgctatttgagtcagtgagacgcgaagctgaaagcatgacttttgagccctgaattcccgtttaaggctctcactactgaattttcttgttacttgtaccaggctttaactagattgttagagtactactgtttgtgactctgactctaaaataaaacttgctccaaaagactagtttttcttgatgcccctggagcgataattttgtgcctgcaacattaaaaagtattcaaagttgcttataaaaaaaaaaaaaaaagg

SEQ ID NO: 40129 - protein, 325 aa, Glycine max
MAVERSGIAKDVTELIGKTPLVYLNKLADGCVARVAAKLELMEPCSSVKDRIGYSMIADAEEKGLITPGKSVLIEPTSGNTGIGLAFMAAARGYKLIITMPASMSLERRIILLAFGAELVLTDPAKGMKGAVQKAEEILAKTPNAYILQQFENPANPKVHYETTGPEIWKGSDGKIDAFVSGIGTGGTITGAGKYLKEQNPNIKLIGVEPVESPVLSGGKPGPHKIQGIGAGFIPGVLEVNLLDEVIQISSDEAIETAKLLALKEGLFVGISSGAAAAAAFQIAKRPENAGKLIVAVFPSFGERYLSSVLFESVRREAESMTFEP

SEQ ID NO: 40130 - DNA, 1601 bp, Pichia pastoris
  CDS (14)..(1519)
agaaatacatactatgtcagacaacaaccaacctttgccaccggtttccaactccattctggagcacattggaaagactccacttgttaaacttaacagaatacccaaaattcttaatttgaaaccacaggtttatgctaaagttgaactgttcaactcaggtggttccatcaaggaccgtattgctctgagaatggttgagcaagctgagaaagagggtagaatcaagccagggtacacgctaattgagccaacgtcaggtaacactggtattggtctggcattagtaggtgcagtcaagggctacagaactattatcactcttccagagaaaatgtctaatgaaaaagttgctgtgctgaaagctctcggggctgaaattataagaactccaaccgaggctgcttgggattccccagagtctcacattggtgttgcaagaaggttggagaaagaaattccaaatgctgtaatcttagaccagtatggtaatgttaacaatccagatgcccatttctacaccactggtgcggaaatctgggatcagactaatggtaaagttacccacggtgttgctggtgcaggaactggaggtacgattacaggtattgccaaatttttgaagtctaaaaaccctaatattcaaattatcggtgctgatcctcatggttccattctagctcttcctgaatcattgaacactagtaatgagcaatacaaagttgaaggtattgggtatgactttatcccagaagttttggatagagaaattgtggacacttggtacaaaacagatgataaggatttcttcaagctggccaggcaattgatttctgaagaaggaattctagttggaggatcttccggctctgcgctttctgctgctgttaaaataatcaatgatgccaagcttgatgaaagtgctgtagttgttgtcgtttgtccagacagtatcagatcttatctaaccaagttcgctgatgatgactggatgaaactcaatggattcactgaagacgagcctgcacctctcaaaaggaagtccagcttttcaaaggacactctgtcgtcctatacgatcaaagatttggcgctcaaacctgtggtctctgtcaccattgacgattcaattgaatccacaattaatatccttcaaaccaagggttttgatcagttaccagtgttgaagaacgataagcttgctggtattgtcactctgtctcaattgttacgattactttctaataagaagattcatcttacttccaaggtagaatctgcctactttgatttttccaagcttgaaaactttgaaaaatcttacaacattaacaaggagtcaacaaacaagagaagagaataccagaagatcactactagcaccacgctggccaaattgaacaagttttttgagaccagttcagctgctatagtagaaaatgataagggtcaaccgatccacatcgtttccaaggttgatctgctttctttcttagcctccaaaggagagtttaattaatatgtaaactatgcagaattttagaaaagatatttccgtgcctgcgtaccatctaggcatacactatctaaaaaaaaaaaaa

SEQ ID NO: 40131 - protein, 501 aa, Pichia pastoris
MSDNNQPLPPVSNSILEHIGKTPLVKLNRIPKILNLKPQVYAKVELFNSGGSIKDRIALRMVEQAEKEGRIKPGYTLIEPTSGNTGIGLALVGAVKGYRTIITLPEKMSNEKVAVLKALGAEIIRTPTEAAWDSPESHIGVARRLEKEIPNAVILDQYGNVNNPDAHFYTTGAEIWDQTNGKVTHGVAGAGTGGTITGIAKFLKSKNPNIQIIGADPHGSILALPESLNTSNEQYKVEGIGYDFIPEVLDREIVDTWYKTDDKDFFKLARQLISEEGILVGGSSGSALSAAVKIINDAKLDESAVVVVVCPDSIRSYLTKFADDDWMKLNGFTEDEPAPLKRKSSFSKDTLSSYTIKDLALKPVVSVTIDDSIESTINILQTKGFDQLPVLKNDKLAGIVTLSQLLRLLSNKKIHLTSKVESAYFDFSKLENFEKSYNINKESTNKRREYQKITTSTTLAKLNKFFETSSAAIVENDKGQPIHIVSKVDLLSFLASKGEFN

SEQ ID NO: 40132 - DNA, 1392 bp, Streptomyces venezuelae
  CDS (1)..(1392): transl_table=11
gtgcaattccacgactcgatgatcagcctcgtcggcaacaccccgctggtgaagctcaacaacgtcacagcgggcattcaggcgaccgtcctggccaaggtcgagtacttcaaccccggaggctcggtcaaggaccggatcgccgtgcggatgatcgaggcggccgagcagagcggcgagctcaagcccggtgggaccatcgtcgagcccacgtccggcaacaccggcgtcggcctggcgatcgtggcccagcagaagggctacaagtgcatcttcgtctgccccgacaaggtgtccctcgacaagatcaacgtgctgcgggcgtacggcgccgaggtcgtcgtctgccccaccgcggtcgacccggagcacccggactcgtactacaacgtctcggaccggctcgtccgtgagacgccgggcgcctggaagcccgaccagtactccaacccgaacaacccgcgctcccactacgagaccaccggtcccgagctctgggagcagacggacgggaagatcacccacttcgtggcgggcgtcggcaccggcggcaccatctccggcaccggcaactacctcaaggaggccagcggcggctccgtgaagatcatcggcgccgacccggagggctccgtctactccggcggctccgggcgcccgtacctcgtcgagggcgtcggcgaggacttctggccgaccgcctacgaccggaacgtcacggaccggatcgtcgccgtgtccgacaaggactccttccagatgacccgccgcctcgccaaggaggagggcctcctcgtcggcggctcctgcggcatggccgtcgtggccgccctggaggtcgccagggagctcggcccggacgacgtcgtcgtcgtgctgctgccggactccggccgcggctacatgtcgaagatcttcagcgacgagtggatggccggccacggcttcctggaggacacctcctcggccaccgtcgcggacgtcctgcgccacaaggagggcggcaccatgccctccctggtccacatgcacccggacgagaccgtcggccaggccatcgaggtgctccgcgagtacggcgtctcgcagatgccgatcgtgaagccgggcgcgggccaccccgacgtgatggccgccgaggtcgtcggatcggtcgtcgagcgtgacgtgctcgacgccctcttcacccagcgcgcctccctggaggactcgctggagagccacatgagcgcgccgctgccgcaggtcggctcgggcgagccggtcgccgccctgatgtccgtcctcggcgacgcggccgacgcggcgatcgtgctggtcgagggcaagccgaccggtgtggtgagccgtcaggacctgctggccttcctggccaacggcggcgccaagtag

SEQ ID NO: 40133 - protein, 463 aa, Streptomyces venezuelae
MQFHDSMISLVGNTPLVKLNNVTAGIQATVLAKVEYFNPGGSVKDRIAVRMIEAAEQSGELKPGGTIVEPTSGNTGVGLAIVAQQKGYKCIFVCPDKVSLDKINVLRAYGAEVVVCPTAVDPEHPDSYYNVSDRLVRETPGAWKPDQYSNPNNPRSHYETTGPELWEQTDGKITHFVAGVGTGGTISGTGNYLKEASGGSVKIIGADPEGSVYSGGSGRPYLVEGVGEDFWPTAYDRNVTDRIVAVSDKDSFQMTRRLAKEEGLLVGGSCGMAVVAALEVARELGPDDVVVVLLPDSGRGYMSKIFSDEWMAGHGFLEDTSSATVADVLRHKEGGTMPSLVHMHPDETVGQAIEVLREYGVSQMPIVKPGAGHPDVMAAEVVGSVVERDVLDALFTQRASLEDSLESHMSAPLPQVGSGEPVAALMSVLGDAADAAIVLVEGKPTGVVSRQDLLAFLANGGAK

SEQ ID NO: 40134 - DNA, 927 bp, Bacillus stearothermophilus
  CDS (1)..(927): transl_table=11
atggcgagaacagtaaactccatcacggaattaatcggtgatacaccggcagtgaaactaaatcgtattgtcgatgaagacagtgccgatgtctatctaaaacttgagtttatgaacccaggaagcagcgtcaaagaccggattgccttggcgatgattgaagcggcggaaaaagaagggaaattaaaaccaggcgatacgattatcgagccgacaagtggaaacacgggaattggcttggccatggttgccgccgcaaaaggctataaagcgattttagtcatgccagatacgatgagtttagagcgccgcaatttattgcgtgcatatggcgctgaattagtgcttacgccgggaagccaagggatgcggggcgccattgaaaaggcagaagaattagtcagagaacatggctattttatgccccaacagtttaaaaatgaggctaacccagaaattcaccgcttaacgacagggaaggaaattgttgaacaaatgggcgatcaattagatgcgttcattgccggcgtcggtacgggcggaacgattaccggagcaggacaagttcttcgtgaaaaatatccaaatattaaaatttatgccgtagagcctgctgattcaccggtattatcgggtggaaaaccaggcccgcacaaaattcaaggaattggagccggatttgtgccagacgttttagatacaaacatttacgatgaagtcattacggtgacaacggaggaagcgtttgccgctgctcgccgcgctgcccgcgaagaaggaatccttggcggaatttcttctggtgctgccattcatgccgcgttgaaagtggcgaaacaacttggaaaaggaaagaaagtattggccattattccaagtaatggcgaacgctacttaagcacgccgctttaccaattcgaagactaa

SEQ ID NO: 40135 - protein, 308 aa, Bacillus stearothermophilus
MARTVNSITELIGDTPAVKLNRIVDEDSADVYLKLEFMNPGSSVKDRIALAMIEAAEKEGKLKPGDTIIEPTSGNTGIGLAMVAAAKGYKAILVMPDTMSLERRNLLRAYGAELVLTPGSQGMRGAIEKAEELVREHGYFMPQQFKNEANPEIHRLTTGKEIVEQMGDQLDAFIAGVGTGGTITGAGQVLREKYPNIKIYAVEPADSPVLSGGKPGPHKIQGIGAGFVPDVLDTNIYDEVITVTTEEAFAAARRAAREEGILGGISSGAAIHAALKVAKQLGKGKKVLAIIPSNGERYLSTPLYQFED

SEQ ID NO: 40136 - DNA, 951 bp, Selenomonas ruminantium
  CDS (19)..(951): transl_table=11
acaaggaggaattttgtcatggcaaagatttacaacagtgtaacagaacttatcggcaatacgccgctcttaaaagcaaataatttcatcgaggcaaatgacctgcaggctaatattctggttaagctggaatatctgaatcctgccggcagcgtcaaagatcgcattgccaaagccatgattgagcaggcggaaaaggaaggcaaaatcaccaaagacacggtgattattgagccgaccagcggcaacacgggcattggcctggcaagttttgcggcagcccgcggctataaggcaatcctgaccatgccggaaaccatgagcgtggagcgccgcaatctcctgaaggcctatggtgcacagattgtgctgactgatggcgctaagggcatgaagggggccattgccaaggccgaagaactggcaaaagagacgccgaatgcgttcatcccatcccagtttacgaatcaggcaaacccggctattcacgaagcaacgaccggcccggaaatctggcaggatgcggaaggcaaagtcgatgtctttatcgctggtgtcggcacgggcggcacgcttacaggtgtaggccgttatctcaaaaagcaaaacgctgctgtgcatatcgtagctgtagagccggaaagttcgccggtactcagccagggcacggccggcccgcacaagattcagggcattggtgcaggttttgtgccggaaacactcgataccaaggtctacgatgaagtcctgccaatcagcaacgaagatgccttcaaatatggccgtcagtttgcccatagcgaaggtgtgctggtcggtatctccgccggtgcagcactagcggcagccgttcagctggccaagcgtccggaatttgcgggcaagaacatcgtggctctgctgcctgacacgggtgaccgctatctttccacagaactctttaatgactaa

SEQ ID NO: 40137 - protein, 310 aa, Selenomonas ruminantium
MAKIYNSVTELIGNTPLLKANNFIEANDLQANILVKLEYLNPAGSVKDRIAKAMIEQAEKEGKITKDTVIIEPTSGNTGIGLASFAAARGYKAILTMPETMSVERRNLLKAYGAQIVLTDGAKGMKGAIAKAEELAKETPNAFIPSQFTNQANPAIHEATTGPEIWQDAEGKVDVFIAGVGTGGTLTGVGRYLKKQNAAVHIVAVEPESSPVLSQGTAGPHKIQGIGAGFVPETLDTKVYDEVLPISNEDAFKYGRQFAHSEGVLVGISAGAALAAAVQLAKRPEFAGKNIVALLPDTGDRYLSTELFND

SEQ ID NO: 40138 - DNA, 1378 bp, Solanum tuberosum
  CDS (55)..(1215)
agtggtaacaacgcagagtacgcggggaaggaagatagagatagcaaagcaacaatggcatctttcatcaacaatcccttaacttctctctgtaacactaagtctgaagctaataatctcttcaaaatttcccctttaagagctcaatcactgggtttttccaagcttaatggcagcagaaaagttgctttcccttctgttgtttgcaaagcggtgtctgtaccaacgaaatcgagtacagagattgaagggcttaacatcgctgaagatgttacacagcttattgggaacacaccaatggtttaccttaacaccatcgctaagggttgtgtagcaaacattgctgctaaacttgagattatggagccatgttgcagtgttaaggacaggatagggttcagtatgatagttgatgcagaggagaagggacttatatctccggggaagactgttctagttgagcctacaagtggaaacacaggcattgggcttgccttcattgctgcttccagaggatataagctcatcttaacgatgcctgcatcaatgagtcttgaaagaagggtcattctaaaagcttttggagctgaacttgttttaactgacccagccaaagggatgaaaggagctgtttcaaaggctgaagaaatattgaataacacaccagatgcctatatccttcaacaatttgacaatcccgccaaccccaagatacactatgaaacaacgggtccagagatctgggaagacacaaaaggcaagattgacatacttgttgctggcattggaactggtggaaccattacaggaacaggccgattccttaaagagcaaaatccaaacattaagattattggtgtggagcccacagaaagtaacgttctatcagggggcaaacctggccctcacaaaattcaagggattggagcaggttttattccaggaaacttggatcaagatgtaatggatgaagtgatagagatatcgagtgacgaagctgttgaaactgcgaagcaattagcgctacaagaagggttgttggttgggatttcttccggagcagctgctcttgctgccattcaggttgggaagagacctgagaatgcaggaaagcttattggggttgtatttccaagctatggggaacgatacctctcctctattcttttccagtcaatacgagaggaatgcgagaaaatgaagccagaattgtgaagatcttccttttttcgagctatcttctgattcttaataatgctatctggcttttctagctgccacacttttgtttgttatatttagttggctgctggtgtatacaatagatcaggtattaagatggttctcataacaaagattaaaaaaaaaaaaaaaaaaa

SEQ ID NO: 40139 - protein, 386 aa, Solanum tuberosum
MASFINNPLTSLCNTKSEANNLFKISPLRAQSLGFSKLNGSRKVAFPSVVCKAVSVPTKSSTEIEGLNIAEDVTQLIGNTPMVYLNTIAKGCVANIAAKLEIMEPCCSVKDRIGFSMIVDAEEKGLISPGKTVLVEPTSGNTGIGLAFIAASRGYKLILTMPASMSLERRVILKAFGAELVLTDPAKGMKGAVSKAEEILNNTPDAYILQQFDNPANPKIHYETTGPEIWEDTKGKIDILVAGIGTGGTITGTGRFLKEQNPNIKIIGVEPTESNVLSGGKPGPHKIQGIGAGFIPGNLDQDVMDEVIEISSDEAVETAKQLALQEGLLVGISSGAAALAAIQVGKRPENAGKLIGVVFPSYGERYLSSILFQSIREECEKMKPEL

SEQ ID NO: 40140 - DNA, 1044 bp, Solanum tuberosum
  CDS (1)..(1044)
atggcaactttaagcagattcttaaagaaaagatcattagctagcaacagattgttctctacacaacttcctcatactaacatcaagtctgaagtttctcaattaattgggaaaacaccaatggtttatcttaaaaaagtgacagaaggatgtggagcatatatagctgtgaaacaagagatgtttcagcctacttctagcatcaaagacagaccagcattggcaatgatcaatgatgcagaaaagaaaggcttaatatcacctgaaaagacgacgttgattgagccaacatcaggaaatatggggattagtatggcatttatggcagcaatgaaaggctacaaaatggttttgactatgccatcgtacacgagcatggagaggagagtgacaatgagagcatttggagccgatttaatcctcaccgatccaaccaaaggaatgggaggcactgttaagaaggcttatgagcttttggaatctacacctaatgctttcatgcttcaacaattttccaaccctgcaaacactcaggttcatttcgacacaactggccctgaaatatgggaagaaactctaggtaatgttgacatatttgtcatgggaataggaagtggaggcactgttactggtgttggactatatcttaaatccaaaaatcctaatgtcaagatatatggactcgagccaactgaaagcaatatactgaatggtggaaaaccaggtcctcatcatataacgggaaatggggtcggatccaagccagatatcgttgatatggatctaatggaggaagtactaatggtttctagcgaagacgctgtaaacatggctagggagttggcagtgaaggaaggactcatggttgggatatcgtcaggagctaatacagtagcagctctaagacttgctcaaaaaccagaaaacaaaggcaaactcatagtgactgtacatgcaagttttggagagcgatacttatcatctgtgttgtatcaagatctgaggaaagaagctgagaatatgcaacctgtttcagtcgattaa

SEQ ID NO: 40141 - protein, 347 aa, Solanum tuberosum
MATLSRFLKKRSLASNRLFSTQLPHTNIKSEVSQLIGKTPMVYLKKVTEGCGAYIAVKQEMFQPTSSIKDRPALAMINDAEKKGLISPEKTTLIEPTSGNMGISMAFMAAMKGYKMVLTMPSYTSMERRVTMRAFGADLILTDPTKGMGGTVKKAYELLESTPNAFMLQQFSNPANTQVHFDTTGPEIWEETLGNVDIFVMGIGSGGTVTGVGLYLKSKNPNVKIYGLEPTESNILNGGKPGPHHITGNGVGSKPDIVDMDLMEEVLMVSSEDAVNMARELAVKEGLMVGISSGANTVAALRLAQKPENKGKLIVTVHASFGERYLSSVLYQDLRKEAENMQPVSVD

SEQ ID NO: 40142 - DNA, 975 bp, Nicotiana tabacum
  CDS (1)..(975)
atggaagagaagagtgatattgcaaaggatgtcacagagcttatcgggaacacccctatggtatatctcaacaaaatcgttgaaggttgcgctgcccaaattgcagccaagttggagtcaatggaaccatgctcaagtgtcaaagacaggatggcatacagtatgatcaaagatgcagaagataagggcctgattactcctggaaagacagtcctccttgaggtgaccagtggtaataccggcattggtcttgcatttattgcagcagctcgtggctacaagctcgtgacagtgatgccagcatcatacagtcttgagagaaggattgttcttaaagctttgggttctgagttatacatcacagatccagccaaaggtatagatggtgtgcttcagaaggctgaagaaatactagataggacgccaaactgtcatttctttcgtcagtttgagaaccctgccaatccaaagatccattatgaaacaactggaccagaaatatggaagtgcacaggagggaaaattgatatttttattgccgggattggaactggaggcacagtgacgggagctggaaggttccttaaggagaagaatccagaaataaaggtatatggtatggaaccagcccgaaaatgcaattctgaatggaggacaaaagggccacataaaatccaaggaattggtgctggttttgtcccagtcgttctcgatctcagcatcctggatgaagttcttcaagtatctagtgatgaagctattgaaatgacaaagcttcttgcattgaaagaaggtttgctggtaggaatatcgtcgggggctgcagctgctgcagcgataaaagtagcaaaaaagccagaaaatgctgggaaactcattgcggttatcttccctagttttggggaacgttatctctccaccgtgctgtttgattctattcgagaagaggtggctaacatgacttttgaacaatag

SEQ ID NO: 40143 - protein, 324 aa, Nicotiana tabacum
MEEKSDIAKDVTELIGNTPMVYLNKIVEGCAAQIAAKLESMEPCSSVKDRMAYSMIKDAEDKGLITPGKTVLLEVTSGNTGIGLAFIAAARGYKLVTVMPASYSLERRIVLKALGSELYITDPAKGIDGVLQKAEEILDRTPNCHFFRQFENPANPKIHYETTGPEIWKCTGGKIDIFIAGIGTGGTVTGAGRFLKEKNPEIKVYGMEPARKCNSEWRTKGPHKIQGIGAGFVPVVLDLSILDEVLQVSSDEAIEMTKLLALKEGLLVGISSGAAAAAAIKVAKKPENAGKLIAVIFPSFGERYLSTVLFDSIREEVANMTFEQ

SEQ ID NO: 40144 - DNA, 927 bp, Methanosarcina thermophila
  CDS (1)..(927): transl_table=11
atgggtcggatattttctgatataacctggacaattggcaatactcctcttgtcaggctaaaccgcataaccaaaggactgcatgcggatgtgctggcaaaagtcgaatccttcaatcccatgggcagtgtgaaggacagaatagggctggcaatgatcgaagaagccgaacgtgaagggagaatcaaagaaggcaccactattattgaagcaaccagcggcaataccggcatcgcacttgcatgcgtttgtgctgcccgcggctacaatcttatactggttatgcctgaaactatgactgtagaacgaagaaaactgcttaaagctctgggagcggaacttgtcctgacctcgggagcggaaggaatgaggggggcagtcaataaagccgaacagatggctgccgacgattctgcactttatttcataccccagcaattccagaaccccgcaaaccctgagattcacagaaggacaacagccgaagagatctggagagatactgacggcaaagccgatgttattgtagcgggcgtgggaactggcggaactattacagggattgccagtgctatcaaaaaacggaggccttcttttaaggcgattgcagtcgagcctgccgaatctcctgtactcagcggaggaagccctggcccgcacaggatccagggaatcggtgcaggttttgttcctgatgttctccagctagagctgattgatgaaattatcaaagttacaggagatgaagccgctgccacagcccgaaggctggcaaaggaagaaggtattcttgcagggatatcttcaggggctgctacctgggctgcacttcaggtcgcatccagagaagaaatgcgcggaaagacgattgttgtaattctgccggatacgggagagcgttatttgagcactgacctgtttgactga

SEQ ID NO: 40145 - protein, 308 aa, Methanosarcina thermophila
MGRIFSDITWTIGNTPLVRLNRITKGLHADVLAKVESFNPMGSVKDRIGLAMIEEAEREGRIKEGTTIIEATSGNTGIALACVCAARGYNLILVMPETMTVERRKLLKALGAELVLTSGAEGMRGAVNKAEQMAADDSALYFIPQQFQNPANPEIHRRTTAEEIWRDTDGKADVIVAGVGTGGTITGIASAIKKRRPSFKAIAVEPAESPVLSGGSPGPHRIQGIGAGFVPDVLQLELIDEIIKVTGDEAAATARRLAKEEGILAGISSGAATWAALQVASREEMRGKTIVVILPDTGERYLSTDLFD

SEQ ID NO: 40146 - DNA, 915 bp, Clostridium sticklandii
  CDS (1)..(915): transl_table=11
atgatttatgaaaatatcatgcaaacaataggaaaaactccaatagttaagcttaaaaatttaacagatgagaatatggcagagctttatgtaaagctggaattttttaatccaggaggttcagtaaaagatagagctgcattaaatatgatagaaaacatggaaaaagagggtaagcttaagcttggtgatattattgtagagcctacaagtggaaatactggaataggaatagcgatggtaggctcggcaaagggctacaaagtaattttatgcatgccagagactatgagtatagaaagaagaaaaatcttaaaagcctatggagctgagctggttttaactgaaggagctaaaggcatgaaaggtgctatagcaaaagctgaagaaatggcacaagaagatggctatattatcctaagacagtttgacaatagctataacgtagatgctcactataaaaacacagctaaggaaataataagtgacctacctgatttagatgctctagtcgtaggagtaggaacaggaggaacacttactggagttgctaaagcatttaaagaaagctctataaatgcagaaattgttgctgtagagccagtagattcagcagttttatctggaaatgctccagggccgcataagcttcaagggataggcgcaggatttgtgcctagtattttagatactgagtatataagcaagatagaacaaattcaaacgcaggaagcttttaatgcatctagacttatggcttcaaaagaaggaatcctccttggaatttcagggggagcagcattagaggctgcgattagaacagctaaacgtcttggaaaagggaaaaaagtctgtttgttgctccctgataacggagaaagatatctaagcacagctttatatggagatgaataa

SEQ ID NO: 40147 - protein, 304 aa, Clostridium sticklandii
MIYENIMQTIGKTPIVKLKNLTDENMAELYVKLEFFNPGGSVKDRAALNMIENMEKEGKLKLGDIIVEPTSGNTGIGIAMVGSAKGYKVILCMPETMSIERRKILKAYGAELVLTEGAKGMKGAIAKAEEMAQEDGYIILRQFDNSYNVDAHYKNTAKEIISDLPDLDALVVGVGTGGTLTGVAKAFKESSINAEIVAVEPVDSAVLSGNAPGPHKLQGIGAGFVPSILDTEYISKIEQIQTQEAFNASRLMASKEGILLGISGGAALEAAIRTAKRLGKGKKVCLLLPDNGERYLSTALYGDE

SEQ ID NO: 40148 - DNA, 1671 bp, Allium tuberosum
  CDS (417)..(1394)
acataggattcgacatggaggctggagaaggtcgatggcctgtcggagttgtggaaggggctatacgagggagtcgaactcgaggaacgaggacgacgtgatgtaggcttggtgcaggtcaacgattaagtatatgaggcaattttgatgcgatgcgattattggagaggtctgcaatgaacctgcgttagtggtcaaggcgaactagtgcttcatcgggtgagagatggtgggtctagtcatgatggagtgaaatcattaggtgagcgatggtcagagctagggaaaaacacgacgatgttggttgttgttgggtcttgaagccaatttttgttgcagcaagagatttgagtaaaattggtgatggaggtgatggccagatgcagagagtctggattgatgagctaatttaacctatgggtgaagttggacctgcaattgcaaaggatgttactgaattgattggtaaaactccattggtatatctcaacaaagttacagctggctgcaaggctcgtattgctgccaagcttgaaatgatggagccttgttctagtgttaaggacaggattgggtacagcatgattactgaggcagagaaacaaggccttattactcctggggtgagtgttcttattgaaccaactagtggcaatacgggcatagggctggcgttcatggcagcagctaaaagctataagctcattttgacaatgcctgcttctatgagtcttgagagaaggattattctcaaagcttttggtgctgaattggtcctaactgatcctgttaagggtatgaaaggagcatgtgagaaagctgaggagatagctgcaaaaacaccaaattcttatgttcttcaacagtttgaaaacccctctaacccaaagattcattatgagacaaccggccctgaaatatggaaggcaactgatgggaaaattgatggacttgtatctggtattggaacgggaggtacaattactgggagtggcaaatatctcaaagaacaaaaccccagtgtcaagctctatggggttgaaccagtggaaagtgctattttatctggtggaaagccaggaccgcataaaattcaagggataggagcaggttttattcctggtgttttagatgtcaatcttatagatgaaactcttcaggtttcaagtgaggaagcaatagaaatggcgaaacaacttgccctacaagaagggcttttggtaggaatttcgtctggagctgctgcaattgctgctattagagttgcacagcgtccggagaatgaaggaaaactgattgtggttgtcttccccagctttggcgagcgatatctttctaccgtgctcttccagtcaattaagaaagaggccgagagcatggtgtttgaaccttaagaggccatctgcttttcgccttgttttctttgtttcattttttcagaataagcacaatgaatgcttcattagtttcgttgcccatggtgtcctgtttcgaagctttcggttatggcttgcacgtatactcatcaactacttgtggcattgtattgtatgcgtgctattttatcatttgtgcttgagagacttgataattttaaactacatttgtgtgacattggatattgatgtatatggcttttcatagctctattattttttataaaaaaaaaaa

SEQ ID NO: 40149 - protein, 325 aa, Allium tuberosum
MGEVGPAIAKDVTELIGKTPLVYLNKVTAGCKARIAAKLEMMEPCSSVKDRIGYSMITEAEKQGLITPGVSVLIEPTSGNTGIGLAFMAAAKSYKLILTMPASMSLERRIILKAFGAELVLTDPVKGMKGACEKAEEIAAKTPNSYVLQQFENPSNPKIHYETTGPEIWKATDGKIDGLVSGIGTGGTITGSGKYLKEQNPSVKLYGVEPVESAILSGGKPGPHKIQGIGAGFIPGVLDVNLIDETLQVSSEEAIEMAKQLALQEGLLVGISSGAAAIAAIRVAQRPENEGKLIVVVFPSFGERYLSTVLFQSIKKEAESMVFEP

SEQ ID NO: 40150 - DNA, 1014 bp, Zymomonas mobilis
  CDS (1)..(1014): transl_table=11
atgaacattgcatcttcttctgtgcctaaaaaggccgaaaatattctttccatgattggcaacacatcgcttgttaggctggaaggccccagcgagctgacagggtgtaatatatatgccaaatgtgaatttactaatcctgggggatctatcaaagatagagccgctttgtcgattattgaagatgcagaagagcaggggattattgaacccggcggcgtaattgttgaaggcacaaccggcaataccggaattgggttaactttggtcggagcagccaaaggctatcataccattattgtcatgccggaaacccaaagttcggaaaagattgcgacccttcaggccttgggggctgaattggtcttggtgccggaaacctcttattccaatagcgcccattatgttcatatgtcgcggcggctggcgcaggagacagataacgcgatctgggcgaatcagtttgacaatctggcaaaccgaatggcgcatattaaaacaacttcgcaggaaatctgggcgcagacagaagggcatattgacggctttatctgtgcagccggaacgggcggtacctttgccggaaccggattaggtctgatagagcataatcccgatattgtggtggcgttggctgacccatatggggccgtttatataattattatactagcggtgaattgcgggcagaggggcattctatttgccgaaggatttggtcaaagtcgggttacaggcaatcttgatggcgcaccggttgataaccagtttttaattagcgatcaggaaggtttgcgcaaatctatcagttgcttcaaaaagagggattgtctgttgggctgtcgtcggggatcaatatcagcaggcgctattaaactcgcaaaagaattaggccccggaaaaacgattgttactattttggccgattctggattacgctatctctcgactttatataatcgccattggctgattgcgcatgatctgcctgttccagaatggctggctaaatag

SEQ ID NO: 40151 - protein, 337 aa, Zymomonas mobilis
MNIASSSVPKKAENILSMIGNTSLVRLEGPSELTGCNIYAKCEFTNPGGSIKDRAALSIIEDAEEQGIIEPGGVIVEGTTGNTGIGLTLVGAAKGYHTIIVMPETQSSEKIATLQALGAELVLVPETSYSNSAHYVHMSRRLAQETDNAIWANQFDNLANRMAHIKTTSQEIWAQTEGHIDGFICAAGTGGTFAGTGLGLIEHNPDIVVALADPYGAVYIIIILAVNCGQRGILFAEGFGQSRVTGNLDGAPVDNQFLISDQEGLRKSISCFKKRDCLLGCRRGSISAGAIKLAKELGPGKTIVTILADSGLRYLSTLYNRHWLIAHDLPVPEWLAK

SEQ ID NO: 40152 - DNA, 927 bp, Streptococcus suis
  CDS (1)..(927): transl_table=11
atggctatttatcaaaacattactcaattagttggaaaaacacctgttattaaactgaataatatcgttccagagggggcagcggaggtctatgtgaaattagaggcctttaacccaggatcttctgtaaaagaccgtatcgccttggctatgattgaagatgctgagaaggctggtacaatcaaacctggagatactattgttgagccaacaagtggtaacactggtatcggtcttgcttgggttggagcagcaaaaggttataatgtgattatcgtcatgcctgaaaccatgagtgttgagcgtcgtaagattatccaagcttatggagctgaacttgtcttgactcctggtagcgaagggatgaagggggctatcgccaaagcaaaagagattgctgaagaaaaaaatggctgggttcctttccagtttgctaatccatccaatccaaaagttcacgaagatacaacaggacaggaaattttggaagactttggcacaactggtttagatgcctttgtatctggcgttggtactggtggtaccgtttcaggtgtttcgcatgttttaaagacagcaaatccagatattgctatctatgctgttgaagctgatgaatcagctgtcttatctggtgaagcacctggtccgcacaagatccaaggtatttcggcaggttttattccagatactttggacactagcgcctatgatggcattattcgtgtcaaatccgatgatgccttagctacaggtcgtgctatcggtggaaaagaaggattcttagttggtatttcttcaggtgcagcaattcacgctgctatcgaagtcgctaaggagttgggaactggaaaaaaagtgttggcaatcttgcctgataacggtgagcgttacttgtcaacagctctttatgagttcaatgattaa

SEQ ID NO: 40153 - protein, 308 aa, Streptococcus suis
MAIYQNITQLVGKTPVIKLNNIVPEGAAEVYVKLEAFNPGSSVKDRIALAMIEDAEKAGTIKPGDTIVEPTSGNTGIGLAWVGAAKGYNVIIVMPETMSVERRKIIQAYGAELVLTPGSEGMKGAIAKAKEIAEEKNGWVPFQFANPSNPKVHEDTTGQEILEDFGTTGLDAFVSGVGTGGTVSGVSHVLKTANPDIAIYAVEADESAVLSGEAPGPHKIQGISAGFIPDTLDTSAYDGIIRVKSDDALATGRAIGGKEGFLVGISSGAAIHAAIEVAKELGTGKKVLAILPDNGERYLSTALYEFND

SEQ ID NO: 40154 - DNA, 1524 bp, Saccharomyces cerevisiae
  CDS (1)..(1524)
atgactaaatctgagcagcaagccgattcaagacataacgttatcgacttagttggtaacaccccattgatcgcactgaaaaaattgcctaaggctttgggtatcaaaccacaaatttatgctaagctggaactatacaatccaggtggttccatcaaagacagaattgccaagtctatggtggaagaagctgaagcttccggtagaattcatccttccagatctactctgatcgaacctacttctggtaacaccggtatcggtctagctttaatcggcgccatcaaaggttacagaactatcatcaccttgccggaaaaaatgtctaacgagaaagtttctgtcctaaaggctctgggtgctgaaatcatcagaactccaactgctgctgcctgggattctccagaatcacatattggtgttgctaagaagttggaaaaagagattcctggtgctgttatacttgaccaatataacaatatgatgaacccagaagctcattactttggtactggtcgcgaaatccaaagacagctagaagacttgaatttatttgataatctacgcgctgttgttgctggtgctggtactggtgggactattagcggtatttccaagtacttgaaagaacagaatgataagatccaaatcgttggtgctgacccattcggttcaattttagcccaacctgaaaacttgaataagactgatatcactgactacaaagttgagggtattggttatgattttgttcctcaggttttggacagaaaattaattgatgtttggtataagacagacgacaagccttctttcaaatacgccagacaattgatttctaacgaaggtgtcttggtgggtggttcttccggttctgccttcactgcggttgtgaaatactgtgaagaccaccctgaactgactgaagatgatgtcattgttgccatattcccagattccatcaggtcgtacctaaccaaattcgtcgatgacgaatggttgaaaaagaacaatttgtgggatgatgacgtgttggcccgttttgactcttcaaagctggaggcttcgacgacaaaatacgctgatgtgtttggtaacgctactgtaaaggatcttcacttgaaaccggttgtttccgttaaggaaaccgctaaggtcactgatgttatcaagatattaaaagacaatggctttgaccaattgcctgtgttgactgaagacggcaagttgtctggtttagttactctctctgagcttctaagaaaactatcaatcaataattcaaacaacgacaacactataaagggtaaatacttggacttcaagaaattaaacaatttcaatgatgtttcctcttacaacgaaaataaatccggtaagaagaagtttattaaattcgatgaaaactcaaagctatctgacttgaatcgtttctttgaaaaaaactcatctgccgttatcactgatggcttgaaaccaatccatatcgttactaagatggatttactgagctacttagcataa

SEQ ID NO: 40155 - protein, 507 aa, Saccharomyces cerevisiae
MTKSEQQADSRHNVIDLVGNTPLIALKKLPKALGIKPQIYAKLELYNPGGSIKDRIAKSMVEEAEASGRIHPSRSTLIEPTSGNTGIGLALIGAIKGYRTIITLPEKMSNEKVSVLKALGAEIIRTPTAAAWDSPESHIGVAKKLEKEIPGAVILDQYNNMMNPEAHYFGTGREIQRQLEDLNLFDNLRAVVAGAGTGGTISGISKYLKEQNDKIQIVGADPFGSILAQPENLNKTDITDYKVEGIGYDFVPQVLDRKLIDVWYKTDDKPSFKYARQLISNEGVLVGGSSGSAFTAVVKYCEDHPELTEDDVIVAIFPDSIRSYLTKFVDDEWLKKNNLWDDDVLARFDSSKLEASTTKYADVFGNATVKDLHLKPVVSVKETAKVTDVIKILKDNGFDQLPVLTEDGKLSGLVTLSELLRKLSINNSNNDNTIKGKYLDFKKLNNFNDVSSYNENKSGKKKFIKFDENSKLSDLNRFFEKNSSAVITDGLKPIHIVTKMDLLSYLA

SEQ ID NO: 40156 - DNA, 969 bp, Arabidopsis thaliana
  CDS (1)..(969)
atggcctcgagaattgctaaagatgtgactgaattgattgggaacactccattggtgtatttgaacaatgttgctgaaggatgtgttggtcgtgttgctgctaagcttgagatgatggaaccgtgctctagcgtcaaagacaggattggttttagcatgatttctgatgcagaaaagaagggtcttatcaaaccaggagagagtgtgctgattgagccaacaagtggaaacactggagttgggttagcattcacggcagctgccaaaggctacaagcttattattacaatgccagcttctatgagtactgagagaagaatcattctcttagcttttggagttgagttggttttaactgacccagctaagggcatgaaaggagctatcgcaaaggcggaagagattttggcgaaaacacccaatggttacatgcttcagcagtttgagaaccctgccaaccctaagatccactatgagactacgggacctgagatatggaaaggcactggtggcaaaatcgatggctttgtttctgggattggtactggtggtaccattacaggtgctgggaagtatcttaaagaacagaacgcaaacgtcaagctgtatggagtggagccagttgaaagtgctattctatccggtgggaagccaggtcctcacaagattcaagggataggagctggttttataccaagtgtattgaatgttgatcttattgacgaagttgttcaggtttcaagtgatgaatccattgacatggcaaggcagcttgctcttaaagaaggtcttcttgtgggaatatcatccggtgcagcagctgctgcagcaattaaacttgcacagaggccagaaaacgctgggaagctatttgtggcgatattcccgagtttcggggagaggtatctatcaacggtacttttcgatgcgacaaggaaagaagcggaagccatgaccttcgaggcttga

SEQ ID NO: 40157 - protein, 322 aa, Arabidopsis thaliana
MASRIAKDVTELIGNTPLVYLNNVAEGCVGRVAAKLEMMEPCSSVKDRIGFSMISDAEKKGLIKPGESVLIEPTSGNTGVGLAFTAAAKGYKLIITMPASMSTERRIILLAFGVELVLTDPAKGMKGAIAKAEEILAKTPNGYMLQQFENPANPKIHYETTGPEIWKGTGGKIDGFVSGIGTGGTITGAGKYLKEQNANVKLYGVEPVESAILSGGKPGPHKIQGIGAGFIPSVLNVDLIDEVVQVSSDESIDMARQLALKEGLLVGISSGAAAAAAIKLAQRPENAGKLFVAIFPSFGERYLSTVLFDATRKEAEAMTFEA

SEQ ID NO: 40158 - DNA, 1280 bp, Brassica juncea
  CDS (74)..(1042)
atttgacgattttattccatataccttcttcattctctttctcactcgcgagtgaagcttgcttgcttgaatcatggcatctcgaattgctaaagatgttaccgaattgattgggaacactccattggtgtatctgaacaatgtggctgaaggatgtgttggtcgtgtcgctgctaagctcgagatgatggaaccttgctccagtgtcaaagacaggattggttttagcatgatctctgatgcagagcaaaagggtctgatcaaaccaggagagagtgtgctgattgagccaacgagtggaaacaccggagttgggttagcgttcacggcggctgccaaggggtacaagctcatcattactatgccagcttcaatgagtgtggagagaaggatcattctcttagcttttggagttgagttggtcttaactgaccctgctaaggggatgaaaggcgctatcgcaaaggccgaagagattttagccaaaacacccaatggttacatgctccaacagtttgagaaccctgccaacccaaagatacactatgagactactggacctgagatatggaaaggcactgatggaaaaatcgatggatttgtttctgggattggtactggtggtaccatcacaggtgcagggaagtatctcaaggaacagaaccctaacgttaagctgtatggagtggagccaattgaaagtgctattctatccggtgggaagccaggccctcacaagattcaagggattggtgctggctttataccaagtgtgttggaggttgatcttatagatgaagttgttcaagtttcaagtgatgaatccatcgacatggcaaggcttcttgctcttaaagaaggtcttcttgtgggaatatcatctggtgcagcagcggccgcagcaatcaaacttgcaaagaggccagaaaatgctgggaagctttttgtggcggtgttcccgagtttcggagagaggtacctgtcgactgtactattcgatgccacaaggaaagaagcagaatcaatgaccttccaggcttgaattgtctcatcttaaaatttctcaatttcttttcatttgagacgccaaaaataaaagagagatgttcagttttctcctaaagagaatcttcatcttcagtttcagtgcgtcttttgtgtttctgtatctttgtgtgagaataataatcaatctagatttcctctgttttcatttgtgaagaacacattctgtcaataagtttgagttttactttgaaaaaaaaaaaaaaaaaaaaaaa

SEQ ID NO: 40159 - protein, 322 aa, Brassica juncea
MASRIAKDVTELIGNTPLVYLNNVAEGCVGRVAAKLEMMEPCSSVKDRIGFSMISDAEQKGLIKPGESVLIEPTSGNTGVGLAFTAAAKGYKLIITMPASMSVERRIILLAFGVELVLTDPAKGMKGAIAKAEEILAKTPNGYMLQQFENPANPKIHYETTGPEIWKGTDGKIDGFVSGIGTGGTITGAGKYLKEQNPNVKLYGVEPIESAILSGGKPGPHKIQGIGAGFIPSVLEVDLIDEVVQVSSDESIDMARLLALKEGLLVGISSGAAAAAAIKLAKRPENAGKLFVAVFPSFGERYLSTVLFDATRKEAESMTFQA

SEQ ID NO: 40160 - DNA, 1056 bp, Schizosaccharomyces pombe
  CDS (1)..(1056)
atggctactagcggtattcaaacgaaggttccaggaatcgttagcggattcattggggcaattggtcgtactcctttaattagactgaatacgctgtcgaacgagacgggatgcaatatccttgccaaagctgaattccaaaatcccggaggaagcgtcaaggatagagctgcttactacgtggtacgcgatgccgagaaaaaaggaaaactctctagaggtggcacaattgtcgaggggactgccggtaacactggtattggtcttgctcacattgctagagcaagaggttataaatgcgtgatttacatgccaaatacccaatctcaagctaaaatcgatacccttaagtttttgggtgccgaggttcatcccgtacctgttgctcccttttccaaccctctcaattataaccatcaggcccgtcgtcacgctgagtctactccgaatgcttcttggactgatcagttcgataacgtcgctaacttactgtctcactacgaaaccactggtcctgaaatttgggatcaaaccaaaggtaccgttgacggctttacctgctctactggtactggtggtacttttgccggcgttaccaagtatttgaaggagaagtccgacggtcgtgttgcttctttcgtggctgatccccctggaagtgttttgtatagccatatcaaaacgaagggtaagcatcctgacaacaagggttcttcatttaccgaaggcattggtcaaggtcgtattactggaaatgtccaacctgtttacgatctcattgacgatgctatgaaaatccctgacgaaaaatctattaacatgttctttcgtttgttagaccaagaaggtcttttcttgggcggctcttcttgcttaaatgtggtcgctgctgttgaaatggctaaaatattaggtcctggcaagacggtggttacaattctttgtgattctggtcacaagtatgccactcgtttattcagtcgctcattccttgaaagtaaaaaattatttgatgtaattgagccacaatacaagaagtatattgtacttccttaa

SEQ ID NO: 40161 - protein, 351 aa, Schizosaccharomyces pombe
MATSGIQTKVPGIVSGFIGAIGRTPLIRLNTLSNETGCNILAKAEFQNPGGSVKDRAAYYVVRDAEKKGKLSRGGTIVEGTAGNTGIGLAHIARARGYKCVIYMPNTQSQAKIDTLKFLGAEVHPVPVAPFSNPLNYNHQARRHAESTPNASWTDQFDNVANLLSHYETTGPEIWDQTKGTVDGFTCSTGTGGTFAGVTKYLKEKSDGRVASFVADPPGSVLYSHIKTKGKHPDNKGSSFTEGIGQGRITGNVQPVYDLIDDAMKIPDEKSINMFFRLLDQEGLFLGGSSCLNVVAAVEMAKILGPGKTVVTILCDSGHKYATRLFSRSFLESKKLFDVIEPQYKKYIVLP

SEQ ID NO: 40162 - DNA, 1238 bp, Brassica juncea
  CDS (18)..(992)
gtgaagcttgaatcgtcatggcctctcgtattggtattgctaatgatgtgaccgaattgattgggaacactccgttggtgtatctgaacagtgttgctgaaggatgtgttggtcgcgttgccgctaagcttgagatgatggaaccctgctccagcgtcaaagacaggattggttttagcatgatctctgatgcagagaaaaagggtctgattaaaccaggagagagtgtgttgattgagccaacgagtggaaacacgggagttgggttggcattcacggcggctgccaagggctacaagcttattattaccatgccagcttcaatgagtattgagagaagaatcattctcttagcctttggtgttgagttggttttaactgacccggccaagggcatgaaaggcgctatcgcaaaggcggaagagattttggccaaaacacccaatggttacatgctccaacagtttgagaaccctgctaacccaaagatccactatgagactactggacctgagatttggaaaggcactgagggtaaaatcgatggctttatttctgggattggtactggtggtaccataacaggtgctgggaagtatctcaaggaacagaacccgaacgttaagctgtatggtgtggagccagtcgaaagcgctattctatctggtggaaagccaggccctcacaagattcaagggataggtgctggttttataccaaatgtattggagactaatcttattgatgaagttgttcaagtttcaagtgatgaatccatcgacatggcaaggcttcttgctcgcgaagaaggtcttcttgtgggaatatcatccggtgcagcagctgcagcagcaatcaaacttgcaaagaggccagaaaacgccgggaagcttttcgtggcagtgttcccaagtttcggagagaggtacctgtcgaccgtactgttcgatgccacaaggaaagaagcagaatccatgaccttcgaggcttgaatagtctcagctggaaaagacaaatctccatttctttggttagagacgccaataataaaaaaggatgttcagtttctccaaaagagaatgttcatcctcatcttcagtttcaatgcgtctttgtttttttatttctgtatcttttgtgtgtgtgagaacaaaactcaaaactctatttcttcttgtgaacgaatcacttgctgttaataaagtttgaatttgctgaaaaaaaaaaaaaaaaaaaaa

SEQ ID NO: 40163 - protein, 324 aa, Brassica juncea
MASRIGIANDVTELIGNTPLVYLNSVAEGCVGRVAAKLEMMEPCSSVKDRIGFSMISDAEKKGLIKPGESVLIEPTSGNTGVGLAFTAAAKGYKLIITMPASMSIERRIILLAFGVELVLTDPAKGMKGAIAKAEEILAKTPNGYMLQQFENPANPKIHYETTGPEIWKGTEGKIDGFISGIGTGGTITGAGKYLKEQNPNVKLYGVEPVESAILSGGKPGPHKIQGIGAGFIPNVLETNLIDEVVQVSSDESIDMARLLAREEGLLVGISSGAAAAAAIKLAKRPENAGKLFVAVFPSFGERYLSTVLFDATRKEAESMTFEA

SEQ ID NO: 40164 - DNA, 1188 bp, Schizosaccharomyces pombe
  CDS (1)..(1188)
atggcgaaaaaatatcaggatctagctagtggaatcgccatgggtgcagttttcatgtaccttttacgtcgtttgtacgagtctcttcgcgtcaaatcgtcagccgattcgttggaagaagacatcgtaaatggagtagaaggactaattggaaatactaaaatggtcaggataaaatctctttcgcaagcgacgggctgcgatatcctcgccaaagcggaatttctgaaccctggaaattctcctaaagatcgtgttgctttgcagatgattcgcacagcagaagaaaatggagatttagtaccttatcaatcgaatgctgtttatgaaggaaccgccggttctactggtatttcgatagctatgctctgttgttcacttggctatgactctcgtatatatatgcctagtgaccaatctaaagaaaaaagtgacatacttgaattgttgggtgctcatgttcaaagagtaactccagctcccatcgtcgatccaaatcattttgtaaatacggctcgtcgtaatgctgccaatcataccgtcgacgagtccattcctggcaaaggatactttgctaatcaatttgagaatccggcgaattggcaagctcatttcaattctaccggtcctgaaatatggcgtcaatgtgctggaaaattagatgcatttattgccggttctggtacgggtggcactatcgctggtatttctcgctacctaaagtccaaagatccttccatcaccgtctgtcttgctgatcctcccggaagtggcctatatcataaagttcttcacggtgtgatgtttgatttggctgaacgagaaggaactcgtcggcgacatcaggttgataccatcgttgaaggagtgggtattaatcgaatgacacgcaacttttctatcgctgaaccccttattgatatggcttacagagtaactgatgagcaggccgtagctatgtctcgatacttagtcacccatgatggtttatttgtcggcagttcttctgctgttaattgcgtcgctgctgtccgtcttgctaaaaagttgggccctggtcatcgaattgttactcttctttgcgatcctggatctcgccatttttcaaaactgtataacgaagagttcttgcgaaaaaaaaacattgttccacaagttccttcttccttagattttgttgaagcttag

SEQ ID NO: 40165 - protein, 395 aa, Schizosaccharomyces pombe
MAKKYQDLASGIAMGAVFMYLLRRLYESLRVKSSADSLEEDIVNGVEGLIGNTKMVRIKSLSQATGCDILAKAEFLNPGNSPKDRVALQMIRTAEENGDLVPYQSNAVYEGTAGSTGISIAMLCCSLGYDSRIYMPSDQSKEKSDILELLGAHVQRVTPAPIVDPNHFVNTARRNAANHTVDESIPGKGYFANQFENPANWQAHFNSTGPEIWRQCAGKLDAFIAGSGTGGTIAGISRYLKSKDPSITVCLADPPGSGLYHKVLHGVMFDLAEREGTRRRHQVDTIVEGVGINRMTRNFSIAEPLIDMAYRVTDEQAVAMSRYLVTHDGLFVGSSSAVNCVAAVRLAKKLGPGHRIVTLLCDPGSRHFSKLYNEEFLRKKNIVPQVPSSLDFVEA

SEQ ID NO: 40166 - DNA, 1215 bp, Arabidopsis thaliana
  CDS (1)..(1215)
atggctttcgcgtctccttcgctccgtcttcttcctcagtctccgttaggtcgaataacatctaaactacaccgtttcagtactgcgaaactctcactcttctcctttcaccatgattcttcatcttctttggctgtcagaactccggtatcttccttcgtcgtcggcgctatctccggaaaatcctctaccggaacgaaatcgaaatccaaaaccaaacggaaaccacctcctcctccgccagtcactactgtggctgaagagcaacacattgctgagtcagagacagtcaacattgccgaagatgtcactcaattgattggaagcacaccaatggtctatctcaatagagtcacagatggttgtttggctgacattgctgccaagctcgaatcaatggagccctgtagaagcgtcaaagataggatcggtctgagcatgatcaacgaggcagaaaacagcggagctataactccgaggaagactgtattagtagaaccaacaaccggaaacactggccttgggattgcatttgtggctgcagctaaaggctacaagcttatagtgacaatgccagcttctatcaatattgaaaggaggatgcttttacgtgcactaggagcagagattgtgctaacgaatccagagaagggtctcaaaggagcagtggataaagccaaagagattgttctcaagacaaagaacgcatatatgtttcagcaattcgacaatacagcaaatacaaagatccactttgaaactacaggaccagaaatctgggaagatacaatgggtaatgtcgatatattcgttgccggaataggaactggtggtactgtaactggtactggaggtttcttgaaaatgatgaacaaggatattaaggtagttggcgttgaaccatcagaaagaagtgtgatttctggagacaaccctggttacttaccgggaatcttggatgttaaattacttgatgaagtgtttaaggttagcaacggggaagcgattgagatggcgaggagactagctttagaggaaggattgctggttgggatttcatctggagctgctgcagtagcagcagtcagcttggctaaaagagcagagaatgccggtaaactaatcacggttctgtttccaagccatggcgagcggtatatcacaacggctctgtttagttccatcaacagagaagtccaagagatgagatattag

SEQ ID NO: 40167 - protein, 404 aa, Arabidopsis thaliana
MAFASPSLRLLPQSPLGRITSKLHRFSTAKLSLFSFHHDSSSSLAVRTPVSSFVVGAISGKSSTGTKSKSKTKRKPPPPPPVTTVAEEQHIAESETVNIAEDVTQLIGSTPMVYLNRVTDGCLADIAAKLESMEPCRSVKDRIGLSMINEAENSGAITPRKTVLVEPTTGNTGLGIAFVAAAKGYKLIVTMPASINIERRMLLRALGAEIVLTNPEKGLKGAVDKAKEIVLKTKNAYMFQQFDNTANTKIHFETTGPEIWEDTMGNVDIFVAGIGTGGTVTGTGGFLKMMNKDIKVVGVEPSERSVISGDNPGYLPGILDVKLLDEVFKVSNGEAIEMARRLALEEGLLVGISSGAAAVAAVSLAKRAENAGKLITVLFPSHGERYITTALFSSINREVQEMRY

SEQ ID NO: 40168 - DNA, 1210 bp, Arabidopsis thaliana
  CDS (1)..(1179)
atggcggcgacatcttcctctgcttttctccttaatccgttgacttctcgccaccgtcctttcaaatactcgccagagctctcttctctctccttatcctctcgaaaggctgctgctttcgatgtttcctcagctgctttcacgctcaagagacagagccggagtgatgttgtgtgcaaggctgtatctatcaagccagaagctggtgttgaagggctcaatatcgccgataacgccgctcagcttattgggaaaactccgatggtgtacttgaacaatgtagtcaagggctgtgttgcaagtgttgctgctaagcttgagatcatggaaccatgttgcagtgtcaaggataggattgggtacagtatgattactgatgctgaagagaaaggacttataacacctggaaagagtgttcttgtggaatctacgagtgggaacacagggattggccttgcattcattgctgcttcaaaaggctataaacttatcttgacgatgcctgcgtccatgagtttggaaaggcgggttcttttgagggcatttggagctgagcttgtgttaactgaacctgcaaaaggtatgactggagcaattcagaaggctgaagaaatcttgaaaaaaactcccaattcctacatgctccaacagtttgacaaccctgccaatcccaagattcattatgagacgactggtcctgagatttgggaagatacaagaggcaaaatcgatatattggttgcggggattggaactggtggaactatcactggtgttggtcgattcattaaagaaagaaaacctgaattgaaggttattggtgtcgaacccacggaaagtgctatactttctggtggaaaacccggacctcacaagattcaaggaattggagctggatttgtacccaagaatttggatctggctattgtagatgaatacatagcgatttccagtgaggaagctattgaaacctcgaagcaactagctctccaggaaggcttgttggttggtatatcttctggagctgctgctgctgctgcaatccaggttgcaaagagacctgaaaatgccgggaaactcatagccgttgtgttcccgagcttcggggaacgttacctctcgacccagcttttccagtcgattcgagaagagtgcgagcaaatgcagcccgagctttgattttcttctgtaatttcgtgaccaacaagga

SEQ ID NO: 40169 - protein, 392 aa, Arabidopsis thaliana
MAATSSSAFLLNPLTSRHRPFKYSPELSSLSLSSRKAAAFDVSSAAFTLKRQSRSDVVCKAVSIKPEAGVEGLNIADNAAQLIGKTPMVYLNNVVKGCVASVAAKLEIMEPCCSVKDRIGYSMITDAEEKGLITPGKSVLVESTSGNTGIGLAFIAASKGYKLILTMPASMSLERRVLLRAFGAELVLTEPAKGMTGAIQKAEEILKKTPNSYMLQQFDNPANPKIHYETTGPEIWEDTRGKIDILVAGIGTGGTITGVGRFIKERKPELKVIGVEPTESAILSGGKPGPHKIQGIGAGFVPKNLDLAIVDEYIAISSEEAIETSKQLALQEGLLVGISSGAAAAAAIQVAKRPENAGKLIAVVFPSFGERYLSTQLFQSIREECEQMQPEL

SEQ ID NO: 40170 - DNA, 1313 bp, Capsicum annuum
  CDS (2)..(1126)
aatggcatctatcatcaacaatcccttcacttctctctgctgcaacaccaacaaatgtgaacctaatagaatttgctctttaaggtctcagcagtcattggtgtttgacaacgtcaacagaaaagttggtttcccttctgttgtttgcaaagcagtgtctgtgcaaacgaaatcacctacagaaattgaaggccttaacattgctgaagatgttacacagcttattgggaacacaccaatggtttaccttaacaccattgttaagggttgtgttgcaaatattgctgctaaacttgagattatggagccatgttgcagtgttaaggacaggatagggttcagtatgatatctgatgctgaggagaagggacttatatctccagggaagactgttctagttgagcctacgagtggaaacacaggcattggtcttgccttcattgctgcttccagaggatataagctcatcttaacgatgcctgcctcaatgagtcttgaaagaagggttattctaaaagcttttggagctgaacttgttttaactgacccagccaaagggatgaaaggagctgtttcaaaggctgaagaaatattgaataacacaccagatgcctatatccttcaacaatttgacaatcccgccaaccccaagatacactatgaaacaacgggtccagaaatctgggaagacacaaaaggcaaaatcgacatacttgttgctggcattggaactggcggaaccatttctggaacgggccgataccttaaagagaaaaatccaaacattaagattattggtgtggagcccacagaaagtaacgttctatcagggggcaagcctggttttattccaggaaacttggatcaagatgtcatggatgaagtgatagagatatcaagtgacgaagctgttgaaactgcaaagcaattagccctacaagaagggttgttggttgggatttcttcgggggcagctgctcttgctgccattcaggttgcgaagaggcctgagaatgcagggaaacttattgcggttgtatttccaagttttggggaacggtacctctcctctatacttttccagtcaatacgagaggaatgcgagaaaatgaagccagaattgtgaagatcttcctttgtcgagctatcttctgattcctaataatgttatttgccttttctagctgccacacttttgtttgttatttagttggctgctggtgtatacaatagatcaggtattaagatgattctcataacaaagcttaaacaacctcattgatttggtttgacggttttttgtttgtgaattg

SEQ ID NO: 40171 - protein, 374 aa, Capsicum annuum
MASIINNPFTSLCCNTNKCEPNRICSLRSQQSLVFDNVNRKVGFPSVVCKAVSVQTKSPTEIEGLNIAEDVTQLIGNTPMVYLNTIVKGCVANIAAKLEIMEPCCSVKDRIGFSMISDAEEKGLISPGKTVLVEPTSGNTGIGLAFIAASRGYKLILTMPASMSLERRVILKAFGAELVLTDPAKGMKGAVSKAEEILNNTPDAYILQQFDNPANPKIHYETTGPEIWEDTKGKIDILVAGIGTGGTISGTGRYLKEKNPNIKIIGVEPTESNVLSGGKPGFIPGNLDQDVMDEVIEISSDEAVETAKQLALQEGLLVGISSGAAALAAIQVAKRPENAGKLIAVVFPSFGERYLSSILFQSIREECEKMKPEL

SEQ ID NO: 40172 - DNA, 1404 bp, Solanum tuberosum
  CDS (21)..(1181)
gaattcgccacgaggcaacaatggcatctttcatcaacaatcccttaacttctctctgtaacactaagtctgaacgtaataatctcttcaaaatttccctttacgaagctcaatcactgggtttttccaagcttaatggcagcagaaaagttgctttcccttctgttgtttgcaaagcagtgtctgtaccaacgaaatcgagtacagaaattgaagggcttaacatcgctgaagatgttacacagcttattgggaacacaccaatggtttaccttaacaccatcgctaagggttgtgtagcaaacattgctgctaaacttgagattatggaaccttgttgcagtgttaaggacaggatagggttcagtatgatagttgatgccgaggagaagggacttatatctccggggaagactgttctagttgagcctacaagtggaaacacaggcattgggcttgccttcattgctgcttccagaggatataagctcatcttaacgatgcctgcatcaatgagtcttgaaagaagggtcattctaaaagcttttggagctgaacttgttttaactgatccagccaaagggatgaaaggagctgtttcaaaggctgaagaaatattgaataacacaccagatgcctatatccttcaacaatttgacaatcccgccaaccccaagatacactatgaaacaacgggtccagagatctgggaagacacaaaaggcaagattgacatacttgttgctggcattggaactggcggaaccattacaggaacaggccgattccttaaagagcaaaatccaaacattaagattattggtgtggagcccacagaaagtaacgttctatcagggggcaaacctggccctcacaaaattcaagggattggagcaggttttattccaggaaacttggatcaagatgtcatggatgaagtgatagagatatcgagtgacgaagctgttgaaactgcgagaaccttagcgctacaagaagggttgttggttgggatttcttccggagcagctgctcttgctgccattcaggttgggaagagacctgagaatgcaggaaagcttattggggttgtatttccaagctatggggaacgatacctctcctctattcttttccagtcaatacgagaggaatgcgagaaaatgaagccagaattgtgaagatcttcctttctttgagctatcttctgattcttaataatcgtatctggcttttctagctcgcaaacttttgtttgttatatttagttggctggtgtatacaatagatcaggtattaagatggttctcataacaaagattaaacaatctcatcgattcggtttgaggattttttatttgaattgatcatgaaatttactcgcaaaaaaaaaaaaaaaaaaaa

SEQ ID NO: 40173 - protein, 386 aa, Solanum tuberosum
MASFINNPLTSLCNTKSERNNLFKISLYEAQSLGFSKLNGSRKVAFPSVVCKAVSVPTKSSTEIEGLNIAEDVTQLIGNTPMVYLNTIAKGCVANIAAKLEIMEPCCSVKDRIGFSMIVDAEEKGLISPGKTVLVEPTSGNTGIGLAFIAASRGYKLILTMPASMSLERRVILKAFGAELVLTDPAKGMKGAVSKAEEILNNTPDAYILQQFDNPANPKIHYETTGPEIWEDTKGKIDILVAGIGTGGTITGTGRFLKEQNPNIKIIGVEPTESNVLSGGKPGPHKIQGIGAGFIPGNLDQDVMDEVIEISSDEAVETARTLALQEGLLVGISSGAAALAAIQVGKRPENAGKLIGVVFPSYGERYLSSILFQSIREECEKMKPEL

SEQ ID NO: 40174 - DNA, 927 bp, Bacillus subtilis
  CDS (1)..(927): transl_table=11
atggtacgtgtagcaaactccattactgaattaattgggaatacgccaatcgttaaattaaatcgccttgcagatgaaaacagtgcggatgtatatctaaaacttgaatacatgaaccctggaagcagtgtaaaagaccgtatcggtttagctatgattgaagcggctgaaaaagaaggaaaattaaaagccggtaatacaatcattgaaccgacaagcggaaatactggaatcgggcttgcaatggttgctgctgctaaaggattaaaagccattttggttatgcctgatacaatgagcatggagcgccgcaaccttcttcgcgcatatggtgctgagcttgtgctgactcctggtgcggaaggcatgaaaggtgctattaagaaagctgaagagcttgctgaaaagcacggatactttgtgccgcagcagtttaacaacccttctaaccccgaaattcaccgccaaacaacgggtaaagaaatcgttgagcaattcggtgatgatcagcttgacgcatttgtagccggaatcggaacgggcggaacgattacgggagcgggcgaagtgctgaaggaagcatacccttccatcaagatttatgctgttgaaccgtcagattccccagtgctttcaggaggaaaaccaggcccccacaaaattcagggaatcggagcaggattcgtgccggacatcttaaacactgaagtatatgatgaaatcttccctgtgaagaatgaagaagcattcgaatatgcccgcagagctgcacgtgaagaaggaattctcggaggcatctcatcaggtgcggcaatttatgctgctcttcaagtagcaaaaaaactcggaaaaggcaaaaaagtattggccatcattccaagtaacggcgaacgttatctaagcacgccgctgtaccaattcgattaa

SEQ ID NO: 40175 - protein, 308 aa, Bacillus subtilis
MVRVANSITELIGNTPIVKLNRLADENSADVYLKLEYMNPGSSVKDRIGLAMIEAAEKEGKLKAGNTIIEPTSGNTGIGLAMVAAAKGLKAILVMPDTMSMERRNLLRAYGAELVLTPGAEGMKGAIKKAEELAEKHGYFVPQQFNNPSNPEIHRQTTGKEIVEQFGDDQLDAFVAGIGTGGTITGAGEVLKEAYPSIKIYAVEPSDSPVLSGGKPGPHKIQGIGAGFVPDILNTEVYDEIFPVKNEEAFEYARRAAREEGILGGISSGAAIYAALQVAKKLGKGKKVLAIIPSNGERYLSTPLYQFD

SEQ ID NO: 40176 - DNA, 1855 bp, Citrullus lanatus
  CDS (564)..(1541)
tattctttttctctccttctctttccccgttcttcctctctcgccgatctctccctctttctcctttctccctctcctcttccgcctcacgcccgcacaatcctcccccaactacgatctgcttccgatcggccagccccactagcgacttggcttcggcagcgcctcccagacgagcggcggacccggcggtgcagcggcaagaaccgactagcgcgacttccggcgaaaatctgtagtgagcggcggcgtccggcacagatctgaagtagatcctcgaacttcgacgatccgcagcagccgccgacgacccagcagccaccagcgacgacgacgacaacggaaggtcggagcaggcgcaacctcgacgcgaaaccacgtgtttcgtcaagtttcagcagcgttttccctcatacagcgttcggacactaatcgacgaggttttgggacgtttgactaagttttagtggggagctattcgaacacgtggcagcaagggaaacagtctatttcggcattcggatcgaggttaaggtcgcttatctgcatagttgttgctcaaaatggctgatgcaaagtctacaatagctaaagatgttactgaactaattgggaatacaccacttgtatacctcaaccgtgttgttgatggctgcgtggctcgggtagctgccaagttggagatgatggagccttgctccagtgtcaaagataggattggctatagcatgatttcagatgcagaaaacaagggtcttatcactccgggggagagtgtcttgattgaacctaccagtggtaatactggtataggcttggccttcattgctgctgccaagggttatagacttataatttgcatgcctgcatcaatgagtcttgaaagaagaaccattcttcgagctttcggagctgaactggttctcacagatccagctcgggggatgaaaggagcagttcaaaaggctgaagagataaaggcaaaaacacctaattcttacatccttcagcaatttgaaaaccctgctaacccgaagatccactatgagaccactggtccagagatctggaggggctcaggtggaaagattgacgcacttgtctctggtatagggactggaggtacagtgacaggtgcagggaagtatctcaaagaacaaaatcctaatattaagttatatggcgttgaacctgttgaaagtgcaattctatctggaggaaagcctggcccacataaaatccaaggaattggggcaggcttcatccctggagttttggatgtcaatttgctagatgaagttattcaagtatcaagtgaagaatctattgaaactgcaaagctgcttgcattgaaagaaggtctactggttggtatatcatctggcgcggccgcggctgctgcaattaggattgcaaagagaccagaaaatgctggaaagcttattgttgcggtattcccgagttttggggaacgatacctctcaaccgtgctgttcgagtctgtgaaacgagagactgagaatatggttttcgagccatgagaggtttatgtaatattttcttgcttcaaatggagagccagccagttgaacctgcaaatttcccatgagtcaaagcaaagaaagaaagtgaacttcaagcggttctttttagctttcgatgcttttgcttatacctgtagtgatttgaataacttgtttccttaatagcttctttcgtttatggtttgctcagttttagtggataaacacagatgcagctgagaataaggatagtctttcatgtattcccttctgtcgaataatgtatggaatgagtagtttctctgtgaaatggttttgaagatgaaaaaaaa

SEQ ID NO: 40177 - protein, 325 aa, Citrullus lanatus
MADAKSTIAKDVTELIGNTPLVYLNRVVDGCVARVAAKLEMMEPCSSVKDRIGYSMISDAENKGLITPGESVLIEPTSGNTGIGLAFIAAAKGYRLIICMPASMSLERRTILRAFGAELVLTDPARGMKGAVQKAEEIKAKTPNSYILQQFENPANPKIHYETTGPEIWRGSGGKIDALVSGIGTGGTVTGAGKYLKEQNPNIKLYGVEPVESAILSGGKPGPHKIQGIGAGFIPGVLDVNLLDEVIQVSSEESIETAKLLALKEGLLVGISSGAAAAAAIRIAKRPENAGKLIVAVFPSFGERYLSTVLFESVKRETENMVFEP

SEQ ID NO: 40178 - DNA, 1113 bp, Emericella nidulans
  CDS (1)..(1113)
atgtttcgccaaagcgtccggcgatttgccacagctgccctgcgcagcgctgctgagagcccatacaatgtccgggtttcccaggcgcaaggtttcgtcaacggactgaccgaagcaattggcaacacgccccttatccgccttaagcgtctctctgaagaaaccggttccaacatcctcgccaaagctgagtttcagaaccccggcggcagcgtcaaggacagagccgcattatacgttgtcaaagatgccgaggaacggggccttctaaagcccggcggcaccgtcgttgaaggaacagcgggcaacacgggtattggactcgcccacgtctgccggtccaaggggtataagcttgtcatctacatgccgaacacgcagtctcagggcaagattgatcttctgcgattgctgggtgcggaagtgtacccagtccccgcagtggcgtttgacaaccctgagaactacaaccacaaggcgcggcggcatgcggagtcgctagacaatgcggtgtggacaaatcagttcgataacacggctaaccgccgagctcatattgagacgacgggcccggagatttgggcgcagacgggcggaaagctggatgcatttacgtgctcgactgggacaggtggtacgctcgcgggaatcacatattacctgaagcaggctagcggcggccgtgtcaaatctttccttgcggatccccctggtagtgttcttcacagctacattcagagcggtgggaaattggtggagcggtctggtagcagtatcactgaggggattggccagggtcgtattacggataatctgcagcctgatgtcggcactttggatggatcgctcaatattagcgacgagaaaaccattgagatgatctaccgctgcttggatgaggaaggcctctacctaggcgccagctctgccctcaatgttgttgctgctaaggaagttgccgagaagctgggcaagggcagcaccgtcgtgaccatccttgctgatggtgcgtaccggtatgcggacaggctcttctccaagtcatggcttgagagcaagggtctgcggaacgctatccctaagcatctagagaagtacattgttcttccttga

SEQ ID NO: 40179 - protein, 370 aa, Emericella nidulans
MFRQSVRRFATAALRSAAESPYNVRVSQAQGFVNGLTEAIGNTPLIRLKRLSEETGSNILAKAEFQNPGGSVKDRAALYVVKDAEERGLLKPGGTVVEGTAGNTGIGLAHVCRSKGYKLVIYMPNTQSQGKIDLLRLLGAEVYPVPAVAFDNPENYNHKARRHAESLDNAVWTNQFDNTANRRAHIETTGPEIWAQTGGKLDAFTCSTGTGGTLAGITYYLKQASGGRVKSFLADPPGSVLHSYIQSGGKLVERSGSSITEGIGQGRITDNLQPDVGTLDGSLNISDEKTIEMIYRCLDEEGLYLGASSALNVVAAKEVAEKLGKGSTVVTILADGAYRYADRLFSKSWLESKGLRNAIPKHLEKYIVLP

SEQ ID NO: 40180 - DNA, 924 bp, Flavobacterium sp
  CDS (1)..(924): transl_table=11
atgaaatttcagaacgcactagaaaccattggaaatacaccagtcgtaaagatcaataacttattcaattcagaccatgaaatctggattaaattggaaaaaagcaacccaggcggaagcatcaaggacagaattgccttagccatgattgaagatgcggaagctaaaggattattaaataaagacagtaccatcattgaacctaccagtggaaataccggaataggattggcattggtagctgcagtaaaaggatataagcttattctggtaatgccggaaagcatgagtatagaacgtcgtaaaatcatggaagcctatggtgctgaatttgtgcttacgccaagagaaaaaggaatgaaaggagctatcgaaaaagctaatgaattagcagaagaaactcccaattcatggattccaagacagtttgataatcctgctaacgtaaaaatacacgtagaaactacagcacaggaaattctacaagatttcccggaaggtttggattatgtgattaccggagtaggaaccggcggacatatcacaggaattgctaaagcattaaaggaaaaatatcctaaccttaaagtgattgcagtagagccggaattatctcctgtattaagcggcggaagtcctgcaccacatccattgcaaggtttaggagctggttttgttccttccatattagatattacccttttagatggagtgattacagtagggaaggatgaagcgtatgaatatgccatcaacgctgctaaaaaagaaggacttttttgtgggagtttccacaggagccgccttagccgctatcgcaaaacatttaccggaaatacagcctggagcaaaaattccttaccattaattacgacaccggagaaaggtatctttctcttgagggactcttctaaaatcctttaa

SEQ ID NO: 40181 - protein, 307 aa, Flavobacterium sp
MKFQNALETIGNTPVVKINNLFNSDHEIWIKLEKSNPGGSIKDRIALAMIEDAEAKGLLNKDSTIIEPTSGNTGIGLALVAAVKGYKLILVMPESMSIERRKIMEAYGAEFVLTPREKGMKGAIEKANELAEETPNSWIPRQFDNPANVKIHVETTAQEILQDFPEGLDYVITGVGTGGHITGIAKALKEKYPNLKVIAVEPELSPVLSGGSPAPHPLQGLGAGFVPSILDITLLDGVITVGKDEAYEYAINAAKKEGLFCGSFHRSRLSRYRKTFTGNTAWSKNSLPLITTPEKGIFLLRDSSKIL

SEQ ID NO: 40182 - DNA, 951 bp, Haemophilus influenzae
  CDS (1)..(951): transl_table=11
atggcaatttatgcagacaattcttattctatcggaaatacgccgcttgtgcgtttaaaacactttggccataacggtaatgtggtggtaaaaattgaaggtcgtaacccaagctacagcgtaaaatgccgtattggggcgaatatggtgtggcaagcagaaaaagatggcacgctcacaaaagggaaagagattgtagatgcaacgagtggtaacacgggcattgctttggcttatgttgcggcggctagaggttataaaatcacgctcactatgccagaaacaatgagtcttgaaagaaaacgcttattgtgcggattgggtgtaaatttagtgcttaccgaaggcgcaaaaggaatgaaaggtgctattgcgaaagcagaagaaattgttgcttctgatccaagccgctatgtcatgcttaaacaatttgaaaatccagccaacccacaaattcatcgagaaacaacagggcctgaaatttggaaagatacggatggcaaagtcgatgttgttgttgctggcgtaggaacaggtggttcgattacgggcatttctcgcgcgattaaattagattttggtaaacaaatcacttctgttgccgttgagccagtggaatctccggtcattagtcaaactttagcgggtgaagaagtaaaaccaggcccacacaaaattcaaggtatcggtgcgggtttcattcccaaaaatttagatttatctattattgatcgcgtagaaactgttgatagtgataccgcacttgccacagctcgtcgcttaatggcggaagaaggaattcttgcaggtatttcatctggtgcagctgtcgcggctgcagatcgcttagctaaattaccagaatttgctgataaactcattgttgttattttgccttcagcgtctgaacgctacttaagcacagcactgtttgaagggattgagggataa

SEQ ID NO: 40183 - protein, 316 aa, Haemophilus influenzae
MAIYADNSYSIGNTPLVRLKHFGHNGNVVVKIEGRNPSYSVKCRIGANMVWQAEKDGTLTKGKEIVDATSGNTGIALAYVAAARGYKITLTMPETMSLERKRLLCGLGVNLVLTEGAKGMKGAIAKAEEIVASDPSRYVMLKQFENPANPQIHRETTGPEIWKDTDGKVDVVVAGVGTGGSITGISRAIKLDFGKQITSVAVEPVESPVISQTLAGEEVKPGPHKIQGIGAGFIPKNLDLSIIDRVETVDSDTALATARRLMAEEGILAGISSGAAVAAADRLAKLPEFADKLIVVILPSASERYLSTALFEGIEG

SEQ ID NO: 40184 - DNA, 1319 bp, Zea mays
  CDS (73)..(1050)
gcacgaggagaaccgccactcctcgaaatctcgaaggattttctgcggcgaaccccttcgtgacgtgacccaatgggagaggcctcgccgtcgatcgccaaggacgtcaccgagttgatcgggaacacgccgctggtgtacctcaacaaggtgaccgatgggtgcgtcggccgcagtcgcgccaagctcgagtccatggagccctgctccagcgtcaaggataggattggctacagcatgatcacggacgcagaggagaaagggctgattactccaggcgtgagtgttctgattgaaccaactagcggcaacacaggcattggactggcctttatggctgctgccaagggctacaaacttacactcacaatgcctgcctccatgagcatggagaggaggatcatattgaaggcttttggtgctgaacttgtccttactgacccactcttgggaatgaaaggagctgtcaagaaagcggaagagatacaagcaaagacacccaactcgtacattcttcaacaatttgaaaatccagctaacccaaagattcactatgagactactgggcctgaaatctggaaagctacagcaggaaaaattgatggccttgtatctggtatcgggacaggaggtaccatcaccggtactgggcgatacctcagagagcaaaatcctaatgtcaagctctatggtgtggagccagtggagagtgctgttttgaatggtggaaaacctggaccacacaagattcaaggaattggagctggttttatccctggagtcttggatgttgatctccttgatgaaactctacaggtttcaagtgatgaagctatcgagactgccaaggctcttgctctgaaagaagggttgttggttggaatctcttctggtgcagctgcagctgcggcagttaggcttgctaagaggccagaaaacgccggaaagctatttgttgtcgtgttcccgagcttcggcgagcgctacctctcatcggtgctgttccagtccatcaagaaggaagcggagagcatggtggtcgagccctagagcacaaaattctggctctggcaaactatttcctgagacgttcaccatttccatcacagaaaaataaagctcgggtgccttctgttgatttcgacgtacatttccctgccgatggtgtccagcccactgttgtcgctggagaacacgtcgtttttagacttgtgatattttactactgttttgacactcgttgtatttctgtatatcgcgtcagactgtgaaataaaagcagtacagtgtgtttcttgcaaaaaaaaaaaaaaaaaaaa

SEQ ID NO: 40185 - protein, 325 aa, Zea mays
MGEASPSIAKDVTELIGNTPLVYLNKVTDGCVGRSRAKLESMEPCSSVKDRIGYSMITDAEEKGLITPGVSVLIEPTSGNTGIGLAFMAAAKGYKLTLTMPASMSMERRIILKAFGAELVLTDPLLGMKGAVKKAEEIQAKTPNSYILQQFENPANPKIHYETTGPEIWKATAGKIDGLVSGIGTGGTITGTGRYLREQNPNVKLYGVEPVESAVLNGGKPGPHKIQGIGAGFIPGVLDVDLLDETLQVSSDEAIETAKALALKEGLLVGISSGAAAAAAVRLAKRPENAGKLFVVVFPSFGERYLSSVLFQSIKKEAESMVVEP

SEQ ID NO: 40186 - DNA, 933 bp, Mycobacterium bovis
  CDS (1)..(933): transl_table=11
atgagcatcgccgaggacatcacccaactcatcgggcgcacaccgctggtccgactgcgccgagtcaccgacggcgccgttgccgacatcgtcgccaagctggaattcttcaacccggccaacagcgtaaaagaccgtatcggggttgccatgctccaagcggccgagcaggcaggtttgatcaagccggacacgatcattctcgaacccacgagcggtaacaccggcatcgccctggccatggtttgcgcggcacgcggctaccggtgcgtgctgaccatgcccgagacgatgagtctggagcgccggatgttgctgcgcgcatacggtgctgaactcatcctcactccgggtgcggacggcatgtcaggtgccatcgccaaggctgaggagctggccaagaccgatcaacgctacttcgtgccccagcaattcgagaacccggcgaacccggccatccatcgcgtcacgaccgccgaggaggtctggcgtgacaccgacggcaaggtcgacatcgtcgtcgcgggagtcggcaccggtggcaccatcaccggcgtcgcgcaggtcatcaaggaacgcaagccgtcggcccggttcgtggccgtagagccggccgcgtcgccggtcctttctggtggccagaagggaccgcacccgatccagggcatcggcgccgggttcgtcccgccggtactcgaccaggacctagtcgacgagatcattaccgtcggtaacgaagacgcgctcaacgtggcgcgccggctggcccgggaagagggcttgctggtcggcatctcctcgggcgccgccacagtggccgctcttcaggtggcccgccggccagagaacgccgggaagctaatcgtcgtagtgctccccgacttcggcgaacgatatctgagcacaccgttgttcgccgacgtggctgactaa

SEQ ID NO: 40187 - protein, 310 aa, Mycobacterium bovis
MSIAEDITQLIGRTPLVRLRRVTDGAVADIVAKLEFFNPANSVKDRIGVAMLQAAEQAGLIKPDTIILEPTSGNTGIALAMVCAARGYRCVLTMPETMSLERRMLLRAYGAELILTPGADGMSGAIAKAEELAKTDQRYFVPQQFENPANPAIHRVTTAEEVWRDTDGKVDIVVAGVGTGGTITGVAQVIKERKPSARFVAVEPAASPVLSGGQKGPHPIQGIGAGFVPPVLDQDLVDEIITVGNEDALNVARRLAREEGLLVGISSGAATVAALQVARRPENAGKLIVVVLPDFGERYLSTPLFADVAD

SEQ ID NO: 40188 - DNA, 933 bp, Mycobacterium leprae
  CDS (1)..(933): transl_table=11
atgagcattgctgaagacgtcacacaactagttggtaacacgccactggtccggctacgccgagttaccgaaggtgcgctggctgacgttgtcgccaagctggaatccttcaatcccgccaacagcgtgaaggacaggataggcgtggccatgatcgacacggccgaggaagcgggtttgatcaagccggacaccgtcatccttgagccgacgagcgggaacaccggcatcgcactagctatggtatgcgcagcacgtggctaccactgcgtgctgaccatgcccgagacaatgagcatcgaacgacgaatgttgttgcgagcgtacggcgccgaactcatcttgactccgggcgccgatggcatgtcaggagccatcgccaaggctgaggaattagccaagtccgataaaaggtattttataccacagcaattcgagaacccagcgaacccagccatccacgccgccacaaccgccgaggaagtgtggcgcgacaccgatggcaaggtagacatcttcgtttctggaatcgggaccggaggcactatcactggtgttgcccgaatcattaaagaacgccggcccgccacgcagttcgtcgccgtagagcccgccgcgtcgccggtgttatccggtggccagaagggtcctcaccccattcagggcatcggtgctggattcgtcccgtcggtgctggtcctggacctggtggacgagatcgttaccgtcggcaacgaagaagcgctcgacctagcccgcagactggctaaggaagagggactgctggtcggcatctccgcaggggcggccgtttgcgccgccctgcacgtggcccgccggccagagaatacaggaaaactgatcgtcgtcgtgctgcccgatttcggcgagcgatatttaagcacgatgctattcgcggacttagccaactag

SEQ ID NO: 40189 - protein, 310 aa, Mycobacterium leprae
MSIAEDVTQLVGNTPLVRLRRVTEGALADVVAKLESFNPANSVKDRIGVAMIDTAEEAGLIKPDTVILEPTSGNTGIALAMVCAARGYHCVLTMPETMSIERRMLLRAYGAELILTPGADGMSGAIAKAEELAKSDKRYFIPQQFENPANPAIHAATTAEEVWRDTDGKVDIFVSGIGTGGTITGVARIIKERRPATQFVAVEPAASPVLSGGQKGPHPIQGIGAGFVPSVLVLDLVDEIVTVGNEEALDLARRLAKEEGLLVGISAGAAVCAALHVARRPENTGKLIVVVLPDFGERYLSTMLFADLAN

SEQ ID NO: 40190 - DNA, 1308 bp, Solanum tuberosum
  CDS (35)..(1012)
gggccgcttcaaatcctagaattaacctgataatatggcgggggaaaagattggaattgccaaggatgtaactgaattgattggtaacactcctttggtatacctgaataatgttgtggatgggtgtgttgcacgtgttgctgccaagctggaaagcatggagccatgctctagtgttaaggataggatcggttatagtatgattacagatgctgaggagaagggtctcatcaaacccggcgagagtgtcctcatcgaacctacgagtggaaacaccggtgtaggattggcattcatggctgctgctaaaggctacaaactcatcattacgatgccttcttcaatgagtcttgagagaagaattattctgcgtggctttcggtctgagttagtgcttaccgatccagcaaaagggatgaagggtgctatttcaaaggctgaagagataaaggccaaaacacccaactcctatattcttcagcaatttgaaaaccctgctaacccaaagatacactatgagaccactggtcctgagatctggaaaggctcaaacgggaaagtggatgctctagcctctggaattggaacaggaggcacgataactggttcaggcaagtatttgagagagcagaaccccaacgttaagctgtatggcgtggaaccagttgaaagtgctatcctttctggtggaaagcctggtccacataagattcaggggattggtgctggtttcattcctggtgttttggaagttaaccttattgatgatgtagttcaggtttcaagtgaagaatccatagaaatggctaagcttctggcattgaaggaaggattgctagtgggaatttcatctggtgctgctgcggcggcggcaattaaagttgctaagcgccctgaaaatgctgggaagctcattgttgttattttcccaagcttcggagagcgatatctttcctctgtactcttcgaaactgtcagacgagaagcagagaacatgactgtggagccttgaactttttacccttcgatgaccacatcatagtcgcaagtgggcttcgatgaaagcagaatgttcttgtctgaaccttcccttttctattttgctgaaactgctagaaaataagccttttctttctttattggctatgttctttaaagtaaagaaaccattcaagtatattttagtgcttttgtaattgtactgtaagaacaacttaatgatatttagtgctttgtaactctatgtttctacaacatttgaaatttaaagaggtgttgcttcttgttaaaaaaaaaaaaaaaaaaaaa

SEQ ID NO: 40191 - protein, 325 aa, Solanum tuberosum
MAGEKIGIAKDVTELIGNTPLVYLNNVVDGCVARVAAKLESMEPCSSVKDRIGYSMITDAEEKGLIKPGESVLIEPTSGNTGVGLAFMAAAKGYKLIITMPSSMSLERRIILRGFRSELVLTDPAKGMKGAISKAEEIKAKTPNSYILQQFENPANPKIHYETTGPEIWKGSNGKVDALASGIGTGGTITGSGKYLREQNPNVKLYGVEPVESAILSGGKPGPHKIQGIGAGFIPGVLEVNLIDDVVQVSSEESIEMAKLLALKEGLLVGISSGAAAAAAIKVAKRPENAGKLIVVIFPSFGERYLSSVLFETVRREAENMTVEP

SEQ ID NO: 40192 - DNA, 1281 bp, Spinacia oleracea
  CDS (52)..(1029)
tcagtctcgattcttctcagatttctatctcttttaagtatataacccaaaatggttgaggagaaggccttcattgctaaagatgtgactgaattgattgggaaaacgccattggtatatctcaacactgtcgccgatggttgtgttgctcgtgttgctgcaaagctggaaggaatggaaccttgctctagtgttaaagacaggattgggttcagtatgattactgatgctgaaaaaagcgggcttattacacctggagagagtgtcctgattgagcccaccagtggaaatactggcattggattagccttcatcgcagcagctaaaggttacaagctcatcattacgatgccagcatcaatgagtcttgagcggaggactattctcagggcctttggtgctgagcttatccttactgatccagcaaaaggtatgaaaggggctgttcagaaggctgaggagatccgtgacaaaactcctaattcatatatactacaacagtttgaaaaccctgccaacccaaaggttcattatgaaacaactggaccagaaatttggaaaggcacaggtggaaaaattgatatattcgtctctggaatagggactggaggtacaataacaggtgcaggaaaatacctaaaggaacaaaacccggatgttaagctaattggcctggaaccagtggaaagtgctgtattgtctggaggaaaacctggcccacataagattcaaggacttggagctggattcatacctggtgttctggatgtgaatattatcgatgaagtggttcagatatccagtgaagaatctattgaaatggccaaattgctcgccctcaaggaaggtctactggttgggatttcatctggtgctgctgctgccgctgccattaaagtggcaaagaggcctgaaaatgctggaaaactcatcgtcgctgtctttcccagctttggcgaacgatatttatcctcggtgttgtttgattcagtgaggaaggaggcagagagcatggttattgagtcctaagttcgagttctcctttaatggtcttggatacttcacaggctttggtcttttcatgtggtctaaatcctagttttcttctgttttccttttcttttctcgtagacatgcaaatcgtggcccttctgtattagaacaatgtcagttgtgtccttgatgtttggtcatcatgcactggcaactatggtttgtgatgtataaaatactctttcatgttcttccattacatattgttgatgagggatttcatgtgat

SEQ ID NO: 40193 - protein, 325 aa, Spinacia oleracea [sequence omitted]

SEQ ID NO: 40194 - DNA, 933 bp, Staphylococcus epidermidis
  CDS (1)..(933): transl_table=11
atggcacaaaaacctgtagattatgttacacaaattattgggaatacacctgtagtcaaattaagaaacgttgttgatgatgatgcagctgatatttatgttaagttagaatatcaaaatccaggtggttcggtaaaagatcgtatcgctttagcgatgattgaaaaagctgagcgtgaagggaaaattaaacctggtgatacaatcgttgagcctacgagtggtaacactggtataggtctagcatttgtatgtgctgccaaggggtacaaagcagtttttacaatgcctgaaacaatgagccaagagcgccgtaacttattaaaagcttatggtgctgaactagtattaacaccaggatctgaagctatgaaaggtgcaataaaaaaagctaaagaattaaaagaagagcacggctattttgaaccacaacaattcgaaaatccagcaaatcctgaaattcatgaacttacaactggaccagaattagttgaacaatttgaaggtcgacaaattgatgcatttttagctggtgtaggaactggtggtacgttatctggtgttggtaaagtattgaagaaagaatatccaaatgtggaaatagtagctattgaacctgaagcttctccagtattaagcggtggtgaaccaggccctcataaattacaaggattgggagcaggtttcgtacctgatactttaaatacagaagtttatgacagcatcatcaaagtaggtaatgatactgctatggatatggcacgtcgtgttgctagagaagaaggtatattagcaggtatttcatctggtgctgcaatatatgctgctattcaaaaagcaaaagaattaggtaaaggtaaaacagttgtaacagtattaccaagtaatggggaacgttacttatcaacaccattatattcatttgataattaa

SEQ ID NO: 40195 - protein, 310 aa, Staphylococcus epidermidis
MAQKPVDYVTQIIGNTPVVKLRNVVDDDAADIYVKLEYQNPGGSVKDRIALAMIEKAEREGKIKPGDTIVEPTSGNTGIGLAFVCAAKGYKAVFTMPETMSQERRNLLKAYGAELVLTPGSEAMKGAIKKAKELKEEHGYFEPQQFENPANPEIHELTTGPELVEQFEGRQIDAFLAGVGTGGTLSGVGKVLKKEYPNVEIVAIEPEASPVLSGGEPGPHKLQGLGAGFVPDTLNTEVYDSIIKVGNDTAMDMARRVAREEGILAGISSGAAIYAAIQKAKELGKGKTVVTVLPSNGERYLSTPLYSFDN

SEQ ID NO: 40196 - DNA, 1371 bp, Triticum aestivum
  CDS (72)..(1049)
gcggccgccacttcgtccagctccagctccgggaggatcacttggctgtcgaatcgctcgtcgacggcgggatgggggaggcgtcatctccggcgatcgccaaggatgtcaccgagctgatcgggaacacgccgttggtgtacctcaacaaggtgaccgacgggtgcgtggggcgcgtcgccgccaagctcgagtccatggagccctgctccagcgtcaaggacaggattggatacagcatgatcaccgacgcggaggagaaggggttcatcgtcccaggcaagagtgtgctgattgagccaaccagtggcaacacaggcattgggctggccttcatggctgctgcgaagggttacagacttgtactcacaatgcccgcctccatgagtatggagaggagaatcatcttgaaggcttttggtgctgagctgatcctcaccgacccactcttgggaatgaaaggagctgtccaaaaggcagaagagctggcagcaaagacacccaactcatacatccttcagcagtttgagaatgctgccaacccaaagattcattatgagacaactgggcctgaaatctggaaaggcacaggaggaaagatcgatggccttgtttctggcatcgggacaggtggtaccattactggaactggaaaatacctccaagagcaaaatcctaacatcaagctctacggtgtggagcctaccgagagtgctatcttaaatggtggaaagcctggaccacacaagatccaaggaattggagctggttttatccctggtgtcttggatgttgacatcattgatgaaaccatacaggtttcaagtgatgagtccattgagatggcaaagtctctggcattgaaagaaggattgctggttggaatctcttctggtgctgctgcagcagctgcaatcaaggttgctcagaggcctgaaaatgcagggaaactctttgttgttgtattcccaagcttcggagagcgctacctttcgtcggtgctcttccactccatcaagaaggaggccgagagcatggtggtcgagtgactctcgggactcctcaagcgcgcgaacgtgttctccaaagccaaatccctacattcgtaggagccctcctacagaaataaaagctttggcgtccctgctagtgttggtctgacatcaagtcctgtcaagttttaatcccactttgtttagcaatggggaatacttttgtgttggccttgtggtgtttagcgatttgaattacctcttgcatgccctgtatattgaactcctctgtggtccatatgtcagccagtgtgaaatgaaacatcatggtgccatgtaaataaatagatatacagataggtttccctcaaaaaaaaaa

SEQ ID NO: 40197 - protein, 325 aa, Triticum aestivum
MGEASSPAIAKDVTELIGNTPLVYLNKVTDGCVGRVAAKLESMEPCSSVKDRIGYSMITDAEEKGFIVPGKSVLIEPTSGNTGIGLAFMAAAKGYRLVLTMPASMSMERRIILKAFGAELILTDPLLGMKGAVQKAEELAAKTPNSYILQQFENAANPKIHYETTGPEIWKGTGGKIDGLVSGIGTGGTITGTGKYLQEQNPNIKLYGVEPTESAILNGGKPGPHKIQGIGAGFIPGVLDVDIIDETIQVSSDESIEMAKSLALKEGLLVGISSGAAAAAAIKVAQRPENAGKLFVVVFPSFGERYLSSVLFHSIKKEAESMVVE

SEQ ID NO: 40198 - DNA, 1182 bp, Saccharomyces cerevisiae
  CDS (1)..(1182)
atgtcctgttctcaaaataagacttctgtcagtctggcctggcgtgaatgcatatccatcgcttccgtcctaattggcgcgtatgcatcatacaaatactataagctgttcaaaacacgcgatattccacgtccaaaagaaggcgttgaagaactcataggaaacactcctctggttaagatcagatctcttaccaaggctactggagttaacatttacgctaagttggagttatgcaacccagcaggaagtgctaaggatagagtggctttaaacatcataaagacggctgaggaattaggcgagctcgtcagaggtgaacctggctgggtatttgaaggaacaagtgggtcgactggtatctctatagcagtggtctgtaatgcgttgggttatagggcacacatttctttgcccgatgacacatcgctagaaaaattggcattactagaaagcctcggtgctactgttaataaggttaagcccgctagtattgtcgatccaaaccaatacgtaaatgccgccaaaaaggcatgtaatgaactaaagaagagtggtaatggaataagagcagtttttgccgatcagttcgaaaacgaagccaactggaaagtacattaccagaccacaggcccagaaattgcccatcaaactaagggaaatattgacgcattcattgctggctgcggtactggtggcaccataactggtgtggcaaaattcttaaaggaaagagcaaagataccttgccatgtcgttctagcggatccacaaggatctggcttttataatagagtcaactatggcgtgatgtatgactatgtagagaaggaaggtactagaagaaggcatcaagttgacactatcgtagaagggattgggttaaacagaatcactcataattttcatatgggcgaaaagtttattgatgaatcaatacgagtcaacgataatcaagccattagaatggcaaaatacctatcggtaaacgacgggctattcgtggggagtagtacagctattaatgcggtagccgctattcaggttgcaaaaacgcttcctcacggctcaaacattgtgattattgcatgcgacagcggttcaagacacctaagtaaattctggaaagaagctaaagaaatcgatcacgacgtgtcattagaagaagtaataaatatctaa

SEQ ID NO: 40199 - protein, 393 aa, Saccharomyces cerevisiae
MSCSQNKTSVSLAWRECISIASVLIGAYASYKYYKLFKTRDIPRPKEGVEELIGNTPLVKIRSLTKATGVNIYAKLELCNPAGSAKDRVALNIIKTAEELGELVRGEPGWVFEGTSGSTGISIAVVCNALGYRAHISLPDDTSLEKLALLESLGATVNKVKPASIVDPNQYVNAAKKACNELKKSGNGIRAVFADQFENEANWKVHYQTTGPEIAHQTKGNIDAFIAGCGTGGTITGVAKFLKERAKIPCHVVLADPQGSGFYNRVNYGVMYDYVEKEGTRRRHQVDTIVEGIGLNRITHNFHMGEKFIDESIRVNDNQAIRMAKYLSVNDGLFVGSSTAINAVAAIQVAKTLPHGSNIVIIACDSGSRHLSKFWKEAKEIDHDVSLEEVINI

SEQ ID NO: 40200 - DNA, 984 bp, Aquifex aeolicus
  CDS (1)..(984): transl_table=11
ttgtcgttaaaatcatgtttaatgtgggttttgggtgaacacgacgagccttacagaaaagcgcgtgaaacaatactaaaactcgtaggaaacacacccctcgtaagagtaaaaaagtgtcttccagaagatatacccgaggacgtagaaatctgggcaaagttagagagtttcaatcccggcggttcggtaaaggacagacctgctctcagtatgtttctggacgccttaaaaagggggcttattaaagagggaaaagttgtaatagacgcaacttccggaaatacgggaatagccctcgccatggttggtgcagctctcggcgttcccgtggaacttgccatgccagcaaacgtaagtgaagagaggaagaagataataaaagccttcggagcgaaactttaccttaccgatccccttgagggtaccgatggagctatcctctttgtaagggaacttgttcagaagtaccctgaaaagtacgtgtacctcgaccaatacaacaatccagcaaactggaaagctcacttttactctaccggtatagagatatggaatcaaactaaggggaggataactcacttcgtcgcagggataggaacaggcggaacgataatgggaacgggaaggagactaaagatttacaacccgaatattcaagtaataggagtccagcctgcgtatccttttcacggaatagaaggtttaaaacacatagagagttcaataaagccgggaatatttgacgagacctttctggacaggactatcttcgtagagacggaagacgcctactactgggcaagggagcttgcaaaaaaggacgctatattcgtaggacagtcatcgggagcggctctctgggcatgcattcaactcgcaagggaacttgcgaaaaaaggtgaaaagggcgtaatagttaccgtttttccggacggaggggagaagtacctcaccacggctcttttctctgacaaggattaa

SEQ ID NO: 40201 - protein, 327 aa, Aquifex aeolicus
MSLKSCLMWVLGEHDEPYRKARETILKLVGNTPLVRVKKCLPEDIPEDVEIWAKLESFNPGGSVKDRPALSMFLDALKRGLIKEGKVVIDATSGNTGIALAMVGAALGVPVELAMPANVSEERKKIIKAFGAKLYLTDPLEGTDGAILFVRELVQKYPEKYVYLDQYNNPANWKAHFYSTGIEIWNQTKGRITHFVAGIGTGGTIMGTGRRLKIYNPNIQVIGVQPAYPFHGIEGLKHIESSIKPGIFDETFLDRTIFVETEDAYYWARELAKKDAIFVGQSSGAALWACIQLARELAKKGEKGVIVTVFPDGGEKYLTTALFSDKD

SEQ ID NO: 40202 - DNA, 936 bp, Bacillus subtilis
  CDS (1)..(936): transl_table=11
atgttgaaaatcgttgcaaacacagctgatctgataggagatacaccgctagtgagattgaatcggcttcagccggaaaatgcggcacaagtctatttaaagcttgaatttttcaatccgagcggcagtgtgaaagacagagccgcttatcaaatgatcatagaagctgaacaaaacggtttactcaagccgggatcagttattatagagccgacaagcggaaataccggcatcgggctcgccatgaatgcggcagcacgcggatataaagcaatcttagttatgcctgatacgatgacgaaggaacggatcaacctacttaaagcttacggtgcagaggttgtattaactcccggagaggaaagaatgccgggcagcatcaaaaaagcgaaggagcttgccgaacaaattccgaacagctatattccaatgcagttcgataacactgctaatcctgatgcgcaccgaaaaacaacagcgcctgaaatcgcccgggcaatagaggaaatcggaaaaccgctcggcgcttttgtagcctcctctggaacgggcggaaccattaccggaacaggtgaggcgctcaaagagctttttccggatatcacggttcatgttgttgagccagcgggttcgcctgtattatccggcggaaaacctggcgcgcataaacttgtaggaacgagcccaggctttataccgccgattttaaatgaagacgtttatgatgaaattatcaaaatctctgatgaagacgcgtatacgacgacaagacggcttgctgctgaagaaggaattcttgtcggtccttcatcaggcgctgcctgcttcgcggcaatcgaaacagcgaaacgcctctctcctgacaaagttgtggtctgcatgacagctgatacaggagaacggtacttatcaactgatttatggtcatttatttaa

SEQ ID NO: 40203 - protein, 311 aa, Bacillus subtilis
MLKIVANTADLIGDTPLVRLNRLQPENAAQVYLKLEFFNPSGSVKDRAAYQMIIEAEQNGLLKPGSVIIEPTSGNTGIGLAMNAAARGYKAILVMPDTMTKERINLLKAYGAEVVLTPGEERMPGSIKKAKELAEQIPNSYIPMQFDNTANPDAHRKTTAPEIARAIEEIGKPLGAFVASSGTGGTITGTGEALKELFPDITVHVVEPAGSPVLSGGKPGAHKLVGTSPGFIPPILNEDVYDEIIKISDEDAYTTTRRLAAEEGILVGPSSGAACFAAIETAKRLSPDKVVVCMTADTGERYLSTDLWSFI

SEQ ID NO: 40204 - DNA, 900 bp, Campylobacter jejuni
  CDS (1)..(900): transl_table=11
atgaaagtacatgaaaaagtaagtgagcttataggaaatactcctattatacatttgaaaaaatttggtatcaatgtttttgctaaatgtgaatttttaaatcctagtcattctataaaagatagagcagcttttgaaatgattaaagatgctttagatagtaaaaaaattaatcaagatactacaatagttgaagcaactagtggaaatactggaatttctttggctatgatttgtgcagatttgggacttaaatttattgctgtaatgcccgaatctatgagtttagaaagaagaaaaatgataacactctttggcgctaggttagaattaactcctgcaaatttaggaatgaaaggagcggttgataaagcaaatgaaatattattaaatactccaaattcttttatggtttctcaatttgaaaatatttcaaataaaaatgcgcatcgtaagaatacggctttagaaattttaagagatttggataatgaacttgatatttttgtagctggttttggaactggcggtactattagtggagttggggaaatactaaaagaaaaattagaaaaagtgcatattgttggagtcgagcctctaaattctccattgcttagcaaaggtgaagcgggaagccataaaatacaaggaataggggcgaattttatacctgctattttaaataaagaagttatagatgaagtgatcacagtaagtaatgaagatgctataaatacagccaaagaacttgccaaaagtggtttaatggtaggtatatcaagtggagcaaatgtatttgccgcaagtatgctagcaaagaaatttccagataaaagaattttaactatgctaaacgatacggctgaaagatacctctcaaccgatctttttgcttaa

SEQ ID NO: 40205 - protein, 299 aa, Campylobacter jejuni
MKVHEKVSELIGNTPIIHLKKFGINVFAKCEFLNPSHSIKDRAAFEMIKDALDSKKINQDTTIVEATSGNTGISLAMICADLGLKFIAVMPESMSLERRKMITLFGARLELTPANLGMKGAVDKANEILLNTPNSFMVSQFENISNKNAHRKNTALEILRDLDNELDIFVAGFGTGGTISGVGEILKEKLEKVHIVGVEPLNSPLLSKGEAGSHKIQGIGANFIPAILNKEVIDEVITVSNEDAINTAKELAKSGLMVGISSGANVFAASMLAKKFPDKRILTMLNDTAERYLSTDLFA

SEQ ID NO: 40206 - DNA, 912 bp, Escherichia coli
  CDS (1)..(912): transl_table=11
gtgagtacattagaacaaacaataggcaatacgcctctggtgaagttgcagcgaatggggccggataacggcagtgaagtgtggttaaaactggaaggcaataacccggcaggttcggtgaaagatcgtgcggcactttcgatgatcgtcgaggcggaaaagcgcggggaaattaaaccgggtgatgtcttaatcgaagccaccagtggtaacaccggcattgcgctggcaatgattgccgcgctgaaaggctatcgcatgaaattgctgatgcccgacaacatgagccaggaacgccgtgcggcgatgcgtgcttatggtgcggaactgattcttgtcaccaaagagcagggcatggaaggtgcgcgcgatctggcgctggagatggcgaatcgtggcgaaggaaagctgctcgatcagttcaataatcccgataacccttatgcgcattacaccaccactgggccggaaatctggcagcaaaccggcgggcgcatcactcattttgtctccagcatggggacgaccggcactatcaccggcgtctcacgctttatgcgcgaacaatccaaaccggtgaccattgtcggcctgcaaccggaagagggcagcagcattcccggcattcgccgctggcctacggaatatctgccggggattttcaacgcttctctggtggatgaggtgctggatattcatcagcgcgatgcggaaaacaccatgcgcgaactggcggtgcgggaaggaatattctgtggcgtcagctccggcggcgcggttgccggagcactgcgggtggcaaaagctaaccctgacgcggtggtggtggcgatcatctgcgatcgtggcgatcgctacctttctaccggggtgtttggggaagagcattttagccagggggcggggatttaa

SEQ ID NO: 40207 - protein, 303 aa, Escherichia coli
MSTLEQTIGNTPLVKLQRMGPDNGSEVWLKLEGNNPAGSVKDRAALSMIVEAEKRGEIKPGDVLIEATSGNTGIALAMIAALKGYRMKLLMPDNMSQERRAAMRAYGAELILVTKEQGMEGARDLALEMANRGEGKLLDQFNNPDNPYAHYTTTGPEIWQQTGGRITHFVSSMGTTGTITGVSRFMREQSKPVTIVGLQPEEGSSIPGIRRWPTEYLPGIFNASLVDEVLDIHQRDAENTMRELAVREGIFCGVSSGGAVAGALRVAKANPDAVVVAIICDRGDRYLSTGVFGEEHFSQGAGI

SEQ ID NO: 40208 - DNA, 918 bp, Helicobacter pylori J99
  CDS (1)..(918): transl_table=11
atgatccttaccgcaatgcaagacgccataggccgcactcccatttttaaattcaccagaaaggattaccccattcccttaaagtccgccatttacgccaaactagagcatctaaacccgggagggagcgttaaagaccgcttaggccaatacctcataaaagaagcgtttagaacgcgcaaaatcacttccacaacgaccatcattgagcctacagcaggcaataccggcatcgctctagccttagtggcaatcaagcaccatctcaaaaccatctttgttgtcccgaaaaaattcagcacagaaaaacagcaaatcatgagagctttgggggctttagtgatcaacacgcctactagtgaggggatttctggcgccattaaaaaaagtaaagaattagccgaaagtatccctgatagctatttgcccttgcaatttgaaaaccctgataatcccgcagcctactaccacaccctagcccctgagattgtccaagaattaggtacaaaccttacgagctttgtagccgggatagggagtggtggcacttttgcaggcatggctaagtatttgaaagaacgcatccctaatattcgcttgattggggtggagccggagggttctattttgaatgggggagagcctgggcctcatgagattgagggcattggcgtggagttcatccctcctttttttgcaaacttggatattgatcgttttgaaacgatctcagatgaagagggttttagctatactaggaaattggctaagaaaaacggcttattagtggggagctctagtggggcagcttttgcggcagcattaaaagaggtgcaacgcctccccgaaggcagccaggttttaaccattttcccggacatggccgatcgttatctttctaaaggtatttattcataa

SEQ ID NO: 40209 - protein, 305 aa, Helicobacter pylori J99
MILTAMQDAIGRTPIFKFTRKDYPIPLKSAIYAKLEHLNPGGSVKDRLGQYLIKEAFRTRKITSTTTIIEPTAGNTGIALALVAIKHHLKTIFVVPKKFSTEKQQIMRALGALVINTPTSEGISGAIKKSKELAESIPDSYLPLQFENPDNPAAYYHTLAPEIVQELGTNLTSFVAGIGSGGTFAGMAKYLKERIPNIRLIGVEPEGSILNGGEPGPHEIEGIGVEFIPPFFANLDIDRFETISDEEGFSYTRKLAKKNGLLVGSSSGAAFAAALKEVQRLPEGSQVLTIFPDMADRYLSKGIYS

SEQ ID NO: 40210 - DNA, 921 bp, Helicobacter pylori
  CDS (1)..(921): transl_table=11
atgatgattatcaccacaatgcaagacgccataggccgcactcccgtttttaaattcactaacaaggattaccccattccgttaaattccgccatttacgccaaactggagcatctaaacccaggggggagcgttaaagatcgcttaggccaataccttataggagaagggtttaaaacgggcaaaatcacttctaaaacaaccatcattgagcctaccgcaggcaataccggcatcgctctagctttagtggcaatcaagcaccatctcaaaaccatctttgttgtcccggaaaaattcagcacagaaaaacaacaaatcatgagggctttgggggctttagtaatcaacacgcctactagcgaggggatttctggcgccattaaaaaaagtaaagagttagccgaaagtatccctgatagctatttgcccttacaatttgaaaaccctgataatcccgccgcttactaccacaccctagcccctgagattgtccaagaattaggcacaaaccttacgagctttgtagccgggatagggagtggtggcacttttgcgggcacggctaggtatttgaaagaacgcatccctgcgattcgcttgattggggtggagccggagggttctattttgaatgggggtgagcctgggcctcatgagattgagggcattggcgtggagttcatccctcctttttttgaaaacttggatattgatggctttgaaacgatctcagatgaagagggttttagctacactaggaagttagccaagaaaaacggcttattagtggggagctctagcggggcagcttttgtggcagcattgaaagaagcgcaacgcctccccgaaggcagccaggttttaaccattttcccggatgttgccgatcgttatctctcaaaaggtatttatttataa

SEQ ID NO: 40211 - protein, 306 aa, Helicobacter pylori
MMIITTMQDAIGRTPVFKFTNKDYPIPLNSAIYAKLEHLNPGGSVKDRLGQYLIGEGFKTGKITSKTTIIEPTAGNTGIALALVAIKHHLKTIFVVPEKFSTEKQQIMRALGALVINTPTSEGISGAIKKSKELAESIPDSYLPLQFENPDNPAAYYHTLAPEIVQELGTNLTSFVAGIGSGGTFAGTARYLKERIPAIRLIGVEPEGSILNGGEPGPHEIEGIGVEFIPPFFENLDIDGFETISDEEGFSYTRKLAKKNGLLVGSSSGAAFVAALKEAQRLPEGSQVLTIFPDVADRYLSKGIYL

SEQ ID NO: 40212 - DNA, 900 bp, Pseudomonas aeruginosa
  CDS (1)..(900): transl_table=11
atgaccgtgcagtacccgactatcgccgactgcgttggcaatacccctctggtgcgtctgcagcgccttcccggggaaacctccaataccctgctggtgaagctcgaaggcaacaacccggcgggatcggtgaaggaccgcccggccctgtcgatgatcacccgtgccgaactgcgcggcgacatccgccccggcgatacgctgatcgaggctacttccggcaacaccggcatcgccctggccatggcggcggcgatcaagggttacaagatgatcctgatcatgccggacaactccacggccgaacgcaaggcggcgatgaccgcctatggcgccgagctcattctggtcagcaaggaagagggcatggagggcgcgcgcgatctggccgacaagctgcagcgcgaaggccgcggcaaggtcctcgaccagttcgccaatggcgacaacccggaagcccattaccacagcaccggcccggaaatctggcagcagaccggcggcagcatcacccatttcgtcagctccatgggcaccaccgggaccatcatgggcgtctcgcgctacctcaaggagcagaacccggcggtgcagatcgtcggcctgcaacccatggagggctcggccatcccgggaatccgacgctggccgcaggaatacctgccgaagatctatgacgccagtcgcgtcgaccgggtcgtcgacatgcaccaggacgaagccgaggacatcatgcgccggctggcccgcgaggaaggcatcttctgcggcgtgtcctccggtggggcggtggcggcgatgctgcgcctgtcccgcgaactggagaatgccgtgctggtggcgatcatctgcgaccgcggcgaccgctacctgtcttccggcgtctatgacccgcgctga

SEQ ID NO: 40213 - protein, 299 aa, Pseudomonas aeruginosa
MTVQYPTIADCVGNTPLVRLQRLPGETSNTLLVKLEGNNPAGSVKDRPALSMITRAELRGDIRPGDTLIEATSGNTGIALAMAAAIKGYKMILIMPDNSTAERKAAMTAYGAELILVSKEEGMEGARDLADKLQREGRGKVLDQFANGDNPEAHYHSTGPEIWQQTGGSITHFVSSMGTTGTIMGVSRYLKEQNPAVQIVGLQPMEGSAIPGIRRWPQEYLPKIYDASRVDRVVDMHQDEAEDIMRRLAREEGIFCGVSSGGAVAAMLRLSRELENAVLVAIICDRGDRYLSSGVYDPR

SEQ ID NO: 40214 - DNA, 912 bp, Salmonella typhimurium
  CDS (1)..(912): transl_table=11
gtgaatacattagaacaaaccatcggcaatacgccgctggtcaaattacaacgtctggggccggataacggcagtgaaatctgggtcaagctggaaggcaataatccggcaggatcggtgaaagatcgcgcggcgctatcgatgattgtcgaggcggaaaagcgcggggaaattaaaccgggcgatgtcctgattgaagcgaccagcggcaacactggcattgcgctggcgatgatcgccgcgctgaaaggttatcgcatgaagctgttgatgccagacaacatgagtcaggagcgtcgggcggcaatgcgggcctatggcgcggaactgattctggtcactaaagagcagggaatggaaggggcgcgcgatttagcgctcgctatgtctgaacgaggcgagggcaaactgctcgatcagtttaataatcctgataatccctacgcccactacacgaccaccggcccggaaatctggcggcaaacgtcaggtcgcatcacccattttgtctccagcatgggcacgaccggcaccattaccggcgtgtcgcgttttctgcgcgagcaggaaaaaccggtcaccatcgttggcctacagccggaagagggcagcagtattccgggcattcgacgctggcctgcggaatatatgccgggcatttttaacgcctcgctggtagatgaggtgctggatattcatcagaatgatgccgaaaacaccatgcgtgaactggccgttcgtgaaggcattttctgcggcgtgagttccggcggcgcggtagcgggcgcgttacgggtcgcacgagccacgcccggcgcgatagtggtggcgatcatctgcgatcgcggcgaccgttacctttcgaccggcgtgtttggtgaagagcatttcagccagggggcagggatttaa

SEQ ID NO: 40215 - protein, 303 aa, Salmonella typhimurium
MNTLEQTIGNTPLVKLQRLGPDNGSEIWVKLEGNNPAGSVKDRAALSMIVEAEKRGEIKPGDVLIEATSGNTGIALAMIAALKGYRMKLLMPDNMSQERRAAMRAYGAELILVTKEQGMEGARDLALAMSERGEGKLLDQFNNPDNPYAHYTTTGPEIWRQTSGRITHFVSSMGTTGTITGVSRFLREQEKPVTIVGLQPEEGSSIPGIRRWPAEYMPGIFNASLVDEVLDIHQNDAENTMRELAVREGIFCGVSSGGAVAGALRVARATPGAIVVAIICDRGDRYLSTGVFGEEHFSQGAGI

SEQ ID NO: 40216 - DNA, 1188 bp, Oryza sativa
  CDS (1)..(1188)
atggcgtcgtggtcgtcgcccgtcgccgccgccgccttgcaggtccatttcgggtcctcctgcttcttctccgcccgatcgccacgacagaccctcctcctaccacctctcgcccgcaaccctacactgaccatccagccccggccccatcccttccggaacatcaactcctcctcctcctccagctggatgtgccacgccgtcgccgccgaggtcgagggcctcaacatcgccgacgacgtcacccagctcatcggcaagactccaatggtatatctcaacaacatcgtcaagggatgtgttgccaatgtcgctgctaagctcgagattatggagccctgttgcagtgtcaaggacaggataggatacagtatgatttctgatgcggaagagaaaggcttgataactcctggaaagagtgttttggtggaaccaacaagtggaaatacaggcattggtcttgccttcattgctgcttccagaggatataaattaatattgaccatgcctgcatcaatgagcatggagagaagagttctactcaaagcttttggcgctgaacttgtccttactgatgccgcaaaagggatgaagggggctgtagataaggctacagagattttaaataagacacctgatgcctatatgctgcagcagtttgacaaccctgccaacccaaagcaggtacattatgagactactgggccagaaatctgggaggattctaaagggaaggtggatgtattcattggtggaattggaacaggtggaacaatatctggtgctggccgtttcctgaaagagaaaaatcctggaattaaggttattggtattgagccttctgagagtaacatactctctggtggaaaacctggcccacataagattcaaggcattggggcaggatttgttccaaggaacttggatagtgaagttctcgatgaagtgattgagatatctagtgatgaggctgttgagacagcaaagcaattggctcttcaggaaggattactggttggaatttcatctggggcagcagcagcagctgccattaaagttgcaaaaagaccagaaaatgctggaaagttggtagtggttgtgtttccaagctttggtgagaggtacctttcatctatcctttttcagtcgataagagaagaatgtgagaagttgcaacctgaaccatga

SEQ ID NO: 40217 - protein, 395 aa, Oryza sativa
MASWSSPVAAAALQVHFGSSCFFSARSPRQTLLLPPLARNPTLTIQPRPHPFRNINSSSSSSWMCHAVAAEVEGLNIADDVTQLIGKTPMVYLNNIVKGCVANVAAKLEIMEPCCSVKDRIGYSMISDAEEKGLITPGKSVLVEPTSGNTGIGLAFIAASRGYKLILTMPASMSMERRVLLKAFGAELVLTDAAKGMKGAVDKATEILNKTPDAYMLQQFDNPANPKQVHYETTGPEIWEDSKGKVDVFIGGIGTGGTISGAGRFLKEKNPGIKVIGIEPSESNILSGGKPGPHKIQGIGAGFVPRNLDSEVLDEVIEISSDEAVETAKQLALQEGLLVGISSGAAAAAAIKVAKRPENAGKLVVVVFPSFGERYLSSILFQSIREECEKLQPEP

SEQ ID NO: 40218 - DNA, 1023 bp, Oryza sativa
  CDS (1)..(1023)
atgcaggaaggaaggaaaggggtgccatctctgctctcatctcagggagaatgcattgcatccaacatcacacagctgattggttggacaccactgatagaattgaagaatattgctaagaaagatggcatagctgctcggctggttgggaagattgagccataccaacccctttcctctgtgaaggatcggagtgctctcagattgatcgaagatgcagaggagagaggcttaatctcacctggcatcacaacactagcaggggtcacaagcggcaatcttggtatcggagtggcgtttgttgctgctcagaaaggttacaaattcattgctgtcatgcctgctaaactctcgatagataaacaaatcctgttgagatacctgggagttgaagtgattttggttgaccctgcactgaatggattcaaggggctacttgatagagttgaacagctgaagaaggatatggagaatgtgtttgttatagatcaattcaccaatcctgctaatcctgatgcgcacttcagatggacaggacctgaaatatggaaagatacagcaggcaaagtggatatatttgtagctgcatctggttcaggaggcacagtgacaggcgtagggaggtatctcaagatgaagaatccatccataaagctgatatgtgttgaaccagctgaaagtgcagtaatttcaggaggtgaaccagcattccataacatccaaggcataggtccaggatttatcccagaaatattggacagatcacaaatagatgagatagtaacagtgaccactcaagaagctatggacatggcaagaaggttggcaagggaagaaggattgctcgttggaatatcttcaggagccaacgcagctgccatcttgaaggttgcagcaagggaggagaacaagggaaagatgatcgtgacgatgttctccagtggtggggagagatacctgaattcggagctatttgcgcaggtgaaggaggaatgcatcaacatcaacaaggcattctgctga

SEQ ID NO: 40219 - protein, 340 aa, Oryza sativa
MQEGRKGVPSLLSSQGECIASNITQLIGWTPLIELKNIAKKDGIAARLVGKIEPYQPLSSVKDRSALRLIEDAEERGLISPGITTLAGVTSGNLGIGVAFVAAQKGYKFIAVMPAKLSIDKQILLRYLGVEVILVDPALNGFKGLLDRVEQLKKDMENVFVIDQFTNPANPDAHFRWTGPEIWKDTAGKVDIFVAASGSGGTVTGVGRYLKMKNPSIKLICVEPAESAVISGGEPAFHNIQGIGPGFIPEILDRSQIDEIVTVTTQEAMDMARRLAREEGLLVGISSGANAAAILKVAAREENKGKMIVTMFSSGGERYLNSELFAQVKEECININKAFC

SEQ ID NO: 40220 - DNA, 1227 bp, Oryza sativa
  CDS (1)..(1227)
atggccgtccaggttcaacgaacgcccctcccccggtccacgtacaccggccatcgggtctatctcctgcgggccccacctgcagtgacacggtgcaccgtggaccgcgcctttccgcgcagtcatggacctccccttcctcctctcctgtataaaacctcgcgtcctgatgcttcctcctccaactccacgagccgccatttcccaaggaggagcaaggattgttgttgtttcgctgtcagatcgattcctgacgggataatgggtgagaccatcgccaaggatgtcaccgagttgattgggaacacgccgttggtgtacctcaaccgggtgacggatgggtgcgtcgggcgcgtcgcggccaagctcgagtccatggagccatgctccagcgtcaaggataggattggatacagtatgatcactgatgcagaggagaaggggctgatcactccaggcaagagtgtgctgattgagccaactagtggcaacacaggcattggactggccttcatggctgctgcaaagggttacaggcttgtactcacgatgccggcctccatgagcatggagaggagaatcatattgaaggcttttggtgctgaattgatacttactgacccactcttgggaatgaaaggagctgtccaaaaggcagaagaactggcagcgaagacaaacaactcatttatcctccaacaattcgagaaccctgctaacccaaagatccattacgagaccactggacctgaaatctggaaaggaacaggaggtaaagttgatggtttagtttctggtattgggacaggtggcactattactggagctggacgatacctcagagagcaaaatcctgatatcaagatctatggtgtggagccagtcgagagcgctgtcttatctggtggaaagcctgggccacacaagattcaaggaattggagctggttttgttcctggggtcctggatgttgacctcatcaatgaaactgtacaagtttcaagtgatgaagctatcgagatggcaaaggctcttgcattgaaagaagggttgctggttggaatatcttcaggtgcagctgcagcagcagctgttaggctcgctcagaggccggaaaatgaaggaaaactttttgttgttgtcttcccaagctttggtgagcggtacctttcgtcggtgctcttccagtccatcaagaaggaagctgaaaacatggtggttgaatga

SEQ ID NO: 40221 - protein, 408 aa, Oryza sativa
MAVQVQRTPLPRSTYTGHRVYLLRAPPAVTRCTVDRAFPRSHGPPLPPLLYKTSRPDASSSNSTSRHFPRRSKDCCCFAVRSIPDGIMGETIAKDVTELIGNTPLVYLNRVTDGCVGRVAAKLESMEPCSSVKDRIGYSMITDAEEKGLITPGKSVLIEPTSGNTGIGLAFMAAAKGYRLVLTMPASMSMERRIILKAFGAELILTDPLLGMKGAVQKAEELAAKTNNSFILQQFENPANPKIHYETTGPEIWKGTGGKVDGLVSGIGTGGTITGAGRYLREQNPDIKIYGVEPVESAVLSGGKPGPHKIQGIGAGFVPGVLDVDLINETVQVSSDEAIEMAKALALKEGLLVGISSGAAAAAAVRLAQRPENEGKLFVVVFPSFGERYLSSVLFQSIKKEAENMVVE

SEQ ID NO: 40222 - DNA, 1179 bp, Brassica napus
  CDS (1)..(1179)
atggcactctcctctccttcgctcctccgtcttcttcctcaccaccccttcactctaacaacctcaaaacgacaccgtttcttatccttaaaccatgaaccttcatcatcctccctcgtcgtagccgccgtctcttcaaaaccctccacccggacaaaacaaaagtctaaatccaaatccaaacctcctcctcctccgccgcctccagttactactgtttctcatgaagtgggaacagaggactcagaaacggtcaacattgctgaagacgtcactcaattgattggaagcacaccgatggtgtatctcaacagagtcactgacgggtgtgttgctgacgttgctgcaaagctagagtcaatggagccttgtagaagcgtcaaagacaggattggtctcagcatgattaacgaggcagaagacagaggagacataactccgaggaagagtgtgttagtagagccgacgaccggaaacactggcctagggatagcttttgtggctgcggctaaagggtacaagcttatagtgactatgccggcttctataaacgttgaaagaaggatgcttttacgcgcactaggagcggagatcgtgctgacgagtccagagaagggacttaaaggtgcggtggagaaagccaaagagattgttctcaagaccaagaacgcatatatgtttcagcagtttgataatacggctaatacaaagatccattttgagactacaggaccagagatttgggaagacacaatgggtaatgtagatatatttgttgctgggattggaactggtgggactgtaacaggtacaggaagtttcttgaagatgatgaaccctgacattaaggtagttggcgttgaaccatcagaaagaagtgtgatctctggagacagtcctggttatgtaccgggaatcttggatgttaagctacttgatgaagtgtttaaggtaagcaacgaggaagcaattgagatggcaagaagactagctttggaggaaggattactggtcggaatatcgtctggagcagctgcagtagcagcaataagcttggctaaaagagctgagaacactgggaaacttatcacggttctgtttccgagccatggggagcggtatatcacaacagctctgtttagttccatcaacaaagaggttcaagagatgagccattag

SEQ ID NO: 40223 - protein, 392 aa, Brassica napus
MALSSPSLLRLLPHHPFTLTTSKRHRFLSLNHEPSSSSLVVAAVSSKPSTRTKQKSKSKSKPPPPPPPPVTTVSHEVGTEDSETVNIAEDVTQLIGSTPMVYLNRVTDGCVADVAAKLESMEPCRSVKDRIGLSMINEAEDRGDITPRKSVLVEPTTGNTGLGIAFVAAAKGYKLIVTMPASINVERRMLLRALGAEIVLTSPEKGLKGAVEKAKEIVLKTKNAYMFQQFDNTANTKIHFETTGPEIWEDTMGNVDIFVAGIGTGGTVTGTGSFLKMMNPDIKVVGVEPSERSVISGDSPGYVPGILDVKLLDEVFKVSNEEAIEMARRLALEEGLLVGISSGAAAVAAISLAKRAENTGKLITVLFPSHGERYITTALFSSINKEVQEMSH

SEQ ID NO: 40224 - DNA, 1179 bp, Brassica napus
  CDS (1)..(1179)
atggctgctgcgacatcttcctctgcttttctccttaatccgttgacttctcgccaccgtcctctcaaatactcccctgagctatcttctctctccttatcctccagaaaggcggctgctttcgatgttctcccggctcctctctccctcaagagccagaggtgtagtagccgtgttgtgtgcaaggctgtgtccgtcaagcctggggttgaaggtctcaatatcgccgagaacgccgctcagcttattgggaaaactccaatggtgtacttgaacaatatagttaaaggttgtgttgcaagtgttgctgctaagcttgagatcatggagccttgttgcagtgtcaaggataggattgggtatagtatgattacagatgctgaggaaaaaggacttatcacacctggaaagagtgttcttgtggaatctacaagtggaaacacagggattggacttgcgtttattgctgcttcaaaagggtataagcttattttaactatgccagcgtccatgagtttggaaagaagggttcttttgagggcgtttggagctgagcttgtgttgactgaacctgcaaagggtatgactggagctattcagaaggctgaagagatcttgaagaacactcctgactcatacatgctccaacagtttgacaacccagccaatcccaagattcattacgagactactggtcctgagatttgggaagatacaagaggcaaggtggatatattggttgcgggaattggaactggtggaaccatcactggtgttggccggtacattaaagaaaggaaacctgaactgaaggtcattggtgttgaacccacggaaagtgctatactttctggaggaaaacctggacctcacaagattcaagggattggagctggatttattcctaagaatttggatcagactgttgtagatgaatacatagcgatttcgagtgaggaagctattgaatttgcaaagcaactagctctccaagaaggcttgttggttggtatatcttctggagctgctgctgctgctgcaatccaggtcgcaaagagacctgaaaatgccgggaaactcatagctgttgtgttcccgagctttggggaacgttacctctcgaccctgctttttcagtctatccgagatgagtgcgagaatatgcagcctgagctttga

SEQ ID NO: 40225 - protein, 392 aa, Brassica napus
MAAATSSSAFLLNPLTSRHRPLKYSPELSSLSLSSRKAAAFDVLPAPLSLKSQRCSSRVVCKAVSVKPGVEGLNIAENAAQLIGKTPMVYLNNIVKGCVASVAAKLEIMEPCCSVKDRIGYSMITDAEEKGLITPGKSVLVESTSGNTGIGLAFIAASKGYKLILTMPASMSLERRVLLRAFGAELVLTEPAKGMTGAIQKAEEILKNTPDSYMLQQFDNPANPKIHYETTGPEIWEDTRGKVDILVAGIGTGGTITGVGRYIKERKPELKVIGVEPTESAILSGGKPGPHKIQGIGAGFIPKNLDQTVVDEYIAISSEEAIEFAKQLALQEGLLVGISSGAAAAAAIQVAKRPENAGKLIAVVFPSFGERYLSTLLFQSIRDECENMQPEL

SEQ ID NO: 40226 - DNA, 972 bp, Brassica napus
  CDS (1)..(972)
atggaagaccggtacatgatcaagaacgatgtcactgaattgattggtaacacaccaatggtgtacctaaataaaattgttgacggttgcgtcgcacgtattgctgccaagcttgagatgatggagccctgctctagcataaaagacagaatcgcttatagtatgatcaaagatgcagaagacaaaggattgattactcccggaaagagtacattgattgaggcaaccggcggtaatactgggattggtttagccagcataggagctgcaagaggctacagagtgatacttttgatgccttcaacgatgagcttagagaggagaatcattttgagagcattaggtgcagagcttcatctttcagatatgaacataggcattaaaggaatgttggagaaagctgaagagatattaagcaaaactcctggtggttacataccacaccagtttctaaatcctgagaaccctgagattcattacagaacaacgggtccagagatatggagagattcagcaggggaagtagatattttggtagctggggctggcactggtggaacggttagtggaactgggaggtttcttaagaagatgaacaaaaacattaaggtttgtgtggtggaacctacagaaagtgcagtacttagcggaggagaaccaggtccacatttgatccaggggattggtcctggtgtcattccaaccaatttggatttaagcattgttgatgaagtcattcaggtgacaagtgaagaagctattgaaacagccaagcttcttgctcttaaagaaggattattggtgggaatatcgtcaggggctgcagcagccgctgcattaaaggttgctaaacggccagaaaacgcaggcaaacttattgtggtgatttttcccagtggaggagagcgttatttatcaacagaactgttcgagtcggtcagatatgaagcagagcatttgtcgatcgattga

SEQ ID NO: 40227 - protein, 323 aa, Brassica napus
MEDRYMIKNDVTELIGNTPMVYLNKIVDGCVARIAAKLEMMEPCSSIKDRIAYSMIKDAEDKGLITPGKSTLIEATGGNTGIGLASIGAARGYRVILLMPSTMSLERRIILRALGAELHLSDMNIGIKGMLEKAEEILSKTPGGYIPHQFLNPENPEIHYRTTGPEIWRDSAGEVDILVAGAGTGGTVSGTGRFLKKMNKNIKVCVVEPTESAVLSGGEPGPHLIQGIGPGVIPTNLDLSIVDEVIQVTSEEAIETAKLLALKEGLLVGISSGAAAAAALKVAKRPENAGKLIVVIFPSGGERYLSTELFESVRYEAEHLSID

SEQ ID NO: 40228 - DNA, 1290 bp, Brassica napus
  CDS (1)..(1290)
atggcggtgctcatggcttcaaggtttaacagtgaagctaggatcgcgtctcgatgcctttcaacactcttgagaaatcaaagagtcctgatagcctcaccatcatcatcatccatggcatccgcatcttcttcctctgctctcctccttaacccgttgacttcctccactctccgtcacttcagatcctcttcggagatctcttctctctccttctctgcttccggcttccctctagcgatgaagagccagcagagtcggagctatggagatgtctcgaaacgagatccgtgcgaggccgttaagcgtgagaatggagctgatgagctcaacatcgctgagaatgtgtctcagctcattgggaaaactcctatggtgtacttgaacagtatggcgaagggttgtgtagcgaacattgctgctaagctcgagatcatggagccttgttgcagtgtcaaggataggattgggtacagtatggttactgatgctgagcaaaaaggattcatatcacctggaaagagtgttcttgtggaacctacaagtggaaacacgggtattggacttgcgtttatcgctgcttcaagaggctaccgactcatcttgacaatgccatcatccatgagtatggagagaagagttcttctaaaggcgtttggagctgagcttgtgctgactgatcctgctaaaggcatgaccggtgcagttcagaaggctgaggaaatcttgaaatcaactcctgatgcttacatgctccaacagtttgacaaccctgccaatccaaagatccattatgagactactggtcctgagatatgggaagatacaaagggaaaggtggatatatttgttgctgggattggaactggtgggactatcactggtgttggtcggttcattaaagagaaaaaccccaaagtgcaggttattggtgttgaaccaactgaaagcgacatactttctggtggcaaaccgggacctcacaagattcaagggattggagctggatttatacctaagaatttggatcgggcaattatggatgaagtcatagcgatttcaagtgaggaagctatagaaactgcaaagcaactagctctcaaagaaggcttgatggttggaatatcatctggagctgctgctgctgctgcaatcatggtagcaaagagacctgagaatgcagggaaactcattgctgttgttttcccgagctttggagagcgatatttatcaacccctctgttccagtctatccgggaagaggttgagaaaatgcagcctgagatatga

SEQ ID NO: 40229 - protein, 429 aa, Brassica napus
MAVLMASRFNSEARIASRCLSTLLRNQRVLIASPSSSSMASASSSSALLLNPLTSSTLRHFRSSSEISSLSFSASGFPLAMKSQQSRSYGDVSKRDPCEAVKRENGADELNIAENVSQLIGKTPMVYLNSMAKGCVANIAAKLEIMEPCCSVKDRIGYSMVTDAEQKGFISPGKSVLVEPTSGNTGIGLAFIAASRGYRLILTMPSSMSMERRVLLKAFGAELVLTDPAKGMTGAVQKAEEILKSTPDAYMLQQFDNPANPKIHYETTGPEIWEDTKGKVDIFVAGIGTGGTITGVGRFIKEKNPKVQVIGVEPTESDILSGGKPGPHKIQGIGAGFIPKNLDRAIMDEVIAISSEEAIETAKQLALKEGLMVGISSGAAAAAAIMVAKRPENAGKLIAVVFPSFGERYLSTPLFQSIREEVEKMQPEI

SEQ ID NO: 40230 - DNA, 978 bp, Linum usitatissimum
  CDS (1)..(978)
atggcagaggagaacattgggattgctaaggatgtcactgagttgattggtaaaacaccattggtatatctcaccaatgtcgtggatggctgcgtcgctcgggttgctgctaaactagagatgatggagccttgctcaagcgtcaaggataggattggatatagtatgatagctgatgccgaggagaagggtcttatcaagcctggagagagtgtccttattgagccaacaagtgggaacactgggatagggctggcattcatggcagcagccaagggctacagacttataattaccatgcctgcttcgatgagtttggagagaagaatggttctccgtgcttttggagccgagcttgttcttacagatccagcaagaggtatgaaaggggctgttcagaaagcagaagatatcttggcaaagacacctaatgcttacattcttcagcaatttgaaaaccctgccaacccaaaggttcattatgaaaccactgggccggaaatatggaaaggttcagctggcaaagtagatgcctttgtgtcgggtataggaactggaggaacagtaactggtgctgggaagtatcttaaggagcagaacccagatgtaaagctttatggcgttgaaccagttgaaagtgcagtgttgtctggaggaaaacctggcccgcataaaatccagggaattggtgctggcttcatccctggagtcttggatgttggtttgcttgatgaggtcgttcaaatatcgagcgaagaagctatcgagacagcaaaaaccctcgccttgagggaaggactgatggtaggaatatcatctggtgcagccgcagctgctgctattaagatagcaaagaggcctgagaatgctggaaagctcatagttgtggtgttcccaagtttcggtgagcgatacctctcatcgatactcttcgaggatgtgaagcgagaagctgagaacatggttttcgagccttga

SEQ ID NO: 40231 - protein, 325 aa, Linum usitatissimum
MAEENIGIAKDVTELIGKTPLVYLTNVVDGCVARVAAKLEMMEPCSSVKDRIGYSMIADAEEKGLIKPGESVLIEPTSGNTGIGLAFMAAAKGYRLIITMPASMSLERRMVLRAFGAELVLTDPARGMKGAVQKAEDILAKTPNAYILQQFENPANPKVHYETTGPEIWKGSAGKVDAFVSGIGTGGTVTGAGKYLKEQNPDVKLYGVEPVESAVLSGGKPGPHKIQGIGAGFIPGVLDVGLLDEVVQISSEEAIETAKTLALREGLMVGISSGAAAAAAIKIAKRPENAGKLIVVVFPSFGERYLSSILFEDVKREAENMVFEP

SEQ ID NO: 40232 - DNA, 1197 bp, Zea mays
  CDS (1)..(1197)
atggcgtcgtggtcgtcgccctcagccgccgccaacgccgcctcgggcgcccgattcggccccttcccgagcggagggcagcggctcgcgccgtgtccgtcgctcgtccgcggaactcccgccccgacgctcgtcctcaggccccacccggacggccgtggccatggcctcctcgcgcacaccgcctcccctccctccttgcggtgccgcgccgtcgccgccgaggtcgggggcctcaacatcgccaacgacgtcacccagctcatcggcaacacaccaatggtgtatctcaacaacgtcgtcaagggctctgtcgccaatgtcgctgctaagctcgagattatggagccctgctgtagcgtcaaggacaggatagggtacagtatgataaatgatgctgaacagaagggcttgattactcctggaaagagtgttttggtggaagcaacaagtggaaacacaggcattggtcttgctttcattgctgcttccaaaggatataagctgatactaacaatgccttcatcaatgagcatggagagaagagtcctccttagagcttttggtgccgaacttgtccttactgatgctgcaaaagggatgaaaggggccttagataaggctacagagattttaaacaagacaccaaattcttacatgcttcaacagttcgataaccctgccaaccctcaggtacattatgagactactggtccagagatctgggaggattcaaaggggaaggtggatatattcattggtggaattggaacaggggggacaatatctggtgccggccgttttctcaaggagaaaaatcctggaattaaggttattggtattgagccttctgaaagtaacatactctccggtggaaaacctggtccacataagatccagggaatcggcgcaggatttgttccaaggaacttggatagcgatattcttgatgaagtaattgagatatcaagtgatgaagctgttgagacagcaaaacagttggctgttcaggaaggattactggttggaatctcctctggagcagccgccgctgctgccataaaggttgccaaaagaccagagaatgctggaaagctgatagtggttgtgtttccgagcttcggcgagaggtacctttcatctgtcctctatcagtccataagagaagaatgtgagaacatgcaacctgagccatga

SEQ ID NO: 40233 - protein, 398 aa, Zea mays
MASWSSPSAAANAASGARFGPFPSGGQRLAPCPSLVRGTPAPTLVLRPHPDGRGHGLLAHTASPPSLRCRAVAAEVGGLNIANDVTQLIGNTPMVYLNNVVKGSVANVAAKLEIMEPCCSVKDRIGYSMINDAEQKGLITPGKSVLVEATSGNTGIGLAFIAASKGYKLILTMPSSMSMERRVLLRAFGAELVLTDAAKGMKGALDKATEILNKTPNSYMLQQFDNPANPQVHYETTGPEIWEDSKGKVDIFIGGIGTGGTISGAGRFLKEKNPGIKVIGIEPSESNILSGGKPGPHKIQGIGAGFVPRNLDSDILDEVIEISSDEAVETAKQLAVQEGLLVGISSGAAAAAAIKVAKRPENAGKLIVVVFPSFGERYLSSVLYQSIREECENMQPEP

SEQ ID NO: 40234 - DNA, 1047 bp, Hordeum vulgare
  CDS (1)..(1047)
atggcgccgggggtggaggaggcggagggggctggcaggagaggggtcccttccctgctcggcgacggcggaaccgggcaggaggagcacatcgcctctgacgtcacccagctgatagggtggacgccgctgatcgagctgaggcggatcgccgggaaggagggggtgggtgcccgcatcgtcggcaagatcgaggcctaccagcccctctgctccgtcaaggaccgcagcgctctcaggatgatagaagacgccgaagagaaagggctgatttcacctggtgtcacgactctagtcgagccgacaagtggtaatttggggctaggactggtgctcattgctctgagcaaagggtacaggtttgttgcggtgatgccgggtcagtactcgctggataagcagatcttgttgagatacatgggtgctgagttgttcataactgatccagcacttgggtttccgggacaagttgaaaaggtcgaacagctcaagaaagaattgcccaatgtacatgttcttgatcagttctcgaatccagcaaaccccgaggcacacattcgatggactggacccgagatttggaaggatactgctggaaaggtggatatatttgttgcgggttcaggctcaggaggcacagtatcaggtgttgggaagtatttgaaaatgcaaaatccaaatgtgaagatcatttgtgttgagcctgcagagagcccagttatttcaggtggggagcgaggcaaacataaaatccagggaataggaccaggattcgtgcctgaaatcttggacacctcggtcatcgacgaggtgcttaccgtgaccactgaggaagcaatggcgaacgcaaggaggttggcaatggaagagggcctgcttgtgggcatatcttctggggcaaacttggcggcttgcttgaaggtcgcggtgagagaagagaacaaggggaagatgattgtgaccatgttcccgagcgggggcgagagatacatgaactctgacctctttgcagctgtaagagaggagtgtattgccatgaccttttga

SEQ ID NO: 40235 - protein, 348 aa, Hordeum vulgare
MAPGVEEAEGAGRRGVPSLLGDGGTGQEEHIASDVTQLIGWTPLIELRRIAGKEGVGARIVGKIEAYQPLCSVKDRSALRMIEDAEEKGLISPGVTTLVEPTSGNLGLGLVLIALSKGYRFVAVMPGQYSLDKQILLRYMGAELFITDPALGFPGQVEKVEQLKKELPNVHVLDQFSNPANPEAHIRWTGPEIWKDTAGKVDIFVAGSGSGGTVSGVGKYLKMQNPNVKIICVEPAESPVISGGERGKHKIQGIGPGFVPEILDTSVIDEVLTVTTEEAMANARRLAMEEGLLVGISSGANLAACLKVAVREENKGKMIVTMFPSGGERYMNSDLFAAVREECIAMTF

SEQ ID NO: 40236 - DNA, 1140 bp, Hordeum vulgare
  CDS (1)..(1140)
atggcgatggcgtcgccgccagcctgctccctcctcctcccggccatttcttgcgcgccggcctacgctagtgtcccacgagcaccccggttcctcacctgcccacgcgctgtaacagcccaccgaccccttcccacgacctcctctcctaaggtcgcggcgccccccgccgtcgagatcccggaggagtacgcggatgatgtcgaagcggtgaacattgcggtggacgtcactcagctaattggaaagaccccaatggtatatctcaataatgttgtcgaaggttgtgccgctaatattgccgcaaagcttgagtacatgggaccttgccggagcgtcaaagacaggattgcattaagcatgattagtgacgcagaagagaaaggattaatttctccaaacaagaccattttggtagaaccaactactgggaatactggtataggactagctgcagtagctgctgctagaggatacaaaatgatagcaactatgccttcatcgatagatgttgagagacgcattcttgtacgcgcatttggagcagatattgtgttaactgatcctacaacaggactaaaaggagctgttgacaaagctgaggaaatagtttcaaagacaccgaatgcgtacatgtttcagcaattcgacaatacagctaacagtgagatccactttcaaaccacaggcccagaaatatgggaggacacactgggtactgttgacatacttgttgcgagcatcgggactggtggcactatcactggcaccgggcgctacttaaaaatgatgaatagagatattaaggtcatcggggtagagcctgctgaaactagtgtgatttctggcgacaagccaggttatattccaagcatactagatgttcagctccttgatgaggttgtgaaggttaccactgcagaggcagttgatgttgcgaggctgcttgcactaaaagagggcttgctggttggcatttcgtcaggtgctgcagcaattgctgctataaacgtggccaaaagacctgaaaatgctggaaagctgattgccgttatcttccccagctttggagagagatatatctctagcattttgttccgtccgatatacaactccgttcgaaggatgaggaagcgatga

SEQ ID NO: 40237 - protein, 379 aa, Hordeum vulgare
MAMASPPACSLLLPAISCAPAYASVPRAPRFLTCPRAVTAHRPLPTTSSPKVAAPPAVEIPEEYADDVEAVNIAVDVTQLIGKTPMVYLNNVVEGCAANIAAKLEYMGPCRSVKDRIALSMISDAEEKGLISPNKTILVEPTTGNTGIGLAAVAAARGYKMIATMPSSIDVERRILVRAFGADIVLTDPTTGLKGAVDKAEEIVSKTPNAYMFQQFDNTANSEIHFQTTGPEIWEDTLGTVDILVASIGTGGTITGTGRYLKMMNRDIKVIGVEPAETSVISGDKPGYIPSILDVQLLDEVVKVTTAEAVDVARLLALKEGLLVGISSGAAAIAAINVAKRPENAGKLIAVIFPSFGERYISSILFRPIYNSVRRMRKR

SEQ ID NO: 40238 - DNA, 978 bp, Zea mays
  CDS (1)..(978)
atgggagaggcctcgccgtcgatcgccaaggacgtcaccgagttgatcgggaacacgccgctggtgtacctcaacaaggtgaccgatgggtgcgtcggccgcgtcgccgccaagctcgagtccatggagccctgctccagcgtcaaggataggattggctacagcatgatcacggacgcagaggagaaagggctgattactccaggcgtgagtgttctgattgaaccaactagcggcaacacaggcattggactggcctttatggctgctgccaagggctacaaacttacactcacaatgcctgcctccatgagcatggagaggaggatcatattgaaggcttttggtgctgaacttgtccttactgacccactcctgggaatgaaaggagctgtcaagaaagcggaagagatacaagcaaagacacccaactcgtacatccttcaacaatttgaaaatccagctaacccaaagattcactatgagactactgggcctgaaatctggaaagctacagcaggaaaaattgctggccttgtatctggtatcgggacaggaggtaccatcaccggtactgggcgatacctcagagagcaaaatcctaatgtcaagctctatggtgtggagccagtggagagtgctgttttgaatggtggaaaacctggaccacacaagattcaaggaattggagctggttttatccctggagtcttggatgttgatctccttgatgagactctacaggtttcaagtgatgaagctattgagactgccaaggctcttgctctgaaagaagggttgttggttggaatctcttctggtgcagctgcagctgcggcagttaggcttgctaagaggccagaaaacgccggaaagctatttgttgtcgtgttcccgagcttcggcgagcgctacctctcatcggtgctgttccagtccatcaagaaggaagcggaaagcatggtggtcgagccctag

SEQ ID NO: 40239 - protein, 325 aa, Zea mays
MGEASPSIAKDVTELIGNTPLVYLNKVTDGCVGRVAAKLESMEPCSSVKDRIGYSMITDAEEKGLITPGVSVLIEPTSGNTGIGLAFMAAAKGYKLTLTMPASMSMERRIILKAFGAELVLTDPLLGMKGAVKKAEEIQAKTPNSYILQQFENPANPKIHYETTGPEIWKATAGKIAGLVSGIGTGGTITGTGRYLREQNPNVKLYGVEPVESAVLNGGKPGPHKIQGIGAGFIPGVLDVDLLDETLQVSSDEAIETAKALALKEGLLVGISSGAAAAAAVRLAKRPENAGKLFVVVFPSFGERYLSSVLFQSIKKEAESMVVEP

SEQ ID NO: 40240 - DNA, 1137 bp, Helianthus annuus
  CDS (1)..(1137)
atggcttccttaatcaacaccaacaacctgctacctcttcacaaatcaagctccaacctttacacacaccatgctcgtgttcttcccttttccctccatttcaagaaaccctctttttcttcagccgctatcgtatgtaaggccgtttctgtgaagccagaagtcgaagaagcccttaacatcgccgatgatgttactcagctcatagggaacactccaatggtgtacttgaatagcattgcaaaggaatccgttgctaatatcgcagccaagcttgaaattatggagccatgttgcagtgtcaaagacaggattggaaacagtatgataactgatgctgaagagaaaggacttataacaccggggaagagtatattggttgagcctacaagtgggaacactggtatcggtctcgcatttatcgctgcttcaaaagggtataagctgatattgacgatgccagcgtcaatgagtcttgagagaagggttcttctaaaggcatttggagctgatcttgttctaacagactcttcaaagggcatgaaaggagcggttcagaaagctgaagaaatcgtcaacagcacacccaatgcttacatgcttcaacagtttgataatcctgctaacccaaagatacattttgagacaactggcccggagatctgggaagacacaaatggaaaagttgatatatttgttgcgggaattggaaccggtggaactatttcaggggctggtcgatttctcaaaactcaaaatcctgatattaaggtgattggcgtggaacctacggagagcaatattctgtctggtggaaagcctggccctcacaaaattcaagggattggagcaggttttatacccgggaacttgcatcaagacgtgctcgatgaagtgatagagatttcaagtgatgaagctgttgagactgcaaaacaattggcactgcaagaagggctgttggtgggcatctcttctggagcggcggctgctgctgctatcaaggttggaaagagacctgagaatgctggaaaacttattgcggttgtgtttccaagctttggggagcgatacctgtccacaattcttttccagtcaatccgggaagagtgcgaggcaatgcaagcttcagcctga

SEQ ID NO: 40241 - protein, 378 aa, Helianthus annuus
MASLINTNNLLPLHKSSSNLYTHHARVLPFSLHFKKPSFSSAAIVCKAVSVKPEVEEALNIADDVTQLIGNTPMVYLNSIAKESVANIAAKLEIMEPCCSVKDRIGNSMITDAEEKGLITPGKSILVEPTSGNTGIGLAFIAASKGYKLILTMPASMSLERRVLLKAFGADLVLTDSSKGMKGAVQKAEEIVNSTPNAYMLQQFDNPANPKIHFETTGPEIWEDTNGKVDIFVAGIGTGGTISGAGRFLKTQNPDIKVIGVEPTESNILSGGKPGPHKIQGIGAGFIPGNLHQDVLDEVIEISSDEAVETAKQLALQEGLLVGISSGAAAAAAIKVGKRPENAGKLIAVVFPSFGERYLSTILFQSIREECEAMQASA

SEQ ID NO: 40242 - DNA, 1050 bp, Zea mays
  CDS (1)..(1050)
atggatggcgaggaggttggcaggaggggtattcctactctgctgaagccgtcttcctcctccagcgacggcagtgccggggaacaagagcacatcgcttctgacgtcactcagctcataggatggacgccgctggtcgaattgaagcgaatcgccagcgaggctgggatcgatgcgcggatcgtcggcaagatggaggcttaccagccactttgctccatcaaggaccgctctgctttgagaatgatagaggatgctgaggagaggggattgatttcgcctggagtcacaacactggtggagccgacgagtggtaacatggggttagggttggtcctcttcgctattcagagaggttacaggctcattgcagtcatgccggctaaatactcgcttgacaagcagatcttgctgaggttcatgggcgcggagctatacttaactgatccggcccttggctttccgggcatgtttgacaaagttgaacagctccgaaaacagctgccaaatgtacatgttctgaaccaagtcacgaacaaagcgaattctgaagcccacttcagattgaccgggcctgagatctggaaggacacggcaggcaaggtggatgtattcgtagccggttcaggcacaggaggcactgtttctggcgtcgggaagtatctgaagatgcaaaagccaggcgtcaagatcatctgcgttgagcctgcagaaagcccagtgatttcaggtggcgcgcctggcaagcataaaatccagggagtaggcccagggtttctacctgaagttctggacacctcggtcatcgacgagaccgtcaccgtgagcaccgaggaggccatggcgaatgcgaggaggctggccagggaagagggcctgctcgtgggcatttcttccggagcaaacctggcagcttgtttgaaggtcgcttcgagacaggagaacaagggcaagatgatcgtcactgtgttcccaagtggcggcgagagatacatcaactccgacctctttgcagatgtgcgagaggagtgcattgccatgacattttga

SEQ ID NO: 40243 - protein, 349 aa, Zea mays
MDGEEVGRRGIPTLLKPSSSSSDGSAGEQEHIASDVTQLIGWTPLVELKRIASEAGIDARIVGKMEAYQPLCSIKDRSALRMIEDAEERGLISPGVTTLVEPTSGNMGLGLVLFAIQRGYRLIAVMPAKYSLDKQILLRFMGAELYLTDPALGFPGMFDKVEQLRKQLPNVHVLNQVTNKANSEAHFRLTGPEIWKDTAGKVDVFVAGSGTGGTVSGVGKYLKMQKPGVKIICVEPAESPVISGGAPGKHKIQGVGPGFLPEVLDTSVIDETVTVSTEEAMANARRLAREEGLLVGISSGANLAACLKVASRQENKGKMIVTVFPSGGERYINSDLFADVREECIAMTF

SEQ ID NO: 40244 - DNA, 1047 bp, Brassica napus
  CDS (1)..(1047)
atggagtactcaatcaaggatgacgtgactcaattgataggtaacactccaatggtgtacctaaacaacattgtagatggctgcgttgcacgtatcgccgctaagcttgagatgatgcagccttgctctagtgtcaaggacagaattgcttatggaatgattaaagatgctgaagacaagggactcatttctcccggcaagaacatattgattgagccaacatctggtaacaccgggattggtatagcaatggtcggagcagctagaggttacaaagttgtgattacaatgcctgcatcagtgagcattgagagaagaatcattcttctagcattaggtgcagagcttcacctcacggatccaagcaaaggcgttataggagtcattgtcaaagctgaagagatattaagcaaaactccagatggtttcatgctagagcaattcagaaacccttcaaacccacaatctcattacgaaaccactggtccagagatatggagagactgtgcagagaaagtagatatgttggttgttggtgttgggactggtggaacgatctctggagcagggaagttcctcaaggagaagaataaagactttaaggtttatggggtggaacctgcagagagtgctgtactcaagcttacaactcttgttcttgagcattcaactctaatatttaaacaaaaaaaaattattaatattagaatcaaagttaatattagaaggcaacctggtccacatgggatccaaggtattggagctggaatcatcccagacaatttggattttagcgttcttgatgaagtcattcaagtgacaagtgtggaagcaattgaaacagccaaacttcttgccctgaaagaaggattattggttggaatatcatccggagctgctgcagccgctgctataaaagtggcaaaacggccagaaaacgccgggaagctcatagttgtggttttcccgagtggcggggaacgttacttatcgactccaatgttcgactcgatcagatgcgaagcagagaatttggcaattgaatga

SEQ ID NO: 40245 - protein, 348 aa, Brassica napus
MEYSIKDDVTQLIGNTPMVYLNNIVDGCVARIAAKLEMMQPCSSVKDRIAYGMIKDAEDKGLISPGKNILIEPTSGNTGIGIAMVGAARGYKVVITMPASVSIERRIILLALGAELHLTDPSKGVIGVIVKAEEILSKTPDGFMLEQFRNPSNPQSHYETTGPEIWRDCAEKVDMLVVGVGTGGTISGAGKFLKEKNKDFKVYGVEPAESAVLKLTTLVLEHSTLIFKQKKIINIRIKVNIRRQPGPHGIQGIGAGIIPDNLDFSVLDEVIQVTSVEAIETAKLLALKEGLLVGISSGAAAAAAIKVAKRPENAGKLIVVVFPSGGERYLSTPMFDSIRCEAENLAIE

SEQ ID NO: 40246 - DNA, 969 bp, Brassica napus
  CDS (1)..(969)
atggcatctcgtattgctaaagatgttaccgaattgattgggaacactccattggtgtatctgaacaatgtggctgaaggatgtgttggtcgtgtcgctgctaagctcgagatgatggagccttgctccagtgtcaaagacaggattggttttagcatgatctctgatgcagagaaaaagggtctgataaagccaggagagagtgtgctgattgagccaacgagtggaaacaccggagttgggttagcgttcacggcggctgctaagggctacaagctcatcattacaatgccagcttcaatgagtgtggagagaaggatcattctcttagcttttggagttgagttggtcttaactgaccctgctaagggcatgaaaggcgctatcgcaaaggccgaagagattttagccaaaacacccaatggttacatgctccaacagtttgagaaccctgccaacccaaagatacactatgagactactggacctgagatatggaaaggcactgatggaaaaatcgatggatttgtttctgggattggtactggtggtaccatcacaggtgcagggaagtatctcaaggaacagaaccctaacgttaagctgtatggagtggagccaattgaaagtgctattctatccggtgggaagccaggccctcacaagattcaagggattggtgctggctttataccaagtgtgttggaggttgatcttatagatgaagttgttcaagtttcaagtgatgaatccatcgacatggcaaggcttcttgctcgtaaagaaggtcttcttgtgggaatatcatctggtgcagcagctgccgcagcaatcaaacttgcaaagaggccagaaaacgccgggaagcttttcgtggcggtgttcccgagtttcggagagaggtacctgtcgaccgtactattcgatgccacaaggaaagaagcagaatccatgaccttcgaggcttga

SEQ ID NO: 40247 - protein, 322 aa, Brassica napus
MASRIAKDVTELIGNTPLVYLNNVAEGCVGRVAAKLEMMEPCSSVKDRIGFSMISDAEKKGLIKPGESVLIEPTSGNTGVGLAFTAAAKGYKLIITMPASMSVERRIILLAFGVELVLTDPAKGMKGAIAKAEEILAKTPNGYMLQQFENPANPKIHYETTGPEIWKGTDGKIDGFVSGIGTGGTITGAGKYLKEQNPNVKLYGVEPIESAILSGGKPGPHKIQGIGAGFIPSVLEVDLIDEVVQVSSDESIDMARLLARKEGLLVGISSGAAAAAAIKLAKRPENAGKLFVAVFPSFGERYLSTVLFDATRKEAESMTFEA

SEQ ID NO: 40248 - DNA, 1290 bp, Brassica napus
  CDS (1)..(1290)
atggcgatgctcatggcttcaaggtttaacagtgaagctaagatcgcgtctcgatgcctgtcaacactcttgagaaaccaaagagtcctgacagcctcaccatcatcatcatccatggcatccgcatcttcttcctctgctctcctccttaacccgttgacttcctccactctccgtcacttcagatcctctccggagatctcttctctctccttctctgcttccggcttccctctagcgatgaagagccagcagagtcggagctatggagatgtctcgaaacgagatccgtgcgaggccgttaagcgtgagaatggagctgatgggctcaacatcgctgagaatgtgtctcagctcattgggaaaactcctatggtgtacttgaacagtatggcaaagggttgtgtagcgaacattgctgctaagctcgagatcatggagccttgttgcagtgtcaaagataggattgggtacagtatggttactgatgctgagcaaaaaggattcatatcacctggaaagagtgttcttgtggaacctacaagtggaaacacgggtattggacttgcgtttatcgctgcttcaagaggctacagacttatcttgacaatgccctcatccatgagtatggagagaagagttcttttgaaggcgtttggagctgagcttgtgctaactgatcctgcaaaaggcatgaccggtgcagttcagaaggctgaagaaatcttgaaatcaactcctgatgcttacatgctccaacagtttgacaaccctgccaatccaaagatccattatgagactactggtcctgagatatgggaagatacaaagggaaaggtggatatattcgttgcagggattggaactggtgggactatcactggtgttggtcggttcattaaagagaaaaaccccaaagtgcaggttattggtgttgaaccaactgaaagcgacatactttctggtggcaaaccgggacctcacaagattcaagggattggagctggatttatacctaagaatttggatcgggcaattatggatgaagtcatagcgatttcaagtgaggaagctatagaaactgcaaagcaactagctctcaaagaaggcttgatggttggaatatcatctggagctgctgctgctgctgcaatcatggtagcaaagagacctgagaatgcagggaaactcattgctgttgtcttcccgagctttggagagcgatatttatcaacccctctgttccagtctatccgggaagaggttgagaaaatgcagcctgagatatga

SEQ ID NO: 40249 - protein, 429 aa, Brassica napus
MAMLMASRFNSEAKIASRCLSTLLRNQRVLTASPSSSSMASASSSSALLLNPLTSSTLRHFRSSPEISSLSFSASGFPLAMKSQQSRSYGDVSKRDPCEAVKRENGADGLNIAENVSQLIGKTPMVYLNSMAKGCVANIAAKLEIMEPCCSVKDRIGYSMVTDAEQKGFISPGKSVLVEPTSGNTGIGLAFIAASRGYRLILTMPSSMSMERRVLLKAFGAELVLTDPAKGMTGAVQKAEEILKSTPDAYMLQQFDNPANPKIHYETTGPEIWEDTKGKVDIFVAGIGTGGTITGVGRFIKEKNPKVQVIGVEPTESDILSGGKPGPHKIQGIGAGFIPKNLDRAIMDEVIAISSEEAIETAKQLALKEGLMVGISSGAAAAAAIMVAKRPENAGKLIAVVFPSFGERYLSTPLFQSIREEVEKMQPEI

SEQ ID NO: 40250 - DNA, 1107 bp, Brassica napus
  CDS (1)..(1107)
atggctactatctggaggaggttgctgaagacagagaccatcccccgcatcagccaaagcacgaggaagctcttctccaccgacggatcttcctctttcgctgaaagactcagaaaccttcccaaagagttccctgcaactcaggccaaacgcgatgcttctctgctcatcggaagaactccactcgtgttcctcaacagagtcactgaaggctgtggagcttatattgctgccaagcaagaacattttcagcctacttgtagcgtcaaagacagaccagctttagctatggttgcagatgcagagaagaaaaaccttatcactcctggaaaaacaacattgatagagccaacttcaggaaacatgggaataagtatggctttcatggcggctttgaaagggtacaagattataatgacaatgccttcttacacaagtttggagaggagagtgactatgagatcctttggtgcagagcttgtcctcactgatccagccaaaggaatgggtggaaccgttaagaaagcttatgatctccttgagagtactcctgatgctcatatgttgcaacagtttgctaatccagcaaacactcagattcattttgatacaactggtcctgagatttgggaagatacacttgggaacgttgatatctttgtgatgggaattggcagtggaggcactgtctctggtgttggccaataccttaaatctaaaaacccaaatgtcaagatatatggagtggagcctgctgaaagcaacatactcaacggtggcaagccaggtccacatgctatcacagggaatggggttggatttaaaccggatatcttggatatggatgttatggagagcgttcttgaggttagtagtgaggatgctataaaaatggctagagaattggcattaaaagaaggtctcatggttgggatatcatcgggggctaacaccgtggcagcaattagactggcgaaaatgccagagaacaaaggcaaactcattgtgacgattcatgcgagctttggagagagatatctgtcgtctattctgtttgatgagctgaggaaagaagcagaagcaatgaagccagtttcagtggactga

SEQ ID NO: 40251 - protein, 368 aa, Brassica napus
MATIWRRLLKTETIPRISQSTRKLFSTDGSSSFAERLRNLPKEFPATQAKRDASLLIGRTPLVFLNRVTEGCGAYIAAKQEHFQPTCSVKDRPALAMVADAEKKNLITPGKTTLIEPTSGNMGISMAFMAALKGYKIIMTMPSYTSLERRVTMRSFGAELVLTDPAKGMGGTVKKAYDLLESTPDAHMLQQFANPANTQIHFDTTGPEIWEDTLGNVDIFVMGIGSGGTVSGVGQYLKSKNPNVKIYGVEPAESNILNGGKPGPHAITGNGVGFKPDILDMDVMESVLEVSSEDAIKMARELALKEGLMVGISSGANTVAAIRLAKMPENKGKLIVTIHASFGERYLSSILFDELRKEAEAMKPVSVD

SEQ ID NO: 40252 - DNA, 1191 bp, Brassica napus
  CDS (1)..(1191)
atggctgctgcgacatcttcctctgctttcctccttaacccggggacttctcgccaccgtcctctcaaatactcccctgagctctcttctctctccttatcctccagaaaggccgctactttcgatgttctcccgtctcctctctccctcaagagacagagccagagatgtagtaacggtgttgtgtgcaaggctgtgtctgttaagcccgaagctggggtcgaaagtctcaacatcgccgagaatgccgctcagcttattgggaaaactccaatggtgtacttgaacaatatagtcaaaggctgtgttgcaagtgttgctgctaagcttgagatcatggagccttgttgcagtgtcaaagataggattgggtatagtatgatcacagatgctgaggaaaaaggacttatcacacctggaaagagtgttcttgtggaatctacaagtggaaacacagggattggacttgcgtttattgctgcttcaaaagggtataagcttatcttgacaatgccagcgtccatgagtttggaaagaagggttcttctgagggcgtttggagctgagcttgtgttgactgaacctgcaaagggtatgactggagctattcagaaggctgaagaaatcttgaagaacactcctgactcatacatgctccaacagtttgacaacccagccaatcccaagattcattacgagactactggtcctgagatttgggaagatacaagaggcaaggtggatatactggttgcgggaattggaactggtggaaccatcactggtgttggccggtacattaaagaaaggaaacctgaactgaaggtcattggtgttgaacccacagaaagtgcaatacttgctggaggaaaacctggacctcacaaaattcaagggattggagctggatttattcctaagaatctggatcagactgttgtagatgaatacatagcgatttcgagtgaggaagctattgaatttgcaaagcaactagctctccaagaaggcttgttggttggtatatcttctggagctgctgctgctgctgcaatccaggtcgcaaagagacctgaaaatgccgggaaactcatagctgttgtgttcccgagctttggggaacgttacctctcgaccctgctttttcagtctatccgagatgagtgcgagaatatgcagcctgagctttga

SEQ ID NO: 40253 - protein, 396 aa, Brassica napus
MAAATSSSAFLLNPGTSRHRPLKYSPELSSLSLSSRKAATFDVLPSPLSLKRQSQRCSNGVVCKAVSVKPEAGVESLNIAENAAQLIGKTPMVYLNNIVKGCVASVAAKLEIMEPCCSVKDRIGYSMITDAEEKGLITPGKSVLVESTSGNTGIGLAFIAASKGYKLILTMPASMSLERRVLLRAFGAELVLTEPAKGMTGAIQKAEEILKNTPDSYMLQQFDNPANPKIHYETTGPEIWEDTRGKVDILVAGIGTGGTITGVGRYIKERKPELKVIGVEPTESAILAGGKPGPHKIQGIGAGFIPKNLDQTVVDEYIAISSEEAIEFAKQLALQEGLLVGISSGAAAAAAIQVAKRPENAGKLIAVVFPSFGERYLSTLLFQSIRDECENMQPEL

SEQ ID NO: 40254 - DNA, 969 bp, Brassica napus
  CDS (1)..(969)
atggcatctcgtattgctaaagatgttaccgaattgattgggaacactccattggtgtatctgaacaatgtggctgaaggatgtgttggtcgtgtcgctgctaagctcgagatgatggaaccttgctccagtgtcaaagacaggattggttttagcatgatctctgatgcagaggaaaagggtctgataaagccaggagagagtgtgctgattgagccaacgagtggaaacaccggagttggtttagccttcacggctgctgctaaggggtacaagctcatcattactatgccagcttcaatgagtgtggagagaaggatcattctcttagcttttggagttgagttggtcttaactgaccctgctaagggcatgaaaggagctatcgcaaaggccgaagagattttagccaaaacacccaatggttacatgctccaacagtttgagaaccctgccaacccaaagatacactatgagactactggacctgagatatggaaaggcactgatggaaaaatcgatggatttgtttctgggattggtactggtggtaccatcacaggtgcagggaagtatctcaaggaacagaaccctaacgttaagctgtatggagtggagccaattgaaagtgctattctatccggtgggaagccaggccctcacaagattcaagggattggtgctggctttataccaagtgtgttggaggttgatcttatagatgaagttgttcaagtttcaagtgatgaatccatcgacatggcaaggcttcttgctcttaaagaaggtcttcttgtgggaatatcatctggtgcagcagctgccgcagcaatcaaacttgcaaagaggccagaaaacgccgggaagcttttcgtggcggtgttcccgagtttcggagagaggtacctgtcgaccgtactattcgatgccacaaggaaagaagcagaatcaatgaccttccaggcttga

SEQ ID NO: 40255 - protein, 322 aa, Brassica napus
MASRIAKDVTELIGNTPLVYLNNVAEGCVGRVAAKLEMMEPCSSVKDRIGFSMISDAEEKGLIKPGESVLIEPTSGNTGVGLAFTAAAKGYKLIITMPASMSVERRIILLAFGVELVLTDPAKGMKGAIAKAEEILAKTPNGYMLQQFENPANPKIHYETTGPEIWKGTDGKIDGFVSGIGTGGTITGAGKYLKEQNPNVKLYGVEPIESAILSGGKPGPHKIQGIGAGFIPSVLEVDLIDEVVQVSSDESIDMARLLALKEGLLVGISSGAAAAAAIKLAKRPENAGKLFVAVFPSFGERYLSTVLFDATRKEAESMTFQA

SEQ ID NO: 40256 - DNA, 1293 bp, Brassica napus
  CDS (1)..(1293)
atggcggtgctcatggcttcaaggtttaacagtgaagctaggatcgcgtctcgatgcctttcaacactcttgagaaatcaaagagtcctgatagcctcaccatcatcatcatccatggcatccgcatcttcttcctcttctctcctccttaacccgttgacttcttccactctccgtcacttcagatcctctccggagatctcttctctctccttctctgcttccggcttccctctagcgatgaagagccagcagcagagtcggagctatggagatgtctcgaaacgagatccgtgcgaggccgttaagcgtgagaatggagctgatgggctcaacatcgctgagaatgtgtctcagctcattgggaaaactcctatggtgtacttgaacagtatggcaaagggttgtgtagcgaacattgctgctaagctcgagatcatggagccttgttgcagtgtcaaagataggattgggtacagtatggttactgatgctgagcaaaaaggattcatatcacctggaaagagtgttcttgtggaacctacaagtggaaacacgggtattggacttgcgtttatcgctgcttcaagaggctaccgacttatcttgacaatgccctcatccatgagtatggagagaagagttcttctaaaggcgtttggagctgagcttgtgctgactgatcctgctaaaggcatgaccggtgcagttcagaaggctgaggaaatcttgaaatcaactcctgatgcttacatgctccaacagtttgacaaccctgccaatccaaagatccattatgagactactggtcctgagatatgggaagatacaaagggaaaggtggatatatttgttgctgggattggaactggtgggactatcactggtgttggtcggttcattaaagagaaaaaccccaaagtgcaggttattggtgttgaaccaactgaaagcgacatactttctggtggcaaaccgggacctcacaagattcaagggattggagctggatttatacctaagaatttggatcgggcaattatggatgaagtcatagcgatttcaagtgaggaagctatagaaactgcaaagcaactagctctcaaagaaggcttgatggttggaatatcatctggagctgctgctgctgctgcaatcatggtagcaaagagacctgagaatgcagggaaactcattgctgttgttttcccgagctttggagagcgatatttatcaacccctctgttccagtctatccgggaagaggttgagaaaatgcagcctgagatatga

SEQ ID NO: 40257 - protein, 430 aa, Brassica napus
MAVLMASRFNSEARIASRCLSTLLRNQRVLIASPSSSSMASASSSSSLLLNPLTSSTLRHFRSSPEISSLSFSASGFPLAMKSQQQSRSYGDVSKRDPCEAVKRENGADGLNIAENVSQLIGKTPMVYLNSMAKGCVANIAAKLEIMEPCCSVKDRIGYSMVTDAEQKGFISPGKSVLVEPTSGNTGIGLAFIAASRGYRLILTMPSSMSMERRVLLKAFGAELVLTDPAKGMTGAVQKAEEILKSTPDAYMLQQFDNPANPKIHYETTGPEIWEDTKGKVDIFVAGIGTGGTITGVGRFIKEKNPKVQVIGVEPTESDILSGGKPGPHKIQGIGAGFIPKNLDRAIMDEVIAISSEEAIETAKQLALKEGLMVGISSGAAAAAAIMVAKRPENAGKLIAVVFPSFGERYLSTPLFQSIREEVEKMQPEI

SEQ ID NO: 40258 - DNA, 1119 bp, Glycine max
  CDS (1)..(1119)
atggcttccctcatgagcaccatcctcatgcaaaggtcttcttctacttcacttgctgctgggaggttgttctccacaacaacagcaaccattattgattccccttcacttgctcagagaatcagagatttgcctaaggacctccctggaaccaacatcaagaaacatgtttctcagctcattgggaggactccacttgtttatcttaacaaagtcactgaaggatgtggagcttatgttgctgtcaagcaagagatgatgcaacctactgccagcatcaaagacagaccagcatatgcaatgatcacagatgctgaggaaaagaatctgataactcctggaaagacaactctgattgagcccacgtcaggcaatatgggtatcagcatggcatttatggccgccatgaagggatacaagatggttttgaccatgccctcttacacaagcttggaaagaagggtgaccatgagagtgtttggagctgaattaatcctcactgatccagccaaaggaatgggaggaacagtaaagaaggcttatgaacttttggaaaacacaccaaatgcccacatgctgcaacaattttcaaaccctgccaatactcaggtgcattttgaaacaacaggtcctgagatatgggaggatacaaatggacaagttgacatatttgttatgggaataggtagtggaggcacagtctctggggttggacaatatcttaaatccaaaaatcctaatgttaagatatatggagtggagccaagtgaaagcaatgtgctgaatggtggtaaacctggtcctcatcatataactggcaatggagttggattcaaaccagacatattggacatggatgttatggaaaaagttcttgaagttagcagtgaagatgcagttaacatggctagggtgttggcattgaaggaaggactcatggtagggatatcatctggagctaacacagttgcagctctcagattggctcagctgcctgagaacaaaggcaaacttattgtgactgttcatccaagtttcggcgaacgatacctgtcatctgtcctgttccaagagcttcgtcaagaagctgaaaacatgcagccagtagcagttgattaa

SEQ ID NO: 40259 - protein, 372 aa, Glycine max
MASLMSTILMQRSSSTSLAAGRLFSTTTATIIDSPSLAQRIRDLPKDLPGTNIKKHVSQLIGRTPLVYLNKVTEGCGAYVAVKQEMMQPTASIKDRPAYAMITDAEEKNLITPGKTTLIEPTSGNMGISMAFMAAMKGYKMVLTMPSYTSLERRVTMRVFGAELILTDPAKGMGGTVKKAYELLENTPNAHMLQQFSNPANTQVHFETTGPEIWEDTNGQVDIFVMGIGSGGTVSGVGQYLKSKNPNVKIYGVEPSESNVLNGGKPGPHHITGNGVGFKPDILDMDVMEKVLEVSSEDAVNMARVLALKEGLMVGISSGANTVAALRLAQLPENKGKLIVTVHPSFGERYLSSVLFQELRQEAENMQPVAVD

SEQ ID NO: 40260 - DNA, 1170 bp, Glycine max
  CDS (1)..(1170)
atggcttctgcttccttaatcaactcgttgacttgttcttcgcgtgctcccactcagcactgttccactttcacccgcaccaccgccgccacgtcactgagacaatttaacagccactgtcggagaccactcgcgacgaggatctcgccgccttccaccgttgtctgcaaagctgtctccgttaagccccaaaccgaaatcgaaggtctcaacattgctgaagatgtcacccagctcatagggaaaacgccaatggtttacctgaacaatatcgtgaagggttctgtggccaatattgctgccaagcttgagattatggagccctgttgtagtgtaaaggacaggattggttttagtatgataaatgatgctgagcagagaggagctataacacctgggaagagtatattggtggaacctactagcggcaacaccggaattggtcttgcctttatagcagcttcaagaggttataaactcattttgacaatgcctgcttcaatgagtttagaaagacgagttctcttgaaagcatttggggccgagcttgttttgactgatgcagcaaagggcatgaatggagcagttcaaaaagctgaagaaattttaaaaagtacccccaatgcatacatgcttcaacaatttgataatccttcaaatcctaagattcattatgagacaactggcccagagatatgggaagatacaagaggaaagatagatattttagttgcaggaattggaaccggtggaactgtttctggagctggccaattcctaaaacaacaaaatccgaaaatacaggttattggcgtagagcctctggaaagcaacatacttacaggtggaaagccaggacctcacaaaattcagggtattggggctggttttgtgcccaggaatttggatcaagatgtgcttgatgaagttatagcgatatcaagtgatgaagcagttgaaactgcaaagcaattagcactccaggaaggcttgctggtgggaatttcttcaggagctgcagctgcagctgctttgaaggttggaaagaggcctgagaatgcaggaaagcttattggggttgtcttcccaagctttggtgaaagatatttgtcaactattcttttccagtcaatacgggaagaatgcgagaaaatgcaacctgagccatga

SEQ ID NO: 40261 - protein, 389 aa, Glycine max
MASASLINSLTCSSRAPTQHCSTFTRTTAATSLRQFNSHCRRPLATRISPPSTVVCKAVSVKPQTEIEGLNIAEDVTQLIGKTPMVYLNNIVKGSVANIAAKLEIMEPCCSVKDRIGFSMINDAEQRGAITPGKSILVEPTSGNTGIGLAFIAASRGYKLILTMPASMSLERRVLLKAFGAELVLTDAAKGMNGAVQKAEEILKSTPNAYMLQQFDNPSNPKIHYETTGPEIWEDTRGKIDILVAGIGTGGTVSGAGQFLKQQNPKIQVIGVEPLESNILTGGKPGPHKIQGIGAGFVPRNLDQDVLDEVIAISSDEAVETAKQLALQEGLLVGISSGAAAAAALKVGKRPENAGKLIGVVFPSFGERYLSTILFQSIREECEKMQPEP

SEQ ID NO: 40262 - DNA, 972 bp, Glycine max
  CDS (1)..(972)
atggagccacagtgtagaatcaagaaggatgccactgaattgatagggaataccccaatggtatatctgaacaacattgtggatgggtgtgtagcccgtattgctgctaaattggagtacatgcaagcgtgctgtagtgtcaaagataggattgctttgagcatgattgaagatgctgagaaaaaaggccttattacacctggaaagactgttctggttgagtatacaagtggtaacaccggcataggattggcattcatagcagcattgaggggctataaacttcaggtgactatgccgtcttatgtgagtcttgagagaaaaattatactgcgagcctttggagctgaggtatatcttacagaccctgccaaaggaattgatggggttattcagaaggcagaagaactaatagccaagacgcctgatagttttatgctcaaccaatttgaaaatcctgcaaatccaaatattcattacgagacaacgggccctgagatttggagggactcgggagagaaaattgatgctttggtttcaggaataggaactggggggtcaatagcaggagctggaagattcctcagggagaaaaacccggatattaagctgtatggtgtggagccagctgaaagtccagttttgaatggaggacagccaggtaagcacctgattcaaggaattggtgctggtatcattcccaaagttctggatgtaaatctcctagatgaagttattcaggtttcaagtgaagaggctatagaaactgctaagctgcttgccttgaaagaaggtttgctgatgggaatttcatcaggagctgctgcagcagcggcaataaaggtggggaagagaccagaaaatgcaggaaagctcattgttgtgattttccccagttttggagaacgttacttatcttcaccactgtttgaatccattaggaaagaagctgaacaaatgacatttgactaa

SEQ ID NO: 40263 - protein, 323 aa, Glycine max
MEPQCRIKKDATELIGNTPMVYLNNIVDGCVARIAAKLEYMQACCSVKDRIALSMIEDAEKKGLITPGKTVLVEYTSGNTGIGLAFIAALRGYKLQVTMPSYVSLERKIILRAFGAEVYLTDPAKGIDGVIQKAEELIAKTPDSFMLNQFENPANPNIHYETTGPEIWRDSGEKIDALVSGIGTGGSIAGAGRFLREKNPDIKLYGVEPAESPVLNGGQPGKHLIQGIGAGIIPKVLDVNLLDEVIQVSSEEAIETAKLLALKEGLLMGISSGAAAAAAIKVGKRPENAGKLIVVIFPSFGERYLSSPLFESIRKEAEQMTFD

SEQ ID NO: 40264 - DNA, 978 bp, Hordeum vulgare
  CDS (1)..(978)
atgggggaggcttcgacgccggcgatcgccagggatgtcaccgagctgatcgggaacacgccgctggtgtacctcaacaaggtgacggacgggtgcgtggggcgcgtcgccgccaagctcgagtccatggagccctgctccagcgtcaaggacaggattgggtacagcatgatcaccgacgcagaggagaaggggttcatcgtcccaggcaagagtgtgctgattgagccaaccagtggcaacacaggcattgggctggccttcatggctgctgccaagggttacagacttgtactcacgatgcccgcctccatgagtatggagaggagaatcatcctgaaggcttttggtgctgagctgatcctcacagacccactcttggggatgaaaggagctgtccaaaaggccgaagagctggcagcgaagacacccaactcatacatccttcagcaatttgagaatgctgctaacccaaagattcactatgagacaaccggacctgaaatctggaaaggcacaggaggaaagatcgatggccttgtttctggcattgggacaggtggtaccattactggatctggaaaatacctcaaagagcaaaatcctaatatcaagctctacggcgtggagcctaccgagagtgctgtcttaaatggtggaaagcctggaccacacaagatccaaggaattggagctggtttcatccctggtgtcttggatgttgacatcattgatgaaaccgtacaggtttcaagtgatgagtccattgagatggcaaagtctcttgcattgaaagaaggattgctggttgggatctcttctggtgcggctgcagctgcggcaatcaaggttgctcagaggcctgaaaatgcagggaaactctttgttgttgtattcccaagcttcggagagcgctacctttcgtcggtgctcttccactctatcaagaaggaggccgagagcatggtggtggagtga

SEQ ID NO: 40265 - protein, 325 aa, Hordeum vulgare
MGEASTPAIARDVTELIGNTPLVYLNKVTDGCVGRVAAKLESMEPCSSVKDRIGYSMITDAEEKGFIVPGKSVLIEPTSGNTGIGLAFMAAAKGYRLVLTMPASMSMERRIILKAFGAELILTDPLLGMKGAVQKAEELAAKTPNSYILQQFENAANPKIHYETTGPEIWKGTGGKIDGLVSGIGTGGTITGSGKYLKEQNPNIKLYGVEPTESAVLNGGKPGPHKIQGIGAGFIPGVLDVDIIDETVQVSSDESIEMAKSLALKEGLLVGISSGAAAAAAIKVAQRPENAGKLFVVVFPSFGERYLSSVLFHSIKKEAESMVVE

SEQ ID NO: 40266 - DNA, 1122 bp, Hordeum vulgare
  CDS (1)..(1122)
atggagaggatggtgatgaggctcatgaggaataagtctcttctcgccggagcctctagccgcggcggcggaggactagcctcctcctccattgtcgactcttcccccttctccaccctgcagcagcagcagcagcaggaagaccccggtgtgctcaacatcagggacaccgccgcccacctcatcgggcggacgccgctggtgtacctgaacaaggtgacggaggggtgcggcgcacgggtcgccgccaagctcgagttcctccagccctccttcagcgtcaaggacaggccggcaatctccatgattgaagatgcggagaagaagggattgatcaccccgggcaagacgacgctgatcgagcctacgtccggcaacatgggcatcggcctggcgttcatggcggcgctcaaagggtacgagctcgtgctgacgatgccgtcctacaccagcctcgagcggagggtggtcatgaaggccttcggcgcgcagctcgtgctcaccgacccggccaaagggatggggggcaccgtgaggaaggccacccagctctatgacaaccatcctagcgcattcatgctccagcagttcgagaaccctgccaacgtccaggtgcactacgagaccaccggtccagagatatgggaggacacgcttgggcaggtcgacatcttcgtcatgggcatcgggagcggcggtactgtcaccggcgtcggcaagtacctcaaggagaagaaccccaatgccaagatctatggagttgaaccagccgaagcaaatgttctcaatggtggcaagccagggcctcacctcatcactggaaatggagtgggattcaagccagacattttggacatggatataatggagaaggttcttgaggtgaaaggtgaggatgctgtcaagatggcacaacaattggcgctgcaagagggtctgctggtggggatatcatcaggagccaacacggtggcagcgattgaacttgcaaagaggcccgaaaacaaagggaagctcatcgtgactgttcatccaagcgcgggagagcgatacttatcgtcggcgctgttcgagggtctgaggaaggaggcggaggccatgcagccagtgccagtggactaa

SEQ ID NO: 40267 - protein, 373 aa, Hordeum vulgare
MERMVMRLMRNKSLLAGASSRGGGGLASSSIVDSSPFSTLQQQQQQEDPGVLNIRDTAAHLIGRTPLVYLNKVTEGCGARVAAKLEFLQPSFSVKDRPAISMIEDAEKKGLITPGKTTLIEPTSGNMGIGLAFMAALKGYELVLTMPSYTSLERRVVMKAFGAQLVLTDPAKGMGGTVRKATQLYDNHPSAFMLQQFENPANVQVHYETTGPEIWEDTLGQVDIFVMGIGSGGTVTGVGKYLKEKNPNAKIYGVEPAEANVLNGGKPGPHLITGNGVGFKPDILDMDIMEKVLEVKGEDAVKMAQQLALQEGLLVGISSGANTVAAIELAKRPENKGKLIVTVHPSAGERYLSSALFEGLRKEAEAMQPVPVD

SEQ ID NO: 40268 - DNA, 972 bp, Brassica napus
  CDS (1)..(972)
atggaagaacggtacatgatcaagaacgatgtcactgaattgattggtaacacaccaatggtgtacctaaataaaattgttgacggttgcgtcgcacgtattgctgccaagcttgagatgatggagccttgctctagcataaaagacagaatcgcttatagtatgatcaaagatgcagaagacaaaggattgattactcccggaaagagtacattgattgaggcaaccggcggtaatactgggattggtttagccagcataggagctgcaagaggctacagagtgatacttttgatgccttcaacgatgagcttagagaggagaatcattttgagagcattaggtgcagaggttcatcttacagatatgaacataggcattaaaggaatgttggagaaagctgaagagatattaagcaaaactcctggtggttacataccacaccagtttctaaatcctgagaaccctgagattcattacagaacaacgggtccagagatatggagagattcagcaggggaagtagatattttggtagctggggctggcactggtggaacggttagtggaactgggaggtttcttaagaagatgaacaaaaacattaaggtttgtgtggtggaacctacagaaagtgcagtacttagcggaggagaaccaggtccacatttgatccaggggattggtcctggtgtcattccaaccaatttggatttaagcattgttgatgaagtcattcaggtgacaagtgaagaagctattgaaacagccaagcttcttgctcttaaagaaggattattggtgggaatatcgtcaggggctgcagcagccgctgcattaaaggttgctaaacggccagaaaacgcaggcaaacttattgtggtgatttttcccagtggaggagagcgttatttatcaacagaactgttcgagtcggtcagatatgaagcagagcatttgtcgatcgattga

SEQ ID NO: 40269 - protein, 323 aa, Brassica napus
MEERYMIKNDVTELIGNTPMVYLNKIVDGCVARIAAKLEMMEPCSSIKDRIAYSMIKDAEDKGLITPGKSTLIEATGGNTGIGLASIGAARGYRVILLMPSTMSLERRIILRALGAEVHLTDMNIGIKGMLEKAEEILSKTPGGYIPHQFLNPENPEIHYRTTGPEIWRDSAGEVDILVAGAGTGGTVSGTGRFLKKMNKNIKVCVVEPTESAVLSGGEPGPHLIQGIGPGVIPTNLDLSIVDEVIQVTSEEAIETAKLLALKEGLLVGISSGAAAAAALKVAKRPENAGKLIVVIFPSGGERYLSTELFESVRYEAEHLSID

SEQ ID NO: 40270 - DNA, 978 bp, Triticum aestivum
  CDS (1)..(978)
atgggggaggcgtcatctccggcgatcgccaaggatgtcaccgagctgatcgggaacacgccgctggtgtacctcaacaaggtgaccgacgggtgcgtggggcgcgtcgccgccaagctcgagtccatggagccctgctccagcgtcaaggacaggattggatacagcatgatcaccgacgcggaggagaaggggttcatcgtcccaggcaagagtgtcctgattgagccaaccagtggcaacacaggcattgggctggccttcatggctgctgccaagggttacagacttgtactcacaatgcccgcatccatgagtatggagaggagaatcatcttgaaggcttttggtgctgagctgatcctcaccgacccactcttgggaatgaaaggagctgtccaaaaggcggaagagctggcagcaaagacacccaactcatacatccttcagcagttcgagaatgctgccaacccaaagattcactatgagacaactgggcctgaaatctggaaaggcacaggaggaaagatcgatggccttgtttctggcatcgggacaggtggtaccattactggaactggaaagtacctcaaagagcaaaactctaacatcaagctctacggtgtggagcctaccgagagtgctgtcttaaatggtggaaagcctggaccacacaagatccaaggaattggagctggttttatccctggtgtcttggatgttgacatcattgatgaaaccatacaggtttcaagtgatgagtctattgagatggcaaagtctcttgcattgaaagaaggattgctggttgggatctcttctggtgctgctgcagctgctgcaatcaaggttgctcagaggcctgaaaatgcagggaaactctttgttgttgtgttcccgagcttcggagagcgctacctttcgtcggtgctcttccactccatcaagaaggaggccgagagcatggtggtcgagtga

SEQ ID NO: 40271 - protein, 325 aa, Triticum aestivum
MGEASSPAIAKDVTELIGNTPLVYLNKVTDGCVGRVAAKLESMEPCSSVKDRIGYSMITDAEEKGFIVPGKSVLIEPTSGNTGIGLAFMAAAKGYRLVLTMPASMSMERRIILKAFGAELILTDPLLGMKGAVQKAEELAAKTPNSYILQQFENAANPKIHYETTGPEIWKGTGGKIDGLVSGIGTGGTITGTGKYLKEQNSNIKLYGVEPTESAVLNGGKPGPHKIQGIGAGFIPGVLDVDIIDETIQVSSDESIEMAKSLALKEGLLVGISSGAAAAAAIKVAQRPENAGKLFVVVFPSFGERYLSSVLFHSIKKEAESMVVE

SEQ ID NO: 40272 - DNA, 1137 bp, Triticum aestivum
  CDS (1)..(1137)
atggagaggatggtgatgaggctgatgaggaacaagaaccagtccctccgccagctgcaaggggccgccgccggcgtgctagcgtcgtcgtcctccgcctcctcggccgccggcgccgccgcgtctcccttctccaccctgcagcagcaggaggaccatcccggggtgctcaacatcagggacaccgccgcccacctcatcggccggacgccgctggtgtacctgaacaaggtgacggaggggtgcggcgcccgcgtcgccgccaagctcgagttcctccagccttccttcagcgttaaggacaggccagcaatctccatgatcgaagatgcggagaagaaggggctgataaccccaggcaagacgacgctgatcgagcctacatccgggaacatgggcatcggcctggcgttcatggctgcactcaaagggtacgagctcgtgctgacgatgccatcatacaccagcctcgagaggagggtggtcatgaaggccttcggtgcgcagctcgtgctcactgacccggcgaaggggatgggaggcaccgtcaggaaagcaacccagctctatgagaaccatcccagcgccttcatgctccagcagttcgagaatcccgccaacgtccaggtgcactacgagaccaccggtccggagatatgggaggacacgctcgggcaggtcgacatcttcgtcatgggaatcggcagcggcggcaccgtcaccggcgtcggcaagtacctcaaggagaagaaccccaacgcaaagatctatggagttgaacctgccgaagcaaatgtcctgaacggtggcaagccagggcctcacctcatcactggaaatggagttggatttaagccagatattttggatatggatataatggagaaggttctagaggtgaaaagcgaggacgccgttaagatggcgcaacagttggcactgcaggagggcctgctggtggggatatcatcaggagccaacacagtggctgcgatcgaactcgcaaagaggccagaaaacaaagggaagctcatcgtgactgttcatccgagcgcgggagagcgatacttatcgtcggcgctattcgagggtctgaggaaggaggctgaggcaatgcagccagtgccagtggactaa

SEQ ID NO: 40273 - protein, 378 aa, Triticum aestivum
MERMVMRLMRNKNQSLRQLQGAAAGVLASSSSASSAAGAAASPFSTLQQQEDHPGVLNIRDTAAHLIGRTPLVYLNKVTEGCGARVAAKLEFLQPSFSVKDRPAISMIEDAEKKGLITPGKTTLIEPTSGNMGIGLAFMAALKGYELVLTMPSYTSLERRVVMKAFGAQLVLTDPAKGMGGTVRKATQLYENHPSAFMLQQFENPANVQVHYETTGPEIWEDTLGQVDIFVMGIGSGGTVTGVGKYLKEKNPNAKIYGVEPAEANVLNGGKPGPHLITGNGVGFKPDILDMDIMEKVLEVKSEDAVKMAQQLALQEGLLVGISSGANTVAAIELAKRPENKGKLIVTVHPSAGERYLSSALFEGLRKEAEAMQPVPVD

SEQ ID NO: 40274 - DNA, 1047 bp, Triticum aestivum
  CDS (1)..(1047)
atgccgccgggggcggaggaggcggagcgggctggccgcagaggggtcccttccctgctcgccggcggcggaaccgggcaggaggagcacatcgccaccgacgtcacccagctgatagggtggacgccgctgatcgagctgaagcggatcgccggcaaggagggggtgggtgcccgcatcgtcggcaagatcgaggcctaccagcccctctgctccgtcaaggaccgcagcgctctcaggatgatagaagacgccgaagagaaagggctgatttcacctggtgtcacgactctagtcgagccgacaagtggtaatttggggctaggactggtgctcattgctctgagcaaagggtacaggtttgtcgcggtgatgccgggccaatattcgctggataagcagatcttgttgagatacatgggtgctgagttgttcataaccgatccagcacttgggtttccagggcaagttgaaaaggtcgaacagctcaagaaagaattgcccaatgtacatgttcttgatcagttctcgaatccagcaaaccccgaggcacacattcgatggactggacccgagatttggaaggatactgctggaaaggtggatatatttgttgcaggttcaggctcaggagggacggtatctggtgttgggaagtatttgaagatgcaaaatccaaatgtaaagatcatttgtgtggaacctgcagagagtccagttatttcaggtggggagcgaggcaaacataaaatccagggaatagggccgggattcgtgcctgaaatcttggacagctcggtcatcgatgaggtgcttaccgtgaccaccgaggaagcaatggtgaatgcaaggaggttggcaatggaagagggcctacttgtgggcatatcttcgggtggaaacttggcggcttgcttgaaggtcgcggcaagagaagagaacaaggggaagatgattgtgaccatgttcccgagcgggggcgagagatacatgaactctgacctctttgcagctgtaagagaggagtgtatcgccatgaccttttga

SEQ ID NO: 40275 - protein, 348 aa, Triticum aestivum
MPPGAEEAERAGRRGVPSLLAGGGTGQEEHIATDVTQLIGWTPLIELKRIAGKEGVGARIVGKIEAYQPLCSVKDRSALRMIEDAEEKGLISPGVTTLVEPTSGNLGLGLVLIALSKGYRFVAVMPGQYSLDKQILLRYMGAELFITDPALGFPGQVEKVEQLKKELPNVHVLDQFSNPANPEAHIRWTGPEIWKDTAGKVDIFVAGSGSGGTVSGVGKYLKMQNPNVKIICVEPAESPVISGGERGKHKIQGIGPGFVPEILDSSVIDEVLTVTTEEAMVNARRLAMEEGLLVGISSGGNLAACLKVAAREENKGKMIVTMFPSGGERYMNSDLFAAVREECIAMTF

SEQ ID NO: 40276 - DNA, 1104 bp, Triticum aestivum
  CDS (1)..(1104)
atggacctccccttcctcgtctcctgtataaaacctcgcgtcctgatgcttcctcctccaactccacgagccgccatttcccaaggaggagcaaggattgttgttgtttcgctgtcagatcgagacccaacgggagaagccgcgacgacgatcgccaaggacgtcaccgagttgatcgggaacacgccgctggtgtacctcaacaaggtgaccgatgggtgcgtcggccgcgtcgccgccaagctcgagtccatggagccctgctccagcgtcaaggataggattggctacagcatgatcacagacgcagaggagaaggggctgatcactccaggcgtgagtgttctgattgaaccaactagtggcaacacaggcattggactggcctttatggctgctgccaagggctacaaacttatactcacaatgcctgcctccatgagcatggagaggaggatcatcttgaaggctttcggtgctgaacttgtccttactgacccactcctgggaatgaaaggagctgtcaaaaaggcggaagagattcaagcaaagacacccaactcatacatccttcaacaatttgaaaatccagctaacccaaagattcactatgagactacagggccagaaatctggaaagctacagccggaaaaattgatgcccttgtatctggtatcgggacaggaggtaccataactggtactgggcgatacctcagagagcaaaatcctaatgtcaagctctatggtgtggagccagtggagagtgctgttttgaatggtggaaaacctggaccacacaagattcaaggaattggagctggttttatccctggtgtcttggatgttgacatcattgatgaaaccatacaggtttcaagtgatgagtctattgagatggcaaagtctcttgcattgaaagaaggattgctggttgggatctcttctggtgctgctgcagctgctgcaatcaaggttgctcagaggcctgaaaatgcagggaaactctttgttgttgtgttcccgagcttcggagagcgctacctttcgtcggtgctcttccactccatcaagaaggaggccgagagcatggtggtcgagtga

SEQ ID NO: 40277 - protein, 367 aa, Triticum aestivum
MDLPFLVSCIKPRVLMLPPPTPRAAISQGGARIVVVSLSDRDPTGEAATTIAKDVTELIGNTPLVYLNKVTDGCVGRVAAKLESMEPCSSVKDRIGYSMITDAEEKGLITPGVSVLIEPTSGNTGIGLAFMAAAKGYKLILTMPASMSMERRIILKAFGAELVLTDPLLGMKGAVKKAEEIQAKTPNSYILQQFENPANPKIHYETTGPEIWKATAGKIDALVSGIGTGGTITGTGRYLREQNPNVKLYGVEPVESAVLNGGKPGPHKIQGIGAGFIPGVLDVDIIDETIQVSSDESIEMAKSLALKEGLLVGISSGAAAAAAIKVAQRPENAGKLFVVVFPSFGERYLSSVLFHSIKKEAESMVVE

SEQ ID NO: 40278 - DNA, 978 bp, Triticum aestivum
  CDS (1)..(978)
atgggggaggcgtcatctccggcgatcgccaaggatgtcaccgagctgatcgggaacacgccgttggtgtacctcaacaaggtgaccgacgggtgcgtggggcgcgtcgccgccaagctcgagtccatggagccctgctccagcgtcaaggacaggattgggtacagcatgatcaccgacgcggaggagaaggggttcatcgtcccaggcaagagtgtgctgattgaaccaaccagtggcaacacaggcattgggctggccttcatggctgctgccaagggttacagacttgtactcacaatgcccgcctccatgagtatggagaggagaatcatcttgaaggcctttggtgctgagctgatcctcaccgacccactcttgggaatgaaaggagctgtccaaaaggcggaagagcttgcagcaaagacgcccaactcatacatccttcagcagttcgagaatcctgccaacccaaagattcactatgagacaactgggcctgaaatctggaaaggcacaggaggaaagatcgatggccttgtttctggcatcgggacaggtggtaccattactggatctggaaaatacctcaaagagcaaaatcctaacatcaagctctacggtgtggagcctaccgagagtgctgtcttaaatggtggaaagcctggaccacacaagatccaaggaattggagctggttttatccctggtgtcttggatgttgacatcattgatgaaaccatacaggtttcaagtgatgagtccattgagatggcaaagtctctggcattgaaagaaggattgctggttggaatctcttctggtgctgctgcagcagctgcaatcaaggttgctcagaggcctgaaaatgcagggaaactctttgttgttgtattcccaagcttcggagagcgctacctttcgtcggtgctcttccactccatcaagaaggaggccgagagcatggtggtcgagtga

SEQ ID NO: 40279 - protein, 325 aa, Triticum aestivum
MGEASSPAIAKDVTELIGNTPLVYLNKVTDGCVGRVAAKLESMEPCSSVKDRIGYSMITDAEEKGFIVPGKSVLIEPTSGNTGIGLAFMAAAKGYRLVLTMPASMSMERRIILKAFGAELILTDPLLGMKGAVQKAEELAAKTPNSYILQQFENPANPKIHYETTGPEIWKGTGGKIDGLVSGIGTGGTITGSGKYLKEQNPNIKLYGVEPTESAVLNGGKPGPHKIQGIGAGFIPGVLDVDIIDETIQVSSDESIEMAKSLALKEGLLVGISSGAAAAAAIKVAQRPENAGKLFVVVFPSFGERYLSSVLFHSIKKEAESMVVE

SEQ ID NO: 40280 - DNA, 1041 bp, Zea mays
  CDS (1)..(1041)
atggcgggagaggaggccgggaggaggggcgttccctctctgctgaacccgccgtccgcttccagcgaggggcagcaggagcacatcgcctctgatgtcacacagctcatcggatggacacctctggtcgagctcaagcgaatcgccgccaaggaaggggtatgcgcgcgcatcgtcggcaaggtggaggcgtaccagcctctgtgctccgtcaaggatcgcagcgctctgagaatgatcgaagacgcagaggagagggggctgatctcgcccggcaccacgacgctcgtggagccgacgagcggcaacctggggctgggcctggtcctcgtcgccctccgcaagggctacaggttcgtcgcggtcatgccaggccagtactcgctcgacaagcagatcctgctgacatacatgggcgcagagctgtacgtaacagatccatccctcgggttcccgggcataaccgccaaggtcgaggagctcaagaaggagctgcccaacgtgcacgtcctcgaccagttctccaacagagcgaatcctgaagcgcatgttagatggactgggcctgagatctggaaggacaccgccggcaaggtggacgtattcgtggccggttcaggctcgggaggcacggtgtctggcgtcggcaagtacctcaagacgcagaaccccagcgtcaaggtcatctgcgttgagcctgccgagagcccagttgtttcaggcggggaaccaggcagccacaagatccagggaatagggccgggattcataccggaagtgctggacacctccgtcatcgacgaggccgtcacggtgaccaccgaggaggcgatggcgggcgcccggaggctggccagggaggagggcctgctcgtcggcatctcttccggagccaacctggcggcctgcttgaaggtcgcggcgcgagaagagagcaaggggaagatgattgtcaccgtgtttccgagcgggggcgagaggtacatgacctccgacctgttcgccgccgccagagaggagtgtattgccatgacgttttga

SEQ ID NO: 40281 - protein, 346 aa, Zea mays
MAGEEAGRRGVPSLLNPPSASSEGQQEHIASDVTQLIGWTPLVELKRIAAKEGVCARIVGKVEAYQPLCSVKDRSALRMIEDAEERGLISPGTTTLVEPTSGNLGLGLVLVALRKGYRFVAVMPGQYSLDKQILLTYMGAELYVTDPSLGFPGITAKVEELKKELPNVHVLDQFSNRANPEAHVRWTGPEIWKDTAGKVDVFVAGSGSGGTVSGVGKYLKTQNPSVKVICVEPAESPVVSGGEPGSHKIQGIGPGFIPEVLDTSVIDEAVTVTTEEAMAGARRLAREEGLLVGISSGANLAACLKVAAREESKGKMIVTVFPSGGERYMTSDLFAAAREECIAMTF

SEQ ID NO: 40282 - DNA, 1323 bp, Zea mays
  CDS (1)..(1323)
atgagctggtggcttggcctctcctccaccagtggcagtggcagtggctggccacccaatcgcctcgttcgtcatctacctctccctcctacaacccaagctaagctaaacagcttacacaggctcgctccgccatcaccgtatagagagagacagagacaggctagcgagggaacggagaggatgctcgccacgctgatgcggcggcggagctccgtccccctgtccggcctcctccaccacggaggagcgcccgccccgctgcaggccgccggcgccactggggcctccccgctgatcttctcgcaccagcagcagcagcagcacacggccgcctccgccgtcctgccggggctcaagatcagggactccgcgtcccagctgatcgggaggaccccgatggtgtacctgaacaaggtgaccgaggggtgcggcgcccgggtggctgccaagctcgagttcctgcagccgtccttcagcgtcaaagacagaccggcgatctcgatgctggaagacgctgaaaagagggggctcatcactccaggaaagaccacgttgatcgagcccacgtcggggaacatgggcatcgggctggcgttcatggcggcgctcaaggggtacgagctcgtgctcaccatgccgtcctacaccagcctggagaggagggtgacgatgcgggcgttcggcgccaacctggtgctgaccgacccggccaaagggatgggcgggacggtgaggaaggcgacggagctgtacgagagacatcccagcgcgcacatgctccagcagttccagaaccctgccaacgtcaaggtgcactacgacacgacgggaccggagatctgggaggacacgcttggccaggtcgatatcttcgtcatggggatcgggagcggcggcaccgtcacgggagtcggcaagtacctcaaggagaaaaaccctaacgcaaagatctatggagttgaacctgccgaggcaaatgttctgaatggtggaaagccaggacctcacctcatcactggaaacggagtagggttcaagccagatattctggacatggacgtgatggaaaaggtgctcgaggtgaaaggtgaggacgccgtcaagatggctcgagagctggcagtcaaggagggtcttttggtcgggatatcatcgggagccaacaccgttgctgctctcgagctagccaagaggccggagaacaaggggaagctcatcgtgaccgttcttccgagccttggcgagcggtacctgtcgtccgcgctgttcgatgagctgaggaaggaggcacaagccatggaaccggtcgcggtggattga

SEQ ID NO: 40283 - protein, 440 aa, Zea mays
MSWWLGLSSTSGSGSGWPPNRLVRHLPLPPTTQAKLNSLHRLAPPSPYRERQRQASEGTERMLATLMRRRSSVPLSGLLHHGGAPAPLQAAGATGASPLIFSHQQQQQHTAASAVLPGLKIRDSASQLIGRTPMVYLNKVTEGCGARVAAKLEFLQPSFSVKDRPAISMLEDAEKRGLITPGKTTLIEPTSGNMGIGLAFMAALKGYELVLTMPSYTSLERRVTMRAFGANLVLTDPAKGMGGTVRKATELYERHPSAHMLQQFQNPANVKVHYDTTGPEIWEDTLGQVDIFVMGIGSGGTVTGVGKYLKEKNPNAKIYGVEPAEANVLNGGKPGPHLITGNGVGFKPDILDMDVMEKVLEVKGEDAVKMARELAVKEGLLVGISSGANTVAALELAKRPENKGKLIVTVLPSLGERYLSSALFDELRKEAQAMEPVAVD

SEQ ID NO: 40284 - DNA, 1191 bp, Zea mays
  CDS (1)..(1191)
atggcgtcgtggtcgtcgccctcatccgccgccgccgcctcgggcgcccgattcggccccttcccgagccgagcgcagcggctcgtgccgtatccgtcgctcgcccgcggaacccccgcctcgacgctcgtcctcaggccccacccggacggccgtggccatggccacctcgcgcacaccggctcctcttcctcgcggtgccgcgccgtagccgccgaggtcgagggcctcaacatcgccaaccacgtcagccagctcatcggcaagacaccaatggtatatatcaacaatgtcgtcaagggctctgtcgccaatgttgctgctaagcttgagattatggagccctgttgtagcgtcaaggacaggatagggtacagtatgataaatgatgctgaacagaagggcttgattactcctggaaagagtgttttagtggaagcaacaagtggaaatacaggcattggtcttgcctttattgctgcttccaaaggatataagttgatattaacaatgccttcatcaatgagcatggagagaagagtcctactcagagcttttggtgctgaacttgtccttactgatgctgcaaaagggatgaaaggagccgtagataaggctacagagattttaaataagacacccaattcttacatgcttcaacagtttgataaccctgccaaccctaaggtacattatgagaccactggcccagagatctgggaggattcaaaggggaaggtggatatactaattggcggaattggaacaggcgggacaatatctggtgctggccgtttcctcaaggagaaaaattctggaattaaggttattggtattgagccttctgaaagtaacatactctccggtggaaaacctggtccacataagattcagggaattggtgcaggatttgttccaaggaacttggatagcgatattcttgatgaagtaattgagatatcaagtgatgaagctgttgagactgcaaaacagttggctgttcaggaaggattactggttggaatctcctctggagcagctgctgccgctgccataaaggttgcgaaaagaccagaaaatgctggaaagttgatagtggttgtgtttccgagttttggcgagaggtacctttcatctgtcctttatcagtccataagagaagaatgcgagaacatgcagcctgagccatga

SEQ ID NO: 40285 - protein, 396 aa, Zea mays
MASWSSPSSAAAASGARFGPFPSRAQRLVPYPSLARGTPASTLVLRPHPDGRGHGHLAHTGSSSSRCRAVAAEVEGLNIANHVSQLIGKTPMVYINNVVKGSVANVAAKLEIMEPCCSVKDRIGYSMINDAEQKGLITPGKSVLVEATSGNTGIGLAFIAASKGYKLILTMPSSMSMERRVLLRAFGAELVLTDAAKGMKGAVDKATEILNKTPNSYMLQQFDNPANPKVHYETTGPEIWEDSKGKVDILIGGIGTGGTISGAGRFLKEKNSGIKVIGIEPSESNILSGGKPGPHKIQGIGAGFVPRNLDSDILDEVIEISSDEAVETAKQLAVQEGLLVGISSGAAAAAAIKVAKRPENAGKLIVVVFPSFGERYLSSVLYQSIREECENMQPEP

SEQ ID NO: 40286 - DNA, 1191 bp, Zea mays
  CDS (1)..(1191)
atgtcgtcgtggtcgtcgccctcatccgccgccgccgcctcgggcgcccgattcggccccttcccgagccgagcgcagcggctcgtgccgtatccgtcgctcgcccgcggaacccccgcctcgacgctcgtcctcaggccccacccggacggccgtggccatggccacctcgcgcacaccggctcctcttcctcgcggtgccgcgccgtagccgccgaggtcgagggcctcaacatcgccaaccacgtcagccagctcatcggcaagacaccaatggtatatctcaacaatgtcgtcaagggctctgtcgccaatgttgctgctaagcttgagattatggagccctgttgtagcgtcaaggacaggatagggtacagtatgataaatgatgctgaacagaagggcttgattactcctggaaagagtgttttagtggaagcaacaagtggaaatacaggcattggtcttgcctttattgctgcttccaaaggatataagttgatattaacaatgccttcatcaatgagcatggagagaagagtcctactcagagcttttggtgctgaacttgtccttactgatgctgcaaaagggatgaaaggggccgtagataaggctacagagattttaaataagacacccaattcttacatgcttcaacagtttgataaccctgccaaccctaaggtacattatgagaccactggcccagagatctgggaggattcaaaggggaaggtggatatactaattggtggaattggaacaggcgggacaatatctggtgctggccgtttcctcaaggagaaaaattctggaattaaggttattggtattgagccttctgaaagtaacatactctccggtggaaaacctggtccacataagattcagggaattggtgcaggatttgttccaaggaacttggatagcgatattcttgatgaagtaattgagatatcaagtgatgaagctgttgagactgcaaaacagttggctgttcaggaaggattactggttggaatctcctctggagcagctgctgccgctgccataaaggttgcgaaaagaccagaaaatgctggaaagttgatagtggttgtgtttccgagttttggcgagaggtacctttcatctgtcctctatcagtccataagagaagaatgcgagaacatgcagcctgagccatga

SEQ ID NO: 40287 - protein, 396 aa, Zea mays
MSSWSSPSSAAAASGARFGPFPSRAQRLVPYPSLARGTPASTLVLRPHPDGRGHGHLAHTGSSSSRCRAVAAEVEGLNIANHVSQLIGKTPMVYLNNVVKGSVANVAAKLEIMEPCCSVKDRIGYSMINDAEQKGLITPGKSVLVEATSGNTGIGLAFIAASKGYKLILTMPSSMSMERRVLLRAFGAELVLTDAAKGMKGAVDKATEILNKTPNSYMLQQFDNPANPKVHYETTGPEIWEDSKGKVDILIGGIGTGGTISGAGRFLKEKNSGIKVIGIEPSESNILSGGKPGPHKIQGIGAGFVPRNLDSDILDEVIEISSDEAVETAKQLAVQEGLLVGISSGAAAAAAIKVAKRPENAGKLIVVVFPSFGERYLSSVLYQSIREECENMQPEP

SEQ ID NO: 40288 - DNA, 978 bp, Zea mays
  CDS (1)..(978)
atgggagaggcctcgccgtcgatcgccaaggacgtcaccgagttgatcgggaacacgccgctggtgtacctcaacaaggtgaccgatgggtgcgtcggccgcgtcgccgccaagctcgagtccatggagccctgctccagcgtcaaggataggattggctacagcatgatcacggacgcagaggagaaagggctgattactccaggcgtgagtgttctgattgaaccaactagcggcaacacaggcattggactggcctttatggctgctgccaagggctacaaacttacactcacaatgcctgcctccatgagcatggagaggaggatcatattgaaggcttttggtgctgaacttgtccttactgacccactcttgggaatgaaaggagctgtcaagaaagcggaagagatacaagcaaagacacccaactcgtacattcttcaacaatttgaaaatccagctaacccaaagattcactatgagactactgggcctgaaatctggaaagctacagcaggaaaaattgatggccttgtatctggtatcgggacaggaggtaccatcaccggtactgggcgatacctcagagagcaaaatcctaatgtcaagctctatggtgtggagccagtggagagtgctgttttgaatggtggaaaacctggaccacacaagattcaaggaattggagctggttttatccctggagtcttggatgttgatctccttgatgaaactctacaggtttcaagtgatgaagctatcgagactgccaaggctcttgctctgaaagaagggttgttggttggaatctcttctggtgcagctgcagctgcggcagttaggcttgctaagaggccagaaaacgccggaaagctatttgttgtcgtgttcccgagcttcggcgagcgctacctctcatcggtgctgttccagtccatcaagaaggaagcggagagcatggtggtcgagccctag

SEQ ID NO: 40289 - protein, 325 aa, Zea mays
MGEASPSIAKDVTELIGNTPLVYLNKVTDGCVGRVAAKLESMEPCSSVKDRIGYSMITDAEEKGLITPGVSVLIEPTSGNTGIGLAFMAAAKGYKLTLTMPASMSMERRIILKAFGAELVLTDPLLGMKGAVKKAEEIQAKTPNSYILQQFENPANPKIHYETTGPEIWKATAGKIDGLVSGIGTGGTITGTGRYLREQNPNVKLYGVEPVESAVLNGGKPGPHKIQGIGAGFIPGVLDVDLLDETLQVSSDEAIETAKALALKEGLLVGISSGAAAAAAVRLAKRPENAGKLFVVVFPSFGERYLSSVLFQSIKKEAESMVVEP

SEQ ID NO: 40290 - DNA, 1155 bp, Zea mays
  CDS (1)..(1155)
atggcgatggctccaccgcctgcctgctcgctcttcccccgggtcgccgctgctgcgcccagttccgtcacctccaactccgttttgacctcgcgtggccccggtatccttccttccccgcgtctcgctttcgcccgccgccacctctccgcggcatggtcatcgaaggcagcagcctccgcttctgtcgaaatccaggatgactacacggatgagatggacgcggtgaacattgcgcaggatgtcacccagctcattggaaaaacaccaatggtgtatctcaatagagttgctgacggatgtgtggctaatatcgctgcaaagctcgagtacatgggaccttgccgaagtgtcaaagataggattggattaagcatgattaatgatgctgaagagaagggattaatttctccagacaagaccattttggtagaaccaacaactggaaatactggtgtagccattgcttctgtggctgcagcaagaggatacaagttgatagcaacaatgccttcatcgttagatgtcgagagacgcattcttctgcgtgcattcggagcagagattgtgttaactgatcctaccaaaggactaaaaggagcttttgataaagctgaggaaatagtcctgagaacaccaaatgcgtatatgtttcagcagttcaacaatgaggcaaatagtgagatccactttcaaaccacaggcccagaaatatgggaagacacgttgggttctgttgatatacttgttgcaagcataggaacaggcggtaccattagtggcactgggcgttacttgaaaaggatgaacaaagatattaaggttattggggtagaacctgctgaaactagtgtgatttctggtgatagccctggttacattccaagtatattagatgtgcagttgattgatgaggttgtgaaggttagcacagcagaagccgttgattctgcaagggaacttgctctaaaagagggcctgctggttggtatttcctctggtgctgcagcgattgctgctatcaatgttggcaaaagacctgaaaatgctggaaagttgattgcggtcattttccccagctttggagagagatacatctccaccattctgttccgtccgatatatgactctgttcgaagaatgaggaagagatag

SEQ ID NO: 40291 - protein, 384 aa, Zea mays
MAMAPPPACSLFPRVAAAAPSSVTSNSVLTSRGPGILPSPRLAFARRHLSAAWSSKAAASASVEIQDDYTDEMDAVNIAQDVTQLIGKTPMVYLNRVADGCVANIAAKLEYMGPCRSVKDRIGLSMINDAEEKGLISPDKTILVEPTTGNTGVAIASVAAARGYKLIATMPSSLDVERRILLRAFGAEIVLTDPTKGLKGAFDKAEEIVLRTPNAYMFQQFNNEANSEIHFQTTGPEIWEDTLGSVDILVASIGTGGTISGTGRYLKRMNKDIKVIGVEPAETSVISGDSPGYIPSILDVQLIDEVVKVSTAEAVDSARELALKEGLLVGISSGAAAIAAINVGKRPENAGKLIAVIFPSFGERYISTILFRPIYDSVRRMRKR

SEQ ID NO: 40292 - DNA, 24 bp, Artificial sequence
  primer
atgagtaagatttttgaagataac

SEQ ID NO: 40293 - DNA, 25 bp, Artificial sequence
  primer
ttactgttgcaattctttctcagtg

SEQ ID NO: 40294 - protein, 375 aa, Artificial sequence
  consensus sequence
  Variant (2)..(2): Xaa in position 2 is any amino acid
  Variant (5)..(7): Xaa in position 5 to 7 is any amino acid
  Variant (9)..(15): Xaa in position 9 to 15 is any amino acid
  Variant (16)..(30): Xaa in position 16 to 30 is any or no amino acid
  Variant (32)..(32): Xaa in position 32 is any amino acid
  Variant (34)..(36): Xaa in position 34 to 36 is any amino acid
  Variant (37)..(37): Xaa in position 37 is any or no amino acid
  Variant (39)..(40): Xaa in position 39 to 40 is any amino acid
  Variant (41)..(42): Xaa in position 41 to 42 is any or no amino acid
  Variant (44)..(44): Xaa in position 44 is any amino acid
  Variant (48)..(51): Xaa in position 48 to 51 is any amino acid
  Variant (52)..(55): Xaa in position 52 to 55 is any or no amino acid
  Variant (58)..(59): Xaa in position 58 to 59 is any amino acid
  Variant (61)..(67): Xaa in position 61 to 67 is any amino acid
  Variant (68)..(71): Xaa in position 68 to 71 is any or no amino acid
  Variant (73)..(73): Xaa in position 73 is any amino acid
  Variant (80)..(80): Xaa in position 80 is any amino acid
  Variant (82)..(82): Xaa in position 82 is any amino acid
  Variant (85)..(90): Xaa in position 85 to 90 is any amino acid
  Variant (93)..(97): Xaa in position 93 to 97 is any amino acid
  Variant (100)..(102): Xaa in position 100 to 102 is any amino acid
  Variant (104)..(104): Xaa in position 104 is any amino acid
  Variant (106)..(113): Xaa in position 106 to 113 is any amino acid
  Variant (116)..(143): Xaa in position 116 to 143 is any amino acid
  Variant (144)..(158): Xaa in position 144 to 158 is any or no amino acid
  Variant (161)..(161): Xaa in position 161 is any amino acid
  Variant (163)..(164): Xaa in position 163 to 164 is any amino acid
  Variant (166)..(167): Xaa in position 166 to 167 is any amino acid
  Variant (168)..(169): Xaa in position 168 to 169 is any or no amino acid
  Variant (171)..(172): Xaa in position 171 to 172 is any amino acid
  Variant (173)..(173): Xaa in position 173 is any or no amino acid
  Variant (175)..(175): Xaa in position 175 is any amino acid
  Variant (176)..(176): Xaa in position 176 is any or no amino acid
  Variant (179)..(192): Xaa in position 179 to 192 is any amino acid
  Variant (193)..(198): Xaa in position 193 to 198 is any or no amino acid
  Variant (204)..(205): Xaa in position 204 to 205 is any amino acid
  Variant (207)..(210): Xaa in position 207 to 210 is any amino acid
  Variant (213)..(222): Xaa in position 213 to 222 is any amino acid
  Variant (223)..(226): Xaa in position 223 to 226 is any or no amino acid
  Variant (228)..(234): Xaa in position 228 to 234 is any amino acid
  Variant (235)..(271): Xaa in position 235 to 271 is any or no amino acid
  Variant (273)..(273): Xaa in position 273 is any amino acid
  Variant (275)..(276): Xaa in position 275 to 276 is any amino acid
  Variant (277)..(286): Xaa in position 277 to 286 is any or no amino acid
  Variant (288)..(312): Xaa in position 288 to 312 is any amino acid
  Variant (313)..(316): Xaa in position 313 to 316 is any or no amino acid
  Variant (318)..(319): Xaa in position 318 to 319 is any amino acid
  Variant (320)..(320): Xaa in position 320 is any or no amino acid
  Variant (323)..(325): Xaa in position 323 to 325 is any amino acid
  Variant (327)..(327): Xaa in position 327 is any amino acid
  Variant (329)..(329): Xaa in position 329 is any amino acid
  Variant (331)..(332): Xaa in position 331 to 332 is any amino acid
  Variant (333)..(334): Xaa in position 333 to 334 is any or no amino acid
  Variant (337)..(349): Xaa in position 337 to 349 is any amino acid
  Variant (350)..(371): Xaa in position 350 to 371 is any or no amino acid
  Variant (374)..(374): Xaa in position 374 is any amino acid
GXTPXXXLXXXXXXXXXXXXXXXXXXXXXXKXEXXXXPXXXXSXKDRXXXXXXXXAEXXGXXXXXXXXXXXEXTSGNTGXIXLAXXXXXXGYXXXXXMPXXXSXEXXXXXXXXGAXXXXXXXXXXXXXXXXXXXXXXXXXXXXXXXXXXXXXXXXXXXQFXNXXNXXXXHXXXTXXEIXXXXXXXXXXXXXXXXXXXXGTGGTXXGXXXXLKXXXXXXXXXXXXXXPXXXXXXXXXXXXXXXXXXXXXXXXXXXXXXXXXXXXXXXXXXXXGXGXXXXXXXXXXXXPXXXXXXXXXXXXXXXXXXXXXXXXXXXXXLXXXEGXXXGXSXGXXXXAAXXXXXXXXXXXXXXXXXXXXXXXXXXXXXXXXXXXRYXS

SEQ ID NO: 40295 - protein, 19 aa, Artificial sequence
  protein pattern
  Variant (3)..(3): Xaa in position 3 is any amino acid
  Variant (5)..(5): Xaa in position 5 is any amino acid
  Variant (6)..(6): Xaa in position 6 is Ala, Asp, Asn, Ser or Val
  Variant (8)..(10): Xaa in position 8 to 10 is any amino acid
  Variant (12)..(13): Xaa in position 12 to 13 is any amino acid
  Variant (14)..(14): Xaa in position 14 is any or no amino acid
  Variant (16)..(16): Xaa in position 16 is Ala or Gly
  Variant (17)..(17): Xaa in position 17 is any amino acid
  Variant (19)..(19): Xaa in position 19 is Ile, Leu or Val
QFXNXXNXXXHXXXTXXEX

SEQ ID NO: 40296 - protein, 12 aa, Artificial sequence
  protein pattern
  Variant (2)..(2): Xaa in position 2 is any amino acid
  Variant (3)..(3): Xaa in position 3 is Ser or Thr
  Variant (4)..(4): Xaa in position 4 is Ala, Gly, Ser or Thr
  Variant (9)..(9): Xaa in position 9 is any amino acid
  Variant (10)..(10): Xaa in position 10 is Ala, Gly or Ser
EXXXGNTGXXLA

SEQ ID NO: 40297 - protein, 14 aa, Artificial sequence
  protein pattern
  Variant (2)..(2): Xaa in position 2 is Ser or Thr
  Variant (3)..(3): Xaa in position 3 is Gly or Thr
  Variant (6)..(7): Xaa in position 6 to 7 is any amino acid
  Variant (9)..(9): Xaa in position 9 is any amino acid
  Variant (10)..(10): Xaa in position 10 is Ala, Gly, Ser or Thr
  Variant (11)..(12): Xaa in position 11 to 12 is any amino acid
  Variant (13)..(13): Xaa in position 13 is Phe, Ile, Leu or Met
GXXGTXXGXXXXXK

SEQ ID NO: 40298 - protein, 14 aa, Artificial sequence
  protein pattern
  Variant (3)..(3): Xaa in position 3 is Ile, Leu or Val
  Variant (4)..(5): Xaa in position 4 to 5 is any amino acid
  Variant (7)..(7): Xaa in position 7 is any amino acid
  Variant (9)..(9): Xaa in position 9 is Ala, Cys, Gly, Ser or Thr
  Variant (11)..(13): Xaa in position 11 to 13 is any or no amino acid
EGXXXGXSXGXXXA

SEQ ID NO: 40299 - DNA, 480 bp, Escherichia coli
  CDS (1)..(480): transl_table=11
atgaaacgaattgcgtttgtgggtagcgtcggggcaggaaaaacaacgttatttaatgcgttgcaggggaattataccctcgccagaaaaacacaggccgtggaatttaatgataagggcgatattgatacgccgggtgaatattttaaccatccccgctggtatcacgccttaattaccacgctacaggatgtagacatgctgatctatgtccatggcgcaaatgacccggaaagtcggttgcctgccgggttgctggatattggcgtcagcaaacggcaaatcgccgtcatcagtaaaacggacatgccagatgctgacgtcgccgcaacgcgaaagttattgcttgagacgggtttcgaagagccgatgttcgagctaaacagccacgacccgcaaagcgtgcagcaactggtggattatctggcatctctcaccaaacaggaggaagcaggtgaaaaaactcatcacagcgaataa

SEQ ID NO: 40300 - protein, 159 aa, Escherichia coli
MKRIAFVGSVGAGKTTLFNALQGNYTLARKTQAVEFNDKGDIDTPGEYFNHPRWYHALITTLQDVDMLIYVHGANDPESRLPAGLLDIGVSKRQIAVISKTDMPDADVAATRKLLLETGFEEPMFELNSHDPQSVQQLVDYLASLTKQEEAGEKTHHSE

SEQ ID NO: 40301 - DNA, 480 bp, Escherichia coli O157:H7 EDL933
  CDS (1)..(480): transl_table=11
atgaaacgaattgcgtttgtgggtaccgtcggggcagggaaaacaacgttatttaatgcgttgcaggggaattataccctcgccagaaaaacacaggccgtggaatttaatgataagggcgatattgatacgccgggtgaatattttagccatccccgctggtatcacgccttaattaccacgctacaggatgtggacatgctgatctatgtccacggcgcgaatgacccggaaagtcggttgcctgccgggttgctggatattggcgtcagcaaacggcaaatcgccgtcatcagtaaaacggacatgccggatgctgacgtcgccgcaacgcgaaagttattgcttgagacgggcttcgaggagccgattttcgagctaaacagccacgacccgcaaagcgtgcagcaactggtggattatctggcatctctcaccaaacaggaggaagcaggtgaaaaaactcatcacagcgaatga

SEQ ID NO: 40302 - protein, 159 aa, Escherichia coli O157:H7 EDL933
MKRIAFVGTVGAGKTTLFNALQGNYTLARKTQAVEFNDKGDIDTPGEYFSHPRWYHALITTLQDVDMLIYVHGANDPESRLPAGLLDIGVSKRQIAVISKTDMPDADVAATRKLLLETGFEEPIFELNSHDPQSVQQLVDYLASLTKQEEAGEKTHHSE

SEQ ID NO: 40303 - DNA, 432 bp, Listeria monocytogenes EGD-e
  CDS (1)..(432): transl_table=11
ttgaagaaaatgatggtaatgggttcagttggttgtggtaaaacaacgctgtgccagaaattgcatgggtatgatattttatataaaaaaacacaagctgtggagtattttcaagaaatgattgatactcctggtgaatttgtacaacatagacaactctacagcgcgctcaccgtgactgcagctgatgcatcagtaatcgctattttacagagtgtaacggaaaagaaacagacgttttcgccaatgtttgccagtatttttgctaaaccggttattgggattgttacaaaagtggatttggcagaatcggataaagacattgaacgagcagagcgagaattacgcatggctggcgcgaagcatattttttatatttcttcggtagaggaaactggaatagaagaactacgcgcatatttggaagattaa

SEQ ID NO: 40304 - protein, 143 aa, Listeria monocytogenes EGD-e
MKKMMVMGSVGCGKTTLCQKLHGYDILYKKTQAVEYFQEMIDTPGEFVQHRQLYSALTVTAADASVIAILQSVTEKKQTFSPMFASIFAKPVIGIVTKVDLAESDKDIERAERELRMAGAKHIFYISSVEETGIEELRAYLED

SEQ ID NO: 40305 - DNA, 435 bp, Clostridium perfringens str. 13
  CDS (1)..(435): transl_table=11
atgggaagagtaatatttatgggtaagacaggatgtggaaaaacaaccttatgtcaagccttaaacaatctagaaataaaatataagaaaactcaagccatagaactttatgataatgccatagatactccaggagaatatatggaaaacaggggatactatactgctttaatagttacagcagcagatgctgatattatagctttagtatatgattgtacctcagaggaaaattatattgctccagggtttgcaagtatgttttgcaaagaagttataggtattatcacaaagataaatctagctaaggacaagtcagaaatagaagtagcagaagagagattaaatttagctggagtaagtaaaatatttaaagttgatacagtagatgatgtaggaattaaagagttatttaattatctaaacaaattttaa

SEQ ID NO: 40306 - protein, 144 aa, Clostridium perfringens str. 13
MGRVIFMGKTGCGKTTLCQALNNLEIKYKKTQAIELYDNAIDTPGEYMENRGYYTALIVTAADADIIALVYDCTSEENYIAPGFASMFCKEVIGIITKINLAKDKSEIEVAEERLNLAGVSKIFKVDTVDDVGIKELFNYLNKF

SEQ ID NO: 40307 - DNA, 438 bp, Fusobacterium nucleatum subsp. nucleatum ATCC 25586
  CDS (1)..(438): transl_table=11
atgaaaaaaataatgttaataggtaggacaagttgtggaaaaactactttaacacaaaaattaatgaatgaggaagtaaaatataaaaagacacaggcagttacatataaaagtaaaattatagatactcctggggaatatgttgaaaataaaatgtattataagtcattattggtattatcagcagatgctaagataatagttttagtacaatcagctatagatggagcaacattgtttccaccaaagttttcaactatgtttcctaaaaaagaagttataggtttagtgactaaaatagatttagcagatgctgatatagaaagaagtaaaaggtttttagtggaagcaggagcaacagaggtatttacaattggtcttaatgatgaaaaaggcttggaagcaattaaaaaaaggttggtaatgaatgagtcttag

SEQ ID NO: 40308 - protein, 145 aa, Fusobacterium nucleatum subsp. nucleatum ATCC 25586
MKKIMLIGRTSCGKTTLTQKLMNEEVKYKKTQAVTYKSKIIDTPGEYVENKMYYKSLLVLSADAKIIVLVQSAIDGATLFPPKFSTMFPKKEVIGLVTKIDLADADIERSKRFLVEAGATEVFTIGLNDEKGLEAIKKRLVMNES

SEQ ID NO: 40309 - DNA, 480 bp, Escherichia coli CFT073
  CDS (1)..(480): transl_table=11
atgaaacgaattgcgtttgtggggaccgtcggggcaggaaaaacaacgttatttaatgcgttgcaggggaattataccctcgcaagaaaaacacaggccgtggaatttaatgataatggcgatattgatacgccgggtgaatattttagccatccccgctggtatcacgccttaattaccacgctacaggatgtggacatgctgatctatgtccacggcgagaatgacccggaaagtcggttgcctgccgggttgctggatattggcgtcagcaaacggcaaatcgccgtcatcagtaaaacggacatgccagatgctgacgtcgccgcaacgcgaaagttattgcttgagacgggcttcgaagagccgattttcgagctaaacagccacgacccgcaaagcgtgcagcaactggtggattatctggcatctctcaccaaacaggaggaagcaggtgaaaaaactcatcacagcgaatga

SEQ ID NO: 40310 - protein, 159 aa, Escherichia coli CFT073
MKRIAFVGTVGAGKTTLFNALQGNYTLARKTQAVEFNDNGDIDTPGEYFSHPRWYHALITTLQDVDMLIYVHGENDPESRLPAGLLDIGVSKRQIAVISKTDMPDADVAATRKLLLETGFEEPIFELNSHDPQSVQQLVDYLASLTKQEEAGEKTHHSE

SEQ ID NO: 40311 - DNA, 435 bp, Clostridium tetani E88
  CDS (1)..(435): transl_table=11
atgaaaaaaataatgttgataggaactattggagcagggaaaaccacattagctcaagctctaaaaaatgagcttatagaatataaaaaaacacagtcaatagaatttgacgattatataatagatactccaggagagtatattgaaaataaagtatattataatgcgctaatatcaacagcagtagacgcagatgtaattgcattagttcatgattctactaaggagaataatagtttcccaccgggatttggaaacatgtttaacaaagaagttataggtatttgtactaaaactgatttatgccaaaaagaagaaaacttaaaaataagcaaagaatatttatcctcagcaggagcccataacatattttgtataagtgctgcaaataatataggaattgaggaattaaaagaatatttagagttaaattaa

SEQ ID NO: 40312 - protein, 144 aa, Clostridium tetani E88
MKKIMLIGTIGAGKTTLAQALKNELIEYKKTQSIEFDDYIIDTPGEYIENKVYYNALISTAVDADVIALVHDSTKENNSFPPGFGNMFNKEVIGICTKTDLCQKEENLKISKEYLSSAGAHNIFCISAANNIGIEELKEYLELN

SEQ ID NO: 40313 - DNA, 444 bp, Enterococcus faecalis V583
  CDS (1)..(444): transl_table=11
atgaaacgaatcattttaatgggagctatcggttgtggcaaaaccacgttatgtcaagctctgcaaggcaaagaattaatttatgataaaacacaggcggtggaatttcatacagaaatgattgatacaccaggcgagtttattttgcatcgacaatattataatgcattaaacgtcacagcggcagaagcagatgtgattggtttggttcaaagtgctgtagaaacacaacaagttttttcaccaggatttggtagtattttcccgaaagaaatcattggtattttaaccaagattgatttagcacaagattctcagcagttagagattgttcggcaacaattaaaaagtgcgggtgcaacaagaatttttgaaatttcttctgttgaaaaaattggcttgcaagaattagtagattatttagaggaggatgaagcagaatga

SEQ ID NO: 40314 - protein, 147 aa, Enterococcus faecalis V583
MKRIILMGAIGCGKTTLCQALQGKELIYDKTQAVEFHTEMIDTPGEFILHRQYYNALNVTAAEADVIGLVQSAVETQQVFSPGFGSIFPKEIIGILTKIDLAQDSQQLEIVRQQLKSAGATRIFEISSVEKIGLQELVDYLEEDEAE

SEQ ID NO: 40315 - DNA, 423 bp, Desulfovibrio desulfuricans G20
  CDS (1)..(423): transl_table=11
atgaagaaagtcatgcttatcggtgagaccggagcgggcaaaagttcgcttatccgggcgctgtccggcggggaatttgttccccgcaggggtatggctgtggaatactacggccggtttatcaacaccccaggcgagtttctggaaaaccgccggttttactatgcgcttatcaccaccgcggcggactgcgacctgctgctgatggttcaggacgccacacgcagcacgtctctttttcccccgcgtttcgctcccatctttaaccgcagggtggtgggtgtcatttctaaaagcgatgcctccgaagcccgtttttcccgtgcggagcagtttctgctcagtgcgggggcgcgcgagattgtccgcgccagtgttgtttctccggacggactggatgccctgaaaacagttctctcctga

SEQ ID NO: 40316 - protein, 140 aa, Desulfovibrio desulfuricans G20
MKKVMLIGETGAGKSSLIRALSGGEFVPRRGMAVEYYGRFINTPGEFLENRRFYYALITTAADCDLLLMVQDATRSTSLFPPRFAPIFNRRVVGVISKSDASEARFSRAEQFLLSAGAREIVRASVVSPDGLDALKTVLS

SEQ ID NO: 40317 - DNA, 444 bp, Desulfitobacterium hafniense Y51
  CDS (1)..(444): transl_table=11
atgcatgattcaaaaatattgctgatcggcggcgttggaacaggcaaaacgacccttaaacaagctttaagcgatctgcccctgatctatcaaaaaacccaagcactgaactttagtgaagtttttatcgattgtcctggggagtatctggagattccccgttactatcatgtgattatcgatctcagccatcaagtttcggaaatttgggcgctgcaggatgctacgaagacttacttaacttatcctccgaagtttgtccgcgtttttcgtaaaccggtcatcggcgtgatcactaagatcgatttaccccaggccaatttagaagctgcccgctctttcttgaacaatgcagggattgctcagcccttttatgagatctcggctctccataaaaagaatatccagatcctaagaactaggattgagtgtttaactaagtaa

SEQ ID NO: 40318 - protein, 147 aa, Desulfitobacterium hafniense Y51
MHDSKILLIGGVGTGKTTLKQALSDLPLIYQKTQALNFSEVFIDCPGEYLEIPRYYHVIIDLSHQVSEIWALQDATKTYLTYPPKFVRVFRKPVIGVITKIDLPQANLEAARSFLNNAGIAQPFYEISALHKKNIQILRTRIECLTK

SEQ ID NO: 40319 - DNA, 429 bp, Lactobacillus reuteri
  CDS (1)..(429): transl_table=11
atgaaaaggactatgtttattggtgcaatcgcttgtggaaaaacaacacttacccaacgtttagaacatcagcaaattagatataacaaaacgcaagctgttgagttcacttcaaatattattgacacaccaggtgaatacatggaacatcacaatatgatgagcacgctccgtgtaacttcaatggatgcggatatcgtggttttattgcaaagcgctgttgataagcgattggttttccctgctggtttctgctcaatgtttagtaagccaacaatcggcgttattactaaaattgatttggtaaatgacccagctgatattgaatattcaaaaaaactattgcttagtgccggagtcaaaaaggttatccccatctccgccgttaaaaatatcaatatcgataaattgcttgcagaacttaactaa

SEQ ID NO: 40320 - protein, 142 aa, Lactobacillus reuteri
MKRTMFIGAIACGKTTLTQRLEHQQIRYNKTQAVEFTSNIIDTPGEYMEHHNMMSTLRVTSMDADIVVLLQSAVDKRLVFPAGFCSMFSKPTIGVITKIDLVNDPADIEYSKKLLLSAGVKKVIPISAVKNINIDKLLAELN

SEQ ID NO: 40321 - DNA, 450 bp, Heliobacillus mobilis
  CDS (1)..(450): transl_table=11
atgaaaaaggtcatgatggtcggcgccgttggagcaggaaagaccactctcttgcaagcgttacaagggaaggaaacggaaaaagccgcaaaaacccaaatgatccgctatgacagcgggatgatcgatacccccggtgaatacgcccaatcacctcgattctactcagccctacaagttaccgcgatggacgcagccgtcattcttctcattcaagatgcaacaaaattaagcgtgtctgttcccccgggtttcgccggtttgttctcttgtcccgtcatcggtgtcgtcacaaaagtagaccacccggcggctgatcagcagacggcaacagtccgcctacaggctgcaggcatcaaagaaattctgttctttgtctctgcgatgactggggaggggctgggggaattacatacatacctcgctgaaagggggtgcaaccatgagtga

SEQ ID NO: 40322 - protein, 149 aa, Heliobacillus mobilis
MKKVMMVGAVGAGKTTLLQALQGKETEKAAKTQMIRYDSGMIDTPGEYAQSPRFYSALQVTAMDAAVILLIQDATKLSVSVPPGFAGLFSCPVIGVVTKVDHPAADQQTATVRLQAAGIKEILFFVSAMTGEGLGELHTYLAERGCNHE

SEQ ID NO: 40323 - DNA, 23 bp, Artificial sequence
  primer
atgaaacgaattgcgtttgtggg

SEQ ID NO: 40324 - DNA, 27 bp, Artificial sequence
  primer
ttattcgctgtgatgagttttttcacc

SEQ ID NO: 40325 - protein, 145 aa, Artificial sequence
  consensus sequence
  Variant (3)..(7): Xaa in position 3 to 7 is any amino acid
  Variant (9)..(10): Xaa in position 9 to 10 is any amino acid
  Variant (12)..(12): Xaa in position 12 is any amino acid
  Variant (18)..(20): Xaa in position 18 to 20 is any amino acid
  Variant (22)..(29): Xaa in position 22 to 29 is any amino acid
  Variant (30)..(30): Xaa in position 30 is any or no amino acid
  Variant (35)..(41): Xaa in position 35 to 41 is any amino acid
  Variant (42)..(42): Xaa in position 42 is any or no amino acid
  Variant (49)..(55): Xaa in position 49 to 55 is any amino acid
  Variant (57)..(58): Xaa in position 57 to 58 is any amino acid
  Variant (60)..(61): Xaa in position 60 to 61 is any amino acid
  Variant (63)..(64): Xaa in position 63 to 64 is any amino acid
  Variant (66)..(94): Xaa in position 66 to 94 is any amino acid
  Variant (95)..(95): Xaa in position 95 is any or no amino acid
  Variant (97)..(100): Xaa in position 97 to 100 is any amino acid
  Variant (102)..(102): Xaa in position 102 is any amino acid
  Variant (104)..(115): Xaa in position 104 to 115 is any amino acid
  Variant (116)..(117): Xaa in position 116 to 117 is any or no amino acid
  Variant (119)..(121): Xaa in position 119 to 121 is any amino acid
  Variant (123)..(139): Xaa in position 123 to 139 is any amino acid
  Variant (140)..(140): Xaa in position 140 is any or no amino acid
  Variant (142)..(144): Xaa in position 142 to 144 is any amino acid
MKXXXXXGXXGXGKTTLXXXLXXXXXXXXXKTQAXXXXXXXXIDTPGEXXXXXXXYXXLXXTXXDXXXXXXXXXXXXXXXXXXXXXXXXXXXXXXIXXXXKXDXXXXXXXXXXXXXXLXXXGXXXXXXXXXXXXXXXXXXLXXXL

SEQ ID NO: 40326 - protein, 26 aa, Artificial sequence
  protein pattern
  Variant (7)..(13): Xaa in position 7 to 13 is any or no amino acid
  Variant (15)..(15): Xaa in position 15 is any amino acid
  Variant (16)..(16): Xaa in position 16 is Ala or Glu
  Variant (17)..(22): Xaa in position 17 to 22 is any amino acid
  Variant (23)..(23): Xaa in position 23 is Ala, Asp, Glu, Ser or Thr
  Variant (24)..(24): Xaa in position 24 is Ala, Leu or Val
  Variant (25)..(25): Xaa in position 25 is any amino acid
  Variant (26)..(26): Xaa in position 26 is Met or Val
IDTPGEXXXXXXXYXXXXXXXXXXXX

SEQ ID NO: 40327 - protein, 21 aa, Artificial sequence
  protein pattern
  Variant (2)..(2): Xaa in position 2 is any amino acid
  Variant (3)..(3): Xaa in position 3 is Lys or Arg
  Variant (4)..(5): Xaa in position 4 to 5 is any amino acid
  Variant (6)..(6): Xaa in position 6 is Phe, Leu, Met or Val
  Variant (7)..(7): Xaa in position 7 is Ile, Met or Val
  Variant (9)..(10): Xaa in position 9 to 10 is any amino acid
  Variant (11)..(11): Xaa in position 11 is Ala, Gly or Ser
  Variant (12)..(12): Xaa in position 12 is Ala or Cys
  Variant (18)..(18): Xaa in position 18 is any amino acid
  Variant (19)..(19): Xaa in position 19 is Asn or Gln
  Variant (20)..(20): Xaa in position 20 is any amino acid
MXXXXXXGXXXXGKTTLXXXL

SEQ ID NO: 40328 - protein, 13 aa, Artificial sequence
  protein pattern
  Variant (2)..(3): Xaa in position 2 to 3 is any or no amino acid
  Variant (5)..(5): Xaa in position 5 is Ala, Asp or Gly
  Variant (6)..(6): Xaa in position 6 is Ile, Leu or Val
  Variant (7)..(7): Xaa in position 7 is any amino acid
  Variant (8)..(8): Xaa in position 8 is Ser or Thr
  Variant (10)..(10): Xaa in position 10 is any amino acid
  Variant (11)..(11): Xaa in position 11 is Asp or Asn
  Variant (12)..(12): Xaa in position 12 is Leu or Met
  Variant (13)..(13): Xaa in position 13 is Ala, Cys, Pro or Val
KXXIXXXXKXXXX

SEQ ID NO: 40329 - DNA, 2016 bp, Escherichia coli
  CDS (1)..(2016): transl_table=11
atggctgaactgactgcgcttcacacattaacagcgcaaatgaaacgtgaagggatccgccgcttgctggtgttgagcggggaagagggttggtgttttgagcatactcttaagttgcgtgatgccttacctggcgactggctgtggatttcgccgcggccagatgctgaaaaccactgttctccctcggcactacaaactttacttgggcgcgagttccggcatgcggtattcgacgcccgccacggctttgatgccgctgcctttgccgcacttagcggaacgttgaaagcgggaagctggctggttttgttactccctgtatgggaagagtgggaaaaccaacctgatgccgactcgctgcgctggagtgattgccctgaccctattgcgacgccgcattttgtccagcatctcaaacgcgtacttacggcggataacgaggctatcctctggcggcaaaaccagccattctcgttggcgcattttactccccgtactgactggtaccccgcgactggcgcaccacaaccagaacaacagcaactcttaaagcagctaatgaccatgccgccgggcgtggcagcggtaacggctgcgcgtgggcgcggtaagtcggcgttggcagggcaactcatttctcgtattgcgggcagagcgattgtcaccgcgcccgcaaaagcgtcaacggatgtactggcacaatttgcgggcgagaagtttcgctttattgcgccggatgccttgttagccagcgatgagcaagccgactggctggtggtcgatgaagccgcagccatacctgcgccattgttgcatcaactggtatcgcgttttcctcgaacgttgttaaccactacggtgcagggctacgaaggcaccggacgtggttttttgctgaaattttgcgctcgctttccgcatttacaccgttttgaactgcaacagccgatccgctgggcgcagggatgcccgctggaaaaaatggtcagcgaggcactggtttttgacgatgaaaacttcacccatacaccacaaggcaatattgtcatttccgcatttgaacagacgttatggcaaagcgatccagaaacgccgttaaaggtttatcagctcttgtctggtgcgcactatcggacttcgccgctggatttacgccggatgatggatgcaccagggcaacattttttacaggcggctggcgaaaacgagattgccggggcgctgtggctggtggatgagggtggattatctcaacaactcagtcaggcggtatgggcaggttttcgtcgcccgcggggtaatctggtggcccagtcgctggcggcgcacggcaacaatccactggcggcgacattgcgtggacggcgggtcagccggatagcagttcatccggctcgtcagcgggaaggcacagggcggcaacttattgctggtgctttgcaatatacgcaagacctcgactatctttcggtgagttttggttacaccggggagttatggcgtttctggcaacgctgcggttttgtgctggtgcggatgggtaatcatcgggaagccagcagcggttgctatacggcgatggcgctgttaccgatgagtgatgcgggtaaacagctggctgaacgtgagcattaccgtttacgtcgcgatgcgcaagctctcgcgcagtggaatggcgaaacgcttcctgttgatccactaaacgatgccgtcctttctgacgacgactggcttgaactggccggttttgctttcgctcatcgtccgctattaacgtcgttaggttgcttattgcgtctgttacaaaccagtgaactggcattaccggcgctgcgtgggcgtttacagaaaaacgccagtgatgcgcagttatgtaccacacttaaactttcaggccgcaagatgttactggtccgtcagcgggaagaggccgcgcaggcgctgttcgcacttaatgatgttcgcactgagcgtctgcgcgatcgcataacgcaatggcaattatttcactaa

SEQ ID NO: 40330 - protein, 671 aa, Escherichia coli
MAELTALHTLTAQMKREGIRRLLVLSGEEGWCFEHTLKLRDALPGDWLWISPRPDAENHCSPSALQTLLGREFRHAVFDARHGFDAAAFAALSGTLKAGSWLVLLLPVWEEWENQPDADSLRWSDCPDPIATPHFVQHLKRVLTADNEAILWRQNQPFSLAHFTPRTDWYPATGAPQPEQQQLLKQLMTMPPGVAAVTAARGRGKSALAGQLISRIAGRAIVTAPAKASTDVLAQFAGEKFRFIAPDALLASDEQADWLVVDEAAAIPAPLLHQLVSRFPRTLLTTTVQGYEGTGRGFLLKFCARFPHLHRFELQQPIRWAQGCPLEKMVSEALVFDDENFTHTPQGNIVISAFEQTLWQSDPETPLKVYQLLSGAHYRTSPLDLRRMMDAPGQHFLQAAGENEIAGALWLVDEGGLSQQLSQAVWAGFRRPRGNLVAQSLAAHGNNPLAATLRGRRVSRIAVHPARQREGTGRQLIAGALQYTQDLDYLSVSFGYTGELWRFWQRCGFVLVRMGNHREASSGCYTAMALLPMSDAGKQLAEREHYRLRRDAQALAQWNGETLPVDPLNDAVLSDDDWLELAGFAFAHRPLLTSLGCLLRLLQTSELALPALRGRLQKNASDAQLCTTLKLSGRKMLLVRQREEAAQALFALNDVRTERLRDRITQWQLFH

SEQ ID NO: 40331 - DNA, 1956 bp, Pasteurella multocida subsp. multocida str. Pm70
  CDS (1)..(1956): transl_table=11
atgaatcgggtaaataagcaaagaaaagtacaatgttgggtgggggagaatgctacattatttcccccactcgcacgcttatctggaataaaaagtgcggtatggattggcgatgatttaccgccttttttgtcttttgctcatttcgatttcaagcaagcaaaaaacatgttggggcaagagtttgccttgattgtctatgatgcaaggggagggctgaatcttgatgccttagctatcgccagtggcactttgcaacaagacggtgtgttgctgattttattaccacaatgggcgatgctgagcacttggcaagatcctgattccgtccgttggtctggtgaaaatgatcctattttgacaccgcactttctacattattttcaacaaaaagtacgagactacggctttccggtttatcatacttttttcccttcgctatcattgccggataaatcaaccagtgcggtcgattttcaatcagaaccgacagtggaacaagcacagttactgcaccgtatcaacaaggctactgaagcggtattgattgtgacggcgaagcggggtcgaggaaaatcggcgctagcaggtttttgggcaaggcagttgaagcaacaaaaccaaacattgatattaactgcaccgaataaagcggctgtcaggattttacaagcgtttgctaatacggcgttagatttcaagtcaccagatttactttgtgagcaaattgcacaagatccccatgcgtttgctgataaatggttattgattgatgaagcggctatgctccctttaagtttgttagaactgctgacatcaacctttaaaggcatactctgtaccactacgatacaaagttacgaagggaccgggcgtggttttttactcaaatttttagccaatttagaccgcacttttgcgcattttgagcttcaccagcctctacgttggcaagttgatgataagttagaagcctttatggatgatctcttattgctacatgcggaagatttgccttttgccccattggcgtcagctgaaggcgttcaatttcagcgctattcacaacatacattatatcagcaacaaaaaattgctccgctttatggtttactgacgcgtgcccattaccgtacgtcaccactggatttacgccgtttgtttgatgcgccaaatcaacatttttatttagcacaaaaagacgaacatcttcttggtgccgcttggcttgtgcaagagggaagtctgcaatcagaacaacttattggtgagattgagcgcggtttgcgccgtcctcgtggcaatttagtgcctcaattactgtgttttcaagcgcatttaccgcaagcctgccgtttatcctcattgcggatttcccgtattgctgttcagccaaattggcaacagcaaggtattgggcaacagttagtcaaaaatatttgccaagatgcacaggtggattttttgtccgtcagttttggttacaccactaagttggctgcattttggcaaaagtgcggttttttattggtgcatttaggtgaacagaaagaagccagtagcggttgttactctgtaatcggcttaaaaccgttgtcgtccgcagggataagcttttgtcagcaagcgtaccaacagttccaacgtaatctcagtttatcgcgacactccctcgcgacggcgttcccttctttgccctccacatggcaattagatccgcaagattggcgtgcattagtacattttgcttattttcaaggctcatttacagccgccttacctgcgatacaacgtttgttggcacaaactaacaggtgcatttgtccgttattatctgccctgttacaaccgtcatcaaacgagatgaaatttgtgggaggcaagaaaaatgggataaaaatatgccgtgaggaagtcaagaaattgttgcaaaatcatacagccgttttatcataa

SEQ ID NO: 40332 - protein, 651 aa, Pasteurella multocida subsp. multocida str. Pm70
MNRVNKQRKVQCWVGENATLFPPLARLSGIKSAVWIGDDLPPFLSFAHFDFKQAKNMLGQEFALIVYDARGGLNLDALAIASGTLQQDGVLLILLPQWAMLSTWQDPDSVRWSGENDPILTPHFLHYFQQKVRDYGFPVYHTFFPSLSLPDKSTSAVDFQSEPTVEQAQLLHRINKATEAVLIVTAKRGRGKSALAGFWARQLKQQNQTLILTAPNKAAVRILQAFANTALDFKSPDLLCEQIAQDPHAFADKWLLIDEAAMLPLSLLELLTSTFKGILCTTTIQSYEGTGRGFLLKFLANLDRTFAHFELHQPLRWQVDDKLEAFMDDLLLLHAEDLPFAPLASAEGVQFQRYSQHTLYQQQKIAPLYGLLTRAHYRTSPLDLRRLFDAPNQHFYLAQKDEHLLGAAWLVQEGSLQSEQLIGEIERGLRRPRGNLVPQLLCFQAHLPQACRLSSLRISRIAVQPNWQQQGIGQQLVKNICQDAQVDFLSVSFGYTTKLAAFWQKCGFLLVHLGEQKEASSGCYSVIGLKPLSSAGISFCQQAYQQFQRNLSLSRHSLATAFPSLPSTWQLDPQDWRALVHFAYFQGSFTAALPAIQRLLAQTNRCICPLLSALLQPSSNEMKFVGGKKNGIKICREEVKKLLQNHTAVLS

SEQ ID NO: 40333 - DNA, 2016 bp, Escherichia coli O157:H7 EDL933
  CDS (1)..(2016): transl_table=11
  misc_feature (1700)..(1700): s is g or c
  misc_feature (1702)..(1702): s is g or c
atggctgaactgactgcgcttcacacattaacagcgcaaatgaaacgtgaagggatccgccgcttgctggtgttgagcggggaagagggttggtgttttgatcatgcgcttaagttacgtgatgccttacctggcgactggctgtggatttcgccgcagccagatgctgaaaaccactgttctccctcggcactacaaactttacttgggcgcgagttccggcatgcggtattcgacgcccgccacggctttgatgccgctgcctttgccgcacttagcggaacgttgaaagcgggaagctggctggttttgttactccctgtatgggaagagtgggaaaaccaacctgatgccgactcgctgcgctggagtgattgccctgaccctattgcgacgccgcattttgtccagcatttcaaacgcgtacttacggcggataacgacgctatcttctggcggcaaaaccagccgttctcgttggcgcattttactccccgtactgactggcaccccgcgaccggcgcaccacaaccagaacaacagcaaatcttacagcagctactgaccatgccgtcgggcgtggcagcggtaactgctgcgcgtgggcgcggtaaatcggcgctggcagggcaactcatttctcgtattgcgggtagtgcgattatcactgcgcccgcaaaagcggcaacggatgtactggcacaatttgcgggcgagaagtttcgctttattgcgcctgatgccttgttagccagcgatgagcaagccgactggctggtggtcgatgaagccgcagccatacctgcgccgttgttgcatcaactggtatcgcgttttcctcgaacgttgttaaccactacggtgcagggctacgaaggtaccggacgtggttttttgctgaaattttgcgctcgctttccgcatttacaccgttttgaactgcaacagccgatccgctgggcacagggatgcccgctggaaaaaatggttagtgaggcactggtttttaacgatgaaaacttcacccatacaccacaaggcaatatcgtcatttccgcatttgaacaaacgttatggcgaagcgagccagaaacgccgttaaaggtttatcagttattgtctggtgcgcactaccggacttcgccgctggatttacgccgcatgatggatgcaccagggcaacattttttacaggcggctggcgaaaacgagattgccggagcgctgtggctggtggatgaggggggattatctcaagaactcagtcaggcggtatgggcaggttttcgtcgcccgcggggtaatctggtggcccagtcgctggcggcgcacggcagcaatccactggcggcgacattgcgtggacggcgggtcagccggatagcagttcatccggcgcgtcagcgcgaaggcgttgggcaacagctcattgccagcgctttgcaatataggcctggcctcgactatctttcggtgagttttggttacaccggggagttatggcgtttctggcaacgctgcggttttgtgctggtgcgaatgggtaatcatcgtgaagccagcagcggttgctatacggcgatggcgctgttaccgatgagtgatgcgggtaaacagctggctgaacgtgagcattaccgtttacgtcgcgatgcgcaagctctcgcgcagtggaatggcgaaacactccctgttgatcsastaaacaatgccgtcctttctgacgacgactggcttgaactggccggttttgctttcgctcatcgtccgctattaacatcgttaggttgcttattgcgtctgctacaaaccagtgaactggcattaccggcgctgcgtgggcgtttacagaaaaacgtcagcgacgcgcagttatgtaccacacttaaactttcaggccgcaagatgttactggtccgtcagcgggaagaggccgcacaggcgctgttcgcacttaatgatgttcgcactgagcgtctgcgcgatcgcataacgcaatggcaattttttcactga

SEQ ID NO: 40334 - protein, 671 aa, Escherichia coli O157:H7 EDL933
  misc_feature (567)..(567): The Xaa at location 567 stands for Arg, or Pro.
  misc_feature (568)..(568): The Xaa at location 568 stands for Leu, or Val.
MAELTALHTLTAQMKREGIRRLLVLSGEEGWCFDHALKLRDALPGDWLWISPQPDAENHCSPSALQTLLGREFRHAVFDARHGFDAAAFAALSGTLKAGSWLVLLLPVWEEWENQPDADSLRWSDCPDPIATPHFVQHFKRVLTADNDAIFWRQNQPFSLAHFTPRTDWHPATGAPQPEQQQILQQLLTMPSGVAAVTAARGRGKSALAGQLISRIAGSAIITAPAKAATDVLAQFAGEKFRFIAPDALLASDEQADWLVVDEAAAIPAPLLHQLVSRFPRTLLTTTVQGYEGTGRGFLLKFCARFPHLHRFELQQPIRWAQGCPLEKMVSEALVFNDENFTHTPQGNIVISAFEQTLWRSEPETPLKVYQLLSGAHYRTSPLDLRRMMDAPGQHFLQAAGENEIAGALWLVDEGGLSQELSQAVWAGFRRPRGNLVAQSLAAHGSNPLAATLRGRRVSRIAVHPARQREGVGQQLIASALQYRPGLDYLSVSFGYTGELWRFWQRCGFVLVRMGNHREASSGCYTAMALLPMSDAGKQLAEREHYRLRRDAQALAQWNGETLPVDXXNNAVLSDDDWLELAGFAFAHRPLLTSLGCLLRLLQTSELALPALRGRLQKNVSDAQLCTTLKLSGRKMLLVRQREEAAQALFALNDVRTERLRDRITQWQFFH

SEQ ID NO: 40335 - DNA, 2019 bp, Salmonella typhimurium LT2
  CDS (1)..(2019): transl_table=11
atgtctgatatcgatgcgctacaggcgttaacgtcgcaaatgacacaggaaggcattcgccgtttactggtcatcagcggcgatgcggcgtggtgccggaagcgggccgaggcgatacgcgctgcattgcccggtgactggctgtgggtcgcgcctgacgcgcccgcccagccgtgctgtacgccacaggcgttacaaacgctgctgggccgtgaattccgtcatgcgatatttgatgcctggcagggctttgacgccgcagcgtttgccgccctgagcgggaccttgcaggccggaagctggctgcttctgctgatgccgccgtacgagacgtgggaaagcaggcctgataccgattcactgcgctggagcgactgcgcgcagcctatccccacaccgcagtttgcacagcatcttaaacggactctctcccgcgatccgcaaacgctgctttggcgacagcgccagccgttttgctggccatcttatccttcccgtgaatgctggcgacccgccaccggcgagccgcagccggagcaggcggctatcttatcgcgtttacgtgaaatgccgcccggcgtggcgacggtgattgccccccgtgggcgcggcaaatcggcgctggccgggcaattcatctcccggatggcgggcacggctatcgtgaccgcaccggcgaaaacggcaacggatatcctggcagcgtttgccggtgagcggttctgctttatggcgccggatgcgttgctggcgagcggggcaagagccgactggctggtggttgacgaggcggcggcaatccccacgccgctgctgctgcaactggtttcgcgctttccccgcatactactcaccaccaccgttcagggctacgaaggcaccggacgcggttttttacttaagttttgcgcccgttttccgcagcttcaccgcttcacgcttcgtcagcctgtccgctgggcgccagaatgcccgctggaaaatatcgtcagcgaggcgctgatattcgacgatgaagcgtttgcgcaggcgccacatggcgcgatagaaatctcggcgttttaccaacaggcctgggtgaatacgcccgcgttgccgagggctgtgtatcagttactgtcgggggcgcactatcgtacttcgccgctggatctgcgccgaatgatggatgcgccaggacagcatttcttgcaggctacggcgaataaccgtgtggcgggcgccctctggctggtcgaagagggcgggttatccgcagaactcagtcaggctgtatggtgcggtttccggcggccgcgtgggaatctggtggcgcagtcgctggcggcgcacggtagcgaccctttagccgcgacgctggttgggcgtcgcgtaagccgtatcgcagtgcaccccgctcgccagcgtgaaggcatcggtcagcagttgattgcctgcgcgtgcatgcaggcggcgcagtgtgattatctttccgtcagcttcggctatacgccgaagctgtggcgtttctggcaacgctgcggctttgtactggtacggatgggcaaccatcgggaggcgagcagcggttgctatacggcgatggcgttattgccgctgagcgacgcgggaaaacggctggcgcagcaggaacaccggcgtttgcgccgcgatgcggatatcctgacgcagtggaacggcgaggcgataccgctggcggcgttgcgcgaacaggcgcttaatgatgaagactggcgtgagctggtcggttttgcgttcgcgcaccgtccgctactgacatcgttaggttgcctgcatcgtttactgcaatacagcgcattgccattaccggcgctgagagggcggctggaagaaaaagccagcgatgccgaactgtgcgcccggctacgcatttcaggccgtaaagctctgctggcgttgcagcgtgcgcaggcggcgcaggcgctaattgcgttggatgccggacgaacgcagagtttgcgcgacgtaatgcccggcggtggggaccatgccggatag

SEQ ID NO: 40336 - protein, 672 aa, Salmonella typhimurium LT2
MSDIDALQALTSQMTQEGIRRLLVISGDAAWCRKRAEAIRAALPGDWLWVAPDAPAQPCCTPQALQTLLGREFRHAIFDAWQGFDAAAFAALSGTLQAGSWLLLLMPPYETWESRPDTDSLRWSDCAQPIPTPQFAQHLKRTLSRDPQTLLWRQRQPFCWPSYPSRECWRPATGEPQPEQAAILSRLREMPPGVATVIAPRGRGKSALAGQFISRMAGTAIVTAPAKTATDILAAFAGERFCFMAPDALLASGARADWLVVDEAAAIPTPLLLQLVSRFPRILLTTTVQGYEGTGRGFLLKFCARFPQLHRFTLRQPVRWAPECPLENIVSEALIFDDEAFAQAPHGAIEISAFYQQAWVNTPALPRAVYQLLSGAHYRTSPLDLRRMMDAPGQHFLQATANNRVAGALWLVEEGGLSAELSQAVWCGFRRPRGNLVAQSLAAHGSDPLAATLVGRRVSRIAVHPARQREGIGQQLIACACMQAAQCDYLSVSFGYTPKLWRFWQRCGFVLVRMGNHREASSGCYTAMALLPLSDAGKRLAQQEHRRLRRDADILTQWNGEAIPLAALREQALNDEDWRELVGFAFAHRPLLTSLGCLHRLLQYSALPLPALRGRLEEKASDAELCARLRISGRKALLALQRAQAAQALIALDAGRTQSLRDVMPGGGDHAG

SEQ ID NO: 40337 - DNA, 2016 bp, Shigella flexneri 2a str. 301
  CDS (1)..(2016): transl_table=11
atggctgaactgactgcgctttacacattaacagcgcaaatgaaacgtgaagggatctgccgcttgctggtgttgagcggggaagagggttggtgttttgatcatgctcttaagttgcgtgatgccttacctggcgactggctgtggatttcgccgcagctagatgctgaaaaccactgttcaccctcggcgctacaaactttacttgggcgcgagttccggcatgcggtattcgacgcccgccacggctttgatgccgctgcctttgcagcacttagcggaacgttgaaagcgggaagctggctggttttgttactccctgtatgggaagagtgggaaaaccaacctgatgccgactcgctgcgctggagtgattgccctgaccctattgcgacgccgcattttgtccagcatctcaaacgcgtacttacggcggataacgacgctatcctctggcggcaaaaccagccgttctcgttggcgcattttactccccgtactgactggcaccccgcgaccggcgcaccacaaccagaacaacagcaactcttacagcagctactgaccatgccgccgggcgtggcagcggtaacggctgcgcgtgggcgcggtaagtcggcgttggcagggcaactcatttctcgtattgcgggcagtgcgattgtcaccgcgcccgcaaaagcggcaacggatgtactggcacaatttgcgggcgagaagtttcgctttattgcaccggatgccttgttagccagcgatgagcaagccgactggctggtggtcgacgaagccgcagccatacctgcgccgttgttgcatcaactggtatcgcgttttcctcgaacgttgttaaccactacggtgcagggctacgaaggtaccggacgtggttttttgctgaaattttgcgctcgctttccgcatttacaccgttttgaactgcaacagccgatccgctgggcacagggatgcccgctggaaaaaatggttagtgaggcactggtttttaacgatgaaaacttcacccatacaccacaaggcaatatcgtcatttccgcatttgaacaaacgttatggcgaagcgagccagaaacgccgttaaaggtttatcagttattgtctggtgcgcactaccggacctcgccgctggatttacgccggatgatggatgcaccagggcaacattttttacaggcggctggcgaaaacgagattgccggggcgttgtggctggtggatgagggcggattatctcaagaactcagtcaggcggtatgggcaggttttcgtcgcccgcggggtaatctggtggcccagtcgctggcggcgcacggcagcaatccactggcggcgacattgcgcggaaggcgggttagccggatagcagttcatccggctcgtcagcgggaaggcacagggcgacaacttattgctggagctttgcaatatacgcatgacctcgactatctttcggtgagttttggttacactggggagttatggcgtttctggcaacgctgcggttttgtgctggtgcggatgggtaatcatcgggaagccagcagcggttgctatacggcgatggcgctgttaccgatgagtgatgcgggtaaacagctggctgaacgtgagcattaccgtttacgtcgcgatgcgcaagctctcgcgcagtggaatggcgaaatgcttcctgttgatccactaaacgatgccatcctttctgacgacgactggcttgaactggccggttttgctttcgctcatcgtccgctattaacatcgttaggttgcttattgcgtctgctacaaaccagtgaactggcattaccggcgctgcgtgggcgtttacagaaaaacgccagtgacgcgcagttatgtaccacacttaaactttcaggccgcaagatgttactggttcgccagcgggaagaggccgcgcaggcgctgttcgcactaaatgaggttcgcactgagcgtctgcgcgatcgcataacgcaatggcaattttttcactga

SEQ ID NO: 40338 - protein, 671 aa, Shigella flexneri 2a str. 301
MAELTALYTLTAQMKREGICRLLVLSGEEGWCFDHALKLRDALPGDWLWISPQLDAENHCSPSALQTLLGREFRHAVFDARHGFDAAAFAALSGTLKAGSWLVLLLPVWEEWENQPDADSLRWSDCPDPIATPHFVQHLKRVLTADNDAILWRQNQPFSLAHFTPRTDWHPATGAPQPEQQQLLQQLLTMPPGVAAVTAARGRGKSALAGQLISRIAGSAIVTAPAKAATDVLAQFAGEKFRFIAPDALLASDEQADWLVVDEAAAIPAPLLHQLVSRFPRTLLTTTVQGYEGTGRGFLLKFCARFPHLHRFELQQPIRWAQGCPLEKMVSEALVFNDENFTHTPQGNIVISAFEQTLWRSEPETPLKVYQLLSGAHYRTSPLDLRRMMDAPGQHFLQAAGENEIAGALWLVDEGGLSQELSQAVWAGFRRPRGNLVAQSLAAHGSNPLAATLRGRRVSRIAVHPARQREGTGRQLIAGALQYTHDLDYLSVSFGYTGELWRFWQRCGFVLVRMGNHREASSGCYTAMALLPMSDAGKQLAEREHYRLRRDAQALAQWNGEMLPVDPLNDAILSDDDWLELAGFAFAHRPLLTSLGCLLRLLQTSELALPALRGRLQKNASDAQLCTTLKLSGRKMLLVRQREEAAQALFALNEVRTERLRDRITQWQFFH

SEQ ID NO: 40339 - DNA, 2016 bp, Escherichia coli CFT073
  CDS (1)..(2016): transl_table=11
atggctgaactgactgcgcttcacacattaacagcgcaaatgaaacttgaagggatccgccgcttgctggtgttgagcggggaagagcgttggtgttttgatcatgcgcttaagttgcgtgatgccttacctggcgactggctgtggatttcgccgcagccagatgctgaaaaccactgttctccctcggcactacaaactttacttgggcgcgagttccggcatgcggtattcgacgcccgctacggctttgatgccgctgcctttgcggcacttagcggaacgttgaaagcgggaagctggctggtgttgttactccctgtatgggatgagtgggaaaaccaacctgatgccgactcgctgcgctggagtgattgccctgaccctattgcgacgccgcattttgtcctgcacctcaaacgtgtacttacggcgaataacgacgctatcctctggcggcaaaaccagccgttctcgttggcgcattttactccccgtactgactggcaccccgctaccggcgcaccacaaccagaacaacagcaactcttacagcagttactgaccatgccgccgggcgtggcagcggtaactgctgcgcgtgggcgcggtaagtcggcgttggcagggcaactcatttctcgtattgcgggcagtgcgattgtcaccgcgcccgcaaaagcggcaacggatgtactggcacaatttgcgggcgagaagtttcgctttattgcaccggatgccttgttagccagcgatgagcaagccgattggctggtggtcgatgaagccgcagctatacctgcgccgttgttgcatcaactggtatcgcgttttcctcgaacgttgttaaccactacggtgcagggctacgaaggcaccggacgtggttttttgctgaaattttgcgctcgctttccgcatttacaccgttttgaactacaacagccgatccgttgggcgcagggatgcccgctggaaaaaatggttagtgaggcactggtgtttgacgatgaaaacttcacccatacaccacaaggcaatatcgttatttccgcatttgaacagacgttatggcgaagcgagccagaaacgccgttaaaggtttatcaattattgtctggtgcgcactaccggacttcgccgctggatttacgccgcatgatggatgcaccaggtcaacattttttacaggcggctggcgaaaacgagattgccggagcgctgtgtctggtggatgagggtggattatctcaagaactcagtcaggcggtatgggcgggttatcgtcgtccacggggcaatctggtggctcaatcgctggcggcgcacggcagcaatccactggcggcgacattgcgcggacggcgggttagccggatagcagttcatccggctcgtcagcgggaaggcacagggcgacagcttattgctggtgctttgcaatatattcatgacctcgactatctttcggtgagttttggttacaccgaggagttatggcgtttctggcaacgctgcggttttgtgctggtgcgaatgggtaatcatcgtgaagccagcagcggttgctatacggcgatggcgctgttaccgatgagtgatgcgggtaaacaactggctgaacgtgagcattaccgtttacgtcgcgatgcgcaagctctcgcgcagtggaatggcgaaatgcttcctgttgatccactaaacgatgccgtcctttctgacgacgactggcttgaactggccggttttgctttcactcatcgtccgctattaacatcgttaggttgcttattgcgtttgctacaaaccagcgaactggcattaccggcgctgcgtgggcgtttacagaaaaacgccagtgacgcgcagttatgtaccacacttaaactttcaggccgtaagctgttactggttcgccagcgggaagaggccgcgcaggcgctattcgcacttgatgatgttcgcactgagcgtctgcgcgatcgcataacgcaatggcaattttttcactga

SEQ ID NO: 40340 - protein, 671 aa, Escherichia coli CFT073
MAELTALHTLTAQMKLEGIRRLLVLSGEERWCFDHALKLRDALPGDWLWISPQPDAENHCSPSALQTLLGREFRHAVFDARYGFDAAAFAALSGTLKAGSWLVLLLPVWDEWENQPDADSLRWSDCPDPIATPHFVLHLKRVLTANNDAILWRQNQPFSLAHFTPRTDWHPATGAPQPEQQQLLQQLLTMPPGVAAVTAARGRGKSALAGQLISRIAGSAIVTAPAKAATDVLAQFAGEKFRFIAPDALLASDEQADWLVVDEAAAIPAPLLHQLVSRFPRTLLTTTVQGYEGTGRGFLLKFCARFPHLHRFELQQPIRWAQGCPLEKMVSEALVFDDENFTHTPQGNIVISAFEQTLWRSEPETPLKVYQLLSGAHYRTSPLDLRRMMDAPGQHFLQAAGENEIAGALCLVDEGGLSQELSQAVWAGYRRPRGNLVAQSLAAHGSNPLAATLRGRRVSRIAVHPARQREGTGRQLIAGALQYIHDLDYLSVSFGYTEELWRFWQRCGFVLVRMGNHREASSGCYTAMALLPMSDAGKQLAEREHYRLRRDAQALAQWNGEMLPVDPLNDAVLSDDDWLELAGFAFTHRPLLTSLGCLLRLLQTSELALPALRGRLQKNASDAQLCTTLKLSGRKLLLVRQREEAAQALFALDDVRTERLRDRITQWQFFH

SEQ ID NO: 40341 - DNA, 2016 bp, Salmonella enterica subsp. enterica serovar Typhi Ty2
  CDS (1)..(2016): transl_table=11
atgtctgatatcgatgcgctacgggcgttaacgtcgcaaatgacacaggaaggcattcgccgtttactggtcatcagcggcgatgcggcgtggtgccgggaacgggccgaggcgatacgcgctgtattgcccggtgactggtgggtcgcgcctgacgcgcccgcccagccgcgctgtacgccacaggcgttacaaacgctgctgggccgtgaatttcgtcatgcgatatttgatgcctggcagggctttgacgccgcagcgtttgccgccctgagcgggaccttgcaggccggaagttggctgcttctgctgatgccgccgtatgagacgtgggaaagccggcctgataccgattcactgcgctggagcgactgcgcgcagcctatccccacaccgcagtttgcacagcatcttaaacggactctttcccgcgatccgcaaacgctgctttggcgacagcgccagccgttttgctggccatcttatccttcccgcgaacgctggcgacccgccaccggcgagccgcagccggagcaggcggctatcttatcgcgtttacgtgaaatgccgcccggcgtggcgacggtgattgccccccgtgggcgcggcaaatcggcgctggccgggcaattcatctcacagatggcgggcacggctatcgtgaccgcaccggcgaaaacggcaacggatatcctggcagcgtttgccggtgagcggttctgctttatggcgccggatgcgctgctggcgagcggggcaagagccgactggctggtggttgacgaggcggcggcaatccccgcgccgctgctgctgcaactggtttcgcgctttccccgcatactactcaccaccaccgttcagggctacgaaggcaccggacgcggttttttacttaagttttgcgcccgttttccgcagcttcaccgctttacgcttcgtcagcctgtccgctgggcgccagaatgcccgctggaaaatatcgtcagcgaggcgctgatattcgacgatgaagcgtttgcgcaggcgccgcatggcgggatagcaatctcggcattttaccagcaggcctgggggaagacgcccgcgttgccgagggctgtgtatcagttactgtcgggggcgcactatcgtacttcgccgttggatctgcgccgaatgatggatgcgccaggacagcatttcttgcaggctacggcgaataaccgtgtggcgggcgccctctggctggtcgaagagggcgggttatccgcagagctcagtcaggctgtatggtgcggtttccggcgtccgcgtggaaatctggtggcgcagtcgctggcggcgcacggtagcgaccctttagccgcgacgctggtcgggcgtcgcgtaagccgtatcgcggtgcaccccgcccgtcagcgcgaaggcatcggtcagcagttgattgcctgcgcgtgcgagcaggcggcgcagtgtgattatctttccgtcagcttcggctatacgccggagctgtggcgcttctggcaacgctgcggctttgtgctggtacggatgggcagccatcgggaggcgagcagcggttgctatacggcgatggcgttattgccgctgagcgacgcgggacaacggctggcgcaacaggaacaccgacgtttgcgccgcgatgcggatatcctgacgcagtggaacggcgaggcgataccgctggcggcgttgcgcgaacaggcgcttaatgatgaagactggcgtgagctggtcggttttgcgttcgcgcaccgcccgctactgacatcgttaggttgcctgcatcgtttactgcaatacagcgcattgccattgccggcgctgagagggcggctggaggaaaaagccagcgatgccgaactgtgcgcccggctacgcatttcaggccgtaaagctctgctggcgttgcagcgtgcgcaggcggcgcaggcgctaattgcgttggatgccggacgaacgcagcgtttgcgcgacgtaatgccaggcggtggggaccatgccggatag

SEQ ID NO: 40342 - protein, 671 aa, Salmonella enterica subsp. enterica serovar Typhi Ty2
MSDIDALRALTSQMTQEGIRRLLVISGDAAWCRERAEAIRAVLPGDWWVAPDAPAQPRCTPQALQTLLGREFRHAIFDAWQGFDAAAFAALSGTLQAGSWLLLLMPPYETWESRPDTDSLRWSDCAQPIPTPQFAQHLKRTLSRDPQTLLWRQRQPFCWPSYPSRERWRPATGEPQPEQAAILSRLREMPPGVATVIAPRGRGKSALAGQFISQMAGTAIVTAPAKTATDILAAFAGERFCFMAPDALLASGARADWLVVDEAAAIPAPLLLQLVSRFPRILLTTTVQGYEGTGRGFLLKFCARFPQLHRFTLRQPVRWAPECPLENIVSEALIFDDEAFAQAPHGGIAISAFYQQAWGKTPALPRAVYQLLSGAHYRTSPLDLRRMMDAPGQHFLQATANNRVAGALWLVEEGGLSAELSQAVWCGFRRPRGNLVAQSLAAHGSDPLAATLVGRRVSRIAVHPARQREGIGQQLIACACEQAAQCDYLSVSFGYTPELWRFWQRCGFVLVRMGSHREASSGCYTAMALLPLSDAGQRLAQQEHRRLRRDADILTQWNGEAIPLAALREQALNDEDWRELVGFAFAHRPLLTSLGCLHRLLQYSALPLPALRGRLEEKASDAELCARLRISGRKALLALQRAQAAQALIALDAGRTQRLRDVMPGGGDHAG

SEQ ID NO: 40343 - DNA, 2049 bp, Photorhabdus luminescens subsp. laumondii TTO1
  CDS (1)..(2049): transl_table=11
atgttgccagaattgagtgtgatacagactgaaatgcagcagcaagggttacgtcgtttgctggtgttgagtggagatgatcattggtgctatttacaggctaatgaattacagcggagatttatcggtgattggttatggatctctcatcgtaaacagcacgctgtgttgccagaaaaggcggtcagtttattaggtcaggaatatctgcacggaatatttgatgctaccgaaggttttaatgcggaagcactggcgatattggcaggtacattgaaagctggaagttggttggtgatgatggttccatcttggtaccaatggcgtgatcaacccgataaggatagcgcgcgttggaacgaacagttagaggcgattccaacaccgcattttgttcagcatattcagcagcaaattgttagcgatccccaagttttactatggcggcaaaatgatcccttatgcatccctgtatttccacaatacagcgcgtggcaactgcctaatggcagcccaacagccagccagcatgccattttggcgcgacttttgcgggcaagtcagggggtatgggttattactgcgccaagagggcgaggtaaatcgacacttgcaggtatgttaatgcagcaatggcaaggaaattgttggttaactgcaccggcgaaggcaacaacagcagtcattaggtgctatgcgggggaaaagggaaaattctgggccgtagataatttgctcaaatattgtagacaaaatagcgtgtcagatattgattggttgcttatcgatgaagccgctgctattccaatgcctcaattatctgaattaatcggctattttccccgcatattgttgaccacaacggtacagggatatgaaggcacagggcgcggatttttacttaaattttgcgttgggcttcctgatcgtcatgtcctgaacctgacagctcctgtgcgttgggcggaaaatgatccgctggaaaattggttggaaagcgctttactgtttgaggatgcaattcctgtcaacaattctgatcaggcgatcagttatcaggtctatcatcagcagcaatggattaaacagcctgaattactgaggcagttttacggcatattaaccagtgctcactacaaaacttcacctttggatttacggcgtttacttgatgctaaaggcatgcaatttgttgcggctcttggaaataatgccttgatgggggctttgtggatggttgaagagggtgggttgacgcttgagttagcccatgaaatatgggcaggcaggcgtcgtccaagaggaaatttggttgttcaatcgttagctgcccatagcggtttaccgcaggcggcggttttgaaatctcaacggatcagcagagttgctgtacaggctaatcatcgcaggcacggtattgctcagggaatgatcgcgtatcaacgggaaagggcagaaaaacagggggtggattttatttctgttagctttggttataccgcggagctctgggcattgtggcagaaatgtggcttccaattagtgcgaatgggaactcatttagaagccagcagtggttgttatacggcaatggctatttttcccctgagtgaacaagggattttgctggggattcaagctcagcaacagcttgcccgtgatgcatattggctggaattgcagattggatttagcttgcctgttgattaccaaactgaccatcatctcaatcaacatgattggcaggaactgtcaggttttgcatttgctcaccgaccattttctgcttcattaccgtccttgcaacggttgttgctgaacagtgatttgccgttgattgcgctgagaaatcatctccagcaggaaatgcgtgttgagcaatgcatcaccgtattgcagttgagtggatataaggcattaatgcgactctggcggcaagaaaccgcacaggcgttatcaagtctggataagaaacttgccaaagattggcaagagtggactacggctttttttgaggccaatcatcttcatcatcccacttgctattaa

SEQ ID NO: 40344 - protein, 682 aa, Photorhabdus luminescens subsp. laumondii TTO1
MLPELSVIQTEMQQQGLRRLLVLSGDDHWCYLQANELQRRFIGDWLWISHRKQHAVLPEKAVSLLGQEYLHGIFDATEGFNAEALAILAGTLKAGSWLVMMVPSWYQWRDQPDKDSARWNEQLEAIPTPHFVQHIQQQIVSDPQVLLWRQNDPLCIPVFPQYSAWQLPNGSPTASQHAILARLLRASQGVWVITAPRGRGKSTLAGMLMQQWQGNCWLTAPAKATTAVIRCYAGEKGKFWAVDNLLKYCRQNSVSDIDWLLIDEAAAIPMPQLSELIGYFPRILLTTTVQGYEGTGRGFLLKFCVGLPDRHVLNLTAPVRWAENDPLENWLESALLFEDAIPVNNSDQAISYQVYHQQQWIKQPELLRQFYGILTSAHYKTSPLDLRRLLDAKGMQFVAALGNNALMGALWMVEEGGLTLELAHEIWAGRRRPRGNLVVQSLAAHSGLPQAAVLKSQRISRVAVQANHRRHGIAQGMIAYQRERAEKQGVDFISVSFGYTAELWALWQKCGFQLVRMGTHLEASSGCYTAMAIFPLSEQGILLGIQAQQQLARDAYWLELQIGFSLPVDYQTDHHLNQHDWQELSGFAFAHRPFSASLPSLQRLLLNSDLPLIALRNHLQQEMRVEQCITVLQLSGYKALMRLWRQETAQALSSLDKKLAKDWQEWTTAFFEANHLHHPTCY

SEQ ID NO: 40345 - DNA, 2034 bp, Vibrio vulnificus YJ016
  CDS (1)..(2034): transl_table=11
gtgaagatgaacgcgcaaattgaatctttgatccatattcagcagcacgctgagcaaacaggctggcgagttggggtggtgcttaaagggcctgacaactggcaaatcgcgctggtgcaaggtttgctgtctgagcaatcaccttgctcaattttcgtcatgggggagggcattgccagtgccgatgacgtaacccaatgtgtgtcggtgaagcaaggtcaacgtctgttggggcaagagtgccagttgttggtggtcgattgccgcaagcagtttgatgcaaacagctttagtgcagcctgtggcgcgctatgtggtggtggtatgctgctgttgctggtctctgagcaggcggccaatacgccgtgggagcagtggctcactggccagtttgaacagttgattcaaatgggctgcgatggcatcactcatcagcccgtttggccgccattacccacaaacgcaacagcgcgctttgcgcagcagcaacaagttgttgagcatgttcatcatgtcgtaacgggtcatcgtaagcgcccgttgttgttaaccgctgaccgaggccggggcaaaagcagtgcacttggcattgccagtggccaactgatgaaaacacgcaaaatgcgtattttgctcaccgcgcccacttccgctgcagtcgaacccgttttccaccatgcacagagccaattagatgacgtggtgtggcaacagagcaaaagcaagctagagagtgagaatgcggttctggaattcgtcgcccccgatgatttgctacagcgcttaccgaaatgcgatctcttgttgattgatgaagcggcagccattccattgccgatgctaaaacggatggtggaacactatcaccgtgcggtgttgtcatcgaccattcatggctacgaaggatgtggccgagggtttacggccaagtttttaccttggttgcagagccagcgacctggcatgaaacatcttcatctcaatacgccaattcgttggttgccagacgaccctcttgagttgtggctcaacgacacctttttacttaacgccgaactgccgacaccagagaatgtggtgctggaaaaccttgctttacgtttggtggacaaaagcgaactgttggcgcagccagcacgtttgcgtgcctgttttgcgttgctggtcaacgcccattatcaaacttcaccaaacgacatgatgcagctactgtccgatcccaactgtcaactttggctggcagagtgcaacagtgacgtactgggctgcttactcaccgttgaggaaggggggctagaaagcgctttgattacgcaagtgcagttggggcagcgtcgtccttcaggtcatttaatcgcgatctcactggctaaccatctgggattaaaagccgccgcgcagcaacgctcgcttcgagtcatgcgtattgccgttcatccacagtatcaatcgctcggggtagggcaggctatgttggcgcaacttgaacagcaattagatccgcaagtcgattttctttccaccagttttggcgcaacagagtccttagtgcggttttggctgcatagccaatatcgccctgtgcgtgtcggttttagtcgagatgccgctagcggttgtcacgcggtgatgatggtcaaaccgctgacatcccgtgctgaacattgggtagaaaaagccgagcggatgtttgaacagactttacctgaatggctgagtgcggcattgaatgatctcgaacctgaggtggttcgcgcactgctgccagcgttaggggcaagtgcattgcctccagaggctctttcgttgattcgacactatgcgttgggcggtaacagttttgaaagtgtgctgccttggttaaaacgctgggtgttgatgttggaagccagccaagtggaccaactgttgattcgcaaagtgctgcaaaatcatacttggtctgagtgcgcacaaatggcgggattaccagggcgtaaacaagtcgagctgctattacgccagcatattgcagccttgtgtcacgagcattaa

SEQ ID NO: 40346 - protein, 677 aa, Vibrio vulnificus YJ016
MKMNAQIESLIHIQQHAEQTGWRVGVVLKGPDNWQIALVQGLLSEQSPCSIFVMGEGIASADDVTQCVSVKQGQRLLGQECQLLVVDCRKQFDANSFSAACGALCGGGMLLLLVSEQAANTPWEQWLTGQFEQLIQMGCDGITHQPVWPPLPTNATARFAQQQQVVEHVHHVVTGHRKRPLLLTADRGRGKSSALGIASGQLMKTRKMRILLTAPTSAAVEPVFHHAQSQLDDVVWQQSKSKLESENAVLEFVAPDDLLQRLPKCDLLLIDEAAAIPLPMLKRMVEHYHRAVLSSTIHGYEGCGRGFTAKFLPWLQSQRPGMKHLHLNTPIRWLPDDPLELWLNDTFLLNAELPTPENVVLENLALRLVDKSELLAQPARLRACFALLVNAHYQTSPNDMMQLLSDPNCQLWLAECNSDVLGCLLTVEEGGLESALITQVQLGQRRPSGHLIAISLANHLGLKAAAQQRSLRVMRIAVHPQYQSLGVGQAMLAQLEQQLDPQVDFLSTSFGATESLVRFWLHSQYRPVRVGFSRDAASGCHAVMMVKPLTSRAEHWVEKAERMFEQTLPEWLSAALNDLEPEVVRALLPALGASALPPEALSLIRHYALGGNSFESVLPWLKRWVLMLEASQVDQLLIRKVLQNHTWSECAQMAGLPGRKQVELLLRQHIAALCHEH

SEQ ID NO: 40347 - DNA, 2100 bp, Yersinia pestis biovar Microtus str. 91001
  CDS (1)..(2100): transl_table=11
atgacgaatccaatcgttgccagtcaaccactgatggcgcagcaggggatcaggcgtttgctgatcctcagtggtcaggccgattggtcacggcagcaggcaataatgctacgccagcatctggcaggcgattggctatggttgagcgagcagcctcccgaaggcgtcaacagtatcagtccaacagcggcaagaactctgttggggcaggaaaacttacacggcgtatttgatgcaaccgatgggttaaatatagaagcgctagccatcgtcgcggggaccttgcgggcggggagttggctgctattgctggtgcctgagtgggatgactggccgcagcggccagataaagacagtttgcgctggagtgagcaacccgctccgattgtcacagcgaactttatccgccacttacagcgccagtttttggctgatcccgatgtggtgctgtggcagcaagatcggccactcatattaccagcggttggttctcgcccatgttggcagcagccagacggttcaccaaccgcacagcaacagcatattcttcagcgtctgatgcaggcagatagcggtatttgggtactgacagccgctcgtgggcgcggtaaatcgacacttgccgggatgttagtcacccactggcagggggcgtgttgggtgaccgggccgggtaaagcggccactcaagtgcttaatcaacaagcaggggagcgggccagattttgggcaccagacgcactgttggattattgccaacggcatgatgtcagtgatattgactggttgttgattgatgaagcggcggcgatcccgacaccgctgttatcggcattattggcgtatttcccccgggcattattgaccaccacggtacagggatatgagggcacggggcgtggttttttactgaaattctgcgcgacactgggcgattggcatcatttgacgctgacggatcctatccgctgggccacggatgatcccttggaacgagtgatggataatgccatgttgttccatgatgaattactcggcaatcatcccctaccaaagcggccacctgtggcgcagatcgaaatccccctttatgaacaacgcgattggcgagataacccggagttactgcggcgtttttatggcttactctctacggctcattaccgcacgacgccgctggatttacgccgtctgatggatgctccgggtatgcatttctctgccgccagagtggccgatgccgtgattggcgcattatggctggtggatgaagggggattgagcgaggcactggcccttgatgtctgggcgggtcggcggcggcccagagggaatctggtggcacaatcactggccgctcatagcgggcagtggcaggcaccaacgctgttatcgcggcgtatcagccgggttgctgtcacggcagcatggcggcagcaaggaattgcccgccggatgattgccgcagaacaggcccatgcccgccagcagcagtgtgattttctttcggtcagttttggctataccgccgagttggctcatttttggcaccgctgtggttttcgtttggtacgtattggtagccataaagaggccagtagcggttgttataccgcaatggcgttgttacctcttagtcccgcgggggaggcactctgtcaggcggcgcagcagcagttaaaacgtgattggtattggttacagcaatggattggcataccaaccccggtatttttacggctacctgaaccgccggaggtcacgttaactgacgacgattggcgggaactggcaggatttgcttttgcttttcgcccattagaggccagtttaccggcgctacaacggttgttattacacaccgagttacccctttcggcgttacgacactatttgcagttacgcactcctcagtctgagattatcaatacccttggtttgatagggcgtaaggcattggtggcactgtggcgtcaggaagccgccgaggggatggcaatgattgatgtggataaaatgatcatgtctgccaaaccatcggcgcggtgtagcactgtccggttacccggtagaaaaaaccttacgatatgccaatgctaa

SEQ ID NO: 40348 - protein, 699 aa, Yersinia pestis biovar Microtus str. 91001
MTNPIVASQPLMAQQGIRRLLILSGQADWSRQQAIMLRQHLAGDWLWLSEQPPEGVNSISPTAARTLLGQENLHGVFDATDGLNIEALAIVAGTLRAGSWLLLLVPEWDDWPQRPDKDSLRWSEQPAPIVTANFIRHLQRQFLADPDVVLWQQDRPLILPAVGSRPCWQQPDGSPTAQQQHILQRLMQADSGIWVLTAARGRGKSTLAGMLVTHWQGACWVTGPGKAATQVLNQQAGERARFWAPDALLDYCQRHDVSDIDWLLIDEAAAIPTPLLSALLAYFPRALLTTTVQGYEGTGRGFLLKFCATLGDWHHLTLTDPIRWATDDPLERVMDNAMLFHDELLGNHPLPKRPPVAQIEIPLYEQRDWRDNPELLRRFYGLLSTAHYRTTPLDLRRLMDAPGMHFSAARVADAVIGALWLVDEGGLSEALALDVWAGRRRPRGNLVAQSLAAHSGQWQAPTLLSRRISRVAVTAAWRQQGIARRMIAAEQAHARQQQCDFLSVSFGYTAELAHFWHRCGFRLVRIGSHKEASSGCYTAMALLPLSPAGEALCQAAQQQLKRDWYWLQQWIGIPTPVFLRLPEPPEVTLTDDDWRELAGFAFAFRPLEASLPALQRLLLHTELPLSALRHYLQLRTPQSEIINTLGLIGRKALVALWRQEAAEGMAMIDVDKMIMSAKPSARCSTVRLPGRKNLTICQC

SEQ ID NO: 40349 - DNA, 2100 bp, Erwinia carotovora subsp. atroseptica SCRI1043
  CDS (1)..(2100): transl_table=11
ttgcgtgattttctccacagccaacaacagcagcaacgctatggtatccgacgattgctggtgctgagcggtgagtcgagctggtgtgaagagcaggcgatggtgcttagcagccagtcagctggcgactggctgtgggttagcgaacacgcacctgactccgtcgcctcgttgccagccagtcgtgttcggacgctgctagggcgagagtttcatcacgcggtgtttgatgcgcgcagcggcgtggatgtcgaggcgctggcgatgctgtccggcacgctacgggccgggagctggctgattatgctggttccgtcgtggcaagtgtggtcgacgctgccggatgaagacagcctacgctggagcgagcacgcacagccgattgctactccgcactttattcagcattttcagcggcagttgctggccgatgacgatgtggttctctggcaacaaggtcagccgttggtgattcagccactggctgtaagatccgactggcagcctgcgcagggcgaaccgactgcgcgacagcagcagatcctgcatgaactgagtgccgcagaatctggcgtatttgtgattaccgcacctcgcgggcggggaaaatcgacgctggctggaatgctgacgcagcgtagtcgtggaacctgttggatcactgcaccttcccgttcggcgacggatattctgcaacagtacgcgcgcagcgatgcgccattctgggcaccggatgcgttgttggcatactgccgccttcatggtgcacctgatgttgattggctgctgattgatgaggttgctgcgattccgtcttctgtattgactgcgctgttgccctattttccccgtattttaatgaccacgacggtgcaggggtatgaaggcacgggacggggttttctgcttaagttttgtgcggcattgccgcagtgtcgcgtattttcactggacgatcctctgcgctgggccgctaatgacccgctggaacgcgtgttggatcaggcgctgctgttcaacgaacctgcctctcttcattttccgctgaatcccactgatggcgcactgactctgccctctgccaaactggatattcgaaccgaatgtgccgacgactggctgacacatcccgaacgcctgacgtggtgctatgcgctattgtgcagcgcacattaccgtacctcgccgctggatttacgccgtctgatggatgcaccgggcatgcatattgccagcgcacaggtggcgggtgatattcgtggcgtgttgtggctggtggaggaaggtgggctgtctgattcactggctcatgacgtttgggctggcaggaggcgaccgcgcggtaatctggtggcgcaatcgctggcggcgcatgctggcctgtggaatgcaccgacgctgcgtgcgcgtcgcgtaagccggattgcggttgcgtcgtcatctcgccggcaggggatcgggcgagcattaatcgcagatcagactcgtgaggcacaaaagcaggcgctggattatctgtcggtcagttttggctatcagccagatctgtgggcgttctggcaatcgtgtgggtttcaattggtgcgtataggcagtcatcttgaggccagtagtggctgctatagcgcgatggcgatactgccgctaagtgaggcggggtatgaactggcacagcaggggagccagcaattggcgcgtgactggtattggttacagcgcatgattccgctgaacctcgcgctgccgcagacagaaaatatcgaacgggataccgaaagtattgcgctgaatgacgacgactggcgtgagctggcgggttttgcgtttgcgcatcggccgatggaggcgagcttcgctgcgatctgccgcctgctgattcatacctcgttgccgctgcctgcgctacgcctgttggcggaaacaccgagtgaaggcgaacagactgctgctacgttagggctaactggcaagaaggcgctcttgaaacgctggcgagaagaaaccaccagtgcgctaatcgagctcgatgcgcaacgcggtgagcgctggcggctgtgggtgcttcctgacgatgcagcggaggatgcgcttcatccctga

SEQ ID NO: 40350 - protein, 699 aa, Erwinia carotovora subsp. atroseptica SCRI1043
MRDFLHSQQQQQRYGIRRLLVLSGESSWCEEQAMVLSSQSAGDWLWVSEHAPDSVASLPASRVRTLLGREFHHAVFDARSGVDVEALAMLSGTLRAGSWLIMLVPSWQVWSTLPDEDSLRWSEHAQPIATPHFIQHFQRQLLADDDVVLWQQGQPLVIQPLAVRSDWQPAQGEPTARQQQILHELSAAESGVFVITAPRGRGKSTLAGMLTQRSRGTCWITAPSRSATDILQQYARSDAPFWAPDALLAYCRLHGAPDVDWLLIDEVAAIPSSVLTALLPYFPRILMTTTVQGYEGTGRGFLLKFCAALPQCRVFSLDDPLRWAANDPLERVLDQALLFNEPASLHFPLNPTDGALTLPSAKLDIRTECADDWLTHPERLTWCYALLCSAHYRTSPLDLRRLMDAPGMHIASAQVAGDIRGVLWLVEEGGLSDSLAHDVWAGRRRPRGNLVAQSLAAHAGLWNAPTLRARRVSRIAVASSSRRQGIGRALIADQTREAQKQALDYLSVSFGYQPDLWAFWQSCGFQLVRIGSHLEASSGCYSAMAILPLSEAGYELAQQGSQQLARDWYWLQRMIPLNLALPQTENIERDTESIALNDDDWRELAGFAFAHRPMEASFAAICRLLIHTSLPLPALRLLAETPSEGEQTAATLGLTGKKALLKRWREETTSALIELDAQRGERWRLWVLPDDAAEDALHP

SEQ ID NO: 40351 - DNA, 2052 bp, Yersinia pseudotuberculosis IP 32953
  CDS (1)..(2052): transl_table=11
atgacgaatccaatcgttgccagtcaaccacagatggcgcagcaggggatcaggcgtttgctgatcctcagtggtcaggccgattggtcacggcagcaggcaataatgctacgccagcatctggcaggcgattggctatggttgagcgagcagcctcccgaaggcgtcaacagtatcagtccaacagcggcaagaactctgttggggcaggaaaacttacacggcgtatttgatgcaaccgatgggttaaatatagaagcgctagccatcgtcgcggggaccttgcgggcggggagttggctgctattgctggtgcctgagtgggatgactggccgcagcggccagataaagacagtttgcgctggagtgagcaacccgctccgattgtcacagcgaactttatccgccacttacagcgccagtttttggctgatcccgatgtggtgctgtggcagcaagatcggccactcatattgccagcggttggttctcgcccatgttggcagcagccagacggttcaccaaccgcacagcaacagcatattcttcagcgtctgatgcaggcagatagcggtatttgggtactgacagccgctcgtgggcgaggtaaatcgacacttgccgggatgttagtcacccactggcagggggcatgttgggtgaccgggccgggtaaagcggccactcaagtgcttaatcaacaagcaggggagcgggccagattttgggcaccagacgcactgttggattattgccaacggcatgatgtcagtgatattgactggttgttgattgatgaagcggcggcgatcccgacaccgctgttatcggcattattggcgtatttcccccgggcattattgaccaccacggtacagggatatgagggcacggggcgtggttttttactgaaattctgcgcgacactgggcgattggcatcatttgacgctgacggatcctatccgctgggccacggatgatcccttggaacgagtgatggataatgccatgttgttccatgatgaattactcggcaatcatcccctaccaaagcggccacctgcggcgcagatcgaaatcaccctttatgaacaacgcgattggcgagataacccggagttactgcggcgtttttatggcttactctctacggctcattaccgcacgacgccgctggatttacgccgtttgatggatgctccgggtatgcatttctctgccgccagagtggccgatgccgtgattggcgcattatggctggtggatgaagggggattgagcgaggcactggcccttgatgtctgggcgggtcggcggcggcccagagggaatctggtggcacaatcactggccgctcatagcgggcagtggcaggcaccaacgctgttatcgcggcgtatcagccgggtcgctgtcacggcagcatggcggcagcaaggaattgcccgccggatgattgccgcagaacaggcccatgcccgccagcagcagtgtgattttctttcggtcagttttggctataccgccgagttggctcatttttggcaccgctgtggttttcgtttggtacgtattggtagccataaagaggccagtagcggttgttataccgcaatggcgttgttacctcttagtcccgcgggggaggcactctgtcaggcggcgcagcagcagttaaaacgtgattggtattggttacagcaatggattgacataccaaccccggtatttttacggctacctgaaccgccggaggtcacgttaactgacgacgattggcgggaactggctgggtttgcttttgctttccgcccattagaggccagtttaccggcgctacaacggttgttattacacaccgagttacccctttcggcgttacgacactatttgcagttacgtactccccaggctgagattattaacacccttggtttgacagggcgtaaggcattggtggcactttggcgtcaggaagccgccgaggggatggcaatgattgatgtggataaaatggatcatgtctgccaaaccatcggcgcggtgtag

SEQ ID NO: 40352 - protein, 683 aa, Yersinia pseudotuberculosis IP 32953
MTNPIVASQPQMAQQGIRRLLILSGQADWSRQQAIMLRQHLAGDWLWLSEQPPEGVNSISPTAARTLLGQENLHGVFDATDGLNIEALAIVAGTLRAGSWLLLLVPEWDDWPQRPDKDSLRWSEQPAPIVTANFIRHLQRQFLADPDVVLWQQDRPLILPAVGSRPCWQQPDGSPTAQQQHILQRLMQADSGIWVLTAARGRGKSTLAGMLVTHWQGACWVTGPGKAATQVLNQQAGERARFWAPDALLDYCQRHDVSDIDWLLIDEAAAIPTPLLSALLAYFPRALLTTTVQGYEGTGRGFLLKFCATLGDWHHLTLTDPIRWATDDPLERVMDNAMLFHDELLGNHPLPKRPPAAQIEITLYEQRDWRDNPELLRRFYGLLSTAHYRTTPLDLRRLMDAPGMHFSAARVADAVIGALWLVDEGGLSEALALDVWAGRRRPRGNLVAQSLAAHSGQWQAPTLLSRRISRVAVTAAWRQQGIARRMIAAEQAHARQQQCDFLSVSFGYTAELAHFWHRCGFRLVRIGSHKEASSGCYTAMALLPLSPAGEALCQAAQQQLKRDWYWLQQWIDIPTPVFLRLPEPPEVTLTDDDWRELAGFAFAFRPLEASLPALQRLLLHTELPLSALRHYLQLRTPQAEIINTLGLTGRKALVALWRQEAAEGMAMIDVDKMDHVCQTIGAV

SEQ ID NO: 40353 - DNA, 1953 bp, Haemophilus somnus 129PT
  CDS (1)..(1953): transl_table=11
ttgagaaataaccaacctgaaatgatatctcctcgccatgtgcaaattagtattgcacccaatctgcaagattttggaccgcactttttatcacattttgatgttttgtggttagggtgggaaaaacccgattttaatgtgcatttttgccatgtgcaaaaagcaaaaaagttacttgggcaagagtttttaaatgtgatttttgatgctcgtcagggatttcatttagaaagtttagcgattgtggcaggaacagtaaaagcgggtggaacattaaatattctacttaatcattgggatcttttagaacaacaagctgatattgatagtttgcgttggagcggtgtagaaggaatgattgcaacaccgcactttattcggcattttcaacggattgttaatcaatttcagtttcctgttaatcatttcgctattccggcgattactcaaaataacctatctgatttattttgttcagttcaattgagtgcaactaaagcacagcaaaaaattattgacagtattttacagcaacaggcagatatttattttttaacagcaaaacgtggacgaggcaaatcagcattattgggtttgttatctcaacaagtaaaacagaaagtttatttgacggcaccaaataaaagtgcggtggatattttgcaaaaatttgccggtcaatctgttacttttattgcacccgatgagtttgttcagtgtttgacagaaaatccgcaagaatatcaacatgcttggctatttgtagatgaagcagccatgctacctgtcagtaccttaaatttttttagtacttattttaaacatattgtttttagtacaaccattcatagttacgaaggtacagggcgtggttttggcttaaaatttaagcaacgaattttacaacaacggcgaaaatgtcttgaatttgaattaaaggagccattgcgttggcgtgaggatgacaagttagaaccttttattgatgtgcttttattgcttaatagtgaagatgattttcggcaatatcattacaaatccaatttggacgttcacataaaatcgctaaatcaacaggcattattgacacaaatagcagatttttacggtctattgtctttagcacattaccgcacttctcctattgatttacgtcgtttattggatgctccaaaacaacgattttatttggcacagacagaaggacatttgcttggtggggtatgggcattagaggaagggggattgtcggatcgaggattgattgcgggaatttgtcgaggagaacgccgtccgagaggtaatttaggtgcacaattattggcttttcaatatcttaattcacaggcttgtgaattacgttctttacgaatttctcgcattgcacttcaacctaattggcagagaagaggagtagggcgagatttgatagctgctttgaaagtagaaagtaacattgattttttatcagtgagctttggttacagctcggagttggtttctttttggcataagtgcggttttaatttagtgtatttgagtgagtataaagaaagtagcagtggcacatataatgcaatggctatttgtcctttgactttgcgaggcaaagaattttcacaacaatgtatgagtcaatttagacgagattttgttttatcggatcatcctttattgaatgagattataaataatcaaactattgaggtagagttaaatgcctttgatgtatactcattgcaaaaatttgcattttattaccgcactttatcggctgctcgtcctgccttatggagactattgaagatgatagcttcctctgaatgtcctgtcttgaggaaatatttttgtggtgaaaaagatttcttgtcttatggcggttatcgacaaggagtgataatttgccgcaacgaagtaaaagaagtgttgcaaaaatataaaaactttctatga

SEQ ID NO: 40354 - protein, 650 aa, Haemophilus somnus 129PT
MRNNQPEMISPRHVQISIAPNLQDFGPHFLSHFDVLWLGWEKPDFNVHFCHVQKAKKLLGQEFLNVIFDARQGFHLESLAIVAGTVKAGGTLNILLNHWDLLEQQADIDSLRWSGVEGMIATPHFIRHFQRIVNQFQFPVNHFAIPAITQNNLSDLFCSVQLSATKAQQKIIDSILQQQADIYFLTAKRGRGKSALLGLLSQQVKQKVYLTAPNKSAVDILQKFAGQSVTFIAPDEFVQCLTENPQEYQHAWLFVDEAAMLPVSTLNFFSTYFKHIVFSTTIHSYEGTGRGFGLKFKQRILQQRRKCLEFELKEPLRWREDDKLEPFIDVLLLLNSEDDFRQYHYKSNLDVHIKSLNQQALLTQIADFYGLLSLAHYRTSPIDLRRLLDAPKQRFYLAQTEGHLLGGVWALEEGGLSDRGLIAGICRGERRPRGNLGAQLLAFQYLNSQACELRSLRISRIALQPNWQRRGVGRDLIAALKVESNIDFLSVSFGYSSELVSFWHKCGFNLVYLSEYKESSSGTYNAMAICPLTLRGKEFSQQCMSQFRRDFVLSDHPLLNEIINNQTIEVELNAFDVYSLQKFAFYYRTLSAARPALWRLLKMIASSECPVLRKYFCGEKDFLSYGGYRQGVIICRNEVKEVLQKYKNFL

SEQ ID NO: 40355 - DNA, 2169 bp, Alkalilimnicola ehrlichei MLHE-1
  CDS (1)..(2169): transl_table=11
gtgacgggcccggagccattgctcggggtggtcgaccggctgctggccgctgcccgtgcccgtggccaccggcgattgctggtgctggccgggaccgcggtctggggccgtgccgaggcccgccgggtcctgcaacgctgcggtgccgacgaacaccacctgtgggtgggggagggtgagggcgcccgggccgcggcggaagtctggcaggagctgggccgggagtacccggcgctggtgtttgacgcccattgcggcttcgatccggacgccttcggggccgtggccggcacggtgcacggtggcggcctgctgctcctgcttaccccaccgctggcggattggcaccgggcgccggatccggagcgggtgcgcctggccgtccacccgctgcgcccggagcaggtccccggccgttacctctggcgcctggcgcggttgctgcgggacagccccgatgcctgggtggtggagcaggacggcacggcggtgccggccgccccggaccgcctgccgccgtcgcaatccgcatccgcggtcgtcgggcccgccgggggcgggccgctcacccccgatcaggcacaggccgtggaggccctggtccgttccgcatccgggcgcggtcaccggcggcggccggtggtgctgacctccgaccgcgggcggggcaagtcctccgccctggggctggccgccgcccgcctgctgcgccaggggctggctgatatccgggtgaccgcgccggcggcggaggcggtgcagccgctgctggaacatgccgccgcggggctccccggcagtcgccgtacccggactgcggtcgagtggcgggggcggagcctgcgcttcgccgtgccgcgtgccctgctggacagcagcgatacccccgacctggtgctggtggacgaggcggccgccatcccgacaccggtgctggcggcattgctgcgccgccacccgcgcatggccttcgccaccacggtccatggctacgagggcaccggtcgggggttcgccctgcgcttcaacgcgttgctcgaccgcgagacccgcggctggcaggcggtgcggttgcagaccccggtgcgctggtcgcccggcgatccggtggaggcgctggtgttccggttactgctgctggacgccgaacccggggaggtgccgccgacggcctccggcgccccgcgctgggagtggttggtccgcgaccgcctggccgccgacgagccgttgctcacccaggtgttcgggctcctggtccaggcccactatcgcacccggccactggacctgcgccacctgctggacgggcccaatgtgcgggtcggggcgttatggctggacgggcgcctggtgggaacgctgatggtggcggaggaggggggattcgatgccgccttcgccgaggccgtctggcggggtcgggcccgtcccatgggccatatgctcccggagaccctggccgcccattgcggtctgcgtcaggcgccggagcggcgcggactgcgggtggtacgcattgcggtccatccggatgccaggcgccgggggctgggacggcgcctgttgttggaggccctcgccgacgcccggcggcggggtctggactacctgggcacggccttcgggaccaccgacgagttgctgcgtttctggcaatgcgaggggctggccccggtgcgtgtcagcctgcgtcgcggcgcggccagcggcgcccattcggtggtcatgctccgggcggtgagtgccgccggggagtccctgcttggccgggcccgggcccgctttctcgacggcctgccccacctgttggccgatccgctgcgccggctggagccggcgctggccgaccaactgctgcgcgcgccggatcagggtgccgccccgcccgtggcggatgactgggaggacctgcgggccttcgccgccagcgagcggatcttcgaagcctgcctgccggcgctccgccgctggacgttgtggctgctggccgacccggagcgagccgcgcggctgaccccggcggagcgcaatgcgctcatccttcgcctcctgcagcaccgggactggggtgagaccgcccgggccttgtcattgccgggccgccgccaggtgacccgcctgctccgtgaggcagtggcggggcagttgccggagccgctaggctag

SEQ ID NO: 40356 - protein, 722 aa, Alkalilimnicola ehrlichei MLHE-1
MTGPEPLLGVVDRLLAAARARGHRRLLVLAGTAVWGRAEARRVLQRCGADEHHLWVGEGEGARAAAEVWQELGREYPALVFDAHCGFDPDAFGAVAGTVHGGGLLLLLTPPLADWHRAPDPERVRLAVHPLRPEQVPGRYLWRLARLLRDSPDAWVVEQDGTAVPAAPDRLPPSQSASAVVGPAGGGPLTPDQAQAVEALVRSASGRGHRRRPVVLTSDRGRGKSSALGLAAARLLRQGLADIRVTAPAAEAVQPLLEHAAAGLPGSRRTRTAVEWRGRSLRFAVPRALLDSSDTPDLVLVDEAAAIPTPVLAALLRRHPRMAFATTVHGYEGTGRGFALRFNALLDRETRGWQAVRLQTPVRWSPGDPVEALVFRLLLLDAEPGEVPPTASGAPRWEWLVRDRLAADEPLLTQVFGLLVQAHYRTRPLDLRHLLDGPNVRVGALWLDGRLVGTLMVAEEGGFDAAFAEAVWRGRARPMGHMLPETLAAHCGLRQAPERRGLRVVRIAVHPDARRRGLGRRLLLEALADARRRGLDYLGTAFGTTDELLRFWQCEGLAPVRVSLRRGAASGAHSVVMLRAVSAAGESLLGRARARFLDGLPHLLADPLRRLEPALADQLLRAPDQGAAPPVADDWEDLRAFAASERIFEACLPALRRWTLWLLADPERAARLTPAERNALILRLLQHRDWGETARALSLPGRRQVTRLLREAVAGQLPEPLG

SEQ ID NO: 40357 - DNA, 1803 bp, Actinobacillus pleuropneumoniae serovar 1 str. 4074
  CDS (1)..(1803): transl_table=11
atgcgtaaactggtgattttagctgaaatgcctccgcttgacgggggcattgttattcatagcggcaatatctcccaagccaaacagtatttggggcaagaacacccctatgcgatttacgatatgcgtgccgaaggcgatgtatggcttaacttagacgcattagcaattattgccggtacgattcaggctcaaggcacactctaccttatttgcccgaactgggatacgctcgaacagcaactagattttgattcgcaacgttggaatggcggtaaggtgattgccacaccgaatttctatcgctactttaaggcattggtacaaaaattcggttttcaattccaaacattggaagaaacggattttagcttgccaaaacagccgcctcaatgccaagcgaccgaaagtcttacgccacaacagcaaaaaatctttgaaaaattaccgcttgattcgtcagctattcatttaattaccgcgcctcgtgggcgaggcaaatcgaccctcgccggtaaattagctcagcagttagctaaaacggaatcggtactgattactgcaagaagtcactcggtattacctagtttttggaagtctgttgcgcagcatattcctttttttgcccccgatcatctgttacaaaaaatcgcggcaaaccaaattgcagcaaagagttggttatttattgatgaatcggcaagtttgccgttaccaatgttacatcagttctgtgagtatttcgacaaagtggtcttaaccacgactacacataattatgaaggtaccgggcgaggctttagcctgaaattcccacaacagcttaccaagcagtatcgagaatggcgactgactaagccgcttcgttggcatgaaaatgatccgttggaacaatttatcgatgaattattgattatgtcaccaccaagcgaaaccaatcaatatgctgaattttatcatttactggcggaagcgcattacaaaacgacaccaagcgatttacgccgattatttgatgctcaagatcagttactacattctttctccgaacatcaacgcttagtcggtggcatttgggctgtacctgaaggtgatttggaacctgaattagctgaagccatttggcggggagaacgccgcccacaaggcaatttagtcgcacaatacctctgcttccaaggcaacttactcgaagcctgtcagctacgttcggtacgcatctcacgtattgcggtacaacctgaattgcaaaagcaagggattggcaagcggttaatttctgactttattttgcaaaaaattcagcaaactcgaccgcttgtagattatgtttcggtcagctttgggctctcggaacctctgttgcatttttggcaacaatgcggttttcagttagtgcaaattaccccaactaaagaagccagtagcggctatcacagtgcgatgatgctctacccgatttcagccgaaggtcagcggtttgtacaacaagctactgccagatttgaacgagatttagcattacagccgttttatgcagaattgcaaaatatgttgccaattcgaccgcttgtgcaactgcaaatggacgaacaagattggcgcaatatagaaggtttcgcattagcgcaacgttctctggcggcaagttatgtcagcctaacacgtctttaccggcaagatcctcgcaatcatggtgtattagccaatctctggcaacaattcgagcgtattcaaggcaaaaaagaatggttggaaaacttacgtagcctacttgctaattacttgcaatacacacgctaa

SEQ ID NO: 40358 - protein, 600 aa, Actinobacillus pleuropneumoniae serovar 1 str. 4074
MRKLVILAEMPPLDGGIVIHSGNISQAKQYLGQEHPYAIYDMRAEGDVWLNLDALAIIAGTIQAQGTLYLICPNWDTLEQQLDFDSQRWNGGKVIATPNFYRYFKALVQKFGFQFQTLEETDFSLPKQPPQCQATESLTPQQQKIFEKLPLDSSAIHLITAPRGRGKSTLAGKLAQQLAKTESVLITARSHSVLPSFWKSVAQHIPFFAPDHLLQKIAANQIAAKSWLFIDESASLPLPMLHQFCEYFDKVVLTTTTHNYEGTGRGFSLKFPQQLTKQYREWRLTKPLRWHENDPLEQFIDELLIMSPPSETNQYAEFYHLLAEAHYKTTPSDLRRLFDAQDQLLHSFSEHQRLVGGIWAVPEGDLEPELAEAIWRGERRPQGNLVAQYLCFQGNLLEACQLRSVRISRIAVQPELQKQGIGKRLISDFILQKIQQTRPLVDYVSVSFGLSEPLLHFWQQCGFQLVQITPTKEASSGYHSAMMLYPISAEGQRFVQQATARFERDLALQPFYAELQNMLPIRPLVQLQMDEQDWRNIEGFALAQRSLAASYVSLTRLYRQDPRNHGVLANLWQQFERIQGKKEWLENLRSLLANYLQYTR

SEQ ID NO: 40359 - DNA, 1971 bp, Haemophilus influenzae R2846
  CDS (1)..(1971): transl_table=11
atgccatctcgccaacttcaaattttaatctgcaaaactttgccgcttgtgcctgataacgtattaattatcggcgaaagtggcattgctttttctaaagcaacgaatttgctcgggcaagaatttgaacatattttatttgatgcgcgaaatggcattcatcttgaagcactggctattgcagctggaacactgaaaatgggcggcacgctttgtttagtgttatctgattgggaaaatttatctcagcagcctgatcaagatagtttacgttggaatggaaatcagtcagcaatcgccacgcctaattttatttatcatttcaaacagtgcattgaacgttatcatttccccattttaagagaggaaagtgcggttgaatttcctcccattttttattctaacgagaatcacaaaaatgctacgttagcgcaacaacaaattatcgagactattttacagaccgagcaggatatttattttctaaccgccaagcggggaagaggaaaatccgcattattggggatgcttgctaaccaaattcaaacgccagtttatcttaccgcaccgaataaaagtgcggtgcattccgttattgaattttcagaaggcggaattgaatttattgcgccagatgaattggctttgacgttacaaagtgaatccgaatttagtcaatctgcttggttgctggtagatgaagcggcgatgatcccattgccgttattgcaagaatattctcaatattttcaacatattgtctttagcacaacaattcatagctatgaaggtacggggcgtggtttcgaattaaaatttaaacggaaaattcaccgcacttttcagcattttgagcttaaacagcccctacgttggcaagaaaatgacccgttagaacattttattgatgatcttttgttgctaaatgccgaagatgattttcagcactttgactatagcaatattacttataacatagaggaaaacgctaaaaatctttccttcccctgcttgcgggggaaggtgcccgaagggcggaagggggatttagatatagccagtctccctcgagctttggaagctcccctcacaagtaagggcagtaaaggaaaatataatcgtcaatttttatttcgagatttttatggcttaatgacattggcgcattatcgaacatcgccactcgatcttcgtcgtttactggatgggaaaaatcaacgtttttattttgctgaatatcaacagaatttgctcggtgcaatttgggcattagaagaaggaaatatggctgatgatgagttgattattcaaattcaacaaggcaaacgtcgcccgaaagggaatcttgtgccacaagccttgtgtttccacgaaaatctttcccaagcctgtaaactgcgttcactccgcatttcacgtatcgccgtgcaaccaaattggcagcaaaagagcattgggcaaaatttgatgcaagccatggaaaatgccgatgtggattttctttcagtgagttttggctacaccgacgaactcgcaaaattttggcaaaagtgcggttttgttttggtgcatttaggcgagcatcaagaagcgagtagtggttgttattcagcgattgcccttaaaggtatttccaaagaaggcttggctttagttgatactgcgtacaaacaatttcagcgtaatctccctttatcttttcatccgttcgtcataaattttgagcaaaatcagcttgattggcagcttgatgaattcgattggatgagcttaaaaaacttcgctaattttcaccgcactttattttcgagcattcctgcaataaggcgtttattaaaattagcgggcaaagaaaatttcccattaatttccgcttatttaacaaacaaaccacttcctattaacaagaaaaaaggcgtagaatgtttgcgtttagaaattaaacaatatttagagcgaggaactttatga

SEQ ID NO: 40360 - protein, 656 aa, Haemophilus influenzae R2846
MPSRQLQILICKTLPLVPDNVLIIGESGIAFSKATNLLGQEFEHILFDARNGIHLEALAIAAGTLKMGGTLCLVLSDWENLSQQPDQDSLRWNGNQSAIATPNFIYHFKQCIERYHFPILREESAVEFPPIFYSNENHKNATLAQQQIIETILQTEQDIYFLTAKRGRGKSALLGMLANQIQTPVYLTAPNKSAVHSVIEFSEGGIEFIAPDELALTLQSESEFSQSAWLLVDEAAMIPLPLLQEYSQYFQHIVFSTTIHSYEGTGRGFELKFKRKIHRTFQHFELKQPLRWQENDPLEHFIDDLLLLNAEDDFQHFDYSNITYNIEENAKNLSFPCLRGKVPEGRKGDLDIASLPRALEAPLTSKGSKGKYNRQFLFRDFYGLMTLAHYRTSPLDLRRLLDGKNQRFYFAEYQQNLLGAIWALEEGNMADDELIIQIQQGKRRPKGNLVPQALCFHENLSQACKLRSLRISRIAVQPNWQQKSIGQNLMQAMENADVDFLSVSFGYTDELAKFWQKCGFVLVHLGEHQEASSGCYSAIALKGISKEGLALVDTAYKQFQRNLPLSFHPFVINFEQNQLDWQLDEFDWMSLKNFANFHRTLFSSIPAIRRLLKLAGKENFPLISAYLTNKPLPINKKKGVECLRLEIKQYLERGTL

SEQ ID NO: 40361 - DNA, 2103 bp, Pseudoalteromonas tunicata D2
  CDS (1)..(2103): transl_table=11
atggctggtaacagcttacgctcgcctacagagcctctaaaaatgactgagcttaatcagctaagcccttacctagctcagttaaaacaaaaccgccaccgacaactgcttgttgtaagtggcgagcacctctggtgctatcagcaagctaatgacctattgcctgttttactcggcaaacaaattattttaagtacacacaatgagttaacaaacgcccaatggccagaacatacacaccagttattggggcaagaatttgattttgctgtgtacgatggtttttcagggatcagccccgataaactggcagcgctcagcggcacaataaccgctggcggtttacttattttattgctacccgaatacaaacaactgtgtgattttaaagatcccagcttttatatttttcaatcagccgaacaactcaatcaacacagtcactttaatcaacgtttcgcctcgcaacttagcaaactagcacatatttcttttgatcaagcacttggtttaaatatcccaaaaattgaagtgcaagctcgcgaaatacaaaccgagcaacaacaagctgctgttgaaatgattataaaacacagtttaggtcgggctaatcgtcccttattgctcaccgctgatcgtggacgagggaaatcttcagctctaggacttgccgcagcgcaattagtcaatcagggtaaaaacgtcgttataacaacaagccagcgccgggctgttgaaagtgcatttaaccattttgcaatgcaaacgcagtttagcgctcaagctgagtcacccctctttcgttacatcccccccgatcagctaatcagccaagcgataactgctgatattttatttgtggatgaggcagcctctttacctgttcctattctgattgagttactcaagcgatttaatcgcatcatttttgccaccactattcatggatatgaaggtacaggccgtggttttactttacggttttgcccttacttaaaacaacattttcctgacagccgctttgtccatttagatgagccgattcgctttgccagcaatgaccccttagagataaacattaaccagttattaggtttaaatgcagactgcaccgagcttaaacagctcactgcaccgctacaatttagtgaggttagccaagcaaccctttgtgaaaatgaaccgctgttacagcaaacttttgcattgttagtacttgcacattaccaaacatcggccaatgattttcgccatttactcgatgcagccaatcttcgtatttttgtggttgcacatcaagaagaggttattgcaaccgcgctagttgcaattgaaggcgagctcagtaacgaattaagctcggcaattgtggcaggtaaacgaaggccacaaggccatttactcgcacagtctgttgctcagataaaacaacagcaatgctttttaactgagcctttagcgcgcattgttcgcattgcagtccacccatattttcagagtcaaaatatcggtcaacagctattaagctttattgaaacacacgtagctacaaatgttgcagcaatcggcgcaagttttggcgcctatccagtattggtgcatttttggatgaaacaagattatcaagttatcaagcttggctttaaaaaagacagcattagcgctgagcatgcttgcttagttataaagcccatcacaggattgcaactcgaaataaatcaactaaagcaaaggtttaaccgagactttccactaaattgcttacattacttgcaacatattgaaccaaaattactgattgagttaatagaacaattacctcacaatcaatctgaaccagacgacttagtagcaatatcgcaactttgcattataccaagtcaattagcagatcattttgcctgttgctggcgtgtgatgtggcaacagccagcagctttaaaaaactgcactgaagcaacgcaacttttattaactaggctaatattacaaaataaatcaccacaacagattgaaaaaatttcaaattttggtggtctaaaaaaattacaagcagctattaagcacgctttgttagaatggtttaccaaccttgagtgctaa

SEQ ID NO: 40362 - protein, 700 aa, Pseudoalteromonas tunicata D2
MAGNSLRSPTEPLKMTELNQLSPYLAQLKQNRHRQLLVVSGEHLWCYQQANDLLPVLLGKQIILSTHNELTNAQWPEHTHQLLGQEFDFAVYDGFSGISPDKLAALSGTITAGGLLILLLPEYKQLCDFKDPSFYIFQSAEQLNQHSHFNQRFASQLSKLAHISFDQALGLNIPKIEVQAREIQTEQQQAAVEMIIKHSLGRANRPLLLTADRGRGKSSALGLAAAQLVNQGKNVVITTSQRRAVESAFNHFAMQTQFSAQAESPLFRYIPPDQLISQAITADILFVDEAASLPVPILIELLKRFNRIIFATTIHGYEGTGRGFTLRFCPYLKQHFPDSRFVHLDEPIRFASNDPLEININQLLGLNADCTELKQLTAPLQFSEVSQATLCENEPLLQQTFALLVLAHYQTSANDFRHLLDAANLRIFVVAHQEEVIATALVAIEGELSNELSSAIVAGKRRPQGHLLAQSVAQIKQQQCFLTEPLARIVRIAVHPYFQSQNIGQQLLSFIETHVATNVAAIGASFGAYPVLVHFWMKQDYQVIKLGFKKDSISAEHACLVIKPITGLQLEINQLKQRFNRDFPLNCLHYLQHIEPKLLIELIEQLPHNQSEPDDLVAISQLCIIPSQLADHFACCWRVMWQQPAALKNCTEATQLLLTRLILQNKSPQQIEKISNFGGLKKLQAAIKHALLEWFTNLEC

SEQ ID NO: 40363 - DNA, 2160 bp, Oceanospirillum sp. MED92
  CDS (1)..(2160): transl_table=11
atgctcagctctctgtttgatcgtttagcaaaagatgcgcttgcgcatttccatcgcagactgctcgttgtgagtggcagtcgggactggtgccatcaacaggtcaaacagttagagagtatccaaggggtaatttgggtaggaaatgactactcgggccctgctaaaagtgtcggttctcgacaagtacatcgtttgctgggccagactgtagagcatcttatttttgatgcctggagtggtttcaatccggatagttttgggcaggctgccgggcttcttcaaggcggtggagtctttatactattgtgccccgaactcgatgaatggggacactttgatgatccagaatatcgcagtttagttccgcatcctttaccctcgtcggccgcgggccgacgctttatcaatcgtctctgtttgttgttagaggacgatgcttataccgtactctatcgtgaaaaagaggagctttccggtgtagagattgagcttccggagcagtcagatagaaccgaccttgttgatgaagaagttgtttctccgcataaaacaaaagatcagcaacttagtgttgagttaattctcagtcaatttagaaggggacgtcgccctgttgtgatcaccgcggacagagggcgcggaaaatcggttgcactgggtatagcggcagcgcagctttctggtctggattttaccgatattctggtgactgcgcctgaatacgattcagcagaagaagcatttttaatggctcatcaacttcttcccgattacgaatatagcccaggacgattgagtaaaggcgaccatcatattcggtttgttgagcccgaacttgcttgtcttgaaacaggtgagggcaaggtcctgtttgtagatgaagccgcagcgatacccgtacctattttgaggaagtgtttagagaattttccgcgggttgcttttgcatcgacaatacatggctatgagggcaatggtcagggatttgcgatacggtttaggcagattctccaggaaataacaccgaactggaaatcgatccatctcaagcagcctattcgctggaaagaaaacgatcctcttgaaacgctggtttttgacgtgctattgctgaatgcccaggctgccagtattgaagcgctgaaaggagacagtgatcactattctccggaaattgtaaaacttgatagagatcagttatctgaggattatgagaccctgaatcagctgttcggtttattggtcttagcgcattatcgtacctctccgggtgacctcagaatcttactagatagtcctgggctgcatatctggattcttcgtatcaatgggcaggttgcaggggctgtcatggtttctgaggaagggccattggacgcagaattagtcgatgatatctggtcaggaaagcgcaggccgagagggcatttgttgccacaaacgctggttgctcaggagggggtaaaaaatgccgcacccctaaaggcgggccgggtaatccgtatcgcagtgcatcctcatctccatggtaaagggctgggttctcagttgctacagagtgttgaagcttattcaagagagcaaggctgggactatatagggtccagttttgcagtaaacgctgctctggttaaattctggcaacaaaacaattggcaaacgcttcgcctgggctcttctcaagacagtgtaagtgggagttatgcagccttagtgatgcagcctatttcagctgaggccgtgcagttagctgtgcagttaaaggcaaggtttacggagcagtttcattatcggcttggggatgacctgaattcgctggatatagcagtggtttgtaacttgttaagcaaaggggctaacaggtacgaattaactgaacatgagtatgccgatctgatcgcctttacacagcacaatcgcagttacgaaagctgttcactgagcatcaacaaattcctcagctcctttctctctgttgtcgatgctattcaattagatcatcttctccaggatgaagaggtgattctactgctgagaaaatcgtttcagcagtatggttggcaagaactagggcaagagggcttaggtcgcaagggcttgataagacagttgcgtagcgctttatctttattgctagagctctatcaagattactaa

SEQ ID NO: 40364 - protein, 719 aa, Oceanospirillum sp. MED92
MLSSLFDRLAKDALAHFHRRLLVVSGSRDWCHQQVKQLESIQGVIWVGNDYSGPAKSVGSRQVHRLLGQTVEHLIFDAWSGFNPDSFGQAAGLLQGGGVFILLCPELDEWGHFDDPEYRSLVPHPLPSSAAGRRFINRLCLLLEDDAYTVLYREKEELSGVEIELPEQSDRTDLVDEEVVSPHKTKDQQLSVELILSQFRRGRRPVVITADRGRGKSVALGIAAAQLSGLDFTDILVTAPEYDSAEEAFLMAHQLLPDYEYSPGRLSKGDHHIRFVEPELACLETGEGKVLFVDEAAAIPVPILRKCLENFPRVAFASTIHGYEGNGQGFAIRFRQILQEITPNWKSIHLKQPIRWKENDPLETLVFDVLLLNAQAASIEALKGDSDHYSPEIVKLDRDQLSEDYETLNQLFGLLVLAHYRTSPGDLRILLDSPGLHIWILRINGQVAGAVMVSEEGPLDAELVDDIWSGKRRPRGHLLPQTLVAQEGVKNAAPLKAGRVIRIAVHPHLHGKGLGSQLLQSVEAYSREQGWDYIGSSFAVNAALVKFWQQNNWQTLRLGSSQDSVSGSYAALVMQPISAEAVQLAVQLKARFTEQFHYRLGDDLNSLDIAVVCNLLSKGANRYELTEHEYADLIAFTQHNRSYESCSLSINKFLSSFLSVVDAIQLDHLLQDEEVILLLRKSFQQYGWQELGQEGLGRKGLIRQLRSALSLLLELYQDY

SEQ ID NO: 40365 - DNA, 2202 bp, marine gamma proteobacterium HTCC2143
  CDS (1)..(2202): transl_table=11
ttgaatcatctcagtcaagctgtagaaatcatcgaagcgcagcaagcggcggcactgaatacccgtcatcgtcgcttggtggttttgtctggagtgcagagctggtcggcgtcgattgtagacaatttactggtaaggcataagtttcaatcccctgcctggataactgaatctcctgacgctagcgccattaaaattaatcatcagcaggcgaagcgattgttgggccaggaaattgacctgctagtctttgatgcgtggtcggggttcgagcccaatgtctttgcagcagcagccggttcgttaattggcggtggcttattggtgctgcttgtaccggcgctggacgactggtcttccttcgcagatcccgactatgagcggatgttaacgtatccgttcttggcggagcatattgagggtcgatttcttgctcatgtgaagcaaagcttacagcgcgccgataaaacgttgatttttgagcagggtaagcccttgccggcgctccctaagccggagcagcgggatacccaattagtggcgacgggtgatcactgtcttactcgcgatcagtcattggctgtagcggcaattgtccgggtctctcgcggccatgcgaaaagaccactagtgataacctctgaccgtggtcggggcaagtcctcagcgctggggatcgcctgtgcccagctgatggctgagggtaataaaactctgatagtaacggcatctaggatagatgcggttcgtccagttttcgaacatgccgtgacagtgctgggcgagaaagcggttttgtcaggtagtgataattcaaaagtcagttttggtcactcttcgctgcagtttgtggctgcggacgagttgcggagtagccctattgatgcccatttactactggttgatgaggcggcatcaatccctgctgcggtattggaggatttgctgaagagctatagtcgaatcgtctatgcgactacggtccatggttatgagggatcggggcgcggctttgatattcgatttcgggcaactcttgatgccatcaggccgcaatggaaatctttggttctacagcagcccattcgctggcaacaacatgatccggttgagcattggcttttcgaggcgatgttgctaaaagcgactgcaattgaccgggaacatatcgaaggttgtgaagtgggtctgtgtgttatcgaaaaaattgataaagacgaattgttgaatgatcgctctttattgcaacagttatttggattattggtcacggcgcactatcagactacgcctaatgacctgagagcgatactggacgcacctaacatagttgtttgggtgggtcgttataaaggcggtgttgtggctgctgctctggtgtcactggaaggtgagttttcgggggacatactgcagtcaatatgggagggaaagcgccggcccaaagggcatttactgccacaaacgttatcggctcacgagggtttgcgatcatcgccggcgttatcttatcgacggattatgcgtgttgccgtacatccagcggcgcagcgaaggcagttggggtctcgattagtgaaagttatcacggacgatgcgaggaacgagaattgtgattttgtcgggtctagttttgctgcaacgcacgatgtgctggcattctggcaaagtttacagtgtgtccccgtgcgtctgggtattcgtcgtgatgcgagtagtggctgctattctgctatggtactgtcagccttatctgctgaagctgaccaacttttttacatcgcccgacaacggtttattcagcagttcccctggcacttaagtcgacgctatcggcacttgccgccgaagttggtggttgagttgctggccggcaatagtggcgatttttcgggtttaagtcagcaggaatggttggacgtggcggccttttctcagggatttaggccgtatgaaatgtgttgctatgcgctgtggagtttgctccagctggcattggcaaaaaaaatcggttttgccttgttaactacccagcaggttgatgtgctggtgatgaaagtattgcaagggcaggacgacaaggttgtaatcaggcagctgtcttatttggggaaaaagcaattggaaacagaacttcgcgcggcggtaagtctgctttatcgtgcactctgcaacgagggatattctagcaatgagtattga

SEQ ID NO: 40366 - protein, 733 aa, marine gamma proteobacterium HTCC2143
MNHLSQAVEIIEAQQAAALNTRHRRLVVLSGVQSWSASIVDNLLVRHKFQSPAWITESPDASAIKINHQQAKRLLGQEIDLLVFDAWSGFEPNVFAAAAGSLIGGGLLVLLVPALDDWSSFADPDYERMLTYPFLAEHIEGRFLAHVKQSLQRADKTLIFEQGKPLPALPKPEQRDTQLVATGDHCLTRDQSLAVAAIVRVSRGHAKRPLVITSDRGRGKSSALGIACAQLMAEGNKTLIVTASRIDAVRPVFEHAVTVLGEKAVLSGSDNSKVSFGHSSLQFVAADELRSSPIDAHLLLVDEAASIPAAVLEDLLKSYSRIVYATTVHGYEGSGRGFDIRFRATLDAIRPQWKSLVLQQPIRWQQHDPVEHWLFEAMLLKATAIDREHIEGCEVGLCVIEKIDKDELLNDRSLLQQLFGLLVTAHYQTTPNDLRAILDAPNIVVWVGRYKGGVVAAALVSLEGEFSGDILQSIWEGKRRPKGHLLPQTLSAHEGLRSSPALSYRRIMRVAVHPAAQRRQLGSRLVKVITDDARNENCDFVGSSFAATHDVLAFWQSLQCVPVRLGIRRDASSGCYSAMVLSALSAEADQLFYIARQRFIQQFPWHLSRRYRHLPPKLVVELLAGNSGDFSGLSQQEWLDVAAFSQGFRPYEMCCYALWSLLQLALAKKIGFALLTTQQVDVLVMKVLQGQDDKVVIRQLSYLGKKQLETELRAAVSLLYRALCNEGYSSNEY

SEQ ID NO: 40367 - DNA, 2016 bp, Escherichia coli B
  CDS (1)..(2016): transl_table=11
atggctgaactgactgcgcttcacacattaacagcgcaaatgaaacgtgaaggggtccgccgcttgctggtgttgagcggggaagagggttggtgttttgatcatgcgcttaagttacgtgatgccttacctggcgactggctgtggatttcgccgcagccagatgctgaaaaccactgttctccctcggcactacaaactttacttgggcgcgagttccggcatgcggtattcgacgcccgccacggctttgatgccgctgcctttgcagcacttagcggaacgttgaaagcgggaagctggctggttttgttactccctgtatgggaagagtgggaaaaccaacctgatgccgactcgctgcgctggagtgattgccctgaccctattgcgacgccgcattttgtccagcatctcaaacgcgtacttacggcggataacgacgctatcctctggcggcaaaaccagccgttctcgttggcgcattttactccccgtactgactggcaccccgcgaccggcgcaccacaaccagaacaacagcaactcttacagcagctactgaccatgccgccgggcgtggcagcggtaacggctgcgcgtgggcgcggtaagtcggcgctggcagggcaactcatttctcgtattgcgggcagtgcgattgtcaccgcgcccgcaaaagcggcaacggatgtactggcacaatttgcgggcgagaagtttcgctttattgcgccggatgccttgttagccagcgatgagcaagccgactggctggtggtcgacgaagccgcagccatacctgcgccgttgttgcatcaactggtatcgcgttttcctcgaacgttgttaaccactacggtgcagggctacgaaggcaccggacgtggttttttgctgaaattttgcgctcgctttccgcatttacaccgttttgaactgcaacagccgatccgctgggcacagggatgcccgctggaaaaaatggttagtaatgcactggtttttgacgatgaaaacttcacccatacaccacaaggcaatattgtcatttccgcatttgaacagacgttatggcgaatcgagccagaaacgccgttaaaggtttatcagttattgtctggtgcgcactaccggacttcgccactggatttacgccgcatgatggatgcaccagggcaacattttttacaggcggctggcgaaaacgagattgccggagcgctgtggctggtggatgagggtggattatctcaagaactcagtcaggcggtatgggcaggttttcgtcgcccgcggggtaatctggtggcccagtcgctggcggcgcacggcagcaatccactggcggcgacattgcgtggacggcgggtcagccggattgcagtccatccggcgcgtcagcgcgaaggcgttgggcaacagctcattgccagcgctttgcaatataggcctggcctcgactatctttcggtgagttttggttacaccggggagttatggcgtttctggcaacgctgcggttttgtgctggtgcgaatgggtaatcatcgtgaagccagcagcggttgctatacggcgatggcactgttaccgatgagtgatgcgggtaaacagctggctgaacgtgagcattaccgtttacgtcgcgatgcgcaagctctcgcaaagtggaatggcgaaacgcttcctgttgatccactaaacgatgccgtcctttctgacgacgactggcttgaactggccggttttgctttcgctcatcgtccgctattaacatcgttaggttgcttattgcgtctgctacaaaccagtgaactggcattaccggcgctgcgtgggcgtttacagaaaaacgtcagcgacgcgcagttatgtaccacacttaaactttcaggccgcaagatgttactggtccgtcagcgggaagaggccgcgcaggcgctgttcgcacttaatgaggttcgcactgaacgtctgcgcgatcgcataacgcaatggcaattttttcactga

SEQ ID NO: 40368 - protein, 671 aa, Escherichia coli B
MAELTALHTLTAQMKREGVRRLLVLSGEEGWCFDHALKLRDALPGDWLWISPQPDAENHCSPSALQTLLGREFRHAVFDARHGFDAAAFAALSGTLKAGSWLVLLLPVWEEWENQPDADSLRWSDCPDPIATPHFVQHLKRVLTADNDAILWRQNQPFSLAHFTPRTDWHPATGAPQPEQQQLLQQLLTMPPGVAAVTAARGRGKSALAGQLISRIAGSAIVTAPAKAATDVLAQFAGEKFRFIAPDALLASDEQADWLVVDEAAAIPAPLLHQLVSRFPRTLLTTTVQGYEGTGRGFLLKFCARFPHLHRFELQQPIRWAQGCPLEKMVSNALVFDDENFTHTPQGNIVISAFEQTLWRIEPETPLKVYQLLSGAHYRTSPLDLRRMMDAPGQHFLQAAGENEIAGALWLVDEGGLSQELSQAVWAGFRRPRGNLVAQSLAAHGSNPLAATLRGRRVSRIAVHPARQREGVGQQLIASALQYRPGLDYLSVSFGYTGELWRFWQRCGFVLVRMGNHREASSGCYTAMALLPMSDAGKQLAEREHYRLRRDAQALAKWNGETLPVDPLNDAVLSDDDWLELAGFAFAHRPLLTSLGCLLRLLQTSELALPALRGRLQKNVSDAQLCTTLKLSGRKMLLVRQREEAAQALFALNEVRTERLRDRITQWQFFH

SEQ ID NO: 40369 - DNA, 22 bp, Artificial sequence
  primer
atggctgaactgactgcgcttc

SEQ ID NO: 40370 - DNA, 28 bp, Artificial sequence
  primer
ttagtgaaataattgccattgcgttatg

SEQ ID NO: 40371 - protein, 743 aa, Artificial sequence
  consensus sequence
  Variant (2)..(4): Xaa in position 2 to 4 is any amino acid
  Variant (6)..(7): Xaa in position 6 to 7 is any amino acid
  Variant (8)..(8): Xaa in position 8 is any or no amino acid
  Variant (10)..(23): Xaa in position 10 to 23 is any amino acid
  Variant (24)..(50): Xaa in position 24 to 50 is any or no amino acid
  Variant (54)..(54): Xaa in position 54 is any amino acid
  Variant (56)..(60): Xaa in position 56 to 60 is any amino acid
  Variant (64)..(65): Xaa in position 64 to 65 is any amino acid
  Variant (67)..(72): Xaa in position 67 to 72 is any amino acid
  Variant (73)..(76): Xaa in position 73 to 76 is any or no amino acid
  Variant (78)..(80): Xaa in position 78 to 80 is any amino acid
  Variant (84)..(85): Xaa in position 84 to 85 is any amino acid
  Variant (87)..(88): Xaa in position 87 to 88 is any amino acid
  Variant (90)..(90): Xaa in position 90 is any amino acid
  Variant (93)..(93): Xaa in position 93 is any amino acid
  Variant (95)..(99): Xaa in position 95 to 99 is any amino acid
  Variant (100)..(103): Xaa in position 100 to 103 is any or no amino acid
  Variant (105)..(105): Xaa in position 105 is any amino acid
  Variant (107)..(108): Xaa in position 107 to 108 is any amino acid
  Variant (110)..(115): Xaa in position 110 to 115 is any amino acid
  Variant (116)..(123): Xaa in position 116 to 123 is any or no amino acid
  Variant (125)..(158): Xaa in position 125 to 158 is any amino acid
  Variant (159)..(176): Xaa in position 159 to 176 is any or no amino acid
  Variant (178)..(194): Xaa in position 178 to 194 is any amino acid
  Variant (195)..(200): Xaa in position 195 to 200 is any or no amino acid
  Variant (203)..(203): Xaa in position 203 is any amino acid
  Variant (210)..(212): Xaa in position 210 to 212 is any amino acid
  Variant (214)..(225): Xaa in position 214 to 225 is any amino acid
  Variant (226)..(229): Xaa in position 226 to 229 is any or no amino acid
  Variant (233)..(243): Xaa in position 233 to 243 is any amino acid
  Variant (245)..(249): Xaa in position 245 to 249 is any amino acid
  Variant (250)..(270): Xaa in position 250 to 270 is any or no amino acid
  Variant (272)..(272): Xaa in position 272 is any amino acid
  Variant (276)..(276): Xaa in position 276 is any amino acid
  Variant (278)..(286): Xaa in position 278 to 286 is any amino acid
  Variant (287)..(292): Xaa in position 287 to 292 is any or no amino acid
  Variant (294)..(295): Xaa in position 294 to 295 is any amino acid
  Variant (300)..(300): Xaa in position 300 is any amino acid
  Variant (303)..(303): Xaa in position 303 is any amino acid
  Variant (305)..(305): Xaa in position 305 is any amino acid
  Variant (307)..(312): Xaa in position 307 to 312 is any amino acid
  Variant (314)..(314): Xaa in position 314 is any amino acid
  Variant (316)..(319): Xaa in position 316 to 319 is any amino acid
  Variant (322)..(323): Xaa in position 322 to 323 is any amino acid
  Variant (333)..(333): Xaa in position 333 is any amino acid
  Variant (337)..(347): Xaa in position 337 to 347 is any amino acid
  Variant (348)..(351): Xaa in position 348 to 351 is any or no amino acid
  Variant (353)..(354): Xaa in position 353 to 354 is any amino acid
  Variant (356)..(356): Xaa in position 356 is any amino acid
  Variant (359)..(362): Xaa in position 359 to 362 is any amino acid
  Variant (366)..(371): Xaa in position 366 to 371 is any amino acid
  Variant (373)..(388): Xaa in position 373 to 388 is any amino acid
  Variant (389)..(449): Xaa in position 389 to 449 is any or no amino acid
  Variant (452)..(453): Xaa in position 452 to 453 is any amino acid
  Variant (457)..(457): Xaa in position 457 is any amino acid
  Variant (459)..(459): Xaa in position 459 is any amino acid
  Variant (461)..(461): Xaa in position 461 is any amino acid
  Variant (465)..(467): Xaa in position 465 to 467 is any amino acid
  Variant (471)..(484): Xaa in position 471 to 484 is any amino acid
  Variant (486)..(491): Xaa in position 486 to 491 is any amino acid
  Variant (494)..(494): Xaa in position 494 is any amino acid
  Variant (496)..(498): Xaa in position 496 to 498 is any amino acid
  Variant (499)..(499): Xaa in position 499 is any or no amino acid
  Variant (501)..(506): Xaa in position 501 to 506 is any amino acid
  Variant (508)..(508): Xaa in position 508 is any amino acid
  Variant (512)..(512): Xaa in position 512 is any amino acid
  Variant (514)..(514): Xaa in position 514 is any amino acid
  Variant (516)..(517): Xaa in position 516 to 517 is any amino acid
  Variant (519)..(519): Xaa in position 519 is any amino acid
  Variant (521)..(528): Xaa in position 521 to 528 is any amino acid
  Variant (530)..(531): Xaa in position 530 to 531 is any amino acid
  Variant (533)..(535): Xaa in position 533 to 535 is any amino acid
  Variant (537)..(538): Xaa in position 537 to 538 is any amino acid
  Variant (543)..(543): Xaa in position 543 is any amino acid
  Variant (545)..(549): Xaa in position 545 to 549 is any amino acid
  Variant (551)..(551): Xaa in position 551 is any amino acid
  Variant (553)..(553): Xaa in position 553 is any amino acid
  Variant (554)..(554): Xaa in position 554 is any or no amino acid
  Variant (556)..(564): Xaa in position 556 to 564 is any amino acid
  Variant (565)..(571): Xaa in position 565 to 571 is any or no amino acid
  Variant (573)..(574): Xaa in position 573 to 574 is any amino acid
  Variant (576)..(576): Xaa in position 576 is any amino acid
  Variant (580)..(583): Xaa in position 580 to 583 is any amino acid
  Variant (585)..(586): Xaa in position 585 to 586 is any amino acid
  Variant (589)..(591): Xaa in position 589 to 591 is any amino acid
  Variant (593)..(595): Xaa in position 593 to 595 is any amino acid
  Variant (597)..(598): Xaa in position 597 to 598 is any amino acid
  Variant (600)..(603): Xaa in position 600 to 603 is any amino acid
  Variant (608)..(608): Xaa in position 608 is any amino acid
  Variant (610)..(610): Xaa in position 610 is any amino acid
  Variant (612)..(615): Xaa in position 612 to 615 is any amino acid
  Variant (617)..(617): Xaa in position 617 is any amino acid
  Variant (619)..(620): Xaa in position 619 to 620 is any amino acid
  Variant (622)..(632): Xaa in position 622 to 632 is any amino acid
  Variant (633)..(633): Xaa in position 633 is any or no amino acid
  Variant (635)..(655): Xaa in position 635 to 655 is any amino acid
  Variant (656)..(665): Xaa in position 656 to 665 is any or no amino acid
  Variant (667)..(669): Xaa in position 667 to 669 is any amino acid
  Variant (672)..(673): Xaa in position 672 to 673 is any amino acid
  Variant (675)..(676): Xaa in position 675 to 676 is any amino acid
  Variant (679)..(681): Xaa in position 679 to 681 is any amino acid
  Variant (683)..(692): Xaa in position 683 to 692 is any amino acid
  Variant (696)..(703): Xaa in position 696 to 703 is any amino acid
  Variant (704)..(717): Xaa in position 704 to 717 is any or no amino acid
  Variant (719)..(734): Xaa in position 719 to 734 is any amino acid
  Variant (735)..(738): Xaa in position 735 to 738 is any or no amino acid
  Variant (740)..(740): Xaa in position 740 is any amino acid
  Variant (742)..(742): Xaa in position 742 is any amino acid
LXXXGXXXWXXXXXXXXXXXXXXXXXXXXXXXXXXXXXXXXXXXXXXXXXLLGXEXXXXXFDAXXGXXXXXXXXXXAXXXGTLXXGXXLXLLXPXXXXXXXXXDXDXXRXXXXXXXXXXXXXXFXXXXXXXXXXXXXXXXXXXXXXXXXXXXXXXXXXXXXXXXXXXXXXXXXXXXQXXXXXXXXXXXXXXXXXXXXXXXTAXRGRGKSXXXGXXXXXXXXXXXXXXXXTAPXXXXXXXXXXXAXXXXXXXXXXXXXXXXXXXXXXXXXXFXAPDXLXXXXXXXXXXXXXXXLXXDEAAXIPXPXLXXXXXXFXRXXXXTTXXGYEGTGRGFXLKFXXXXXXXXXXXXXXXLXXPXRWXXXXPLEXXXXXXLXXXXXXXXXXXXXXXXXXXXXXXXXXXXXXXXXXXXXXXXXXXXXXXXXXXXXXXXXXXXXXXXXXXXXXXXXXXXXLLXXAHYXTXPXDLRXXXDAPXXXXXXXXXXXXXXGXXXXXXEGXLXXXXLXXXXXXGXRRPXGXLXXQXLXXXXXXXXAXXLXXXRXXRIAVXPXXXXXGXGXXLXXXXXXXXXXXXXXXXDXXSXSFGXXXXLXXFWXXXGXXXVXXGXXXXASSGXYXAXXXXPXSXXGXXXXXXXXXXXXRXXXXXXXXXXXXXXXXXXXXXXXXXXXXXXXLXXXDWXXLXXFAXXXRXXXXXXXXXXRLLXXXXXXXXXXXXXXXXXXXXXXLXXXXXXXXXXXXXXXXXXXXGXKXL

SEQ ID NO: 40372 - protein, 45 aa, Artificial sequence
  protein pattern
  Variant (2)..(3): Xaa in position 2 to 3 is any amino acid
  Variant (4)..(4): Xaa in position 4 is any or no amino acid
  Variant (9)..(9): Xaa in position 9 is any amino acid
  Variant (10)..(10): Xaa in position 10 is Ile or Leu
  Variant (12)..(12): Xaa in position 12 is any amino acid
  Variant (13)..(13): Xaa in position 13 is Ala, Pro or Ser
  Variant (14)..(14): Xaa in position 14 is any amino acid
  Variant (16)..(21): Xaa in position 16 to 21 is any amino acid
  Variant (22)..(22): Xaa in position 22 is Phe, His or Tyr
  Variant (23)..(25): Xaa in position 23 to 25 is any amino acid
  Variant (26)..(26): Xaa in position 26 is Ala, Ile, Leu or Val
  Variant (27)..(27): Xaa in position 27 is any amino acid
  Variant (28)..(28): Xaa in position 28 is Ala, Ser or Thr
  Variant (31)..(31): Xaa in position 31 is Ile or Val
  Variant (32)..(32): Xaa in position 32 is any amino acid
  Variant (33)..(33): Xaa in position 33 is Gly or Ser
  Variant (37)..(37): Xaa in position 37 is Ser or Thr
  Variant (42)..(42): Xaa in position 42 is any amino acid
  Variant (43)..(43): Xaa in position 43 is Ile or Leu
  Variant (44)..(44): Xaa in position 44 is Lys or Arg
LXXXDEAAXXPXXXLXXXXXXXXXXXXXTTXXXYEGXGRGFXXXF

SEQ ID NO: 40373 - protein, 38 aa, Artificial sequence
  protein pattern
  Variant (2)..(8): Xaa in position 2 to 8 is any amino acid
  Variant (9)..(10): Xaa in position 9 to 10 is any or no amino acid
  Variant (13)..(13): Xaa in position 13 is any or no amino acid
  Variant (15)..(15): Xaa in position 15 is any amino acid
  Variant (16)..(16): Xaa in position 16 is His or Tyr
  Variant (17)..(17): Xaa in position 17 is Ser or Thr
  Variant (18)..(18): Xaa in position 18 is Ala or Val
  Variant (19)..(19): Xaa in position 19 is Ile, Met or Val
  Variant (20)..(20): Xaa in position 20 is any amino acid
  Variant (21)..(21): Xaa in position 21 is Ile or Leu
  Variant (22)..(22): Xaa in position 22 is any amino acid
  Variant (23)..(23): Xaa in position 23 is Ala, Gly or Pro
  Variant (24)..(24): Xaa in position 24 is Ile, Leu, Met or Val
  Variant (26)..(26): Xaa in position 26 is any amino acid
  Variant (27)..(27): Xaa in position 27 is Ala, Glu or Gln
  Variant (28)..(28): Xaa in position 28 is Ala or Gly
  Variant (29)..(30): Xaa in position 29 to 30 is any amino acid
  Variant (31)..(31): Xaa in position 31 is Phe or Leu
  Variant (32)..(34): Xaa in position 32 to 34 is any amino acid
  Variant (35)..(35): Xaa in position 35 is Ala, Glu or Gly
  Variant (36)..(37): Xaa in position 36 to 37 is any amino acid
  Variant (38)..(38): Xaa in position 38 is Gln or Arg
VXXXXXXXXXASXGXXXXXXXXXXSXXXXXXXXXXXXX

SEQ ID NO: 40374 - protein, 25 aa, Artificial sequence
  protein pattern
  Variant (3)..(3): Xaa in position 3 is Ala, Cys, Ser, Thr or Val
  Variant (4)..(4): Xaa in position 4 is any amino acid
  Variant (8)..(8): Xaa in position 8 is any amino acid
  Variant (10)..(10): Xaa in position 10 is any amino acid
  Variant (12)..(13): Xaa in position 12 to 13 is any or no amino acid
  Variant (16)..(16): Xaa in position 16 is any amino acid
  Variant (17)..(17): Xaa in position 17 is Ile, Leu or Met
  Variant (18)..(18): Xaa in position 18 is Phe, Leu or Met
  Variant (20)..(20): Xaa in position 20 is Ala, Gly or Ser
  Variant (21)..(21): Xaa in position 21 is Pro or Gln
  Variant (22)..(24): Xaa in position 22 to 24 is any amino acid
  Variant (25)..(25): Xaa in position 25 is Phe, Ile, Leu or Val
LLXXAHYXTXPXXLRXXXDXXXXXX

SEQ ID NO: 40375 - protein, 30 aa, Artificial sequence
  protein pattern
  Variant (3)..(3): Xaa in position 3 is any amino acid
  Variant (4)..(4): Xaa in position 4 is Phe or Leu
  Variant (5)..(5): Xaa in position 5 is Asp, Glu, Ser or Thr
  Variant (6)..(6): Xaa in position 6 is any amino acid
  Variant (7)..(7): Xaa in position 7 is Ala, Asp, Glu, Gln or Ser
  Variant (8)..(8): Xaa in position 8 is Ile or Leu
  Variant (9)..(10): Xaa in position 9 to 10 is any amino acid
  Variant (11)..(11): Xaa in position 11 is Ala, Asp, Glu, Gln or Ser
  Variant (12)..(12): Xaa in position 12 is Ile or Val
  Variant (13)..(14): Xaa in position 13 to 14 is any amino acid
  Variant (16)..(16): Xaa in position 16 is any amino acid
  Variant (20)..(20): Xaa in position 20 is any amino acid
  Variant (22)..(22): Xaa in position 22 is any amino acid
  Variant (24)..(24): Xaa in position 24 is any amino acid
  Variant (25)..(29): Xaa in position 25 to 29 is any or no amino acid
EGXXXXXXXXXXXXGXRRPXGXLXXXXXXA

SEQ ID NO: 40376 - protein, 21 aa, Artificial sequence
  protein pattern
  Variant (2)..(2): Xaa in position 2 is Phe or Tyr
  Variant (3)..(3): Xaa in position 3 is Ile, Leu or Val
  Variant (5)..(5): Xaa in position 5 is Thr or Val
  Variant (9)..(9): Xaa in position 9 is any amino acid
  Variant (10)..(10): Xaa in position 10 is Gln, Ser or Thr
  Variant (11)..(12): Xaa in position 11 to 12 is any amino acid
  Variant (14)..(16): Xaa in position 14 to 16 is any or no amino acid
  Variant (18)..(19): Xaa in position 18 to 19 is any amino acid
  Variant (20)..(20): Xaa in position 20 is Cys or Ser
  Variant (21)..(21): Xaa in position 21 is Gly or Gln
DXXSXSFGXXXXLXXXWXXXX

SEQ ID NO: 40377 - protein, 16 aa, Artificial sequence
  protein pattern
  Variant (2)..(2): Xaa in position 2 is Ala or Ser
  Variant (3)..(3): Xaa in position 3 is any amino acid
  Variant (10)..(10): Xaa in position 10 is any amino acid
  Variant (11)..(11): Xaa in position 11 is any or no amino acid
  Variant (13)..(14): Xaa in position 13 to 14 is any or no amino acid
  Variant (16)..(16): Xaa in position 16 is Ala, Cys, Gly or Ser
TXXRGRGKSXXLXXAX

SEQ ID NO: 40378 - protein, 21 aa, Artificial sequence
  protein pattern
  Variant (2)..(3): Xaa in position 2 to 3 is any amino acid
  Variant (7)..(7): Xaa in position 7 is Leu or Val
  Variant (8)..(8): Xaa in position 8 is any amino acid
  Variant (9)..(9): Xaa in position 9 is Pro or Ser
  Variant (10)..(14): Xaa in position 10 to 14 is any amino acid
  Variant (15)..(15): Xaa in position 15 is Gly, Asn or Ser
  Variant (16)..(16): Xaa in position 16 is any amino acid
  Variant (18)..(19): Xaa in position 18 to 19 is any amino acid
  Variant (20)..(20): Xaa in position 20 is Leu or Met
  Variant (21)..(21): Xaa in position 21 is Ile, Leu, Met or Val
RXXRIAXXXXXXXXXXGXXXX

SEQ ID NO: 40379 - protein, 19 aa, Artificial sequence
  protein pattern
  Variant (2)..(2): Xaa in position 2 is Ile, Leu or Val
  Variant (4)..(4): Xaa in position 4 is Phe or Trp
  Variant (5)..(6): Xaa in position 5 to 6 is any amino acid
  Variant (7)..(7): Xaa in position 7 is Asp, Glu, Gly or Asn
  Variant (8)..(8): Xaa in position 8 is Cys or Asp
  Variant (12)..(17): Xaa in position 12 to 17 is any amino acid
  Variant (18)..(18): Xaa in position 18 is any or no amino acid
PXRXXXXXPLEXXXXXXXL

SEQ ID NO: 40380 - protein, 21 aa, Artificial sequence
  protein pattern
  Variant (3)..(3): Xaa in position 3 is Gln or Arg
  Variant (4)..(4): Xaa in position 4 is Glu or Thr
  Variant (5)..(7): Xaa in position 5 to 7 is any amino acid
  Variant (8)..(8): Xaa in position 8 is Ala, Gly, Ile, Leu or Val
  Variant (9)..(9): Xaa in position 9 is Ile, Leu or Val
  Variant (13)..(14): Xaa in position 13 to 14 is any amino acid
  Variant (16)..(16): Xaa in position 16 is Phe, Ile, Leu or Val
  Variant (17)..(17): Xaa in position 17 is any amino acid
  Variant (18)..(18): Xaa in position 18 is Ala, Ile, Leu, Pro or Val
  Variant (19)..(19): Xaa in position 19 is Ala, Asp, Glu or Asn
  Variant (20)..(20): Xaa in position 20 is Ala, Ser or Val
  Variant (21)..(21): Xaa in position 21 is Phe or Leu
LGXXXXXXXFDAXXGXXXXXX

SEQ ID NO: 40381 - protein, 37 aa, Artificial sequence
  protein pattern
  Variant (2)..(3): Xaa in position 2 to 3 is any or no amino acid
  Variant (5)..(6): Xaa in position 5 to 6 is any or no amino acid
  Variant (9)..(9): Xaa in position 9 is Ile, Leu or Val
  Variant (10)..(11): Xaa in position 10 to 11 is any amino acid
  Variant (12)..(12): Xaa in position 12 is Asp, Gly or Gln
  Variant (13)..(13): Xaa in position 13 is Gly or Ser
  Variant (14)..(14): Xaa in position 14 is any amino acid
  Variant (16)..(16): Xaa in position 16 is any amino acid
  Variant (17)..(17): Xaa in position 17 is Ile, Leu or Met
  Variant (18)..(18): Xaa in position 18 is Ile, Leu, Met or Val
  Variant (19)..(19): Xaa in position 19 is any amino acid
  Variant (20)..(20): Xaa in position 20 is Asn, Pro or Ser
  Variant (21)..(29): Xaa in position 21 to 29 is any amino acid
  Variant (31)..(31): Xaa in position 31 is any amino acid
  Variant (32)..(32): Xaa in position 32 is Asp, Glu or Ser
  Variant (33)..(36): Xaa in position 33 to 36 is any amino acid
  Variant (37)..(37): Xaa in position 37 is Ala, Asn, Gln or Ser
AXXAXXGTXXXXXXLXXXXXXXXXXXXXXDXXXXXXX

SEQ ID NO: 40382 - protein, 24 aa, Artificial sequence
  protein pattern
  Variant (3)..(7): Xaa in position 3 to 7 is any amino acid
  Variant (8)..(8): Xaa in position 8 is Phe, Leu or Met
  Variant (9)..(9): Xaa in position 9 is any amino acid
  Variant (10)..(10): Xaa in position 10 is Ala, Ser or Thr
  Variant (11)..(11): Xaa in position 11 is Ala, Cys or Ser
  Variant (12)..(12): Xaa in position 12 is any amino acid
  Variant (13)..(13): Xaa in position 13 is Ala, Gly, Pro or Val
  Variant (14)..(14): Xaa in position 14 is Ala, Cys or Ser
  Variant (15)..(15): Xaa in position 15 is Ile or Leu
  Variant (16)..(16): Xaa in position 16 is any amino acid
  Variant (18)..(19): Xaa in position 18 to 19 is any or no amino acid
  Variant (21)..(23): Xaa in position 21 to 23 is any amino acid
  Variant (24)..(24): Xaa in position 24 is Ala, Asp, Glu, Ser or Thr
FAXXXXXXXXXXXXXXRXXLXXXX

SEQ ID NO: 40383 - DNA, 813 bp, Escherichia coli
  CDS (1)..(813): transl_table=11
atgagcgatctgcataacgagtccatttttattaccggcggcggatcgggattagggctggcgctggtcgagcgatttatcgaagaaggcgcgcaggttgccacgctggaactgtcggcggcaaaagtcgccagtctgcgtcagcgatttggcgaacatattctggcggtggaaggtaacgtgacctgttatgccgattatcaacgcgcggtcgatcagatcctgactcgttccggcaagctggattgttttatcggcaatgcaggcatctgggatcacaatgcctcactggttaatactcccgcagagacgctcgaaaccggcttccacgagctgtttaacgtcaatgttctcggttacctgctgggcgcaaaagcctgcgctccggcgttaatcgccagtgaaggcagcatgattttcacactgtcaaatgccgcctggtatcctggcggcggtggcccgctgtacaccgccagtaaacatgccgcaaccggacttattcgccaactggcttatgaactggcaccgaaagtgcgggtgaatggcgtcggcccgtgtggtatggccagcgacctgcgcggcccacaggcgctcgggcaaagtgaaacctcgataatgcagtctctgacgccggagaaaattgccgccattttaccgctgcaatttttcccgcaaccggcggattttacggggccgtatgtgatgttgacatcgcggcgcaataatcgcgcattaagcggtgtgatgatcaacgctgatgcgggtttagcgattcgcggcattcgccacgtagcggctgggctggatctttaa

SEQ ID NO: 40384 - protein, 270 aa, Escherichia coli
MSDLHNESIFITGGGSGLGLALVERFIEEGAQVATLELSAAKVASLRQRFGEHILAVEGNVTCYADYQRAVDQILTRSGKLDCFIGNAGIWDHNASLVNTPAETLETGFHELFNVNVLGYLLGAKACAPALIASEGSMIFTLSNAAWYPGGGGPLYTASKHAATGLIRQLAYELAPKVRVNGVGPCGMASDLRGPQALGQSETSIMQSLTPEKIAAILPLQFFPQPADFTGPYVMLTSRRNNRALSGVMINADAGLAIRGIRHVAAGLDL

SEQ ID NO: 40385 - DNA, 768 bp, Bombyx mori
  CDS (1)..(768)
atgtttaagggcctagtagctttggtgactggagggtcatcaggattaggaaaagctactgctgagctgttagtaaaacaagggggcagagttgttatctgtgacttaccctcaaccaaaggccaaaatactgctaaaagccttggcgagaatgcagtgtttgcacctgttgatgtaacttcggaagatgatgtgaaggaggctctacagataactttagacaagtttggtcgattggatgctcttataaactgtgcaggcgttgcgagtgcatcaagagtttataatttcaaaaaggaacaaccatttgatttgaacatctttcaaaacactattcaggtaaatttgataggaacattcaatgttattcgcttagcagtggggctaatcgggaaaaatgcaccagacgctgacggacaacgcggagtcgttatcaacacggccagtgtcgctgcatttgatggacagatcggacaggcagcttattctgcttccaaagcgggcgtggtaggcatgacattgcctcttgcaagggacatggccaaacaaggaatcagagtcgtcactattgcaccaggattattccgtacacctatgatggaacaattgccagagccggcgatcaaaagcctggaagcgtcggtgccattcccttctagacttgggcatcctcaagagtttgcattgctcgttcagagcatcattcagaacccgatgctaaacggcgaaactatacgattagacggctccctcaggatgcagccttaa

SEQ ID NO: 40386 - protein, 255 aa, Bombyx mori
MFKGLVALVTGGSSGLGKATAELLVKQGGRVVICDLPSTKGQNTAKSLGENAVFAPVDVTSEDDVKEALQITLDKFGRLDALINCAGVASASRVYNFKKEQPFDLNIFQNTIQVNLIGTFNVIRLAVGLIGKNAPDADGQRGVVINTASVAAFDGQIGQAAYSASKAGVVGMTLPLARDMAKQGIRVVTIAPGLFRTPMMEQLPEPAIKSLEASVPFPSRLGHPQEFALLVQSIIQNPMLNGETIRLDGSLRMQP

SEQ ID NO: 40387 - DNA, 825 bp, Oryza sativa (japonica cultivar-group)
  CDS (1)..(825)
atggcagctggaagctcccatgtttctgctgatgcaaggaagctggtgggcaaggtggcggtgatcaccggcggcgcgagcggcatcggcgcgtgcacggcgcggctgttcgtgaagcacggcgcccgcgtcgtggtcgccgacatccaggacgagctgggagctagcctcgtcgccgagctcggcccggacgcgtccagctacgtgcactgcgacgtcacgaacgagggcgacgtcgccgccgcggtcgaccacgccgtcgccaggttcgggaagctcgacgtcatgttcaacaacgccggcgtcagtggcccgccgtgcttcaggatgagcgagtgcaccaaggaggacttcgagcgcgtgctcgccgtgaacctggtcggcccgttcctgggcaccaagcacgcggcgcgggtgatggcgccggcgcgccgcggcagcatcatctcgacggcgagcctgtcgtcgtcggtgtccggcgcggcgtcgcacgcgtacacgacgtcgaagcacgcgctggtggggttcacggagaacgcggccggcgagctgggccggcacgggatccgcgtcaactgcgtttcgcccgccggggtcgccacgccgctggcgagggctgccatgggcatggacgacgaggcaatcgaggcgatcatggcgaactcggcgaacctgaagggcgcaggcgcactcaaggcggacgacatcgccgccgcggcgctgttcctcgccagcgacgacggccggtacgtgagcggccagaacctgcgcgtcgacggcggcttgtccgtcgtcaacagcagctttggtttcttcagggactga

SEQ ID NO: 40388 - protein, 274 aa, Oryza sativa (japonica cultivar-group)
MAAGSSHVSADARKLVGKVAVITGGASGIGACTARLFVKHGARVVVADIQDELGASLVAELGPDASSYVHCDVTNEGDVAAAVDHAVARFGKLDVMFNNAGVSGPPCFRMSECTKEDFERVLAVNLVGPFLGTKHAARVMAPARRGSIISTASLSSSVSGAASHAYTTSKHALVGFTENAAGELGRHGIRVNCVSPAGVATPLARAAMGMDDEAIEAIMANSANLKGAGALKADDIAAAALFLASDDGRYVSGQNLRVDGGLSVVNSSFGFFRD

SEQ ID NO: 40389 - DNA, 900 bp, Oryza sativa (japonica cultivar-group)
  CDS (1)..(900)
atggccgtggagtcgccattcagggcggatgtgttgaggggcaaggcggcgctggtcaccggcggcggctccggcatcgggttcgagatcgccgcccagctcgcccgccacggcgcgcacgtcgccatcatgggccgccgccgcgaggtcctcgacaaggccgtcgccgccctccgctcccacggcctccgggctgttggttttgagggagatgtgcgcaagcaggaagatgccgcgagagtggttgccgcaacagttcaacattttggtaagctagacattcttgtcaatggggcagctggcaatttccttgcttccccggaggatttgacgcccaaagggttcaggacagtcgttgacattgacacagtgggtacatacactatgtgctatgaagctctaaagtatctgaaaaagggtggccctgggaaaggtccctctactggtggcgtcatcatcaacataagtgctactttgcattacactgcggcctggtaccaaattcatgtctctgctgctaaggcgggcgttgatagtataacaagatcattggctctggaatggggaacagattatgacatcagggtcaatggaattgcaccagggccaattgaaggcactccaggaatgaggaagcttgcacctgaggaaatggccaaggggagtcgggaaataatgcctttatttaagttgggtgaaaaatgggacatagctatggctgcactttaccttgcttctgatgcaggaaaatatgtaaatgggactacagtggttgttgatggaggtctttggctaagtcgccctcgccatattccgaaggaggaagtgaaggagctctcaaaggttgtcgagaagaaggttagggcctctggtgttggtgtgccatcaagcaaattgtga

SEQ ID NO: 40390 - protein, 299 aa, Oryza sativa (japonica cultivar-group)
MAVESPFRADVLRGKAALVTGGGSGIGFEIAAQLARHGAHVAIMGRRREVLDKAVAALRSHGLRAVGFEGDVRKQEDAARVVAATVQHFGKLDILVNGAAGNFLASPEDLTPKGFRTVVDIDTVGTYTMCYEALKYLKKGGPGKGPSTGGVIINISATLHYTAAWYQIHVSAAKAGVDSITRSLALEWGTDYDIRVNGIAPGPIEGTPGMRKLAPEEMAKGSREIMPLFKLGEKWDIAMAALYLASDAGKYVNGTTVVVDGGLWLSRPRHIPKEEVKELSKVVEKKVRASGVGVPSSKL

SEQ ID NO: 40391 - DNA, 888 bp, Oryza sativa (japonica cultivar-group)
  CDS (1)..(888)
atgatgcagagaacaatgcagctcgttctcagggtgaagagatcgtcgggtttactacaccaattctccactgcggcgaactcgcagaggttggccgggaaggtggccgtcatcaccggcgccgccagcggcatcggcaaggcgtcggcgaaggagttcatcggcaatggcgccaaggttatactcgccgacgtccaggacgacctcggccgcgccgtcgccgccgagctcggccctggcgcgacgtacacgcggtgcgacgtcacggacgaggcgcaggtcgccgcggcggtggacctcgccgtggcgcgccacggggcgctcgacgtgttctacagcaacgccggcgtcctgggctccatcgcgccggcgccgctcgcctccctggacctgggcgagttcgaccgcgtcatggccgtgaacgcccgcgccgccgtcgccgccgccaagcacgcggcgcgcgccatggtgccgcgccggagcgggtgcgtcctcttcacggggagcgtgtcgggcgtggtgggcggcacggggccgacgtcgtacggcgtgtcgaaggcggccgtgctgggcgtggtgcgcgccgtggccggggagctggcgcgccacggcgtgcgggcgaacgccgtctcgccgtgcggcgtcgcgacgccgctgtccatggtgcaggtccttgaggcctaccccgggatgagcttcgaggagctcaagaacgccatggcggcgtccatggagcagatggaagctggcccgttgatcgaccccgaggacgtggcgagggcggccgtcttcctggcgtccgacgaggccaggtacatcaacggccataacctcgtcgtcgacggcggcttcacggtggggaagctgctcaaaatccccaaggagtag

SEQ ID NO: 40392 - protein, 295 aa, Oryza sativa (japonica cultivar-group)
MMQRTMQLVLRVKRSSGLLHQFSTAANSQRLAGKVAVITGAASGIGKASAKEFIGNGAKVILADVQDDLGRAVAAELGPGATYTRCDVTDEAQVAAAVDLAVARHGALDVFYSNAGVLGSIAPAPLASLDLGEFDRVMAVNARAAVAAAKHAARAMVPRRSGCVLFTGSVSGVVGGTGPTSYGVSKAAVLGVVRAVAGELARHGVRANAVSPCGVATPLSMVQVLEAYPGMSFEELKNAMAASMEQMEAGPLIDPEDVARAAVFLASDEARYINGHNLVVDGGFTVGKLLKIPKE

SEQ ID NO: 40393 - DNA, 1173 bp, Deinococcus radiodurans R1
  CDS (1)..(1173): transl_table=11
ttgtcgcgcgcccggtgctgtcggcggctccctaccgcacgccggtgcgcggggtgtatctgtgttcgagctccacgcctcccggtggcggcattcacggcatgtgcggggtcaacgcggcacgaacggcgctggcagacgagttcggcttcaggaagtaaagccgccctcagccgggcaggtccacacaaaattcgcttaaggcccctgcaacccgccacgcccccagcttcggcacactgggcagcaggagacctcatgaccaacgacgacaagaccaagcaggccaatggccagcccgaaaccgccgccaccgagaacatgccgcaggaggtgcccgccgaaacccaggagcagcagcccggcagcgaagccgaaatgagcctggccccggtggtcatccgtgacgattaccggggcagcgacaagctgaagggcaaggtggccctcatcagcggcggcgacagcggcatcgggcgcgcggtggccgtgcattttgcccgcgagggggccgacgtggcgatcttgtacctcgacgagcaccaggacgcgcgggacaccctgaagatggtgcaggccgagggccgccagggcctgatcatcgctggcgacattggcgatcccaagttctgtcaggacgcggtggcgcaggtaatgaaggaactcggcaagctcgacattctggtcaacaacgccgccgagcagcacccgcaggaaaacctcaccgacatcaccccggagcagctcgaacggaccttccgcaccaacattttcggcatgttctacctgacccaggccgccctgccacacctgcaaaaaggcgccgtgatcgtcaacaccacctcggtcaccgcgtataagggcagccccgaactgctcgactactccagcaccaagggcgccatcctcgcctttacccgcagcctgtcgcaaaacctcgccgacaagggcattcgcgtcaacgccgtggcgcccggccccatctggacgccgctcattccctccacttttgaccagaagcgggtggccgagcacggcaaaaagaccccgctcgagcgccccggccagcccgccgaagtcgcgccgagctacgtgttcctcgcgtcggaggacagcagctacatcaccgggcaagtcctgcaccccaacggtggggacgtggtcaacggctga

SEQ ID NO: 40394 - protein, 390 aa, Deinococcus radiodurans R1
MSRARCCRRLPTARRCAGCICVRAPRLPVAAFTACAGSTRHERRWQTSSASGSKAALSRAGPHKIRLRPLQPATPPASAHWAAGDLMTNDDKTKQANGQPETAATENMPQEVPAETQEQQPGSEAEMSLAPVVIRDDYRGSDKLKGKVALISGGDSGIGRAVAVHFAREGADVAILYLDEHQDARDTLKMVQAEGRQGLIIAGDIGDPKFCQDAVAQVMKELGKLDILVNNAAEQHPQENLTDITPEQLERTFRTNIFGMFYLTQAALPHLQKGAVIVNTTSVTAYKGSPELLDYSSTKGAILAFTRSLSQNLADKGIRVNAVAPGPIWTPLIPSTFDQKRVAEHGKKTPLERPGQPAEVAPSYVFLASEDSSYITGQVLHPNGGDVVNG

SEQ ID NO: 40395 - DNA, 813 bp, Escherichia coli O157:H7 EDL933
  CDS (1)..(813): transl_table=11
atgagcgatctgcataacgagtccatttttattaccggcggcggatcgggattagggctggcgctggtcgagcgatttatcgaagaaggcgcgcaggttgccacgctggaactgtcggcggcgaaagtcgccagtctgcgtcagcgatttggtgaacatattctggcggtggaaggcaacgtgacctgttatgccgattatcaacgcgcggtcgatcagatcctgactcgttccggcaagctggattgttttatcggcaatgcgggcatctgggatcacaatgcctcactggttaatactcccgcagagacgctcgaaaccggcttccacgagctgtttaacgtcaacgtactcggttacctgctgggtgcaaaagcctgcgctccggcgttaatcgccggtgaaggcagcatgattttcacactatcaaatgccgcctggtatcccggcggcggtggcccgctgtacaccgccagtaaacatgccgcaaccgggcttattcgccaactggcttatgaactggctccgaaagtacgggtgaatggcgtcggcccttgtggtatggccagcgacctgcgcggcccacaggcgctcgggcaaagtgaaacctcaataatgcagtctctgacgccggagaaaattgccgccattttaccgctgcaatttttcccgcaaccggctgattttacgggtccgtatgtgatgttggcatcgcggcgcaataatcgcgcattaagcggtgtgatgatcaacgctgatgcgggtttagcaattcgcggcattcgccacgtagcggctgggttggatctttaa

SEQ ID NO: 40396 - protein, 270 aa, Escherichia coli O157:H7 EDL933
MSDLHNESIFITGGGSGLGLALVERFIEEGAQVATLELSAAKVASLRQRFGEHILAVEGNVTCYADYQRAVDQILTRSGKLDCFIGNAGIWDHNASLVNTPAETLETGFHELFNVNVLGYLLGAKACAPALIAGEGSMIFTLSNAAWYPGGGGPLYTASKHAATGLIRQLAYELAPKVRVNGVGPCGMASDLRGPQALGQSETSIMQSLTPEKIAAILPLQFFPQPADFTGPYVMLASRRNNRALSGVMINADAGLAIRGIRHVAAGLDL

SEQ ID NO: 40397 - DNA, 747 bp, Sinorhizobium meliloti 1021
  CDS (1)..(747): transl_table=11
atgacatcgatcagtttggccggaaagaccgctttcgttaccggcggcagcaggggtatcggcgcggctatcgccaagaggcttgctctggagggggcggcggtggcgctgacttatgtgaatgcggccgagcgtgcgcaggcagtcgtgtccgagatcgagcaggcgggcggtcgcgcggttgcaatccgtgccgacaatcgcgacgccgaagccatcgagcaggccattcgcgagactgtcgaagccttgggcgggctggacatactggtcaacagcgctggcatctggcactcggctccgctggaggagacgactgtcgccgatttcgacgaagtgatggccgttaacttccgtgcgcccttcgtggccattcgttcggcgtcccggcacctcggtgacggcggcaggatcatcacgatcggcagcaatctggccgaactggttccctggccggggatcagcctctattctgccagcaaggctgctctggccggtctgacgaaaggcctggctcgcgaccttgggccgcgcgggatcaccgtcaacatcgttcatccaggctcgaccgacaccgatatgaaccccgccgatggcgaccatgccgaagcgcagcgggaacgtatcgccaccggcagctacggtgagccgcaagacattgccggactcgtcgcctggctggcggggccgcaaggcaagttcgtcaccggcgcttcgctgaccatcgacggcggtgccaacgcttga

SEQ ID NO: 40398 - protein, 248 aa, Sinorhizobium meliloti 1021
MTSISLAGKTAFVTGGSRGIGAAIAKRLALEGAAVALTYVNAAERAQAVVSEIEQAGGRAVAIRADNRDAEAIEQAIRETVEALGGLDILVNSAGIWHSAPLEETTVADFDEVMAVNFRAPFVAIRSASRHLGDGGRIITIGSNLAELVPWPGISLYSASKAALAGLTKGLARDLGPRGITVNIVHPGSTDTDMNPADGDHAEAQRERIATGSYGEPQDIAGLVAWLAGPQGKFVTGASLTIDGGANA

SEQ ID NO: 40399 - DNA, 858 bp, Nostoc sp. PCC 7120
  CDS (1)..(858): transl_table=11
atggcagaaaagcaaacattacaaccaccacagcaacagcaaccaccgggtacagaatcaaaaatgcagccaaaacctcaagctgatgatgctcagtatcgaggtagcggtaaattaaaagataaagttgccttgattactggtggggatagtgggattggtcgggctgtggcgatcgcctatgctaaagaaggtgcagatgtagcctttgtttacctgagtgaacacgacgatgcggaagaaaccaaaaatttggtagaagaacaaggaagacgtgctgtatctattgccggcgatataactgatgaggctttttgtcagcgtgcgattcaacaaacagtagatgagttcggtaaattggatattctcatcaataatgcggctgaacaacatccccaagaaagcattgaagatattactaaagaacagttagaacggacattccgcacgaatattttttcaatgttttacttgaccaaagcagcaatcaaacacctgaaaaaaggtagcgccattatcaatactacttcagttacagcttataaaggtagtccacagttacttgattattcttcaactaaaggtgcaattgttgcctttactcgttccttatcacaaaacttaattagtaaaggtatccgggttaatgctgtggcacctgggccaatttggacacctttaattccctcaacatttcccgcagaaaaagtagaaacctttggtaaacaagtacccatgcaacgagccggacaaccagaagaagttgcacctagttatgtgtttctagcttctgatgactcatcttatatgtctggtcaagttttacatcccaatggtggggaagtagttaatggctaa

SEQ ID NO: 40400 - protein, 285 aa, Nostoc sp. PCC 7120
MAEKQTLQPPQQQQPPGTESKMQPKPQADDAQYRGSGKLKDKVALITGGDSGIGRAVAIAYAKEGADVAFVYLSEHDDAEETKNLVEEQGRRAVSIAGDITDEAFCQRAIQQTVDEFGKLDILINNAAEQHPQESIEDITKEQLERTFRTNIFSMFYLTKAAIKHLKKGSAIINTTSVTAYKGSPQLLDYSSTKGAIVAFTRSLSQNLISKGIRVNAVAPGPIWTPLIPSTFPAEKVETFGKQVPMQRAGQPEEVAPSYVFLASDDSSYMSGQVLHPNGGEVVNG

SEQ ID NO: 40401 - DNA, 789 bp, Brucella melitensis 16M
  CDS (1)..(789): transl_table=11
gtgctggaaatagcatttgggagaaacatagtgtcgcttgaaggtaaggtcgcgctcattacgggagcaggttcggggtttggtgaaggcatggcgaaacgctttgccaagggcggcgcgaaggtcgtcatcgtggatcgcgacaaggcgggtgccgaacgtgtggccggtgaaatcggcgatgcggcgctggctgttgctgccgatatttccaaagaagccgatgtcgatgcggcggtggaggctgcattatcgaaattcggcaaggtcgatattctcgtcaacaatgccggtatcggccacaagccgcaaaatgccgagctggtggagccggaagagttcgaccgtattgtgggtgtcaatgtgcgcggcgtctatctgatgacccgcaagcttattccgcatttcaaggagaatggtgccaagggacaagaatgcgtaatcctcaacgtcgcttcgaccggggccgggcgcccgcgcccgaatctcgcctggtacaatgcaaccaagggctgggttgtttcggtgacgaaggcgctggccatcgagcttgcaccggcaaagattcgcgtggtggcgctgaacccggtggcgggtgaaacgccgcttctcaccaccttcatgggtgaggatagcgaggaaatccgcaagaaattccgcgattccattccgatgggccgcctgttgaaacctgacgatctggctgaagctgcggctttcctttgctcgcctcaagcctctatgattacaggcgttgcgctcgacgtggatggcgggcgttcgatctaa

SEQ ID NO: 40402 - protein, 262 aa, Brucella melitensis 16M
MLEIAFGRNIVSLEGKVALITGAGSGFGEGMAKRFAKGGAKVVIVDRDKAGAERVAGEIGDAALAVAADISKEADVDAAVEAALSKFGKVDILVNNAGIGHKPQNAELVEPEEFDRIVGVNVRGVYLMTRKLIPHFKENGAKGQECVILNVASTGAGRPRPNLAWYNATKGWVVSVTKALAIELAPAKIRVVALNPVAGETPLLTTFMGEDSEEIRKKFRDSIPMGRLLKPDDLAEAAAFLCSPQASMITGVALDVDGGRSI

SEQ ID NO: 40403 - DNA, 750 bp, Streptomyces coelicolor A3(2)
  CDS (1)..(750): transl_table=11
atgggacagctcgaaggcaggacggccgtcgtcaccggcggcggcacggggatcggtctggccagcgcggtgcggctggcggacgagggcgcgcacgtgttcatcacggggcggcgcaaggaggcactggacaaggccgtggagatcatcggagcggggcgggtcacggcggtggccggtgacgtctcggacccggccgacctggaccggctctacgaagcggtccgcgcccgcggccgggggctcgacgtggtcttcgccaacgcggcgaccgcctcgctggtgccgctggaggagatcaccgaggagcggttcgaggagatcttcggcgtcaacgtgcgcggcacgctcttcaccgtgcagaaggcgctgccgctgctcaacgacggtgcctcggtgatcctcaacgcctccaccgccgccgacaacggcgccgaggcgttcagtctgtacgccgcctccaaggccgccgtccggaccttcgcgcgaggctgggccaacgaactcaagggccgtggcgtccgggtcaacgcgatctccccgggcccggtcgacacccccgggatcaccaacctcttcggtgagtcgaacgcgcccaccgtccacacgaagctcgccggggacaccgcgatcggccggatggggcgccccgaggaggtcgccgcggtggtggccttcctggcctcggaccagagcagcttcgtcctcggcgccaactggtacgtcgacggcggcgagaaccagatctga

SEQ ID NO: 40404 - protein, 249 aa, Streptomyces coelicolor A3(2)
MGQLEGRTAVVTGGGTGIGLASAVRLADEGAHVFITGRRKEALDKAVEIIGAGRVTAVAGDVSDPADLDRLYEAVRARGRGLDVVFANAATASLVPLEEITEERFEEIFGVNVRGTLFTVQKALPLLNDGASVILNASTAADNGAEAFSLYAASKAAVRTFARGWANELKGRGVRVNAISPGPVDTPGITNLFGESNAPTVHTKLAGDTAIGRMGRPEEVAAVVAFLASDQSSFVLGANWYVDGGENQI

SEQ ID NO: 40405 - DNA, 768 bp, Streptomyces coelicolor A3(2)
  CDS (1)..(768): transl_table=11
atgtccccgaaccagtcccacgagacgttctccggtcacgttgtgatcgtcaccggcgcgggaaccggcatcggccgagccaccgccgtggccttcgccgagtcgggtgcgcacgtcctcgccgtgggccgccgcgaggcgctcctgaaggagaccgccgcggcccactcccatatcgacgtcctggccatcgacatctgcggtgacgaggcgcccggcaaggtggtggacgccgccgtggagcggtggggacgcctcgaccacctgatcaacaacgccggtgcgacagcggtgatgccgctggccgaggccgagaagcagacgatcgtcgatctgctggcgctcaacgtcgtcgcgcccagtcttctggcgcgcgaagccctgccgcacctgcgccggacctcggggtcgatcatcaacctctccagcacctacgggcaccgcccgatggcggggggtgcgcactactcggccaccaaggccgccgtcgagcagatgacgcggagctgggcactggaactggccgacgagggtgtccgtgtcaactcggtcgctcccggccccacccgcaccgacgtcatgctgcacgccggtctgacgccggaggcggccaacgacatgtacgcgtacgagcgcgaccgcatcccgacccaccacatcgcgcacgcggacgaggtggctcactggatcctccgtatggcggacccggccggacgccatgccaccggtcaggtgatcaccgtcgacggcggcctggaactcatctga

SEQ ID NO: 40406 - protein, 255 aa, Streptomyces coelicolor A3(2)
MSPNQSHETFSGHVVIVTGAGTGIGRATAVAFAESGAHVLAVGRREALLKETAAAHSHIDVLAIDICGDEAPGKVVDAAVERWGRLDHLINNAGATAVMPLAEAEKQTIVDLLALNVVAPSLLAREALPHLRRTSGSIINLSSTYGHRPMAGGAHYSATKAAVEQMTRSWALELADEGVRVNSVAPGPTRTDVMLHAGLTPEAANDMYAYERDRIPTHHIAHADEVAHWILRMADPAGRHATGQVITVDGGLELI

SEQ ID NO: 40407 - DNA, 813 bp, Shigella flexneri 2a str. 301
  CDS (1)..(813): transl_table=11
atgagcgatctgcataacgagtccatttttattaccggcggcggatcgggattagggctggcgctggtcgagcgatttatcgaagaaggcgcgcaagttgccacgctggaactgtcggcggcaaaagtcgccagtctgcgtcagcgatttggcgaacatattctggcggtggaaggtaacgtgacctgttatgccgattatcaacgcgcggtcgatcagatcctgactcgttccggcaagctggattgttttatcggcaatgcaggcatctgggatcacaatgcctcactggttaatactcccgcagagacgctcgaaaccggcttccacgagctgtttaacgtcaacgtactcggttacctgctgggcgcaaaagcctgcgctccggcgttaatcgccagtgaaggcagcatgattttcacactgtcaaatgccgcctggtatcctggcggcggtggcccgctgtacaccaccagtaaacatgccgcaaccggacttattcgccaactggcttatgaactggcaccgaaagtgcgggtgaatggcgtcggcccgtgtggtatggccagcgacctgcgcggcccacaggcgctcgggcaaagtgaaacctcgataatgcagtctctgacgccggagaaaattgccgccattttaccgctgcaatttttcccgcaaccggcggattttacggggccgtatgtgatgttggcatcgcggcgcaataatcgcgcattaagcggtgtgatgatcaacgctgatgcgggtttagcgattcgcggcattcgccacgtagcggctgggctggatctttaa

SEQ ID NO: 40408 - protein, 270 aa, Shigella flexneri 2a str. 301
MSDLHNESIFITGGGSGLGLALVERFIEEGAQVATLELSAAKVASLRQRFGEHILAVEGNVTCYADYQRAVDQILTRSGKLDCFIGNAGIWDHNASLVNTPAETLETGFHELFNVNVLGYLLGAKACAPALIASEGSMIFTLSNAAWYPGGGGPLYTTSKHAATGLIRQLAYELAPKVRVNGVGPCGMASDLRGPQALGQSETSIMQSLTPEKIAAILPLQFFPQPADFTGPYVMLASRRNNRALSGVMINADAGLAIRGIRHVAAGLDL

SEQ ID NO: 40409 - DNA, 828 bp, Pseudomonas putida KT2440
  CDS (1)..(828): transl_table=11
atgaaactggatacagttttttcagttgaaggcgctcgtgtcattgtaacgggggcggccagtggattaggtctagccttcactgaagcgatggctgagagtggagcacaggtcgcaatgcttgacctgaatcgtgaagcgctcgatgcacagttcagaagattgagaagccttggatattcagtcagatcccacgttttggatgtgacggaccgagatgctgtagatgatacgtttaatgctgtagcagcaggctttggtggattggacattgtgttcgccaacgccgggattgatccaggacctggattcgctgcactcaatgccgcaggggaacgagaaccagcaaatatgctggaagaatactcggaccatcgctggaggaaggtcatctccgtcagcctagatgctgtgttctattcgataagagctgctgcgcggcacatgagagctaaccgatctggctcaattattgtgaccacctcggtgtcggcccttcgacctgcggtcacactcggcgccgcctatgcagcagcgaaggccggtgcagcccaattagttcgggccacggccctcgaattggccagcgatggcgtcagggtcaatgcaattgctcctgggccattcgaaacggacatcggcggcggcttcatgcacaactcggaagtgcgagccaagatggcagcaggcgttcccatggggcgcattgctgaggtcgaggaaatcaagccgctcgcactttacctcgcatccaaggcttccagtttcgtcaccggccaacagtttgtaattgatggcggcctttctttgtctgcggctcgtgcatag

SEQ ID NO: 40410 - protein, 275 aa, Pseudomonas putida KT2440
MKLDTVFSVEGARVIVTGAASGLGLAFTEAMAESGAQVAMLDLNREALDAQFRRLRSLGYSVRSHVLDVTDRDAVDDTFNAVAAGFGGLDIVFANAGIDPGPGFAALNAAGEREPANMLEEYSDHRWRKVISVSLDAVFYSIRAAARHMRANRSGSIIVTTSVSALRPAVTLGAAYAAAKAGAAQLVRATALELASDGVRVNAIAPGPFETDIGGGFMHNSEVRAKMAAGVPMGRIAEVEEIKPLALYLASKASSFVTGQQFVIDGGLSLSAARA

SEQ ID NO: 40411 - DNA, 813 bp, Rhodococcus erythropolis
  CDS (1)..(813): transl_table=11
atgggttggctggaagacaacgtcatgatcgtcaccggcggagggtcgggcctaggccgggcgctggtcgagcgattcctgggagagggagcccgggtgggtgtcctggagaagtcggcggagaaggctgagaagcttgccaacgacttcggcgaggatgtcctcgtggtcgaaggcgacgtgcgcaagtacgacgacaatgcgcgcgtcgtccaggaaacggttcgccagttcggtcgcctcgacacgttcgtcgcgaacgccgcgatctgggacttctcgacgaagatggtcgatatcccggtggaccgactggacgccctcttcgacgaaatgttccacatcaacgtcaagggctacttgcacggtgcacgtgcggcggtcgaggagctcgccgccaccggaggctcgatcatctacaccgtgtcgaacgccggcttctaccccggcggcggcggcccgctctacaccgcgtcgaagcacgcggtagtcgggctgatcaaggaactggccttcgaactcggccccaagatccgcgtcaacggagtggctccgggcgcaatgcccaccgatctgagaggacctggttcgctcggaatgggcgaaaccaccatcacctcagtgccgctcggcgatctggtcaaacagtgcaccgtgctgcaggagctgcccgaggcggcggactacaccgggcactatgttctgctggcttcgaaggcgaactcgaggacggcaaccggcgcgattatcaactgtgacggcgggatgggggtgcgcggcttggccgagacggccggcggaaatgacctgtaa

SEQ ID NO: 40412 - protein, 270 aa, Rhodococcus erythropolis
MGWLEDNVMIVTGGGSGLGRALVERFLGEGARVGVLEKSAEKAEKLANDFGEDVLVVEGDVRKYDDNARVVQETVRQFGRLDTFVANAAIWDFSTKMVDIPVDRLDALFDEMFHINVKGYLHGARAAVEELAATGGSIIYTVSNAGFYPGGGGPLYTASKHAVVGLIKELAFELGPKIRVNGVAPGAMPTDLRGPGSLGMGETTITSVPLGDLVKQCTVLQELPEAADYTGHYVLLASKANSRTATGAIINCDGGMGVRGLAETAGGNDL

SEQ ID NO: 40413 - DNA, 861 bp, Gloeobacter violaceus PCC 7421
  CDS (1)..(861): transl_table=11
atgtctcagtcccagcaactccagccgccccagcaacaggagcgccagcccggcctcgaatcggagatgactccgaaaccccaggccgacgatcccaaataccgcggcagcggtaaactccaggacaaagtggcgctgattaccggcggcgattccggcatcggccgggcggtcgccatcttttacgccaaagaaggcgcggatgtggccgttctttatctcgacgagcacgacgatgccaaggagacctgccgtctggtacgagaaatcggtcagcgttgtctcaccattgccggggatatcggcgacgagtcgttctgtcggcaggctgtcgcacaggtggttgatgaattcggacgcctcgatatcctcgtcaacaacgccgccgagcagcacccgcaaaagagcatcgaggacatcagcgccgagcaactggagcgcacctttcgcaccaacattttttcttttttctatatgaccaaagcggcgctaccgcacctcaaacccggcagcgccatcatcaacagcacctcggtgacggcctacaaaggttcgccgcaactgctcgactactcttccaccaaaggggcgattgtcgcttttacccggtctctctcccaggcactgctcgaaaagggcattcgcgtcaacggcgtcgcccccggcccgatctggacaccattgatccccgcctcgatgtccccggagcgcaccgcttcccacggcagttctgcgccgatgggccgggtgggtcagccggaggaagtggcgccgagctacgtgtttctcgccagcgacgactcgtcatacatcacgggccagatcctgcatcccaacggcggcgaggtggtcaacggctga

SEQ ID NO: 40414 - protein, 286 aa, Gloeobacter violaceus PCC 7421
MSQSQQLQPPQQQERQPGLESEMTPKPQADDPKYRGSGKLQDKVALITGGDSGIGRAVAIFYAKEGADVAVLYLDEHDDAKETCRLVREIGQRCLTIAGDIGDESFCRQAVAQVVDEFGRLDILVNNAAEQHPQKSIEDISAEQLERTFRTNIFSFFYMTKAALPHLKPGSAIINSTSVTAYKGSPQLLDYSSTKGAIVAFTRSLSQALLEKGIRVNGVAPGPIWTPLIPASMSPERTASHGSSAPMGRVGQPEEVAPSYVFLASDDSSYITGQILHPNGGEVVNG

SEQ ID NO: 40415 - DNA, 843 bp, Photorhabdus luminescens subsp. laumondii TTO1
  CDS (1)..(843): transl_table=11
atgagttggatcaaagatcaagtcattttattaacaggcggtggctccggtttaggtttggctttaatagagcgttttattgctgaaggcgccaaagtgggcgttttggagttatcggcagaaaaagcgacagctttggcacactgttttggtaacgatatctgtgttattcacggtgatgttgtctcttttgaggacaatgagcgagcagtggctgaaactgttcggtgttttggcaaactagactgctttgttggtaatgccgggatatgggatcacaaaattagcctgcttgacgcctcaccagagcagattgataaaggatttgatgagctgatgggggttaacctgaaagggtatattctaggggctaaagccgcgttaccggcgctaaccgcatcagaaggcagcatgatttttacgttgtcaaactcgtcatggttttctggtggtggaggggtgttgtataccgccagcaagcacggtgcggtcggcatgatccgccagttagcttatgaattagcgccagttatcagggttaatggtgttgcgccttgtgggatgccaagtgatcttcgtggggcggcttcactatctcagcaagatagatgcattacagataacctgtcattagaaagtctcagtgcaattttacctttgcaattcatacctcagccaaaagatttcaccggtccgtatgtcatgttggcttcccgtgccaataaccgcactttaacgggggtgatgataacggctgatgccggattaagtatccgtggcattcgccaaacgacagcgggagtgatgtctccgaccaagaaggagagttcagatgaccgttaa

SEQ ID NO: 40416 - protein, 280 aa, Photorhabdus luminescens subsp. laumondii TTO1
MSWIKDQVILLTGGGSGLGLALIERFIAEGAKVGVLELSAEKATALAHCFGNDICVIHGDVVSFEDNERAVAETVRCFGKLDCFVGNAGIWDHKISLLDASPEQIDKGFDELMGVNLKGYILGAKAALPALTASEGSMIFTLSNSSWFSGGGGVLYTASKHGAVGMIRQLAYELAPVIRVNGVAPCGMPSDLRGAASLSQQDRCITDNLSLESLSAILPLQFIPQPKDFTGPYVMLASRANNRTLTGVMITADAGLSIRGIRQTTAGVMSPTKKESSDDR

SEQ ID NO: 40417 - DNA, 828 bp, Pseudomonas sp. ND6
  CDS (1)..(828): transl_table=11
atggtcactgcaaccgcggtcaccattaatcaaagggaatgtacgtgtatgggcaatcaacaagtcgtttcgataaccggtgcaggctcaggaatcggtctcgaactggttcggtcctttaagtcggccggttattacgtatccgctctcgtacgaaacgaggagcaagaggcgcttctttgcaaagagttcaaggacgcactcgagattgtagtgggcgatgtccgggaccacgcaacaaatgagaagctgataaagcaaacaatcgatagattcggtcatcttgattgttttattgcaaatgccggtatctgggattacatgctgagcatcgaagagccttgggagaaaatatcgagcagttttgacgaaatattcgacattaatgtcaagagctatttcagtggcatcagtgccgccctgccggaactgaaaaagactaacggatcagtggtgatgaccgcttcggtgtcgtcccatgcggtcggtggtggtggttcttgctacatcgccagcaagcatgcggtgctcggtatggttaaggctttggcctacgaattggcccccgaagttcgcgtgaacgctgtttcgccggggggcaccgtgacgtctctgtgcggtcccgcgagcgccggtttcgacaaaatgcacatgaaagacatgcccggcatcgacgatatgatcaaaggtctcacgcctcttgggtttgcagccaagcccgaagacgtggtggcaccctatttgttgctggcttcgcgaaagcaaggaaaattcatcaccggcaccgtgattagcattgatggcggtatggcgctcggtcgcaagtga

SEQ ID NO: 40418 - protein, 275 aa, Pseudomonas sp. ND6
MVTATAVTINQRECTCMGNQQVVSITGAGSGIGLELVRSFKSAGYYVSALVRNEEQEALLCKEFKDALEIVVGDVRDHATNEKLIKQTIDRFGHLDCFIANAGIWDYMLSIEEPWEKISSSFDEIFDINVKSYFSGISAALPELKKTNGSVVMTASVSSHAVGGGGSCYIASKHAVLGMVKALAYELAPEVRVNAVSPGGTVTSLCGPASAGFDKMHMKDMPGIDDMIKGLTPLGFAAKPEDVVAPYLLLASRKQGKFITGTVISIDGGMALGRK

SEQ ID NO: 40419 - DNA, 786 bp, Rhodopseudomonas palustris CGA009
  CDS (1)..(786): transl_table=11
atgggccgcctcgaaggcaaatccatcatcatcaccggcgccggcagcggcatcggccgcgcggcatcgctgctgttcaccaaggaaggcgcgcaactgatcgcggtcgatcgcaccgaaggcgtgcaggagacggtcgagcaggtgcgcaaggccggcggcaccgccgaggccgtgatggccgatgcaggctccgaggacgacgtgaagggcttcgtcgccaaggcgatcgccgtttacggcaagctcgacggcatctgggccaatgccggtatcagcggcggcctgctgccgctgcccgaacagacgccggagcattggcaggagatcctgcgcgtcaatctgatcggtccgttcctggcgatcaagcacgccacgccgcatctgatcaaacagggccacggcgcgattgtctgcactgcctcggtcgcgggtttgaagagcggcgcctcgggacacccttacgctgcatcgaaggctggtgtgatcagcctggtgcagaccaccgcctactcgctgtccggcaccggcgtgcgcatcaacgcggtgtgccccggcctgatcgagaccggcatgaccaagccggtgttcgacggtgcgcgcgcccgcggcaccgatcacaagatcggccagctcaacccgctgaagcgcgccggccagccgcacgaactcgctaccatggggctattcctgctcagcgacgaagcgtcctacgtcaacggccaggcgttcccagtcgacggcggcctgaccgcgtcgatgccgtatgcgggcaagccgatctga

SEQ ID NO: 40420 - protein, 261 aa, Rhodopseudomonas palustris CGA009
MGRLEGKSIIITGAGSGIGRAASLLFTKEGAQLIAVDRTEGVQETVEQVRKAGGTAEAVMADAGSEDDVKGFVAKAIAVYGKLDGIWANAGISGGLLPLPEQTPEHWQEILRVNLIGPFLAIKHATPHLIKQGHGAIVCTASVAGLKSGASGHPYAASKAGVISLVQTTAYSLSGTGVRINAVCPGLIETGMTKPVFDGARARGTDHKIGQLNPLKRAGQPHELATMGLFLLSDEASYVNGQAFPVDGGLTASMPYAGKPI

SEQ ID NO: 40421 - DNA, 765 bp, Apis mellifera
  CDS (1)..(765)
atgaaaggactagttgctcttgtcactggtggtgcttctggattaggacttggtgttgtacaaagatttataaaaaaaggtgctaaagtagttattgcagatttaccaatatctaaaggaaatacaattgctaatgaacttggagaatctgcagtttttacaccagtagatataacatcaacagaagatgtaaatggtgctataaatgaaataagaaataagtttaaaaaattggatgtcatagtaaatgcagcaggaatagctgttgcccacaaagtatataattttaataaagatatgccacatgaattaactgatttcaacaaagtgcttaatgtaaatgtttctggaacatttaatgttattagattatctctaccacttatgtataacaacacaccagataaagatggattacgtggagtaataattaatacagcaagtgttgcagcgtttgaaggacaaattggtcaagtagcatattctgccagtaaagctgcaattgttggaatgactttaccattagctcgagatcttgctagtattggtgttcgtgttgttacaattgcacctggaatatttgatacacctatgctaggaaatttaccagaaaaagtgcgtgttttcttacagagatcagtaccgtttccaaagagattgggtactcctgatgaatatgctcaattagctgaacacattgttgaaaattctcttctcaatggagaagtgataagattagatggtgctcttagaatgcaaccttaa

SEQ ID NO: 40422 - protein, 254 aa, Apis mellifera
MKGLVALVTGGASGLGLGVVQRFIKKGAKVVIADLPISKGNTIANELGESAVFTPVDITSTEDVNGAINEIRNKFKKLDVIVNAAGIAVAHKVYNFNKDMPHELTDFNKVLNVNVSGTFNVIRLSLPLMYNNTPDKDGLRGVIINTASVAAFEGQIGQVAYSASKAAIVGMTLPLARDLASIGVRVVTIAPGIFDTPMLGNLPEKVRVFLQRSVPFPKRLGTPDEYAQLAEHIVENSLLNGEVIRLDGALRMQP

SEQ ID NO: 40423 - DNA, 759 bp, Nasonia vitripennis
  CDS (1)..(759)
atgctgaagaatgcggtcgtccttatcacaggtgctagttctggcatcggagctgccactgcccttcagctgtcgcagcttggtgcttctctgagcctgcatgggcgtaatgtccagaatctgcagaaggtggctgaccagtgcaaagaacccaagccccatattgttaccggggagatcaccaatgaggctgacgtgaagaacattctggagtctactctccagaagtacggcaagctggatgttctggtgaacaatgctggcactctggagtcgggtggtattgaaaatactagcttggagcagtacgacagggtattcaacatcaacgtcaggtccatctatcatttaactatgctggctgtgccgcatttgataaagaccaaaggaaatattgtgaatgtatccagtgtgacgggaaccagggcttttcctggagtcttgtcctactgtatgagcaagtctgccattgatcagttgactcgctgtgtagctttggaactagctcccaagcaggtccgtgtgaatgctgtcaacccaggtgttgttgtgacaaacctgcacagaagcagtggcatgagtgaggacaagcttaaggaattctttgaacacagcaaagcaactcatgctcttggacgccctggaactccggatgaagtagccaagacaattgctttcttggctagtgaagatgctagctttatcacgggtcagacccttgccgttgacggtggacgaagcgtcatgtgcccgcgataa

SEQ ID NO: 40424 - protein, 252 aa, Nasonia vitripennis
MLKNAVVLITGASSGIGAATALQLSQLGASLSLHGRNVQNLQKVADQCKEPKPHIVTGEITNEADVKNILESTLQKYGKLDVLVNNAGTLESGGIENTSLEQYDRVFNINVRSIYHLTMLAVPHLIKTKGNIVNVSSVTGTRAFPGVLSYCMSKSAIDQLTRCVALELAPKQVRVNAVNPGVVVTNLHRSSGMSEDKLKEFFEHSKATHALGRPGTPDEVAKTIAFLASEDASFITGQTLAVDGGRSVMCPR

SEQ ID NO: 40425 - DNA, 768 bp, Nasonia vitripennis
  CDS (1)..(768)
atgctgaagggagtcgtaaccttggtcactggaggagcctctggactgggtaggggaaccgtggagagatttatcaagcaaggaggaaaagttgttatcggagaccttcccagttcgaagggaaatgatcttgcaaaggaacttggtgactcagcagtttttgtgccccttgatgtcacctcagagaaggacgtccagctcgccgtgtccacggccaaggaaaagttcggccgtctggacgtgttggtgaatgcagctggtatcgcggttgcacacaagacctttaactccaacaagatgatggctcactcactcgaggatttcgagagggtgctcaaggtcaacacgctcggcaccttcaacgctatccgtctgtcggccggtgcgatggtggagaatgagccgaacgttgatggccagcgcggtgtcatcatcaataccgccagtgtggccgctttcgacggtcagatcggtcaggcggcttactccgccagcaagggtgccgtcgtcggcatgactctgcccatcgctcgtgatttgtctcgcgacggaattcgtgtggtgacaatcgcgccaggtctgttcgacacgccgatgctggcctcgctgcccgagaaggtacgcaactttttggcaaaaagcatcccgttccctcagcgactaggcaaggccgaggagtatgcccagctcgcccagagcatcgtcgagaacccgctgctcaacggcgagaccataagactggatggagctctacgcatgcagccttag

SEQ ID NO: 40426 - protein, 255 aa, Nasonia vitripennis
MLKGVVTLVTGGASGLGRGTVERFIKQGGKVVIGDLPSSKGNDLAKELGDSAVFVPLDVTSEKDVQLAVSTAKEKFGRLDVLVNAAGIAVAHKTFNSNKMMAHSLEDFERVLKVNTLGTFNAIRLSAGAMVENEPNVDGQRGVIINTASVAAFDGQIGQAAYSASKGAVVGMTLPIARDLSRDGIRVVTIAPGLFDTPMLASLPEKVRNFLAKSIPFPQRLGKAEEYAQLAQSIVENPLLNGETIRLDGALRMQP

SEQ ID NO: 40427 - DNA, 783 bp, Nasonia vitripennis
  CDS (1)..(783)
atgtctgcagtacgtactgcccacggagtcgtaaccttggtcactggaggagcctctggactgggtaggggaaccgtggagagatttatcaagcaaggaggaaaagttgttatcggagaccttcccagttcgaagggaaatgatcttgcaaaggaacttggtgactcagcagtttttgtgccccttgatgtcacctcagagaaggacgtccagctcgccgtgtccacggccaaggaaaagttcggccgtctggacgtgttggtgaatgcagctggtatcgcggttgcacacaagacctttaactccaacaagatgatggctcactcactcgaggatttcgagagggtgctcaaggtcaacacgctcggcaccttcaacgctatccgtctgtcggccggtgcgatggtggagaatgagccgaacgttgatggccagcgcggtgtcatcatcaataccgccagtgtggccgctttcgacggtcagatcggtcaggcggcttactccgccagcaagggtgccgtcgtcggcatgactctgcccatcgctcgtgatttgtctcgcgacggaattcgtgtggtgacaatcgcgccaggtctgttcgacacgccgatgctggcctcgctgcccgagaaggtacgcaactttttggcaaaaagcatcccgttccctcagcgactaggcaaggccgaggagtatgcccagctcgcccagagcatcgtcgagaacccgctgctcaacggcgagaccataagactggatggagctctacgcatgcagccttag

SEQ ID NO: 40428 - protein, 260 aa, Nasonia vitripennis
MSAVRTAHGVVTLVTGGASGLGRGTVERFIKQGGKVVIGDLPSSKGNDLAKELGDSAVFVPLDVTSEKDVQLAVSTAKEKFGRLDVLVNAAGIAVAHKTFNSNKMMAHSLEDFERVLKVNTLGTFNAIRLSAGAMVENEPNVDGQRGVIINTASVAAFDGQIGQAAYSASKGAVVGMTLPIARDLSRDGIRVVTIAPGLFDTPMLASLPEKVRNFLAKSIPFPQRLGKAEEYAQLAQSIVENPLLNGETIRLDGALRMQP

SEQ ID NO: 40429 - DNA, 729 bp, Anopheles gambiae str. PEST
  CDS (1)..(729)
atggagtgttcggtaaaggataaaacgatcgtagtaaccggtgccggacaaggcattggaaatgagctctgccggacgttggaccagctcggcgctaaggtgatcgccgtatcgcgttccagtgggccgttggaagcgttgaaagccgactgtccgcggattgagacggtccaggtcgacctaagtgactggagcgcgaccaggactgcccttgcgccgctcggaaaggtcgatgggctggtaaacaatgccggtgttgcagtcataaagccatttctcgagctaacggaggaagattacgatcgcacattcgctgtaaatgtaaaggccgcttttaatgtcgcccagattctagtgcccaagatggaggccggcgcgagcatcgtaaacgtatcgtccctcgcggggctgaaagccatccacggccactgcgcttactccatgtcgaaggcggccatcgatggtttgacgcagaatttagccctcgagcttgggccgcgcaaaatccgcgtcaacagcgtcaatccgaccgtcattctgacgcgcatgggacgggacaattggtccgatccggcgaaggcggatccgctgaaggcgaaaattccgctcggccggttcggggaggttagcgaggtggtcgaaccgatcgtctatctgctgagcgatcggtccgggttcgtgaacggacacatgctgccgatcgagggtggatttttggccgggaattga

SEQ ID NO: 40430 - protein, 242 aa, Anopheles gambiae str. PEST
MECSVKDKTIVVTGAGQGIGNELCRTLDQLGAKVIAVSRSSGPLEALKADCPRIETVQVDLSDWSATRTALAPLGKVDGLVNNAGVAVIKPFLELTEEDYDRTFAVNVKAAFNVAQILVPKMEAGASIVNVSSLAGLKAIHGHCAYSMSKAAIDGLTQNLALELGPRKIRVNSVNPTVILTRMGRDNWSDPAKADPLKAKIPLGRFGEVSEVVEPIVYLLSDRSGFVNGHMLPIEGGFLAGN

SEQ ID NO: 40431 - DNA, 750 bp, Gibberella zeae PH-1
  CDS (1)..(750)
atgggacgcttagacggtaaagtcgcgattgttacaggcgcggcatctggctttggccaaggcattgcagaacattttgctgaagaaggggccaaagtcctgatctgtgacatcaatgaagaagccggggaaaaggtagcagcacactccgaggcctttgcgtttcaggccatgaatgtcacgaaagcagcagactggcaggccgcagttgcaaaggcagtgcagatctggggacatatcgatatcttggtcaacaatgcggggacaagctatgagaacaagagcaccaatctagtcaccgaggacgagtttgacaaggtcatgagcgtcaacgtcaaaagcgtttttctcggaagtaacgcctttaccacacaagtcaaaaagcaaggcaccaagggttccatgatcaacattgcctctgtaggtgcgcatcgcccgagacccggactggtgtggtacaacgcctccaaaggagccattacaaatgccacgatgggtctcgctgcagaatacggcccagatggcatacgtgtcaattcaatttgtccccttgccacaatgactggtcttcttcccaaatttattggcaaagaaatcacgcccgaggtgcagaaggcgctgggtaacgtcccacttggccggatgggagagatccgagatgttaccaaagctgcggtatttctggcgagcgaggaatcctcattcattactggtgtaaatctggatgttgatggaggccgtgcgatttag

SEQ ID NO: 40432 - protein, 249 aa, Gibberella zeae PH-1
MGRLDGKVAIVTGAASGFGQGIAEHFAEEGAKVLICDINEEAGEKVAAHSEAFAFQAMNVTKAADWQAAVAKAVQIWGHIDILVNNAGTSYENKSTNLVTEDEFDKVMSVNVKSVFLGSNAFTTQVKKQGTKGSMINIASVGAHRPRPGLVWYNASKGAITNATMGLAAEYGPDGIRVNSICPLATMTGLLPKFIGKEITPEVQKALGNVPLGRMGEIRDVTKAAVFLASEESSFITGVNLDVDGGRAI

SEQ ID NO: 40433 - DNA, 783 bp, Strongylocentrotus purpuratus
  CDS (1)..(783)
atgtcatctgttaaatctgtgaaaggtcttgttggacttgttaccggtggtgcctctggtcttgggaaggccactgtggagagattcgtgagaaatggagccagaatggtcattgtggatctgccaaactctcctggtgaagaggtagccaagagtttgggagaggactgcaaattttctcccggggatgtcacttcagcagacgatgtgacacgagccatagatgttgctaaggactcctttggacgtctagacgtggctgttagctgcgcaggaatcggtgtggcagtcaagacctacaactttaacaaagacagaccccaccccctggaggaattccagagggtcctgatggtcaacacggctggaaccttcaacttggccagactggccgctggagccatgggcaagaatgagcccaatgtcgatggagaaaggggtatcatcatcaacacagccagtgtagcagcgtttgatggacagatgggccaggcggcgtattcagcttctaagggtgctattgtgggcatgactctgccgattgcaagggatttggcatctcaggggattagagtttgcaccattgcaccaggtctttttgacactccacttttggcagggcttccagaaaaagttcggactttcttggcaaggagtatacccttccccagcaggctagctcatcctgatgaatacgcccacatggtggaatccatcgttcagaatcccatcttgaacggggaggtgatccgcttggatggggctctccggatgcaaccataa

SEQ ID NO: 40434 - protein, 260 aa, Strongylocentrotus purpuratus
MSSVKSVKGLVGLVTGGASGLGKATVERFVRNGARMVIVDLPNSPGEEVAKSLGEDCKFSPGDVTSADDVTRAIDVAKDSFGRLDVAVSCAGIGVAVKTYNFNKDRPHPLEEFQRVLMVNTAGTFNLARLAAGAMGKNEPNVDGERGIIINTASVAAFDGQMGQAAYSASKGAIVGMTLPIARDLASQGIRVCTIAPGLFDTPLLAGLPEKVRTFLARSIPFPSRLAHPDEYAHMVESIVQNPILNGEVIRLDGALRMQP

SEQ ID NO: 40435 - DNA, 771 bp, Tribolium castaneum
  CDS (1)..(771)
atgttgaagaacgcggtgactttggtgactggaggcgcctccgggctgggaaaagcaacagtcgaaagactcgtccaacaaggaagtcgtgtcattctctgcgacttgcagtcttcaaagggccaagaagttgcaaaaacgcttggcgaagacaaagttttattcgctcctgttaacgtaacttccgaaagcgacgtccaatcagccttagatttagccaagcaaaagttcggcaagcttgacaatgtcgtgaactgtgccggaattggcgttgccttcaaaacgtacaatttcaacaaaaaagctgcacacagtttggaggattttgccaaagttataaatataaacacaattggcacatttaacgtaattagattagctgtgggcctgattggcgaaaatcagccaaatgaaaggggggaacgtggagtggtgattaacacggcaagtgtggccgcctatgagggacaaatgggacaagcggcttattcggcaagtaagggggccatcgtgggaatgactttgcccatagctcgggacttggcaagtcaggcaataagagtcgtgaccatagcccctggcctatttaggacacccctattttcggcattgcctgacaaggttgtaaagtttctggaaaagtctgtaccttttccgtctcgattgggcgatccagcagaatttgcccatttggtgcaatgtatcatcgaaaatcccatgttaaatggcgagaccattagactggacggtgctctgcgaatgcagccgtaa

SEQ ID NO: 40436 - protein, 256 aa, Tribolium castaneum
MLKNAVTLVTGGASGLGKATVERLVQQGSRVILCDLQSSKGQEVAKTLGEDKVLFAPVNVTSESDVQSALDLAKQKFGKLDNVVNCAGIGVAFKTYNFNKKAAHSLEDFAKVININTIGTFNVIRLAVGLIGENQPNERGERGVVINTASVAAYEGQMGQAAYSASKGAIVGMTLPIARDLASQAIRVVTIAPGLFRTPLFSALPDKVVKFLEKSVPFPSRLGDPAEFAHLVQCIIENPMLNGETIRLDGALRMQP

SEQ ID NO: 40437 - DNA, 804 bp, Mycobacterium sp. JLS
  CDS (1)..(804): transl_table=11
atgactggctggctggcgggcaaacgcgcgttaatcgtgggagcaggttcgggtatcggtcgggccacggtcgacgcgttcctgaacgaggatgcccgggtggccgtgctcgagtacgacagcgataagtgcgccacgctgcgccagcagctgcccgacgttccggtgatcgagggcgatgggaccactcgcaccgccaacgacgaagcagtgcaggtcgctgtcgacgccttcggcggactcgacacattggtgaactgcgtggggattttcgatttctaccgccgtattcaggacatccccgccgagctgatcgaccaggcgttcgacgaaatgtttcgcatcaacgtcctgagtcatatccactcagtcaaggcagcagtgccggcgctgatgggccaggacggcgcctcgatcgtgctcaccgagtccgcgtcatcgttctatccaggacgcggcggcctgctgtatgtggcgtcgaagttcgcggtgcgcggcgtagtcactgcactggctcacgaactcgcgccgaggatccgtgtgaacggtgtcgcccccggggggacgttgaacaccgacctgcgcggactcgacagcctcgaccttggcgcccgccgtctggatgctgcaccagatcgggcccgcgaattggctgctcgcacaccgctgggcgtggccctatcgggtgaagaccacgcctggagttacgtcttcctcgcttctcaccgctcccgcgggctcaccggcgaaacgatccatcccgacggcggtttcagcctcggacccccaccccagcggaattga

SEQ ID NO: 40438 - protein, 267 aa, Mycobacterium sp. JLS
MTGWLAGKRALIVGAGSGIGRATVDAFLNEDARVAVLEYDSDKCATLRQQLPDVPVIEGDGTTRTANDEAVQVAVDAFGGLDTLVNCVGIFDFYRRIQDIPAELIDQAFDEMFRINVLSHIHSVKAAVPALMGQDGASIVLTESASSFYPGRGGLLYVASKFAVRGVVTALAHELAPRIRVNGVAPGGTLNTDLRGLDSLDLGARRLDAAPDRARELAARTPLGVALSGEDHAWSYVFLASHRSRGLTGETIHPDGGFSLGPPPQRN

SEQ ID NO: 40439 - DNA, 801 bp, Novosphingobium aromaticivorans DSM 12444
  CDS (1)..(801): transl_table=11
gtgactgcaagactcgaaggacaggtggcgctgctgaccggcggcgccaccgggatcggcgcggcggtcgtcgcccgctatctcgaagaaggtgcaaaggtaggcgtcctggtcagggacgccgaccaagctgacatggtgcgcatgcggcatggcaaaggaatagtcgtggttgagggcgatgtccgcaactattccgacaaccagaacgcggttgcggcgaccgtggctaccttcggcaagctcgacgtgtttgtcggcaatgtcggcatctgggattacatgaccccgctggcggacatggatccggacaagctctccgaaacgttggacgagatttttggggtcaacgtcaagggctacttcttcggtgcccgcgccgcaatcccggaactcaggaagaccaagggcagcatcatcttcacggcctcgacctcgagcttctataccggcggcggtggcacgccctatgtggcatcgaagcacgcggtccttggtctgatccgccagctggcatgggaacttacccccgatgtcagggtcaacggcgtggctccgggcggcacccggacacccctcggcggcaccaaggcgggcggaacggccgatgtccacatggaggacatggaaggcctcgacgcgatgattgccgggatgacgccgctcgcgcggatcgctgaaccggatgatcacacagggctctatgccttgctagcctcgcgtcgggactcggcctacatgacaggagcggttttgctcagcgatggtggcatcggcattggcaagcgtcccgaaggctga

SEQ ID NO: 40440 - protein, 266 aa, Novosphingobium aromaticivorans DSM 12444
MTARLEGQVALLTGGATGIGAAVVARYLEEGAKVGVLVRDADQADMVRMRHGKGIVVVEGDVRNYSDNQNAVAATVATFGKLDVFVGNVGIWDYMTPLADMDPDKLSETLDEIFGVNVKGYFFGARAAIPELRKTKGSIIFTASTSSFYTGGGGTPYVASKHAVLGLIRQLAWELTPDVRVNGVAPGGTRTPLGGTKAGGTADVHMEDMEGLDAMIAGMTPLARIAEPDDHTGLYALLASRRDSAYMTGAVLLSDGGIGIGKRPEG

SEQ ID NO: 40441 - DNA, 837 bp, Bradyrhizobium sp. ORS278
  CDS (1)..(837): transl_table=11
atgcagccatccgccccatcgaccgagcgcgccccgcgtctccttggacactacgcgctggtgaccggtgccgcgcagggtatcggccgcgcgatcgcggtgcgcttcgccgaggaaggcgcgcatgtcgcgatcaactatggcgggccgtcatcgtccggtgacgaaaccctggcgctggtgcaggcggcctcggccgcgcgcggccatgccgggcgcgatcacgtgacggtgaaggccgacatcggtgtcgaggccgatatcacccggatgttcgagacggtgctggcgcgctggccgcggctcgattgcctcgtcaacaatgccggcttccagcgggagtcgccgagcgaggcgctcgacgtcgacacctatcgcgccatcctcgaggtcaatctgaacggcgccgtgctgtgcgcgcgccacgcgctggcgcatttcgtcgcgcgcggtggcggcggcaacatcatcaatacgtcgagcgtgcatcagatcattccgaagcctggctatctcgcttattccatcagcaagagcgcgatggccggactcacccgcacgctcgccctggaattcgccgggcgcggcatccgcgtcaattccgtcggtcccggtgcggtggacacgccgatcaacgccgcttggaccgacgatccggtcaagcgggcggcggtcgaatctcacatcccgatggggcgcgtcgcgagcccggaggagatcgcgggcgttttcgccttcctggcctctgccgaggcgagctacatcaccggacagacgatctatgcctgcggcggcatcacgctgttcggcgagttccgcgacaattgggcgagctga

SEQ ID NO: 40442 - protein, 278 aa, Bradyrhizobium sp. ORS278
MQPSAPSTERAPRLLGHYALVTGAAQGIGRAIAVRFAEEGAHVAINYGGPSSSGDETLALVQAASAARGHAGRDHVTVKADIGVEADITRMFETVLARWPRLDCLVNNAGFQRESPSEALDVDTYRAILEVNLNGAVLCARHALAHFVARGGGGNIINTSSVHQIIPKPGYLAYSISKSAMAGLTRTLALEFAGRGIRVNSVGPGAVDTPINAAWTDDPVKRAAVESHIPMGRVASPEEIAGVFAFLASAEASYITGQTIYACGGITLFGEFRDNWAS

SEQ ID NO: 40443 - DNA, 765 bp, Pseudomonas syringae pv. syringae B728a
  CDS (1)..(765): transl_table=11
atgaatcgtttcacccaaaaagtcatcgtcgtcacaggtgccggttccggaatcggcgaagcgaccgccaaacgttttgccgaggaaggcgcgagcgtggtgctggtcggccgcaatcacgacaagctggccaaggtggccgcgcaactgaagggcgaagggcacttggtcagagccacggatgtggccgacccgagcgacgtggaagcgctgttcaaggaagtggcgacccgtttcgggcgtctggatgtgctggtcaacaatgccggcatcgtcaagtccggcaaagtgaccgagctgggcatagaggactggaaagagctgatgtccgtggacctggacggcgtgttctattgcacccgcaccgccatgccggcactgatcgccagcaaaggcaacatcatcaatgtctcgtcggtgtccggtctgggcggcgactggggcatgagcttctataacgcggccaagggtgccatcaccaacttcacccgttcgctggccatggatcatggtgctgacggcgtgcgtgtgaatgccgtttgcccctcactgacccgcagcgagctgaccgaagacatgctcggcgacaaagcgttgatggccaaattcatggagcgcatcccattggggcgcccgggtgaagccgaagacgtcggcgacgtgattgcctttctggccagcgatgacgcgcgcttcgtgaccggcgtcaacctgccggtagacggtggcctgtcggcgtccaacgggcagccgccgcaggcctga

SEQ ID NO: 40444 - protein, 254 aa, Pseudomonas syringae pv. syringae B728a
MNRFTQKVIVVTGAGSGIGEATAKRFAEEGASVVLVGRNHDKLAKVAAQLKGEGHLVRATDVADPSDVEALFKEVATRFGRLDVLVNNAGIVKSGKVTELGIEDWKELMSVDLDGVFYCTRTAMPALIASKGNIINVSSVSGLGGDWGMSFYNAAKGAITNFTRSLAMDHGADGVRVNAVCPSLTRSELTEDMLGDKALMAKFMERIPLGRPGEAEDVGDVIAFLASDDARFVTGVNLPVDGGLSASNGQPPQA

SEQ ID NO: 40445 - DNA, 795 bp, Dechloromonas aromatica RCB
  CDS (1)..(795): transl_table=11
atgggctggctcgatggctacgtggcgctggtgacaggcggtggttccggaatcggacgcgccgtggtcaaaagatatcttcaggaaggctgcaccggggtcggtgtgatggcgcgtagccagaagcaggccgacagcctggttgccgagttcggcgaccgggttgtcgtcagcctgggcgacgtgcgttccggggcggataaccgggccgcggtggacaccaccgtcgggcgcttcggcaagctcgatacgctggtcggcaacgccggggtctgggactttttcacccggctcgaaaagatgagcctggaagatatcgaccgcagcttcgacgaaatcttcggggtcaatgtgaagggctatgtgctggctgcccgcgctgctgccgaggcgctgcgggccagccggggcagcatgatcttcacgctgtccaactcggcctactacgccgggggcggcgggccgctctatgtggcttccaagcacgctgggcttggcctgatcaagcaactggcctacgagttcgcgccggatgtccgcgtcaacggcgtggcaccgggcgggacggtgacgccgttgcgcgggccggaaagtcttggcaagggcgagcgccgactgtcggaaattccgaatttccaggaaagcgtcgccagcgtcatgccgctgaagatgatagcccagccggaagaccatgccggtcattacgtgctgctggcctcgaaagagaacagtcgggcgacaacggcggcggtgatccagagcgatggtgggtgggagataaggccgatgagatga

SEQ ID NO: 40446 - protein, 264 aa, Dechloromonas aromatica RCB
MGWLDGYVALVTGGGSGIGRAVVKRYLQEGCTGVGVMARSQKQADSLVAEFGDRVVVSLGDVRSGADNRAAVDTTVGRFGKLDTLVGNAGVWDFFTRLEKMSLEDIDRSFDEIFGVNVKGYVLAARAAAEALRASRGSMIFTLSNSAYYAGGGGPLYVASKHAGLGLIKQLAYEFAPDVRVNGVAPGGTVTPLRGPESLGKGERRLSEIPNFQESVASVMPLKMIAQPEDHAGHYVLLASKENSRATTAAVIQSDGGWEIRPMR

SEQ ID NO: 40447 - DNA, 858 bp, Anabaena variabilis ATCC 29413
  CDS (1)..(858): transl_table=11
atggcagaaaagcaaacattacaaccaccgcagcagcaaaaaacaccaggtacagaatcaaaaatgcaaccaaaacctcaagctgatgatgctcggtatctgggtagcggtaaattaaaagataaagttgccttgattactggtggggatagtgggattggtcgggctgtggcgatcgcctatgctaaagagggtgcagatgtagcctttgtttacttgagtgaacatggcgatgcggaagaaaccaaaaatttggtagaagaacaaggacggcgtgctgtatctatcgccggggatataactgatgaggctttttgtcagcgtgcaattcaacaaactgtagatgagtttggtaaactggatattctcatcaataatgcggctgaacaacatccccaagaaagcattgaagatattactaaagagcagttagaacggacattcagcactaacattttctcaatgttctacttgacaaaagcagcactcaagcatctgaaacaaggtagcgctattatcaatactacttcagttacagcttataaaggtagttcacatttacttgattattctgcaacaaaaggggcaattgttgcctttactcgttccttatcacaaaatctcattagtaaaggtatccgggttaatgctgtggcacctgggccaatttggacacctttaattccctcgacattccccacagaaaaagtagaaacctttggtaaacaagtaccgatgcaacgagcaggacaaccggaagaagttgcacctagttatgtgtttttagcttctgatgattcgtcttatatgtctggtcaagttttacatcctaatggtggggaagtagttaatggctaa

SEQ ID NO: 40448 - protein, 285 aa, Anabaena variabilis ATCC 29413
MAEKQTLQPPQQQKTPGTESKMQPKPQADDARYLGSGKLKDKVALITGGDSGIGRAVAIAYAKEGADVAFVYLSEHGDAEETKNLVEEQGRRAVSIAGDITDEAFCQRAIQQTVDEFGKLDILINNAAEQHPQESIEDITKEQLERTFSTNIFSMFYLTKAALKHLKQGSAIINTTSVTAYKGSSHLLDYSATKGAIVAFTRSLSQNLISKGIRVNAVAPGPIWTPLIPSTFPTEKVETFGKQVPMQRAGQPEEVAPSYVFLASDDSSYMSGQVLHPNGGEVVNG

SEQ ID NO: 40449 - DNA, 762 bp, Pseudomonas fluorescens PfO-1
  CDS (1)..(762): transl_table=11
atgcagatcgagaacaaggtttttatcgtcaccggcggtgcgtccgggctgggtgcagccaccgctgagctgttggttgccgccggcgccaaagtgatgctggtggacatgaacgccgaagccgtcgccgctcaggcccagcgcctcggcgcgcaaagcgtggtggccgacatcagcaacgaagccgccgccgaagccgccgtgcaggcgaccgttaaagccttcggcagcctcaacgggctggtgaactgcgccggcatcgttcgcggcgagaagattcttggcaagaacggcccgcacgccttgtccagcttcgcccaggtgatcaacgtcaacctgatcggcagtttcaacatgctgcgtctggcagccgctgcgattgccgaaagcgaagccaacgccgacggcgagcgtggtgtgatcatcaacaccgcgtcggttgcggcgttcgacggccagatcggccaggccgcgtattcggcgtccaaaggcgcgatcgccagcctgactctgcctgccgctcgtgaactggcgcgcttcggcatccgcgtgatgaccatcgccccgggcattttcgaaaccccgatgatggccggcatgaccccggaagtgcgcgactcgctggccgccggcgtaccgttcccgccgcgtctgggcaaacctgccgagtacgccgcgctggtgcggcatatcattgaaaacagcatgctcaacggcgaggtgatccgtctcgacggtgccttgcgcatggctgccaagtaa

SEQ ID NO: 40450 - protein, 253 aa, Pseudomonas fluorescens PfO-1
MQIENKVFIVTGGASGLGAATAELLVAAGAKVMLVDMNAEAVAAQAQRLGAQSVVADISNEAAAEAAVQATVKAFGSLNGLVNCAGIVRGEKILGKNGPHALSSFAQVINVNLIGSFNMLRLAAAAIAESEANADGERGVIINTASVAAFDGQIGQAAYSASKGAIASLTLPAARELARFGIRVMTIAPGIFETPMMAGMTPEVRDSLAAGVPFPPRLGKPAEYAALVRHIIENSMLNGEVIRLDGALRMAAK

SEQ ID NO: 40451 - DNA, 780 bp, Pseudomonas putida
  CDS (1)..(780): transl_table=11
atgggcaatcaacaagtcgtttcgataaccggtgccggctcaggaatcggtctcgaactggttcgatcctttaagttggccggttattgcgtatccgctctcgtgcgaaacgaggagcaagaggcgcttctttgcaatgagttcaaggacgcactcgagatcgtagtgggcgatgtccgggaccacgcgacaaatgagaagctgataaagcagacaattgatagattcggtcatctcgattgtttcatcgcaaatgccggtatttgggattacatgctgaatatcgaagagccttgggagaaaatctcgagcagttttgacgaaatattcgacatcaatgtcaagagctatttcagtggcatcagtgccgccctgcccgagctgaaaaagactaacggatcagtggtgatgaccgcttcggtgtcgtcccatgcggtcggtggtggtggttcttgctacatcgccagcaagcatgcggtgctgggtatggtcaaggctttggcctacgaattggcccccgaaattcgcgtgaacgctgtttcgcctggcggcaccgtgacgtctctgtgcggtcccgctagcgccggtttcgacaaaatgcacatgaaagacatgcccggcatcgacgatatgatcaaaggtctcacacctcttgggtttgcagccaagcccgaagacgtggtggcaccctatctgttgctggcttcgcgaaagcaaggaaaattcatcactggcaccgtgattagcattgatggcggtatggcgctcggtcgcaagtga

SEQ ID NO: 40452 - protein, 259 aa, Pseudomonas putida
MGNQQVVSITGAGSGIGLELVRSFKLAGYCVSALVRNEEQEALLCNEFKDALEIVVGDVRDHATNEKLIKQTIDRFGHLDCFIANAGIWDYMLNIEEPWEKISSSFDEIFDINVKSYFSGISAALPELKKTNGSVVMTASVSSHAVGGGGSCYIASKHAVLGMVKALAYELAPEIRVNAVSPGGTVTSLCGPASAGFDKMHMKDMPGIDDMIKGLTPLGFAAKPEDVVAPYLLLASRKQGKFITGTVISIDGGMALGRK

SEQ ID NO: 40453 - DNA, 1056 bp, Mycobacterium sp. MCS
  CDS (1)..(1056): transl_table=11
gtgcgaggaactggctacgctgctggccggggcgaccggcgatgcactgaacgtcgccaacgagttcgcagaggtcgtcgtgcgccgagtgaccactcgcaacggagctcggctgttgattcaggcgccaaaatcggcgcagtgggtctcgctggatgccttggagatcgaggcgctgacctggcagaacccagccaccttagcggccatggtggggaacgcaggtactccgttgattctgggcgacgagatatgactggctggctggcgggcaaacgcgcattgatcgtcggcggaggttcgggtatcggtcgggccaccgtcgacgcgttcctgaacgaggatgcccgggtggccgtgctcgagtacgacagcggtaagtgcgccacgctgcgccagcagctgcccgacgttccggtgatcgagggcgatgggaccacccgcaccgccaacgacgaagcagtgcaggtcgctgtcgacgccttcggcggactcgacacattggtgaactgcgtggggattttcgatttctaccgccgtattcaggacatccccgccgagcgaatcgaccaggcgttcgacgaaatgtttcgcatcaacgtcctgagtcatatccactcagtcaaggcagcagtgccggcgctgatgggccaggacggcgcctcgatcgtgctcaccgagtccgcgtcatcgttctatccaggacgcggcggcctgctgtatgtggcgtcgaagttcgcggtgcgcggcgtagtcactgcactggctcacgaactcgcgccgaggatccgtgtgaacggtgtcgcccccggggggacgttgaacaccgacctgcgcggactcgacagcctcgaccttggcgcccgccgtctggatgctgcaccagatcgggcccgcgaattggctgcccgcacaccgctgggcgtggccctatcgggtcacgaccacgcgtggagttacgtcttcctcgcttctcaccgctcccgcgggctcaccggcgaaacgatccatcccgacggcggtttcagcctcggacccccaccccagcggaattga

SEQ ID NO: 40454 - protein, 351 aa, Mycobacterium sp. MCS
MRGTGYAAGRGDRRCTERRQRVRRGRRAPSDHSQRSSAVDSGAKIGAVGLAGCLGDRGADLAEPSHLSGHGGERRYSVDSGRRDMTGWLAGKRALIVGGGSGIGRATVDAFLNEDARVAVLEYDSGKCATLRQQLPDVPVIEGDGTTRTANDEAVQVAVDAFGGLDTLVNCVGIFDFYRRIQDIPAERIDQAFDEMFRINVLSHIHSVKAAVPALMGQDGASIVLTESASSFYPGRGGLLYVASKFAVRGVVTALAHELAPRIRVNGVAPGGTLNTDLRGLDSLDLGARRLDAAPDRARELAARTPLGVALSGHDHAWSYVFLASHRSRGLTGETIHPDGGFSLGPPPQRN

SEQ ID NO: 40455 - DNA, 813 bp, Rhodococcus sp. RHA1
  CDS (1)..(813): transl_table=11
atgggttggctagaaggcaacgttgcggttatcaccggtggcggatcgggcctgggtagggcgctggttgagcgattcatcgaggagggcgcaaaagtaggagtcctggagaggtcggcggagaaggtcaagaagcttgcggctgatttcggcgagaatgtcgtcactgtcgagggcgacgtgagcaagtacgaggacaacgcttcggtcgtgcgagaaacggtgcgacagttcggccgcctcgacaccttcgtgggtaacgcggcgatctgggacttttcgacaaagctggtcgacatcccggaggacagactggacccgctcttcgacgagatgttccacatcaacgtcaagggctatctgaacggggcgaaagcggcagtcaaggagcttgcactcacaggtggttcgatcgtcttcacggtgtccaacgccggtttctacccaggtggcggcgggccgctgtacacggcctcgaagcacgcggtcgtgggtctggtcaaggaactggccttcgaattcgcccccaaaatccgagtaaacggagtggcccctggtgccatggccacggatctgcgcgggccaggatcgatcggactcggcgaaacgaacgtctcgtccctcccgctcgcagatctgatcaagcagtgcacggtactgcaggaactctgtgagcccgcggattacactgggcactacgtcctgctcgcctcgaaggataattcacgaaccgcgactggtgcgatcatcaactgtgacggcggaatgggcgtacgcggcctcgccgaaaccgcaggcggaaatgacctttag

SEQ ID NO: 40456 - protein, 270 aa, Rhodococcus sp. RHA1
MGWLEGNVAVITGGGSGLGRALVERFIEEGAKVGVLERSAEKVKKLAADFGENVVTVEGDVSKYEDNASVVRETVRQFGRLDTFVGNAAIWDFSTKLVDIPEDRLDPLFDEMFHINVKGYLNGAKAAVKELALTGGSIVFTVSNAGFYPGGGGPLYTASKHAVVGLVKELAFEFAPKIRVNGVAPGAMATDLRGPGSIGLGETNVSSLPLADLIKQCTVLQELCEPADYTGHYVLLASKDNSRTATGAIINCDGGMGVRGLAETAGGNDL

SEQ ID NO: 40457 - DNA, 747 bp, Rhizobium leguminosarum bv. viciae 3841
  CDS (1)..(747): transl_table=11
atggctaagcttacaggaaaagtcgctgtcgtaacgggcgcctccaaaggcattggcgctgcgattgccaaggcactcgcagcagagggtgcaaaagtggtggtcaactacgcttcgagcaaggcgggagcggacgctgtggttgcggcgatcggcgcggccggtggcaaagccatcgcggtgcagggcgatgtttcgaaggccgctgaggcacagggactggtcgatgctgcggtcagggagttcggcaagctcgacgtgctggtcaacaactcaggtgtctatgaattcgcgccgatcggtgaggtgaccgaggagcaatatcgccgcatcttcgacgtgaatgttctcggtgttctcctgaccacccaggcagcggtcaagcatctcggcgagggcggcagcatcatcaacatctcgtcggtggtcaccagtctggcgccgccagactccgccgtctataccggcacgaagggagccgtcgagggcatcaacagcgtgcttgccaaggaactcggcccgcgcaagatccgcgtcaacgccatcctgccggggatggtcgaaaccgagggcacgcacacggccggcgtcatcggctcggatttcgaacagacaatcgccgcccagacgccgctcggccgcatcggccagccggacgatatcgccggtgtcgccgtcttcctcgcttccgacgatgcccgctggctgaccggcgaacgattggccgccagcggcggttttcgctga

SEQ ID NO: 40458 - protein, 248 aa, Rhizobium leguminosarum bv. viciae 3841
MAKLTGKVAVVTGASKGIGAAIAKALAAEGAKVVVNYASSKAGADAVVAAIGAAGGKAIAVQGDVSKAAEAQGLVDAAVREFGKLDVLVNNSGVYEFAPIGEVTEEQYRRIFDVNVLGVLLTTQAAVKHLGEGGSIINISSVVTSLAPPDSAVYTGTKGAVEGINSVLAKELGPRKIRVNAILPGMVETEGTHTAGVIGSDFEQTIAAQTPLGRIGQPDDIAGVAVFLASDDARWLTGERLAASGGFR

SEQ ID NO: 40459 - DNA, 795 bp, Mycobacterium avium 104
  CDS (1)..(795): transl_table=11
atgaccggctggcttgacggcaagcgcgccctcgtcgtcggcgcggggtcgggaatcgggcgcgccgtcgtcgacgccttcgccgccgagggcgcgaaagtcgctgcgctggaacgcgatagcgacaagtgcgaccggctgcgccggcagctgcccgaggtggccgtcgccgagggcgacgccaccacccgcgaggccaacgaacgggccgtggcgctcgcggtggacaccttcggcgggctggacaccctggtcaactgcgtcggggtgttcgacttctaccgcggggtcgccgacatcgacgcgggcgcgctcgccgacgcgttcgacgagatgtttcgcaccaacgtgctgagccacctgcagtcggtcaaggcggcgctgcccgcgctgcgggccgccggtgcctcctcgatcgtgctgaccgagtccgcatcgtcgttctatccgggccgcggcggagtgctctacgtgtcgtcgaaattcgcggtgcgcgggttggtttcggcgttggcgcacgagctggcgccggggatccgggtcaacggcgtggccccgggcggcacgctgggcaccgacctgcgcggcctggccagcctgaggctgcagggcacccgcctggacgacgccccggaccgggcggccgaggtggccgcccgcactcccctgcgggtcgcgctgtccggcgccgaccatgcctggagtttcgtgttcctggcctccgaccggtcccgcggcatcaccggcgaaaccgtaaggcccgacggcggattcgggctggggacgccgcggtga

SEQ ID NO: 40460 - protein, 264 aa, Mycobacterium avium 104
MTGWLDGKRALVVGAGSGIGRAVVDAFAAEGAKVAALERDSDKCDRLRRQLPEVAVAEGDATTREANERAVALAVDTFGGLDTLVNCVGVFDFYRGVADIDAGALADAFDEMFRTNVLSHLQSVKAALPALRAAGASSIVLTESASSFYPGRGGVLYVSSKFAVRGLVSALAHELAPGIRVNGVAPGGTLGTDLRGLASLRLQGTRLDDAPDRAAEVAARTPLRVALSGADHAWSFVFLASDRSRGITGETVRPDGGFGLGTPR

SEQ ID NO: 40461 - DNA, 852 bp, Mycobacterium sp. KMS
  CDS (1)..(852): transl_table=11
gtgggttggttgaccgggcaggtcgccctggtgaccggcggggcagccggaatcggtttggccgtggtcgagcgtttcttggccgagggcgcatgcgtgggcgtcctggatcgctcggaaggcgacctggctaccatcggcaacgccgacggcaggctgatcgcggtatcgggtgacgtgacgtcgtatgcagacaacgtcatggcggtgcgcgaaacggtcgatgcgttcggaaagctcgacgtcttcgtcggcaacgctgggatcttcgattactttgcccctttggtgggtttcgacggagccgacctcagcagcgccttcgatgagatcttcgcggtcaatgtcaagggttacctccttggtgccagggccgccgttcctgaactcctcaaaagcgatggcccgagcatgatcttcaccgtctccaactctggtttctatgcctccggtggcggcccgctgtacaccgcttccaagcacgtagtcgttggcgtggtgcgtgaactggcctacgagttggcgccgaagatcagggtgaatggcgtcgctccaggcggcacggtaacgggcctgcgtgggatcgaggacctcggccagggtcaggacgtgttgtcatcggtgcccggcgtcgccgacatgatgagtatcacgaaccctctgcagtacgcgcagcagcccgccgatcatgccggcctgtatctgctactcgcgtctgcagacaactcgcgagcggtgaccggcgtcgtcatcaacagtgacggcggcttgggcgtgcggggcctgaaccagccgtccggagggctggaacttgccaccggcgcgatgcgcatcgacgtcgggtcaacatag

SEQ ID NO: 40462 - protein, 283 aa, Mycobacterium sp. KMS
MGWLTGQVALVTGGAAGIGLAVVERFLAEGACVGVLDRSEGDLATIGNADGRLIAVSGDVTSYADNVMAVRETVDAFGKLDVFVGNAGIFDYFAPLVGFDGADLSSAFDEIFAVNVKGYLLGARAAVPELLKSDGPSMIFTVSNSGFYASGGGPLYTASKHVVVGVVRELAYELAPKIRVNGVAPGGTVTGLRGIEDLGQGQDVLSSVPGVADMMSITNPLQYAQQPADHAGLYLLLASADNSRAVTGVVINSDGGLGVRGLNQPSGGLELATGAMRIDVGST

SEQ ID NO: 40463 - DNA, 816 bp, Oceanicola batsensis HTCC2597
  CDS (1)..(816): transl_table=11
atgcggcgcagctgccggtttccgggtctgcacccggacaaacaggagaccggaatgaaccgtttcgagaacaagaccgtcatcgtgaccggcgccgcctcgggcatgggccgcgccacggcccgccgctttctcgaggaaggcgcgcgagtggcgtgcgccgaccttcccgatcagctggaacaactgcccggcgatctggaatgcgacagcgcccttaggtgccccaccgacgtgtcggacagcgaccaggtcgatgcgctggtcgaccggacggtcgagaccttcggcgggctcgacgtcatcgtgaacaatgccgggcagcttatcggaggggagatcggcgaagtcacgaacgaggactggcacaaggttttcgccaccgacgtcgacggcgtcttctacggttgccgcgctgcccttccccatctggaacgttccggcggctgcgtggtcaacaccgtctcggtctcgggcctgggcggggactggggcatgagcccctacaatgccgccaagggcgcggccgcgcagctgacccgcgcgctggcgctcgacttcgggcgcaagggcgtgcgggtgaatgccgtctgcccgacgctgacccgcacgggaatgacgaccgacgtggtcgcggacgaggagatggtggagaagttccgcgagcgcatcgccctcggccgctatgccgagcccgaggatgttgcggcggtcatcgcctttctcgccagcgatgacgcgcggttcgtgaccggggtcaacctgccggtcgacgggggcctgatggcctcgaacggccagccgccccaggcctga

SEQ ID NO: 40464 - protein, 271 aa, Oceanicola batsensis HTCC2597
MRRSCRFPGLHPDKQETGMNRFENKTVIVTGAASGMGRATARRFLEEGARVACADLPDQLEQLPGDLECDSALRCPTDVSDSDQVDALVDRTVETFGGLDVIVNNAGQLIGGEIGEVTNEDWHKVFATDVDGVFYGCRAALPHLERSGGCVVNTVSVSGLGGDWGMSPYNAAKGAAAQLTRALALDFGRKGVRVNAVCPTLTRTGMTTDVVADEEMVEKFRERIALGRYAEPEDVAAVIAFLASDDARFVTGVNLPVDGGLMASNGQPPQA

SEQ ID NO: 40465 - DNA, 759 bp, Synechococcus sp. WH 5701
  CDS (1)..(759): transl_table=11
atgaccggatccgctgttgccccactcacgggccaggtggctctggtcacaggagccagccgcggcatcggccgggccatcgctctggaactggccgccagcggagcggaggtggtggtgaactatgccgcttccgctgacgcggccgaagctgtggtggcggccatcaccgccgccggcggccgggcctggagtcaccgcgccgatgtctcccaggaggcggacgtggaggccatggtcaagcaggtgctggagcgcagcggccgcctcgacatactggtgaacaacgcgggcatcacccgtgacggcctgctgatgcgcatgaagaccgctgactggcagagcgtgatcgacctcaacctcagcggcgtcttcctctgcacccgtgccgtctgccgcacgatgctcaaggcccgcagcggacgcatcatcaacatcacctcggtggtggggctgatgggcaacccaggccaggccaactacagcgccgccaaggccggtgtgatcggcttcacccgcagcaccgccgccgagctggccagccgtggggtcactgtcaacgccgtggcccctggcttcatcgcctccgacatgacgaaagacctggacgtcgagcggatccaggcggccatccccctgggtcggctcggtcagcccgaggacgtggccggtgtggtgcgctttctggccgccgatcccgccgccgcttacatgactggccaggtgctgcaggtggatggtggcctggtgatgcgctga

SEQ ID NO: 40466 - protein, 252 aa, Synechococcus sp. WH 5701
MTGSAVAPLTGQVALVTGASRGIGRAIALELAASGAEVVVNYAASADAAEAVVAAITAAGGRAWSHRADVSQEADVEAMVKQVLERSGRLDILVNNAGITRDGLLMRMKTADWQSVIDLNLSGVFLCTRAVCRTMLKARSGRIINITSVVGLMGNPGQANYSAAKAGVIGFTRSTAAELASRGVTVNAVAPGFIASDMTKDLDVERIQAAIPLGRLGQPEDVAGVVRFLAADPAAAYMTGQVLQVDGGLVMR

SEQ ID NO: 40467 - DNA, 768 bp, Xanthobacter autotrophicus Py2
  CDS (1)..(768): transl_table=11
atgtccactgctggaaatctgcgtctttccggaaaaactgcgctcgtcacgggcgccgcctcgggcttcggcgccgagatcgcccgcgtcttcgcccgcgagggcgccaaggtcgccatcgtcgacctgaacggcgagggcgcccggaaggtggccgaagagatcggcccggccgccatcgccgtcacggcggacgtgaccagccgcgccgacatcgaggcggcggttgccgccaccatcgcccacggcggcaagctcgacattgtcgtcaacaacgcgggctggacccaccgcaataagccgctgatggaggtgaccgaggaggagttcgacagggtctacgccatcaacgtgaagtccatctattacatgacccacaccatcgtgccgatcatgtcggggcagggcggtggagtggtcgtgaatgtgggctccgtcgcgggcatccggccgcgtccgggcctcacctggtacaattcctccaagggggcggtgaacctggccacccgctcgctggcggtggagctggcgccgcagaagatccgcgtgaactgcgtcgccccggtgatgggcgcgacaggtctcctcgacagcttcatgggcgtgcccgacacgccggagaaccgcgcgcgcttcatcgccaccattccgctcggccggctgtccgagccgaaggacatcgccaacgcctgcctgtatcttgcctccgacgaggcggagttcatcaccggcgtggtgctggaagtggacggcggccgcaccatctga

SEQ ID NO: 40468 - protein, 255 aa, Xanthobacter autotrophicus Py2
MSTAGNLRLSGKTALVTGAASGFGAEIARVFAREGAKVAIVDLNGEGARKVAEEIGPAAIAVTADVTSRADIEAAVAATIAHGGKLDIVVNNAGWTHRNKPLMEVTEEEFDRVYAINVKSIYYMTHTIVPIMSGQGGGVVVNVGSVAGIRPRPGLTWYNSSKGAVNLATRSLAVELAPQKIRVNCVAPVMGATGLLDSFMGVPDTPENRARFIATIPLGRLSEPKDIANACLYLASDEAEFITGVVLEVDGGRTI

SEQ ID NO: 40469 - DNA, 795 bp, marine gamma proteobacterium HTCC2143
  CDS (1)..(795): transl_table=11
atgatgtctacgcaaaaagatttagcatttgacgataaaattgtgcttattacgggtgcagctgggggcattggtttggcgactacactggcttttgttcgcagcggtgcaacggtattcgctatggacctgttgggatcttcgttggcagaatccgtcgcagccatgaccgatttatcgggttccattattacgatcgaaggtgatgtcactcaagccgatgattggcagcgggcggttgacacgattaccggtgaatttggtggtttagacatactcgtaaataacgcgggtattattgaggcgggttctcgacttgagaagtttgatgagaatgtattcgatcgtgttatggcggttaataccaagggtactttcctgggtatgaaggcagtcattccggcaatgcgcaaacgtcatggtggcgccattgttaacgtctcatcaatatccggtcactgcggtagtgcggttgcaaccgcctacaccgcgagcaaacatgccgtattgggtatgaccaagagtgctgctttggacttggctgaatacgacattcgtgtcaatgcggtctgtcccgcgcctatcgacacaccgatggtgcgaaacttgggcactcgtcaacaggcaaaagatccaagttttgatatagctgcggtgatgtccagtggcactcccttgaaacggttaggtgatccaggcgaagtggcctccgccattttatttctcgctagtgagcaggcgagttttattactggcgcaggccttcccgttgacggtggcgtattagccaaataa

SEQ ID NO: 40470 - protein, 264 aa, marine gamma proteobacterium HTCC2143
MMSTQKDLAFDDKIVLITGAAGGIGLATTLAFVRSGATVFAMDLLGSSLAESVAAMTDLSGSIITIEGDVTQADDWQRAVDTITGEFGGLDILVNNAGIIEAGSRLEKFDENVFDRVMAVNTKGTFLGMKAVIPAMRKRHGGAIVNVSSISGHCGSAVATAYTASKHAVLGMTKSAALDLAEYDIRVNAVCPAPIDTPMVRNLGTRQQAKDPSFDIAAVMSSGTPLKRLGDPGEVASAILFLASEQASFITGAGLPVDGGVLAK

SEQ ID NO: 40471 - DNA, 768 bp, Pseudomonas putida GB-1
  CDS (1)..(768): transl_table=11
atgcacatagccaacaaacacttcatcgtcagcggcgccgcttccgggctgggtgccgctactgctcagatgctggtcgaggccggcgccaaggtcatgctggtcgacctcaatgcccaggccgtcgaggccaaggctcgcgagctgggcgacaacgcccgcttcgcggtggccgacatcagcgacgagcaggctgcccaggcggcggtcgatgcagccgtcaacgcctttggcagcttgcatgggctggtcaattgcgccggcatcgtcggtgctgagaaggtgttgggcaagcagctcccgcatggcctgggcagcttcgccaaggtcatcaacgtcaacctgatcggcagcttcaacctgctgcgtctggctgctgcggccatggccgaaggggctgccgacgaggggggcgaacgcggggtgatcatcaacactgcgtccattgccgcctatgacgggcagatcggccaggccgcctacgcggcctccaagggcgctatcgccagcctgaccttgccggccgcccgcgaactggcgcgcttcggtatccgtgtgatgaccatcgccccaggcatcttcgaaacaccgatgatggccgggatgactgaggacgtgcgtgcttcgctggctgccggcgtgccgttcccgccgcgtctgggtcgcccccaggaatatgccgcactggcccgtcacatcatcgagaacagcatgctcaacggcgaggtgatccgcctcgacggtgcactgcgcatggctgccaagtaa

SEQ ID NO: 40472 - protein, 255 aa, Pseudomonas putida GB-1
MHIANKHFIVSGAASGLGAATAQMLVEAGAKVMLVDLNAQAVEAKARELGDNARFAVADISDEQAAQAAVDAAVNAFGSLHGLVNCAGIVGAEKVLGKQLPHGLGSFAKVINVNLIGSFNLLRLAAAAMAEGAADEGGERGVIINTASIAAYDGQIGQAAYAASKGAIASLTLPAARELARFGIRVMTIAPGIFETPMMAGMTEDVRASLAAGVPFPPRLGRPQEYAALARHIIENSMLNGEVIRLDGALRMAAK

SEQ ID NO: 40473 - DNA, 783 bp, Branchiostoma belcheri tsingtauense
  CDS (1)..(783)
atggcggcgatcaggagttgcaagggtcttgttgccatagtaacaggcggggcctctggtctgggtcgggccacagtggagaggttggtaaagcagggtgcatctgtggtgatcgctgacctgccaacatcagagggagagtctgtggctaatactatcgggggaaactgtgtcttctctccaacagatgtatcaaaggaggcagatgtggtggcagcagttgccaaggccaagtcagagtttgggaagctgaatgcggctatcaattgtgcaggaattggggtggccatgaaaacatacaacttcaagaagaatgcaccgcaccccctggaagacttccaacgagtactgacagtgaacacagttggcacctttaacgtaattcgactgtccgtggcggagattgctcagaatgaacccaacgaggatggagagagaggagtgatcattaacacagccagtgtggctgctttcgaggggcagcagggacaggtggcatactcagcgtccaagggcgccatcgtagggatgactctgccaatagcacgagacttggctgacaagggcatcagagtcaacaccattgcacctggccttttcatgacgccattgttgatgggcctgccggaaaaagttcggtccttcctggccaagatggtgccgtatccgcagcgcctgggtcacccagacgagtacgcacacttggtgcagtccatcatcgagaaccccatgctgaacggagaagtcatcaggatagacggtgccatccgcatgcctccataa

SEQ ID NO: 40474 - protein, 260 aa, Branchiostoma belcheri tsingtauense
MAAIRSCKGLVAIVTGGASGLGRATVERLVKQGASVVIADLPTSEGESVANTIGGNCVFSPTDVSKEADVVAAVAKAKSEFGKLNAAINCAGIGVAMKTYNFKKNAPHPLEDFQRVLTVNTVGTFNVIRLSVAEIAQNEPNEDGERGVIINTASVAAFEGQQGQVAYSASKGAIVGMTLPIARDLADKGIRVNTIAPGLFMTPLLMGLPEKVRSFLAKMVPYPQRLGHPDEYAHLVQSIIENPMLNGEVIRIDGAIRMPP

SEQ ID NO: 40475 - DNA, 906 bp, Mycobacterium sp
  CDS (1)..(906): transl_table=11
gtgggcagatgcagagcaacaagagcattgcgcatcaccggggggacgatagttttgagttggttgaccgggcaagtcgccctggtgaccggcggggcagccggaatcggtttggccgtggtcgagcgtttcttggccgagggcgcatgcgtgggcgtcctggatcgctcggaaggcgacctggctaccatcggcaacgccgacggcaggctcatcgcggtaacaggtgacgtgacgtcgtatgcagacaacgtcatggcggtgcgcgaaacggtcgatgcgttcggaaagctcgacgtcttcgtcggcaacgctgggatcttcgattactttgcccctttggtgggtttcgacggagccgacctcagcagcgccttcgatgagatcttcgcggtcaatgtaaagggctacctccttggtgccagggccgccgttcctgaactcctcaaaagcgatggcccgagcatgatcttcaccgtctccaactctggcttctatgcctccggtggcggcccgctgtacaccgcttccaagcacgcggtcgttggcgtagtgcgtgaactggcctacgagttggcgccgaagatcagggtgaatggcgtcgctccaggcggcacggtaacgggcctgcgtggaatcgaggacctcggccagggtcaggacgtgttgtcatcggtgcccggcatcgccgacattatgagtactacaaacccattgcagtacgcgcagcagcccgccgatcacgccggcctgtatctgctactcgcgtctgcagacaactcgcgagcggtgaccggcgtcgtcatcaacagcgacggcggcttgggcgtgcggggcctcaaccagccgtccggagggacggaacttgccaccggcgcgatgcgcatcgacgtcgggtcaacatag

SEQ ID NO: 40476 - protein, 301 aa, Mycobacterium sp
MGRCRATRALRITGGTIVLSWLTGQVALVTGGAAGIGLAVVERFLAEGACVGVLDRSEGDLATIGNADGRLIAVTGDVTSYADNVMAVRETVDAFGKLDVFVGNAGIFDYFAPLVGFDGADLSSAFDEIFAVNVKGYLLGARAAVPELLKSDGPSMIFTVSNSGFYASGGGPLYTASKHAVVGVVRELAYELAPKIRVNGVAPGGTVTGLRGIEDLGQGQDVLSSVPGIADIMSTTNPLQYAQQPADHAGLYLLLASADNSRAVTGVVINSDGGLGVRGLNQPSGGTELATGAMRIDVGST

SEQ ID NO: 40477 - DNA, 807 bp, Sphingomonas yanoikuyae
  CDS (1)..(807): transl_table=11
gtggcattgtctgcaaggcttgaaggacaggttgcgctcctgactggcggcgcaaccggaattggtgcggcggtggtcgcccgctatattgaagaaggggccagggttggtgtgctcgtccgagacgacgagcaggcccagctggtgcgttcgcgccacggtgacaaggtcgccgtggtcgcgggcgacgtccgttcctttgcagacaatgcccgggccgtcgccgagacagtcggggcattcggcaagctggatgtctttgtcggcaatgtcgggatctgggatttcatggtgccccttgagcagcaggatcccgagcttctggaaaagacattcgacgaaatctttgacgtcaacctgaaggggtatttcttcggtgcgcgcgccgcgattcccgaactgaggaaaaccaaaggcagcatcgtctttactgcctcgacgtcgagctactacactggcggcggcgggacactgtatgtcgcatcgaagcacgcggtgcttggcctgatccggcagctggcctgggaactgacacccgatatcagggtcaatggcgtcgcgccgggcggcacccgaactccgctcagcggcaccaagactgcgggttttcccgaaaccaagatggaggagatgcctggcctggacggaatgatcgcgggcatgacgccactggcgcggatcgccgagccggacgatcatgcaggtctctacgcgcttttggcttcgcgtcgcgattccgcatacatgaccggaacggttctgctcagcgacggcggcgtcggcatcggcaagcgccccgacgcctga

SEQ ID NO: 40478 - protein, 268 aa, Sphingomonas yanoikuyae
MALSARLEGQVALLTGGATGIGAAVVARYIEEGARVGVLVRDDEQAQLVRSRHGDKVAVVAGDVRSFADNARAVAETVGAFGKLDVFVGNVGIWDFMVPLEQQDPELLEKTFDEIFDVNLKGYFFGARAAIPELRKTKGSIVFTASTSSYYTGGGGTLYVASKHAVLGLIRQLAWELTPDIRVNGVAPGGTRTPLSGTKTAGFPETKMEEMPGLDGMIAGMTPLARIAEPDDHAGLYALLASRRDSAYMTGTVLLSDGGVGIGKRPDA

SEQ ID NO: 40479 - DNA, 825 bp, Oryza sativa subsp
  CDS (1)..(825)
atggcaggcagctcccatgtttctgctgaaacaaggaagctggtgggcaaggtggcggtgatcaccggcggcgcgagcggcatcggcgcatgcacggcgcggctgttcgtgaagcacggcgcccgcgtcgtggtcgccgacatccaggacgagcttggagctagcctcgtcgccgagctcggcccggacgcctccagctacgtgcactgcaacgtcacgaacgagggcgacgtcgccgccgcggtcgaccacgccgtcgccacgttcgggaagctcgacgtcatgttcaacaacgccggcgtcaccggcccgccgtgcttcaggatcaccgagagcaccaaggaagacttcgagcgcgtgctggccgtgaacctgatcggcccgttcctcggcaccaagcacgcggcgcgggtgatggcgccggcgcgccgtggcagcatcatctcgacggcgagcctgtcgtcgtcggtgtccggcacggcgtcgcacgcgtacacgacgtcgaagcgcgccctggtggggttcacggagaacgcggccggcgagttgggccggcacgggatccgcgtcaactgcgtttcccccgccgcggtcgccacgccgctggctagggctgccatgggtatggacatggacgacgagaccattgaggcgatcatggagaagtcggcgaacctaaagggcgttggactcaaggtggacgacatcgccgccgcggcgctgttcctcgccagcgacgacgggcggtacgtgagcggccagaacctgcgcgtcgacggcggcgtgtccgtcgtcaactcgagctttggtttcttcagggactga

SEQ ID NO: 40480 - protein, 274 aa, Oryza sativa subsp
MAGSSHVSAETRKLVGKVAVITGGASGIGACTARLFVKHGARVVVADIQDELGASLVAELGPDASSYVHCNVTNEGDVAAAVDHAVATFGKLDVMFNNAGVTGPPCFRITESTKEDFERVLAVNLIGPFLGTKHAARVMAPARRGSIISTASLSSSVSGTASHAYTTSKRALVGFTENAAGELGRHGIRVNCVSPAAVATPLARAAMGMDMDDETIEAIMEKSANLKGVGLKVDDIAAAALFLASDDGRYVSGQNLRVDGGVSVVNSSFGFFRD

SEQ ID NO: 40481 - DNA, 825 bp, Oryza sativa subsp
  CDS (1)..(825)
atggcagctggaagctcccatgtttctgctgatgcaaggaagctggtgggcaaggtggcggtgatcaccggcggcgcgagcggcatcggcgcgtgcacggcgcggctgttcgtgaagcacggcgcccgcgtcgtggtcgccgacatccaggacgagctgggagctagcctcgtcgccgagctcggcccggacgcgtccagctacgtgcactgcgacgtcacgaacgagggcgacgtcgccgccgcggtcgaccacgccgtcgccaggttcgggaagctcgacgtcatgttcaacaacgccggcgtcagtggcccgccgtgcttcaggatgagcgagtgcaccaaggaggacttcgagcgcgtgctcgccgtgtacctggtcggcccgttcctgggcaccaagcacgcggcgcgggtgatggcgccggcgcgccgcggcagcatcatctcgacggcgagcctgtcgtcgtcggtgtccggcgcggcgtcgaacgcgtacacgacgtcgaagcacgcgctggtggggttcacggagaacgcggccggcgagctgggccggcacgggatccgcgtcaactgcgtttcgcccgccggggtcgccacgccgctggcgagggctgccatgggcatggacgacgaggcaatcgaggcgatcatggcgaactcggcgaacctgaagggcgcaggcgcactcaaggcggacgacatcgccgccgcggcgctgttcctcgccagcgacgacggccggtacgtgagcggccagaacctgcgcgtcgacggcggcttgtccgtcgtcaacagcagctttggtttcttcagggactga

SEQ ID NO: 40482 - protein, 274 aa, Oryza sativa subsp
MAAGSSHVSADARKLVGKVAVITGGASGIGACTARLFVKHGARVVVADIQDELGASLVAELGPDASSYVHCDVTNEGDVAAAVDHAVARFGKLDVMFNNAGVSGPPCFRMSECTKEDFERVLAVYLVGPFLGTKHAARVMAPARRGSIISTASLSSSVSGAASNAYTTSKHALVGFTENAAGELGRHGIRVNCVSPAGVATPLARAAMGMDDEAIEAIMANSANLKGAGALKADDIAAAALFLASDDGRYVSGQNLRVDGGLSVVNSSFGFFRD

SEQ ID NO: 40483 - DNA, 816 bp, Rhodococcus rhodochrous
  CDS (1)..(816): transl_table=11
atgggatggctcgatggacgtagtgcgctcgtcacaggtggcgcgtccgggatcggccgcgccgtcgtcgagcgttttctggcggaaggagcacgtgtcgctgtccttgatgcttccgcagagaacatcgcggcattgcggaaagacttgccggacgtcgtggtgaccgaaggcgacgtctcctcgttcgaagacaatgagcgagcggtggcggcgacggtagcggctcacggcgggctcaacacattcgtcgggaacgctggaatctttgactatttcgccccggtggcgaccactccgggtgcaactctgtcgggctcgttcgacgagatcttctcggtcaacgtcaaaggctatctgctgggcgtaaaggcatctcttccggcgctgctggagagttcctccccgtcgatcgtcttcacgctgtccaatggggcttttctgccggccggtggtggatctgtttacacggcttcgaagcatgccgccgtcggcctgatccgtcagttggcttacgagctggctccccgcgtccgggtgaacggtgtcgctcccggcgggacgttgaccgatcttcgtggcgcgagcgctctgggtcaggccgagacttcccttcgcgatgcggcgaacttcccggatctcgtccgagcgacgaacccgctcgggatcgtccagcagcccgcggaccacaccggctcgtatgtcttgctggcgtcgccggagaacgcagcggcgatcagcggcgtggttatcaatagcgacggcggaatgcaggtccgcgggttggtgcaggcagcgggaggggcggatctctga

SEQ ID NO: 40484 - protein, 271 aa, Rhodococcus rhodochrous
MGWLDGRSALVTGGASGIGRAVVERFLAEGARVAVLDASAENIAALRKDLPDVVVTEGDVSSFEDNERAVAATVAAHGGLNTFVGNAGIFDYFAPVATTPGATLSGSFDEIFSVNVKGYLLGVKASLPALLESSSPSIVFTLSNGAFLPAGGGSVYTASKHAAVGLIRQLAYELAPRVRVNGVAPGGTLTDLRGASALGQAETSLRDAANFPDLVRATNPLGIVQQPADHTGSYVLLASPENAAAISGVVINSDGGMQVRGLVQAAGGADL

SEQ ID NO: 40485 - DNA, 816 bp, Rhodococcus erythropolis
  CDS (1)..(816): transl_table=11
atgggatggctcgatggacgtagtgcgctcgtcacaggtggcgcgtccgggatcggccgcgccgtcgtcgagcgttttctggcggaaggagcacgtgtcgctgtccttgatgcttccgcagagaacatcgcggcattgcggaaagacttgccggacgtcgtggtgaccgaaggcgacgtctcctcgttcgaagacaatgagcgagcggtggcggcgacggtagcggctcacggcgggctcaacacattcgtcgggaacgctggaatctttgactatttcgccccggtggcgaccactccgggtgcaactctgtcgggctcgttcgacgagatcttctcggtcaacgtcaaaggctatctgctgggcgtaaaggcatctcttccggcgctgctggagagttcctccccgtcgatcgtcttcacgctgtccaatggggcttttctgccggccggtggtggatctgtttacacggcttcgaagcatgccgccgtcggcctgatccgtcagttggcttacgagctggctccccgcgtccgggtgaacggtgtcgctcccggcgggacgttgaccgatcttcgtggcgcgagcgctctgggtcaggccgagacttcccttcgcgatgcggcgaacttcccggatctcgtccgagcgacgaacccgctcgggatcgtccagcagcccgcggaccacaccggctcgtatgtcttgctggcgtcgccggagaacgcagcggcgatcagcggcgtggttatcaatagcgacggcggaatgcaggtccgcgggttggcgcaggcagcgggaggggcggatctctga

SEQ ID NO: 40486 - protein, 271 aa, Rhodococcus erythropolis
MGWLDGRSALVTGGASGIGRAVVERFLAEGARVAVLDASAENIAALRKDLPDVVVTEGDVSSFEDNERAVAATVAAHGGLNTFVGNAGIFDYFAPVATTPGATLSGSFDEIFSVNVKGYLLGVKASLPALLESSSPSIVFTLSNGAFLPAGGGSVYTASKHAAVGLIRQLAYELAPRVRVNGVAPGGTLTDLRGASALGQAETSLRDAANFPDLVRATNPLGIVQQPADHTGSYVLLASPENAAAISGVVINSDGGMQVRGLAQAAGGADL

SEQ ID NO: 40487 - DNA, 807 bp, Rhodococcus sp
  CDS (1)..(807): transl_table=11
atgactggctggctcgacggcaagcgggcactcgtcgttggcgggggctcggggatcgggcgagcagtcgtcgatgcgttcctcgccgaaggcgcgtgcgtcgcggtactcgagcgtgacccgagcaagtgtcgagtgctgcgcgaacacctaccccaggtaccggtcatcgaaggtgacgccacacgcgcggcggacaacgacgctgccgtcgcggctgcggtcgccgcgttcggagggctcgacacactggtcaactgtgtcgggatcttcgacttctaccagggcataggggacatccccgcggacacactcgacgtggcgttcgacgagatgttccgaaccaacgtgctcagccacatgcactcggtcaaggccgccgtaccggaactgcgcaagcaccgcggatcgtcgatcgtgctggcggagtctgcctcgtcgttctatcccggacgaggcggagtgctctacgtgtcatccaaatttgccgtacgcgggctggtcaccaccctggcctacgagctcgccccagatattcgcgtcaacggagtcgccccaggcggcacgttgaacaccgacctgcgcgggttggcgagcctgggacgcgacgccgatcgactcgacgacaatccgaatcgtgcaaacgagttggcggcgcggacaccgctcaacgtggccctctcaggtgaggaccacgcgtggagcttcgtcttcttcgcttccgacagatcccgaggaatcaccgcaggcgcgacgcatcccgacggcggcttcggaatcggagcccccaaaccttcgacccgctga

SEQ ID NO: 40488 - protein, 268 aa, Rhodococcus sp
MTGWLDGKRALVVGGGSGIGRAVVDAFLAEGACVAVLERDPSKCRVLREHLPQVPVIEGDATRAADNDAAVAAAVAAFGGLDTLVNCVGIFDFYQGIGDIPADTLDVAFDEMFRTNVLSHMHSVKAAVPELRKHRGSSIVLAESASSFYPGRGGVLYVSSKFAVRGLVTTLAYELAPDIRVNGVAPGGTLNTDLRGLASLGRDADRLDDNPNRANELAARTPLNVALSGEDHAWSFVFFASDRSRGITAGATHPDGGFGIGAPKPSTR

SEQ ID NO: 40489 - DNA, 801 bp, Rhodococcus erythropolis
  CDS (1)..(801): transl_table=11
gtgggctggctggacggatattccgcggtagtcactggcgccgggtcaggcctcggcaaggctatcgttggacgattcttgacggagggcgcaaacgtcgtcgcattcgacaaatctggagagaaactctccgccttgaaaactcatcatggcgacgccgtcgagaccgtgacgggtgacgtccgaagcattgaagacaacaagagggcctgcgagcgtgcgatcgaaaagttcggcaaactcgacaccttcgtcggaaacgctggactgtgggacttcaacaggacactcaccgacacgccgtcagagcttctagaagccggttttgacgagctcttcggggtgaacgtgaagggttacgtgcttggagccaaggcagcgatccctgcactgcaagcctctggtggttcgattgtcctcacactttccaatgcctctttcttctctggcggcggtgggggaccgctttacgtggcctccaaacacgccggagtgggcttggtcaagcagctcgcctacgaactcgcaccccgcgtgcgcgtcaacgcggtcgcacctggcggcatggacaccgaccttcgcggccccgatgctctggggctgtcaaatactgcgattggccaggcattcccgatcggtgaggtcatgaagcagcgttcggcgctgcacttcgaacctgcgcccgaggactacgttgccgcctacgtcctccttgcggcgaaatcccagtcaaggacggtgaccgggtcagtcttcgatgtcagtagcttcggcacccctactagaccgtctggaggatga

SEQ ID NO: 40490 - protein, 266 aa, Rhodococcus erythropolis
MGWLDGYSAVVTGAGSGLGKAIVGRFLTEGANVVAFDKSGEKLSALKTHHGDAVETVTGDVRSIEDNKRACERAIEKFGKLDTFVGNAGLWDFNRTLTDTPSELLEAGFDELFGVNVKGYVLGAKAAIPALQASGGSIVLTLSNASFFSGGGGGPLYVASKHAGVGLVKQLAYELAPRVRVNAVAPGGMDTDLRGPDALGLSNTAIGQAFPIGEVMKQRSALHFEPAPEDYVAAYVLLAAKSQSRTVTGSVFDVSSFGTPTRPSGG

SEQ ID NO: 40491 - DNA, 828 bp, Ralstonia sp
  CDS (1)..(828): transl_table=11
atgaaactcaaaggtgaagtggccttggtgaccggtggtggcgcgggcctggggagggcgatcgtggatcgctatgtcgcggaaggcgcccgtgtcgccgtactcgataaatctgcggcgggtctggaagaactcaagaaagtacatggcgacgccattgtgggggtggagggggatgtccggtcgctcgacagccatcgtgaagccgtggcccgctgtgtcgatgcgttcggcaagctcgactgcctggtcggcaacgccggcgtctgggactacctgacccagctggtcgatatccccgatgacctgatctcggaggcattcgaggaaatgttcgcggtcaacgtcaagggctacatccttgcggcgaaggccgcgctacctgctctctatcaaagcaagggcagcgcgatcttcacggtgtcgaatgccggtttctaccccggcgggggcggcgttctgtataccgccggcaagcatgccgtgatcggtctgatccggcagctcgcacacgaatggggcccgcatatccgtgtcaacggcatcgcccccggcgggatcctgggaagcgatctgcgcgggctcaagaccctggacttgcaggacaagagcatttcgacctttccactggacgacatgctgaaatccgtccttccgacggggcgggctgccacggccgaggaatacgccggcgcctttgtcttcttcgcaacgcgtgcggacacggtcccgcttaccggcagtgtgctgaacttcgacggcggcatgggcgtgcgcggcctgttcgaagccagtctgggcgcacagcttgacaagcacttcggttga

SEQ ID NO: 40492 - protein, 275 aa, Ralstonia sp
MKLKGEVALVTGGGAGLGRAIVDRYVAEGARVAVLDKSAAGLEELKKVHGDAIVGVEGDVRSLDSHREAVARCVDAFGKLDCLVGNAGVWDYLTQLVDIPDDLISEAFEEMFAVNVKGYILAAKAALPALYQSKGSAIFTVSNAGFYPGGGGVLYTAGKHAVIGLIRQLAHEWGPHIRVNGIAPGGILGSDLRGLKTLDLQDKSISTFPLDDMLKSVLPTGRAATAEEYAGAFVFFATRADTVPLTGSVLNFDGGMGVRGLFEASLGAQLDKHFG

SEQ ID NO: 40493 - DNA, 1064 bp, Vigna unguiculata
  CDS (76)..(879)
gctcagaagaacaattaagttgaacacttcaaaaaccctttttccaggttttatatatatcccaaacgctcactcatggcaaatggttctgttctctcacctgttgttaaaaggcttgaggggaaagtggcgattatcaccggcggtgccagcggcataggtgaggccactgcaagactcttctcacagcatggagctcacgtggtggtggctgatattcaagacgatgtgggactttctctctgcaatgagttgaaatcagccatatatgttcattgcgatgtgacaaaggaagaagacatcgaaaagtgcgtggacacagcagtttccaagttcgggaagctagacatcatgtttaataacgccggtacaggtgatgagttcaaaaaaagcatactcgacaacacaaaatctgattttgagagagtgataagtgtgaacctggttggtccatttctgggaacaaagcacgctgcaagagtcatgattcctgctagaagagggtgcataattaacacagcgagtgttgcaggatgcataggtggaggagctacacatgcctacaccagttcaaagcatgccctagtgggactcaccaaaaacactgcggtggagcttggacaattcggtattcgtgtgaactgtgtgtccccttttgccattgtgacaccgttgttgaacaaatatttcaatcttgatgaagaaggagttcgcaagacttatatgaacctaaaaggttggtatcctgtgcctaacgatgtggcagaagctgctctttacttagcaagtgatgagtctaagtttgttagttctcataatcttgtcatagacggaggtttgatcaattcaaacgtaggatttcctatgtttgagatgtaaatatgttctggttccttaaatagttatattgttggtgttatttggctttgaggacagttcagaaaccgtagcttccgacatatgtgaagaaagaaggcaatagatttggtggatattacaatcctcactcaaatctagccattttgctcattcttgtgaaaaaaaataaacatgtgttacgatgg

SEQ ID NO: 40494 - protein, 267 aa, Vigna unguiculata
MANGSVLSPVVKRLEGKVAIITGGASGIGEATARLFSQHGAHVVVADIQDDVGLSLCNELKSAIYVHCDVTKEEDIEKCVDTAVSKFGKLDIMFNNAGTGDEFKKSILDNTKSDFERVISVNLVGPFLGTKHAARVMIPARRGCIINTASVAGCIGGGATHAYTSSKHALVGLTKNTAVELGQFGIRVNCVSPFAIVTPLLNKYFNLDEEGVRKTYMNLKGWYPVPNDVAEAALYLASDESKFVSSHNLVIDGGLINSNVGFPMFEM

SEQ ID NO: 40495 - DNA, 1113 bp, Oryza sativa
  CDS (85)..(909)
cttgtcagacagcacaaaacatcgatccaaaagcacttctcggacagcaaatcgtctcgatcctgttattagtattcaggcgccatggcagctgaaagctcccatgtttctgctgatgcaaggaagttagacggcaaggtggcggtgatcaccggcggcgcgagcggcatcggcgcgtgcacggcgcggctgttcgtgaagcacggcgcccgcgtcgtggtcgccgacatccaggacgagctgggagctagcctcgtcgccgagctcggcccggacgcgtccagctacgtgcactgcgacgtcacgaacgagggcgacgtcgccgcggcggtcgaccacgccgtcgccaggttcgggaagctcgacgtcatgttcaacaacgccggcatcagtggccctccgtgcttcaggatgagcgagtgcaccaaggaggacttcgagcgcgtgctcgccgtgaacctggtcggcccgttcctgggcacgaagcacgcggcgcgggtgatggcgccggcgcgccgtggcagcattatctcgacggcgagcctgtcgtcgtcggtgtccggcgccgcgtcgcacgcgtacacgacgtcgaagcacgcgctggtggggttcacggagaacgccgccggcgagctgggccggcacgggatccgcgtgaactgcgtttcgcccgccggggtcgccacgccgctggcgagggctgccatgggcatggacgacgaggccatcgaggcgatcatggcgaactcggcgaacctgaagggcgcaggcgcactcaaggcggacgacatcgccgccgcggcgctgttcctcgccagcgacgacgggcggtacgtgagcggccagaacctgcgcgtcgacggcggcttgtccgtcgtcaactcgagctttggtttcttcagggactgaaaatgatttgggaccagtcgtcagtcgatcgacaatactacattacgtcgttatatatggttgttgttatttgtgttgtattcttgaataaactagcatccatggttccccgcttgtttgcgaggacataccatcgctagctagattctgtcttgtatttgtatttattggaagagtgaaatacattatacatgcatgaacggt

SEQ ID NO: 40496 - protein, 274 aa, Oryza sativa
MAAESSHVSADARKLDGKVAVITGGASGIGACTARLFVKHGARVVVADIQDELGASLVAELGPDASSYVHCDVTNEGDVAAAVDHAVARFGKLDVMFNNAGISGPPCFRMSECTKEDFERVLAVNLVGPFLGTKHAARVMAPARRGSIISTASLSSSVSGAASHAYTTSKHALVGFTENAAGELGRHGIRVNCVSPAGVATPLARAAMGMDDEAIEAIMANSANLKGAGALKADDIAAAALFLASDDGRYVSGQNLRVDGGLSVVNSSFGFFRD

SEQ ID NO: 40497 - DNA, 825 bp, Streptomyces fungicidicus
  CDS (1)..(825): transl_table=11
atgcagctcgccggcaagaccgcgatcgtcaccggggccgcacgcgggctggggcgcgcctgcgcggtcgccttcgcccgtgagggcgccgacctcgtcctcctcgacctctgcgcggacctgcccggcgttccgtacccgctcggcggccccggccagctcgcccacaccgccgacctgtgccgcgggcacggcgcggccgtcctcgtccggcaggccgacgtacgggacctcggcgcgctgcggcacgccgtggacgacgcccacggccggttcggacgcatcgacgtgctgctcaacaacgccgggatcgccgcgccctccggcaaacccgtcgacgagatcgacgaggacgagtggcagctgatgatcgacgtggacctgtccggcgcgtggcgcgcgacgaaggcggtcggcaagatcatgaccgcccagcgggccggcagcatcatcaacgtcgcctccaccgccgggcaggtcggataccgcaacttcgcgggctacgtggcggccaaacacggtgtcatcgggctcaccagggccacggcgctcgacttcgcgccgatgagggtccgcgccaacgccctgtgcccgggctcggtccgggacgaccctgccgtcgagggccggatgctctccgagatcgccaggtccctccaggtgccggtcgccgaacacgaggaggccttcgtccagtcgcagcccatgaacgccctgatcgagcccgatgacgtcgcctcggccgccgtctggctcgcctccgacggatcccggcaggtcacggggtcggtcatcaccgtcgacggcgggttcaccactcgctga

SEQ ID NO: 40498 - protein, 274 aa, Streptomyces fungicidicus
MQLAGKTAIVTGAARGLGRACAVAFAREGADLVLLDLCADLPGVPYPLGGPGQLAHTADLCRGHGAAVLVRQADVRDLGALRHAVDDAHGRFGRIDVLLNNAGIAAPSGKPVDEIDEDEWQLMIDVDLSGAWRATKAVGKIMTAQRAGSIINVASTAGQVGYRNFAGYVAAKHGVIGLTRATALDFAPMRVRANALCPGSVRDDPAVEGRMLSEIARSLQVPVAEHEEAFVQSQPMNALIEPDDVASAAVWLASDGSRQVTGSVITVDGGFTTR

SEQ ID NO: 40499 - DNA, 780 bp, Pseudomonas putida
  CDS (1)..(780): transl_table=11
atgggcaatcaacaagtcgtttcaataaccggtgccggctcaggaatcggtctcgaactggttcgatccttcaagtcggccggttattgcgtatccgctctcgtacgaaacgaggagcaagaggcgcttctttgcaatgaattcaaggacgcactcgagatcgttgtgggcgatgtccgagatcacgcaataaatgagaagctgatcaagcagacaatcgctagattcggtcatctcgattgtttcatcgcaaatgccggtatttgggattacatgctgagcatcgaagagccttgggagaaaatctccagcagttttgacgaaatattcgacatcaatgtaaagagctatttcagtggcatcagtgcagctctgccggaactgaaaaagacgaacggatcggtggtgatgaccgcttcggtgtcgtcccatgcggtcggtggtggtggttcttgctacatcgccagcaagcatgcggtgttaggtatggtcaaggctttggcctacgaattggctcccgaaattcgcgtgaacgctgtctcgccgggcggcaccgtgacgtctctgtgcggtcctgcaagcgccggtttcgacaaaatgcacatgaaagacatgcccggcatcgacgatatgatcaaaggcctcactcctcttgggtttgcagccaagcccgaagacgtggtggagccctatctgttgctggcttcgcgaaagcagggaaaattcatcaccggcaccgtgattagcattgatggcggtatggcgctcggtcgcaagtga

SEQ ID NO: 40500 - protein, 259 aa, Pseudomonas putida
MGNQQVVSITGAGSGIGLELVRSFKSAGYCVSALVRNEEQEALLCNEFKDALEIVVGDVRDHAINEKLIKQTIARFGHLDCFIANAGIWDYMLSIEEPWEKISSSFDEIFDINVKSYFSGISAALPELKKTNGSVVMTASVSSHAVGGGGSCYIASKHAVLGMVKALAYELAPEIRVNAVSPGGTVTSLCGPASAGFDKMHMKDMPGIDDMIKGLTPLGFAAKPEDVVEPYLLLASRKQGKFITGTVISIDGGMALGRK

SEQ ID NO: 40501 - DNA, 801 bp, Sphingomonas sp
  CDS (1)..(801): transl_table=11
  misc_feature (126)..(126): n is a, g, c or t
gtgactgcaaggctcgaaggacaagtggcgctgctaaccggcggcgccacagggatcggtgaggcggtcgtcgcgcgctttatcgaagaaggtgccaaggttggcgtcctggtcagggatgccgcncaggccgacttggtgcgtacgcggcatggcaacgcagtagtcgtgattgagggcgatgtccgcaattatgtcgacaacgaaaaggcagtcgtcgcaaccgtggctgcattcggcaagcttgacgtgttcgtcggcaatgtcgggatctgggatttcatgaccccgcttgcggacatggaacccgaaaagctctcggaaacgctggacgagatcttcggcgtcaacgtaaagggctacttccttggcgcccgtgccgcaattccggagttgcgtaagaccaagggcagcatcatctttactgcctcgacttcaagcttctacaccggcggtggcggtacgccctatgtggcgtcgaagcacgccgtgctgggcctgatccgccagctcgcctgggaactaacccccgacgtcagggtcaacggcgtggcgccaggcggcacccgaacgccgctgggcggtacccatgcgggcggaacagccgatgttcacatggaagatatggaagggctcgacgcgatgattgccgggatgacgccgctcgcgcggatcgccgaaccggatgatcactccggcctctatgccttgctcgcctcgcgtcgggactcggcctacatgacaggaacggttttgctcagcgacggtggaatcggcatcggcaaacgccccggaagctga

SEQ ID NO: 40502 - protein, 266 aa, Sphingomonas sp
MTARLEGQVALLTGGATGIGEAVVARFIEEGAKVGVLVRDAAQADLVRTRHGNAVVVIEGDVRNYVDNEKAVVATVAAFGKLDVFVGNVGIWDFMTPLADMEPEKLSETLDEIFGVNVKGYFLGARAAIPELRKTKGSIIFTASTSSFYTGGGGTPYVASKHAVLGLIRQLAWELTPDVRVNGVAPGGTRTPLGGTHAGGTADVHMEDMEGLDAMIAGMTPLARIAEPDDHSGLYALLASRRDSAYMTGTVLLSDGGIGIGKRPGS

SEQ ID NO: 40503 - DNA, 900 bp, Aedes aegypti
  CDS (1)..(900)
atgagcgaatctttttgcgcgcgtgatgatgatggtgatgagatactgcgagggatgaacgaacgatatttatgcgcgcgctttaaaattggatcgaatgtgatgaattggatgattttttggacgagagcgcgagatgataacgcggtagctctggtgactggtggcgcctccggcctgggacgcgcaacggtggagcggttcgccaggactggaagtaaagtagtgctgtgcgatctccccacgtccaagggtggcgacgtcgcgaaggaactcggcgacaatgtcgttttcgtgccggttgatgtcctctcggaaaaggacgtcaccggtgcgctggacatcgccaagaccaaattcggccgtttggatgtgaccgtcaattgtgccggcgtcgccgtagccgtcaagacctacaacttcaacaagaaagccgcccacaaattggaggacttccagcgggtgctgctggtcaacacggccggaacgttcaacgtgattcggctgtccgccggcctgatgggcgaaaacgaacctaaccaggacggccagaggggtgtgatcgttaataccgcctctgtggccgctttcgatggacagatcgggcaggcggcatatgctgcttccaaggccgcggttgttggaatgactctaccgattgcccgtgacctcagcacccaaggtatccgcatctgcacgattgctccgggactgttcaacaccccgatgctgcaagcccttccggaaaaggttcgtgccttcctggccaagaccgttcccttcccgcagcgtctcggcgaaccgtcggaatatgcgctgctggtggaatcgatcgtcgaaaaccctatgctgaacggagaggtgatccgactggatggtgccctgagaatgatgccttaa

SEQ ID NO: 40504 - protein, 299 aa, Aedes aegypti
MSESFCARDDDGDEILRGMNERYLCARFKIGSNVMNWMIFWTRARDDNAVALVTGGASGLGRATVERFARTGSKVVLCDLPTSKGGDVAKELGDNVVFVPVDVLSEKDVTGALDIAKTKFGRLDVTVNCAGVAVAVKTYNFNKKAAHKLEDFQRVLLVNTAGTFNVIRLSAGLMGENEPNQDGQRGVIVNTASVAAFDGQIGQAAYAASKAAVVGMTLPIARDLSTQGIRICTIAPGLFNTPMLQALPEKVRAFLAKTVPFPQRLGEPSEYALLVESIVENPMLNGEVIRLDGALRMMP

SEQ ID NO: 40505 - DNA, 768 bp, Aedes aegypti
  CDS (1)..(768)
atgttgaagaatgccgtttcactgatcaccggtggatcgtccgggcttggattcgccaccgtagagcgctttgcccgcgcaggctgtcgggtaatccttgcagatctaccgtcctctaacggagaaaaggtcgcttcggatttgggagataatgtgacattcgtacctacggacgtttcttcggaacatgatgtgaccaatgccctcgaagaagccaaaaatcgattcagtcgattggacattgttgttaactgtgccgggatcgcttttccggagaaagtctacgacttcaaaaagggcaggccgcacagtttaaaatcttttcaggcactgttgaatgtcaacaccgttggaacgttcaacgtgattcggcttgcagctggtctgatgggtaaaaacgcaccggatggtaatggccaacggggagttatcgtcaacacggcttccgtactgggttatgatgcccaaacggggttgacggcgtactcggcctcgaaagcagccataattggaatgacgctaccgattgcgcgtgaccttagcggtcagggcattcgggtggtcacgatcgcacctggtttgttcgaaaccaagatgaccggagaactacccaaggaggccgtgaagatgttgatctcgactattccatttcccaagagggctggtcatccaaacgagttcgccaaactagtccaggatgttgtagagaaccctatgctaaacggagaggttattcgattagatgctgccgcaagatttaacatttga

SEQ ID NO: 40506 - protein, 255 aa, Aedes aegypti
MLKNAVSLITGGSSGLGFATVERFARAGCRVILADLPSSNGEKVASDLGDNVTFVPTDVSSEHDVTNALEEAKNRFSRLDIVVNCAGIAFPEKVYDFKKGRPHSLKSFQALLNVNTVGTFNVIRLAAGLMGKNAPDGNGQRGVIVNTASVLGYDAQTGLTAYSASKAAIIGMTLPIARDLSGQGIRVVTIAPGLFETKMTGELPKEAVKMLISTIPFPKRAGHPNEFAKLVQDVVENPMLNGEVIRLDAAARFNI

SEQ ID NO: 40507 - DNA, 840 bp, Aedes aegypti
  CDS (1)..(840)
atgttccttcgtgcactagctcggcaatcgaacactgtcgttgggatgtccggtcagagaaatttgtgcagccagattagttcctcccgactgcaggggaaagtcgcagtggtcacagcatccaccgatggcatcggttatgccatcgcggaacgtctgggccaggacggagccaaagtggtcatcagcagtcgcaaagaacagaacgtagccaaggcggtgagtcaactgaccaagagtggcctggacgtcgttggagtcaagtgtcacgtggccaatgccgatgatcggaaggcactgttcgaaaaggctgtggaaaagtacggcggaatcgacattctggtctcgaacgcggcggtcaatcctgaggttggtggcgtgctggacgccagcgaagcagcttgggataaaattttcgaggtgaacgtcaaatgttcgttcctgctggccaaggaagttctaccgtacattcgtcagagaaagaatggaagtattgtatttgtgtcttcgatcgccggattccaaccgttttcattgttgggagcttactcggtgagcaagacggcgcttttcggattgaccaaagccgccagtcaagatttggccgctgaaggcattcgggtgaattgtatcgcaccaggcatcgtgcgaaccaagtttgctgctgcccttcatgaatcggaatcggctcgggacaccgctctggctcaaatacccatgggacgatttgctcagcctccggagattgcaggtgtttgtgccttcctggtatccgacgatgccagctatattacgggagaaactattgtggcatccggtggaatgccttcccgtctctga

SEQ ID NO: 40508 - protein, 279 aa, Aedes aegypti
MFLRALARQSNTVVGMSGQRNLCSQISSSRLQGKVAVVTASTDGIGYAIAERLGQDGAKVVISSRKEQNVAKAVSQLTKSGLDVVGVKCHVANADDRKALFEKAVEKYGGIDILVSNAAVNPEVGGVLDASEAAWDKIFEVNVKCSFLLAKEVLPYIRQRKNGSIVFVSSIAGFQPFSLLGAYSVSKTALFGLTKAASQDLAAEGIRVNCIAPGIVRTKFAAALHESESARDTALAQIPMGRFAQPPEIAGVCAFLVSDDASYITGETIVASGGMPSRL

SEQ ID NO: 40509 - DNA, 897 bp, Aspergillus oryzae
  CDS (1)..(897)
atgtccctgaatgcgtctaatcttttctccgttcacggcatcgtcgccatcattacaggcggcggaacaggcctcgggcggaccattgcccttgccctagataccaacaacgccgagaaagtttttatcatcgggcgtcgtgagcaaccacttcatgaaacagccgctcaagcgacgaaccagtccatcattcccattgtcgcagacatcacctcgcaggaatctctagagaatgcgtaccacgccgtagcggctcagacttcgcacatcgaccttctatttgccaatagcggcaccgacggtccatccgcccatttaccgcccaaaccagatggctcaccaccaaccctggctgaattccgcgaccatcactggggtcatcaaatgaccgacttttcagagaccctgaacgtcaacgtgaccggcacacactacaccattctggcatttctgccactgttagacgaggcgaacaagcgccgtccaccacaggattctaatgagcttgcgtcaccacatccgcaagtcattgtgaccagctccgtatcagcaatgatgaaccgtccagcgagtctagcatactcattctcgaaggccgctttactgcatctagtcgaggtgtttgcggctcaactcgcgccgtaccggatccgtgtcaatggtgttgccccaggtctattctatagtgacctctcgaaacatctatttgataaaagtggcgtgtcaggacgtgggatctccgaggggtcctttacgactgagcttaaccctctcacccgagcgggcagcgatgaggatattgccggtacgatactgtggatggcgagtcggtcagggggatacctgaatggggacacaatcgtgctcgacggtggccgaacagcggttgtcagatag

SEQ ID NO: 40510 - protein, 298 aa, Aspergillus oryzae
MSLNASNLFSVHGIVAIITGGGTGLGRTIALALDTNNAEKVFIIGRREQPLHETAAQATNQSIIPIVADITSQESLENAYHAVAAQTSHIDLLFANSGTDGPSAHLPPKPDGSPPTLAEFRDHHWGHQMTDFSETLNVNVTGTHYTILAFLPLLDEANKRRPPQDSNELASPHPQVIVTSSVSAMMNRPASLAYSFSKAALLHLVEVFAAQLAPYRIRVNGVAPGLFYSDLSKHLFDKSGVSGRGISEGSFTTELNPLTRAGSDEDIAGTILWMASRSGGYLNGDTIVLDGGRTAVVR

SEQ ID NO: 40511 - DNA, 792 bp, Aspergillus oryzae
  CDS (1)..(792)
atggttctcgcacagccggaaaacaagcatgtattgaaggcttttgacctttcaggcaaagtcgccgccgtgactggtggcgcccgtggtattggtctagaagtctcaatagcattagcagaagccggagccgatgtcgctctgatctataactcatccaagacagccgaaacacttgcaaccgaggtagcaaccaagcacaacgtcaaagcagcagcgtaccaagccgacgtggcgaaccaagaagacatcgaaaaggcaatcaagcaaatcgctgccgactttgggaaattagacatcattgtcgcgaactcaggaatctgttccaatgttcctgcagaggattatactgcagaacaatggcataatattaccaaggttaacttggacggtgcattttatactgcccaggctgcagcacggattttcaaggagcagggacacgggaatgttattttcacagcgtctgttagtgcaactttggtgaatgtgcctcagaaacaagctgcatataatgcctcaaaggctgcggttgttcagatggctaagtgtctgtctgttgaatgggtggatttctgtcgtgtgaactgtatctctcctggatttattgcaacggatattctggatattcatcccaaagagtggcgcgagaagtggttcgatatgattccagcgaaacggatggcggaggcttatgagcttaagggagcgtatgtcttctgtgcttcggacgcgtcgagttacatgactggtgcgaatattgtcattgatggcggctatactcttccttga

SEQ ID NO: 40512 - protein, 263 aa, Aspergillus oryzae
MVLAQPENKHVLKAFDLSGKVAAVTGGARGIGLEVSIALAEAGADVALIYNSSKTAETLATEVATKHNVKAAAYQADVANQEDIEKAIKQIAADFGKLDIIVANSGICSNVPAEDYTAEQWHNITKVNLDGAFYTAQAAARIFKEQGHGNVIFTASVSATLVNVPQKQAAYNASKAAVVQMAKCLSVEWVDFCRVNCISPGFIATDILDIHPKEWREKWFDMIPAKRMAEAYELKGAYVFCASDASSYMTGANIVIDGGYTLP

SEQ ID NO: 40513 - DNA, 810 bp, Aspergillus oryzae
  CDS (1)..(810)
atggcccgtctcctgaacaaagtagctctgattaccggttcctcgtcaggaatgggaagggcgattgcccttcgttacgcaaaagagggcgcacacatcgtctgcgcagatctatcgctaaccgctcgatccttagtccccgaagaggccgagataaccacccacgacgctattatccaagcaggcggacgagccatctatgtccaaacagacgtcagcgaagcccaacaatttgaacgagcggtacaaacagcggtatccgagttcggccggctggatattttagtcaacaacgccggaatcgccacagatacccggaatccgactcgagtccacgaaacagacgaacatgcctgggacacgatgctgcgggtcaacacgacgtcggtcttccttggctgcaagtatgggatcgcgcagatgttgaagcaggagcctcattcttccggggataggggctgggtgattaacctagcgtcgatatgggggctggtaggggggctgggttctccggcttattgtgcgtccaaaggagctgttgtcaatttgactaggcagatggcgctggattatggccctgatcgcatccatgtgaatgctatctgtccggggttcatatggacagctatgacacgcgatcttgaggaggcttcacctcatgcaatagaatcactacatcagaaacatcccctgaaagggtttggatatccagatgatgttgcccggatggcggtggttctggctagcgacgatgccagcttggtgacgggggttgctttgccggttgatgggggatacactgctcaatag

SEQ ID NO: 40514 - protein, 269 aa, Aspergillus oryzae
MARLLNKVALITGSSSGMGRAIALRYAKEGAHIVCADLSLTARSLVPEEAEITTHDAIIQAGGRAIYVQTDVSEAQQFERAVQTAVSEFGRLDILVNNAGIATDTRNPTRVHETDEHAWDTMLRVNTTSVFLGCKYGIAQMLKQEPHSSGDRGWVINLASIWGLVGGLGSPAYCASKGAVVNLTRQMALDYGPDRIHVNAICPGFIWTAMTRDLEEASPHAIESLHQKHPLKGFGYPDDVARMAVVLASDDASLVTGVALPVDGGYTAQ

SEQ ID NO: 40515 - DNA, 789 bp, Aspergillus oryzae
  CDS (1)..(789)
atggctgcgagaaacaaatacgtgaacaagttgcatggaaaacacatcgtcatcttcggagggacttccggtgtcggcttctgtgtagctgaagcaagcatcgaacacggtgccaacgttacggtcctctcctccgacccgagcaaagttgacgctgctcaagtgcgccttctatcttcctatccagaagcaaaggaccgagtccgtggcttaacgattgaccttggagcgccagatgtcgaggatcaattggtgtctacgtttgagcaagtccagccatttgaccatatcatcttcacagcgggaacttttgagtttgattctgaagactggatacagccgcgagcagacctggaccgaatccgaaacactgccaatgtccgcattatcgcaccgttcctcatcgccaagcatgctccaaggtatatggcaagcaactcacccgcttgctccatcacactcactagtggagcaacagccgagagacccatgggacggggaatggcaatgcacaccatgtactcaacaggcctgtatgggctcacaaagaacctctgcttagatattgcgccggtcagggttaacctcgtcagtcctggtcccatagatactgagctgtgggacaccattccggagaaagaggcgatgttcgcccatctaaaggaaaagcttcccatcaaagagattcccactcccgagaatgtggcggaagcttatatatactgtatgaaggatcgtggattgacgggggctatcatatcaacccatggtggtggaatattcgtttga

SEQ ID NO: 40516 - protein, 262 aa, Aspergillus oryzae
MAARNKYVNKLHGKHIVIFGGTSGVGFCVAEASIEHGANVTVLSSDPSKVDAAQVRLLSSYPEAKDRVRGLTIDLGAPDVEDQLVSTFEQVQPFDHIIFTAGTFEFDSEDWIQPRADLDRIRNTANVRIIAPFLIAKHAPRYMASNSPACSITLTSGATAERPMGRGMAMHTMYSTGLYGLTKNLCLDIAPVRVNLVSPGPIDTELWDTIPEKEAMFAHLKEKLPIKEIPTPENVAEAYIYCMKDRGLTGAIISTHGGGIFV

SEQ ID NO: 40517 - DNA, 753 bp, Aspergillus oryzae
  CDS (1)..(753)
atgtccggacgtctagaaggtaaagtcgccatcataacaggctccggctcaggcttcggccacggcattgcaaagaaattcgtcgaagagggcgcgaaagtcatagtcgcagagatatccaaagagaacggcgaaaaggtcgcagcagagctcaacagcaaattcgtctttgcagacgtaacaagccgagaatcctggcaaacattactccagacagctctggacacgtacggccagctggacattgtagtcaacaatgcgggggcaacctattccaataagcccacaggccaggtcacagacgccgactttgacctatgcatgaacgtcaatgtgaagtcgatctacctctcggcgaacgtcattgtaccgtatttcgaacagaataaccgtcccggatgttttgtccaggtttcttctaccgctgcgcttcggccgcgccccggcttgacctggtataatgcttccaaggcggcggttagtattgctaccaagacgatggctgttgagtatgggccaaagaagatccgattcaattgcgtttgtcctgttgttgggagtaccggaatgacacatctgtttcttggaaaaccagatacggaggaaaaccgggcagcatttgtatctacggtcccgttagggcgtcctagtaccccggcggatgttgccaatgcctgcagtttccttgctagtgatgaggcgcagtttatcaccggcgtggacctagaggtcgacggcggtcgctgtgtctag

SEQ ID NO: 40518 - protein, 250 aa, Aspergillus oryzae
MSGRLEGKVAIITGSGSGFGHGIAKKFVEEGAKVIVAEISKENGEKVAAELNSKFVFADVTSRESWQTLLQTALDTYGQLDIVVNNAGATYSNKPTGQVTDADFDLCMNVNVKSIYLSANVIVPYFEQNNRPGCFVQVSSTAALRPRPGLTWYNASKAAVSIATKTMAVEYGPKKIRFNCVCPVVGSTGMTHLFLGKPDTEENRAAFVSTVPLGRPSTPADVANACSFLASDEAQFITGVDLEVDGGRCV

SEQ ID NO: 40519 - DNA, 828 bp, Pseudomonas putida
  CDS (1)..(828): transl_table=11
gtgagacttgaaggcgaagtggccttggtgacaggcggtggcgcaggcctgggcagagcgatcgtggatcgttatgtcgcggaaggtgcgcgtgtcgcagtgctggataaatccgcggcaggcctggaagcgctcaggaaactccatggcgatgcaatcgtgggcgtggagggggatgttcgctcgctcgacagccatcgtgaggctgtggcccgctgcgtcgaagcgttcggcaagctggactgcctggttggcaatgctggcgtttgggactacctgacccaactggtggatattcccgacgacctcatctcggaggcattcgaggaaatgttcgaggtcaatgtcaagggctacatcctggcggcaaaggctgcgctacctgcgctttatcagagcaaaggcagcgcgatattcactctgtcgaatgccggtttctacccgggcggtggcggtgttctgtatacagctggcaagcatgccgtgattggattgatcaagcagctcgcgcacgaatgggggccgcgtatccgcgtcaacggcatcgcccccggtggcattttggggagcgatctgcgcgggctgaagagccttgatttacaagacaagagcatttcgacctttccattggacgacatgctgaaatccgttcttccgaccgggcgggccgccactgccgaggaatacgccggcgcctatgtcttcttcgcgacgcgcggcgacacggttccgctcaccggtagcgtgttgaacttcgatggcggcatgggcgtgcgtggcttgttcgaagccagcctaggcgcacagctcgacaagcacttcggttga

SEQ ID NO: 40520 - protein, 275 aa, Pseudomonas putida
MRLEGEVALVTGGGAGLGRAIVDRYVAEGARVAVLDKSAAGLEALRKLHGDAIVGVEGDVRSLDSHREAVARCVEAFGKLDCLVGNAGVWDYLTQLVDIPDDLISEAFEEMFEVNVKGYILAAKAALPALYQSKGSAIFTLSNAGFYPGGGGVLYTAGKHAVIGLIKQLAHEWGPRIRVNGIAPGGILGSDLRGLKSLDLQDKSISTFPLDDMLKSVLPTGRAATAEEYAGAYVFFATRGDTVPLTGSVLNFDGGMGVRGLFEASLGAQLDKHFG

SEQ ID NO: 40521 - DNA, 768 bp, Lysiphlebus testaceipes
  CDS (1)..(768)
atgttgaagggtgtcgtgacattggttactggtggtgcatctggattgggacgtggaactgttgaaagatttgtcaaacatggagctaaagttattattggtgatttaccaacatcaaaaggcaatgaattggcaaaagaccttggttcaaatgttgtattttctcctttagatgtaacatctgaacaagatgttaatgatgcactggaaattgctaaaacaaaatttggcaaattagatgttgttgttaatgctgcaggaatagctgctgctcataaagtttataatttcaacaaagatctttgtcatgatttggatacatttgctcgtattataaatgtaaatactgttggtacatttaatgttattcgtttatcagttggtttaatgggtaaaaatacaccaaatattgatggccaacgtggtgttattgttaatacagcaagtgttgcagcatttgatggtcaaatgggacaggctgcttattcagcaagtaaagctggtgttgttggtatgacacttccattagctcgtgatcttgcatctgttggaattcgtgttgttacaattgcacctggtttatttgatacaccaatgttgcaaactttaccagataaagtacgtaaatttttagctgatacagtaccatttccaaaaagacttggtaatccagatgagtatgcacaattggttcaatctattgttgaaaatccactaataaatgctgaaacaattcgtttagacggtggacttcgtatgcagccataa

SEQ ID NO: 40522 - protein, 255 aa, Lysiphlebus testaceipes
MLKGVVTLVTGGASGLGRGTVERFVKHGAKVIIGDLPTSKGNELAKDLGSNVVFSPLDVTSEQDVNDALEIAKTKFGKLDVVVNAAGIAAAHKVYNFNKDLCHDLDTFARIINVNTVGTFNVIRLSVGLMGKNTPNIDGQRGVIVNTASVAAFDGQMGQAAYSASKAGVVGMTLPLARDLASVGIRVVTIAPGLFDTPMLQTLPDKVRKFLADTVPFPKRLGNPDEYAQLVQSIVENPLINAETIRLDGGLRMQP

SEQ ID NO: 40523 - DNA, 786 bp, Pseudomonas aeruginosa
  CDS (1)..(786): transl_table=11
atgtgtatgagcaatcaacaagtcgtttcgataaccggtgctggctcaggaattggtctcgaactggttcgatcctttaagtccgccggttattgcgtatccgctctcgtacaaaacgaggagcaaaaggcgagcctttgcaatgagttcaaggacgcactcgagatcgtcgtgggcgatgtccgggaccacgcaacaaatgagaagctgataaagcaaacaaccgatagattcggccatctcgattgtttcattgcaaatgccggtatttgggattacatgcttggcatcgaagagccttgggagaaaatatcgagcagttttgatgagatattcaacatcaatgtcaagagctatttcagcggtatcagggccgccctgcaggaactgaaaaagactagcggatcagtggtgatgaccgcttcagtgtcgtcccatgcggtcggtgctggtggttcttgctacatcgccagcaagcatgcggtcctgggcatgatgaaagctttggcttacgaattggctccccacattcgcgtcaacgccgtagcaccgggcggcactgtgacgcctctgagcggtcccgcaagcgccggcttcgacaaaactcacatggaaaacatgcccggtatcgaggacatgatcaagggtctaacgcctcttggaatttcagccaaggccgaagacgtagtggcaccctatttgttgttggcgtcgcgagatcaagggaaattcattaccgggactgtcattaatatagatggagggatggcgctcggtcgcaagtag

SEQ ID NO: 40524 - protein, 261 aa, Pseudomonas aeruginosa
MCMSNQQVVSITGAGSGIGLELVRSFKSAGYCVSALVQNEEQKASLCNEFKDALEIVVGDVRDHATNEKLIKQTTDRFGHLDCFIANAGIWDYMLGIEEPWEKISSSFDEIFNINVKSYFSGIRAALQELKKTSGSVVMTASVSSHAVGAGGSCYIASKHAVLGMMKALAYELAPHIRVNAVAPGGTVTPLSGPASAGFDKTHMENMPGIEDMIKGLTPLGISAKAEDVVAPYLLLASRDQGKFITGTVINIDGGMALGRK

SEQ ID NO: 40525 - DNA, 831 bp, Pseudomonas fluorescens
  CDS (1)..(831): transl_table=11
gtgaaactaaaagaagaagttatattaatcacagggggcgcatctggactggggcatgcccttgtggaacggttcgtggccgaaggtgccaaggtggctgtcctcgataagtgtgccgatcgacttcaacagttggagtctgatcacggcgaagatgtggtatgcattgtcggtgatgtgcgttcaatggaagaccagaaactggctgccagtcgttgtattgccaagttcgggaggattgacactctgatccccaacgccgctatctgggattacaacacggcacttgtcgatctacctgaagacagtatcgacaaagcatttgatgaagtatttcagattaatgttaagggctatattctcgccgtcaaggcatgcctgccagccctggttgccagccgaggcagcgtgatctgcacgatctcgaatgcaggtttttaccccaatggcggtggtcctctttacacggcgacgaagcacgcagtggtggggctggtgcgcgagctggcattcgagttggcaccatacgtccgggtcaatggtgtgggggttggcggtatcaatacggatttgagaggaccttgctcgttgggaatgagtgagcagtcgatatcgaatgtgccgttggctgagttgctgcaggacgtactgccaatcggccgcctgcctgacgccgaagaatacacaggagcttatgtgtttttcgccacgcgtgggacatctgcgcccgccaccggtgccttactgaattatgacggaggcatgggcgttcgcggacttttttccgcagtcggaggtaaggacctgctcgaaaaacttaacattgattga

SEQ ID NO: 40526 - protein, 276 aa, Pseudomonas fluorescens
MKLKEEVILITGGASGLGHALVERFVAEGAKVAVLDKCADRLQQLESDHGEDVVCIVGDVRSMEDQKLAASRCIAKFGRIDTLIPNAAIWDYNTALVDLPEDSIDKAFDEVFQINVKGYILAVKACLPALVASRGSVICTISNAGFYPNGGGPLYTATKHAVVGLVRELAFELAPYVRVNGVGVGGINTDLRGPCSLGMSEQSISNVPLAELLQDVLPIGRLPDAEEYTGAYVFFATRGTSAPATGALLNYDGGMGVRGLFSAVGGKDLLEKLNID

SEQ ID NO: 40527 - DNA, 834 bp, Pseudomonas pseudoalcaligenes
  CDS (1)..(834): transl_table=11
atgaaactgaaaggtgaagcggtactgatcacggggggcgcctccggattagggcgcgcgctcgtggaccgattcgtggccgaaggcgccaaagtggcggtgctcgacaagtcggcagagcgccttgcagagctggaaaccgatcatggcgacaacgtgctcggcatcgtcggcgatgtgcgttcactggaagaccagaaacaggctgccagccgctgcgtggccaggttcgggaaaatcgacaccttgattcccaatgcaggcatctgggattactcgacggccttggtcgacctgcccgaagagagcctcgatgccgcgttcgatgaggtctttcacatcaatgtcaagggttatatccatgcagtgaaggcctgcctgccggccctggtcgccagccgtggcaacgtgatcttcacgatctccaatgcgggcttctatcccaatggcggcggccctctttacaccgcagccaagcacgccatcgtgggcctggtgcgtgaactggcgttcgagctggcgccatacgtgcgcgtcaacggcgtggggccgggcggcatcaatagcgatatgagaggtccttcctcgctgggaatgggcagcaaggcgatttcgaccgtaccgctggccgacatgctgaagtcggtgctgccgattggtcgcatgcccgaggtcgaagagtacaccggggcctatgtgttttttgccacccgaggcgatgcggcgcctgcgaccggggccttgctgaactacgacggtggcttgggcgttcgtggattcttctcgggtgccggaggtaatgacttgctcgaacagctgaatatccatccctaa

SEQ ID NO: 40528 - protein, 277 aa, Pseudomonas pseudoalcaligenes
MKLKGEAVLITGGASGLGRALVDRFVAEGAKVAVLDKSAERLAELETDHGDNVLGIVGDVRSLEDQKQAASRCVARFGKIDTLIPNAGIWDYSTALVDLPEESLDAAFDEVFHINVKGYIHAVKACLPALVASRGNVIFTISNAGFYPNGGGPLYTAAKHAIVGLVRELAFELAPYVRVNGVGPGGINSDMRGPSSLGMGSKAISTVPLADMLKSVLPIGRMPEVEEYTGAYVFFATRGDAAPATGALLNYDGGLGVRGFFSGAGGNDLLEQLNIHP

SEQ ID NO: 40529 - DNA, 828 bp, Pseudomonas sp
  CDS (1)..(828): transl_table=11
atgaaactcaaaggtgaagtggcattggtgacgggcggaggcgccggactggggcgagcgatcgtcgatcgctatgtcgcagagggcgcccgcgtcgcggtgctggacaagtcggcagcaggcctggaggaaatcaggaagcgccacggcgatgccgtggtcggcatcgagggcgatgttcggtcgctcgacagccatcgtgaagccgtggcgcgctgcgtcgagaccttcggaaagctcgattgcctgatcggcaacgccggcgtttgggactacctgacccaactggcggacattcccgacaacggcatctcggaagccttcgacgaaatgttcgcgatcaacgtcaaaggctacatcctggccgccaaggccgcgttgcccgcgctgtacaagagcaaaggcagcgcgatcttcaccgtgtcgaacgctggcttctaccctggtggcggaggcgttctctacaccgcgggcaagcatgccgtgatcggcttggtcaagcagctcgcgcatgaatgggggcctcgcatccgtgtcaacggcatcgcccctggagggatcctcggcagcgacctgcgcgggctcaagacgctgggtctgcaagaccaaaccattgcgacgatgccactggccgacatgctgggtcctgtccttccgaccgggcggatggccaccgccgaggaatacgccggagcctacgtgttcttcgccacgcgcgcggataccgtcccgctcaccggcagcgtgctgaacatcgacggcggcatgggcgtgcgcggcttgttcgaagccagtctcggtgcacagctcgacaagcatttcgcttga

SEQ ID NO: 40530 - protein, 275 aa, Pseudomonas sp
MKLKGEVALVTGGGAGLGRAIVDRYVAEGARVAVLDKSAAGLEEIRKRHGDAVVGIEGDVRSLDSHREAVARCVETFGKLDCLIGNAGVWDYLTQLADIPDNGISEAFDEMFAINVKGYILAAKAALPALYKSKGSAIFTVSNAGFYPGGGGVLYTAGKHAVIGLVKQLAHEWGPRIRVNGIAPGGILGSDLRGLKTLGLQDQTIATMPLADMLGPVLPTGRMATAEEYAGAYVFFATRADTVPLTGSVLNIDGGMGVRGLFEASLGAQLDKHFA

SEQ ID NO: 40531 - DNA, 792 bp, Rhodococcus sp
  CDS (1)..(792): transl_table=11
atgatcgtcaccggcggagggtcgggcctaggccgggcgctggtcgagcgattcctgggagagggagcccgggtgggtgtcctggagaagtcggcggagaaggctgagaagcttgccaacgacttcggcgaggatgtcctcgtggtcgaaggcgacgtgcgcaagtacgacgacaatgcgcgcgtcgtccaggaaacggttcgccagttcggtcgcctcgacacgttcgtcgcgaacgccgcgatctgggacttctcgacgaagatggtcgatatcccggtggaccgactggacgccctcttcgacgaaatgttccacatcaacgtcaagggctacttgcacggtgcacgtgcggcggtcgaggagctcgccgccaccggaggctcgatcatctacaccgtgtcgaacgccggcttctaccccggcggcggcggcccgctctacaccgcgtcgaagcacgcggtagtcgggctgatcaaggaactggccttcgaactcggccccaagatccgcgtcaacggggtggctccgggcgcaatgcccaccgatctgaggggacctggttcgctcggaatgggcgaaaccaccatcacctcagcggtatccctcggtgatctggtcaaacagtgcacagtgctgcaggagctgcccgaggctgcggactacaccgggcactacgttctgctggcttcgaaggcgaactcgaggacggcaaccggcgcgatcatcaactgtgacggcgggatgggtgtgcgcggcttggccgagacggccggcggaaacgacctgtaa

SEQ ID NO: 40532 - protein, 263 aa, Rhodococcus sp
MIVTGGGSGLGRALVERFLGEGARVGVLEKSAEKAEKLANDFGEDVLVVEGDVRKYDDNARVVQETVRQFGRLDTFVANAAIWDFSTKMVDIPVDRLDALFDEMFHINVKGYLHGARAAVEELAATGGSIIYTVSNAGFYPGGGGPLYTASKHAVVGLIKELAFELGPKIRVNGVAPGAMPTDLRGPGSLGMGETTITSAVSLGDLVKQCTVLQELPEAADYTGHYVLLASKANSRTATGAIINCDGGMGVRGLAETAGGNDL

SEQ ID NO: 40533 - DNA, 756 bp, Streptomyces sp
  CDS (1)..(756): transl_table=11
atggagaacacacagcgatccgtgatcgtgaccggcggcggctccggcatcggacgagccgtcgcccgcgctttcgccgcccggggcgaccgcgtcctcgtcgtgggtaggaccgccggtccgctggccgagacggtcgacgggcacaaggaggcgcacacgctggccgtggacatcaccgaccccgcagcgccgcaggccgtcgtccgggaggtgcgcgagcggctcggcggcgtggtcgacgtgctcgtgaacaatgccgccactgccgtcttcgggcacctgggggagctggaccgcaccgcggtggaggcgcaggtggccacgaacctcgtggcccccgtgctgctgacccaagcactgctcgaccccctggagaccgcctccgggctggtcgtgaacatcggttcggcgggcgcgctgggccggcgggcctggccggggaacgcggtgtacggagcggccaaggccgggctggacctgctgacgcggtcctgggccgtggaactcggcccccgcggaattcgcgtgatcggggtcgccccgggagtgatcgagacgggcgcgggagtccgggccgggatgtcccaggaggcgtacgacgggttcctggaagccatgggacaacgcgtcccgctcggccgggtgggccggcccgaggacgtcgcgtggtgggtggtgcggctcgccgatcccgaagccgcgtacgccagcggtgccgtgctcgccgtggacggggggctgtcggtgacctga

SEQ ID NO: 40534 - protein, 251 aa, Streptomyces sp
MENTQRSVIVTGGGSGIGRAVARAFAARGDRVLVVGRTAGPLAETVDGHKEAHTLAVDITDPAAPQAVVREVRERLGGVVDVLVNNAATAVFGHLGELDRTAVEAQVATNLVAPVLLTQALLDPLETASGLVVNIGSAGALGRRAWPGNAVYGAAKAGLDLLTRSWAVELGPRGIRVIGVAPGVIETGAGVRAGMSQEAYDGFLEAMGQRVPLGRVGRPEDVAWWVVRLADPEAAYASGAVLAVDGGLSVT

SEQ ID NO: 40535 - DNA, 756 bp, Streptomyces peucetius
  CDS (1)..(756): transl_table=11
atggagaacacacagcgatccgtgatcgtgaccggcggcggctccggcatcggacgagccgtcgcccgcgccttcgccgcccggggcgaccgcgtcctcgtcgtgggcaggaccgccggtccgctggccgagacggtggacgggcacaaggacgcgcacacgttggccgtggacatcaccgaccccgcggcgccggaggcggtcgtccgggaggtgcgcgagcggctcggcggcgtggtcgacgtgctcgtgaacaatgccgccacggccgccttcgggcacctgggagagctgcaccgcaccgcggtggaggcacaggtggccacgaacctcgtggcccccgtgctgctcacccaggccctgctcggccccctggagaccgcttccggcctggtggtgaacatcggttcggcgggcgcactcggccggcgggcctggccggggaacgcggtgtacggggcggccaaggccggcctggacctgctgacgcggtcctgggccgtggaactcggtccccgcggcattcgcgtggtcggtgtcgccccgggagtgatcgggacgggcgcgggggtccgggccgggatgtcccaggaggcgtacgacgggttcctggaagccatggggcagcgcgtcccgctcggccgtgtgggccggcccgaggacgtcgcgtggtgggtggtgcggctcgccgatcccgaagccgcgtacgccagcggtgccgtgctggccgtggacgggggtctctcggtgacgtga

SEQ ID NO: 40536 - protein, 251 aa, Streptomyces peucetius
MENTQRSVIVTGGGSGIGRAVARAFAARGDRVLVVGRTAGPLAETVDGHKDAHTLAVDITDPAAPEAVVREVRERLGGVVDVLVNNAATAAFGHLGELHRTAVEAQVATNLVAPVLLTQALLGPLETASGLVVNIGSAGALGRRAWPGNAVYGAAKAGLDLLTRSWAVELGPRGIRVVGVAPGVIGTGAGVRAGMSQEAYDGFLEAMGQRVPLGRVGRPEDVAWWVVRLADPEAAYASGAVLAVDGGLSVT

SEQ ID NO: 40537 - DNA, 1216 bp, Solanum tuberosum
  CDS (28)..(855)
ggatagaaaaaaaggaactttattgccatggctgatacttctcttcctatccaaaggttattgggaaaagttgctttagtcactggaggggcaactggcataggagagagcatagtacgtctatttcataaacatggtgcaaaagtatgcattgctgatattcgagatgaagttggacagcatgtttgtgagacccttggtaatgaccagaatgtgtgttttatccactgtgatgtgactgtagaagctgatgttagtaatgcagttgattttaccgttcaaaagtttggtacacttgacataatggttaataatgctgggttgtctgggccccctattcgagatatccgtgactatgaactttctgtgtttgagaatgtgcttgacgtgaacttgaaaggtgctttccttggaatgaagcatgctgctcgcataatgataccactaaagaagggagcaatagtatctctgtgcagtgtcgcaagtgccattggtggaatcggacctcatggttatgcagcttccaagtatgctgttttgggacttacgcagaacgttgcagctgagatgggaaaacatggtgtacgtgtgaattgtgtttctccttatgctgttgcaactggattagctctggctcacttgcctgaggatgaaaagactgatgatgcaatggaaggttttcgtgattttgttgccaggaatgctaacttgcagggcgtggaattgatggctaatgatgttgctaatgccgtgcttttcttagccagtgatgaatcaaggtatataagtgggcataatctgatggtcgatggtggtttctcgtgtgttaatcactcccttcgggtcttcagatagctgcatgtttatcgatcttataggaaactttcaagagattgtcatactgtttgtgatttttccattcaaacaaccctgcttatgtcttcgaaagcactatgctaaaagaaaaaacaaaacttatacaatcacccgggcctcttcactgcgaccccctttgtgaggagacaacccccccaattcccttctcctgaagttaaagggtgagattgccaagttcaaatagagttgctttgcaatttgctgtataagcatgtgtgttgacaatatacagtacattataacgtaaactccaactgattagtgatttcctttttatgatttgctttggaaaaaaaaaaaaaaaaaaaaaaaaaaaaaa

SEQ ID NO: 40538 - protein, 275 aa, Solanum tuberosum
MADTSLPIQRLLGKVALVTGGATGIGESIVRLFHKHGAKVCIADIRDEVGQHVCETLGNDQNVCFIHCDVTVEADVSNAVDFTVQKFGTLDIMVNNAGLSGPPIRDIRDYELSVFENVLDVNLKGAFLGMKHAARIMIPLKKGAIVSLCSVASAIGGIGPHGYAASKYAVLGLTQNVAAEMGKHGVRVNCVSPYAVATGLALAHLPEDEKTDDAMEGFRDFVARNANLQGVELMANDVANAVLFLASDESRYISGHNLMVDGGFSCVNHSLRVFR

SEQ ID NO: 40539 - DNA, 906 bp, Neurospora crassa
  CDS (1)..(906)
atgtcgaccggaaccaagtcggcctccgctgccagccatgccgagttgaaccgcaactccctcttcaacctcgcgggccgcgtcgccctcgtaaccggcggcggcactggcatcgggcttatggccacacaagctctcgccgtcaacggcgccaaggtgtatatcgctggccgcaacaaggagaagctggacaaggtggtggagatctacaacaaggacgtcgagggcgagatcatcgccctgcaggcagacgtgactaagaaggaggacattgccgctctggtcaaggagatcgaatcccgcgagaagtgtctctgcatcttggtcaacaacgccggcatttccagctcgagcgtaaccaccgaggccagcgaccccaaggagctcaagcacaacttgtttgataacgagaacgctactttcgacgactggacggagacataccgtaccaatgtggctagcatttacttcatgacctccgcctttttgcccctcctacaagctagcaccgagcgccacccaggctggtccggcactgtggtcaacatcagcagcatcagcggccaagtcaagtcagcccagcaccacttcagctacaacgctagcaaggcagcggccgttcacctgaaccgcatgctagccgcagagatcgccaacgctgggctcaagattcgcatcaacagcattgcgcctggtgtcttccctagcgagatgacggccgaggaaagcgacgagttccagaagagccatatccccaaggagaagtatcaagacaagttcccgagtgctcgtcctggccgcgatatcgatatggcgcaggcagtactggcattggtatcgaaccagttcatcaatggcgagacgttggccgttgatggtgggtacaagttggctgctggactctaa

SEQ ID NO: 40540 - protein, 301 aa, Neurospora crassa
MSTGTKSASAASHAELNRNSLFNLAGRVALVTGGGTGIGLMATQALAVNGAKVYIAGRNKEKLDKVVEIYNKDVEGEIIALQADVTKKEDIAALVKEIESREKCLCILVNNAGISSSSVTTEASDPKELKHNLFDNENATFDDWTETYRTNVASIYFMTSAFLPLLQASTERHPGWSGTVVNISSISGQVKSAQHHFSYNASKAAAVHLNRMLAAEIANAGLKIRINSIAPGVFPSEMTAEESDEFQKSHIPKEKYQDKFPSARPGRDIDMAQAVLALVSNQFINGETLAVDGGYKLAAGL

SEQ ID NO: 40541 - DNA, 816 bp, Rhodococcus sp
  CDS (1)..(816): transl_table=11
ttgggattcctggacggcaaggtggcgctcgtcaccggcggcggatcgggtatcggccgcgctgtggtcgagctctacgtgcaacagggcgcaaaagtggggatcctcgagatctccccggagaaggtgaaggacctgcgtaacgcactgcccgccgactccgtcgtggtgacggaaggcgacgccacgtcgatggccgacaacgaacgcgccgtcgccgacgtcgtggacgcgttcgggccgctcaccacgctcgtctgcgtggtcggcgttttcgactacttcaccgagattccgcaactgcccaaggacaagatcagcgaggcgttcgatcaactcttcggcgtcaacgtcaagagcaacctgctcagcgtgaaggcggcgctcgacgagctgatcgagaacgagggtgacatcattctcaccctctccaacgctgcgttctacgccggtggcggcggcccgctgtatgtgtcgtcgaagttcgccgtccgcggcctcgtgaccgagctcgcgtacgagctggcgccgaaggtgcgcgtcaacggcgtggcaccaggcggcaccatcaccgagctgcgcggcatccctgctctggccaacgagggccaacgtctcaaggacgtgccggacatcgagggtttgatcgagggcatcaatccgttgggcatcgtcgcccagcctgaggatcactcatgggcatacgcgcttctcgcctcgcgggagcggacctcggcggtgaccggcaccatcatcaacagcgacggcggtctcggggtccgcggtatgacgcggatggcgggtctcgcgcagtga

SEQ ID NO: 40542 - protein, 271 aa, Rhodococcus sp
MGFLDGKVALVTGGGSGIGRAVVELYVQQGAKVGILEISPEKVKDLRNALPADSVVVTEGDATSMADNERAVADVVDAFGPLTTLVCVVGVFDYFTEIPQLPKDKISEAFDQLFGVNVKSNLLSVKAALDELIENEGDIILTLSNAAFYAGGGGPLYVSSKFAVRGLVTELAYELAPKVRVNGVAPGGTITELRGIPALANEGQRLKDVPDIEGLIEGINPLGIVAQPEDHSWAYALLASRERTSAVTGTIINSDGGLGVRGMTRMAGLAQ

SEQ ID NO: 40543 - DNA, 828 bp, Xanthobacter polyaromaticivorans
  CDS (1)..(828): transl_table=11
atgtgtaaatggccggtggcacttgtcaccgggggcggttcgggactcggcaaggcgatcgtcgagcggttcctggccgagggggcgaaagtcgctatcctcgaccgttcggaggagcgtgtgcaagaagttgttgccatgtttggcggcaaggtcgtcggcacttctggtgacgtccgcagcatggccgacaacaaggcggcggtggcgagatgtgtcgaagccttcggcaagatcgacacccttgtcggcaacgccggtgtctgggactacaacgcctcgatcgccggcacgtcggaagaaaagcttgcggaggccatcgatgaactggtcgggatcaacctcaagggttacattctcgctgccaaggcggccttgccggaactctacaagaccaagggcaatgcaatcttcaccgtctcgaacgccggcttttacccgggcggtggcggcgtgctttataccgcatccaaacatggtgtggtgggaatgatcaagcaactcgcccatgaatgggctccgcatatccgcgtgaacggcgtggcgccgggcggtatcggcggaatctcgcggggctttccgtcgctttcacaggagggcatccgtttttccaatctgccgctcgacgatctgatgaagcagatgctgccgctcgaaaaagcattttacgcgagcgaatatactggcggctatgtcttcttcgctaatcgcaaggacaacggaccggccaccggaagtgtgctcaatttcgacggcgggatcgggatgcgtggcttcatgtcgccaaacatgggcaaggaactcgatgagaaattcaggggcgcctga

SEQ ID NO: 40544 - protein, 275 aa, Xanthobacter polyaromaticivorans
MCKWPVALVTGGGSGLGKAIVERFLAEGAKVAILDRSEERVQEVVAMFGGKVVGTSGDVRSMADNKAAVARCVEAFGKIDTLVGNAGVWDYNASIAGTSEEKLAEAIDELVGINLKGYILAAKAALPELYKTKGNAIFTVSNAGFYPGGGGVLYTASKHGVVGMIKQLAHEWAPHIRVNGVAPGGIGGISRGFPSLSQEGIRFSNLPLDDLMKQMLPLEKAFYASEYTGGYVFFANRKDNGPATGSVLNFDGGIGMRGFMSPNMGKELDEKFRGA

SEQ ID NO: 40545 - DNA, 843 bp, Rhodococcus erythropolis
  CDS (1)..(843): transl_table=11
gtgagactcaaggatgaggttgtcctcgtcaccggcggttgtgccggcctgggacgcgctatcgtagatcggttcgtctgcgagggcgccagggttgccgtgctcgaccggtctgttgcaggtctcgaggagctgcgtgccgctcatggtgacgcggtcgtggccgtcgagggagacgtccgttatctcgacagtcacaaggagaccgtcgcgaagtgcgtcgagacatttggaaagctagattgctacatcggaaacgcgggagtttgggactactcgacggcgctcgtcgaaattccagaggaccgtctcgatgaggcgttcgacgagatgtactccatcaatgtgaagggctacctcctcggcgtcaaggccgctctgggggccctctacgccagcaggggcagcgtcatcttcacggtgtccaatgctggcttctaccctgccggtggtggcgctctctacacgggcgcgaagcacgcgatcgtcggcatggtcaagcagctggcctacgagctaggcccacacatcagggtgaatggaatcgcgccaggcggcctcgggggaagcgatctgcgaggtctcaaggccctcgacctcgccgaggtctcgctctcgaaggtcccgctgggcgacatgctcaaggacatcctcccgacggggcagatggcctccgccgaggagtcgacgggcgcctatgtcttcttcgccacccggtccgaaaccgtgcctctgacagggagtgttcttaactacgacggcgggatcggggtacggggcatgtccgaggcaaatcgcggcgacctattggatcagttctactcaaagggagcgctagtatga

SEQ ID NO: 40546 - protein, 280 aa, Rhodococcus erythropolis
MRLKDEVVLVTGGCAGLGRAIVDRFVCEGARVAVLDRSVAGLEELRAAHGDAVVAVEGDVRYLDSHKETVAKCVETFGKLDCYIGNAGVWDYSTALVEIPEDRLDEAFDEMYSINVKGYLLGVKAALGALYASRGSVIFTVSNAGFYPAGGGALYTGAKHAIVGMVKQLAYELGPHIRVNGIAPGGLGGSDLRGLKALDLAEVSLSKVPLGDMLKDILPTGQMASAEESTGAYVFFATRSETVPLTGSVLNYDGGIGVRGMSEANRGDLLDQFYSKGALV

SEQ ID NO: 40547 - DNA, 819 bp, Bacillus sp
  CDS (1)..(819): transl_table=11
atgggctggttagatggaaaagttgcattggtgataggtggaggctcaggaattggcaggggcgtggttgaggcttttcttcgggaaggggcatccgttggtgtcctggagatcaatcctcagaaagtctcaaagctggaggaacacgggacggccgtaaaagcgattcaaggagatgccaccatgttgaaagataacgaacgagcagtccgacttaccgtggagacgtttggcagattggatatcttggtctcgtgcgtaggggtatgggattacttcgcggacctgccgaatatacctgcagaaaaaatcagcgacgcttttgatgaattgtttgccgtcaatgtgaaaagcaatcttctgagcgcgaaagcggctttgcctgaattgttaaaaacggagggaaacatcgtattgaccgtttcaaattccggtttttatcccgccggaggaggacctttatacgtttcctcgaagtttgccgtacgcgggttgattatggaattggcctatgagctggcgcctaaaattcgcgtcaatggagttgcccctggggggactattaccgatttgtcagggcttaaaagcttggaacagcagaatatgtcattatctcagattccaaatcttccggacatcatgcgaactacgaatccgctacaagtcttgggaacaccggaagaccacgcatgggcttatgtatacctggcgtccaaagaacggactcgtactgtaacgggcaccatcatccatacggacggaggaatcggagtaaggggaatcggcaaggtagcaggattgttgccggacgaaaaatga

SEQ ID NO: 40548 - protein, 272 aa, Bacillus sp
MGWLDGKVALVIGGGSGIGRGVVEAFLREGASVGVLEINPQKVSKLEEHGTAVKAIQGDATMLKDNERAVRLTVETFGRLDILVSCVGVWDYFADLPNIPAEKISDAFDELFAVNVKSNLLSAKAALPELLKTEGNIVLTVSNSGFYPAGGGPLYVSSKFAVRGLIMELAYELAPKIRVNGVAPGGTITDLSGLKSLEQQNMSLSQIPNLPDIMRTTNPLQVLGTPEDHAWAYVYLASKERTRTVTGTIIHTDGGIGVRGIGKVAGLLPDEK

SEQ ID NO: 40549 - DNA, 828 bp, Ralstonia sp
  CDS (1)..(828): transl_table=11
atgcaactcaacaatgaagtagccctggtcaccggcggtggctcgggcctgggccgggccatcgtggaccggttcgtggccgaaggcgcgcgtggccgtgctcgacaaatcggccgccagctccaggaactccaggccgcgcacggcgccaaagtgctgggcatcgaaggtgacgtgcgcgtgctggccgaccaccagaaggccgcgcgcgaatgcgtggccgcctttggcaagatcgactgcctgatccccaacgcgggcatctgggattattcgatgccgctcgtggacatccctgacgacaggatcgacgccgccttcgacgaggtcttccacatcaacgtcaagggctatctgcttgccgtcaaggcctgcctgcccgcgctggtgcaaagccgcggcagctgggtcttcacgatctcgaacgcgggcttctacccgaacggcggcggcccgctctatacaggggccaaacatgccgtggtgggcatggtgcgcgaactcgcctacgaacttgcgccacacgtgcgcgtcaatggcgtggcgcccggcggcatgagcactgacctgcgcggcccggcctcgctgggcatggccaaccaggccatttcgagcgtgccgctgggtgaaatgctgacctctgtgcttcccgtggggcgcatgcctgtggcagcggaatacaccggagcctacgtgttctttgccacgcgcggcgacaccttccccacgacaggcgcgttgctcaaccacgatggtggcatgggcgtgcgcggctttttcgaggctgccgggggcaaagacctgccgcagaaactgcggctttcataa

SEQ ID NO: 40550 - protein, 275 aa, Ralstonia sp
MQLNNEVALVTGGGSGLGRAIVDRFVAEGARGRARQIGRQLQELQAAHGAKVLGIEGDVRVLADHQKAARECVAAFGKIDCLIPNAGIWDYSMPLVDIPDDRIDAAFDEVFHINVKGYLLAVKACLPALVQSRGSWVFTISNAGFYPNGGGPLYTGAKHAVVGMVRELAYELAPHVRVNGVAPGGMSTDLRGPASLGMANQAISSVPLGEMLTSVLPVGRMPVAAEYTGAYVFFATRGDTFPTTGALLNHDGGMGVRGFFEAAGGKDLPQKLRLS

SEQ ID NO: 40551 - DNA, 831 bp, Cupriavidus oxalaticus
  CDS (1)..(831): transl_table=11
atgcaactcaccaatgaagtagccctggtcaccggcggcggctcgggcctgggccgcgccatcgtggaccgcttcgtcgccgaaggcgcgcgcgtggccgtgctcgacaagtcggccgccaggctccaggagttgaaggccgcgcacggcgccaaggtgcttggcatcgaaggcgatgtgcgcgtgctggccgaccaccagaaggccgcgcgcgaatgcgttgctgccttcggcaagatcgactgcctgatccccaacgcgggcatctgggactattcgatgccactggtcgacatccccgacgacaagatcgatgccgccttcgacgaggtgttccacatcaacgtcaaaggctatctgctggccgtcaaggcctgcctgcccgcgctggtgcaaagccgcggcagcgtggtcttcacgatctcgaacgccggcttctaccccaatggcggcggcccgctctacacagccaccaaacatgccgtcgtgggcatggtgcgcgaactcgctttcgaactggccccgcacgtgcgcgtcaacggtgtggcgcccggcggcatgagcaccgacctgcgtggcccggcctcgctgggcatggccaaccaggccatctccagcgtgccgctgggcgacatgctggcctcggtgctgccggtgggccgcatgcccgtggccgcggaatacaccggggcctatgtgttctttgccacgcgcggcgacaccttccccaccacgggcgctctgctgaaccatgacggtggcatgggcgtgcgcggctttttcgaggctgccgggggcaaagacctgccgcagaaactgcagctttcataa

SEQ ID NO: 40552 - protein, 276 aa, Cupriavidus oxalaticus
MQLTNEVALVTGGGSGLGRAIVDRFVAEGARVAVLDKSAARLQELKAAHGAKVLGIEGDVRVLADHQKAARECVAAFGKIDCLIPNAGIWDYSMPLVDIPDDKIDAAFDEVFHINVKGYLLAVKACLPALVQSRGSVVFTISNAGFYPNGGGPLYTATKHAVVGMVRELAFELAPHVRVNGVAPGGMSTDLRGPASLGMANQAISSVPLGDMLASVLPVGRMPVAAEYTGAYVFFATRGDTFPTTGALLNHDGGMGVRGFFEAAGGKDLPQKLQLS

SEQ ID NO: 40553 - DNA, 831 bp, Streptomyces atroolivaceus
  CDS (1)..(831): transl_table=11
atgagcggacggctcacgggccggaccgcgatcgtcaccggcgccgggcggggcgtcgggcgtgcctgcgccacggcgttcgccgcgcagggcgccgacctggtcctggtcgacatcgccgccgacctcccgcacgtcccctaccccgcggccaccccgagccagctcgatcacaccgcccggctgtgccgcgagcagggggccgccgtgctcaccgcacgcgcggacgtgcgggacgcggcggcctgcgagcgggtggtggccgatgccgtggaccgcttcggttcgctggacgtgctggtcaacaacgcggggatcgcgggtccttcgggccggatcgtgcacgaggtcaccgaggacgagtgggcggtgatgatcgacgtcaacctcaacggcgcctggcggatgctgaaggccgcgggggcgtcgatggtggcggcccgctccggctccatcgtcaacatcgcctccaccgccggactggtgggataccgcaacttcgccggctacgtggcgtccaagcacggcctggtcggcctgacgaaggccgccgccctcgactacgcgccctaccgggtgcgggtgaacgcggtctgccccggctcggtgcgcgacggcgaggcgtgggagggccggatgctggtggagatcggccgcagcatcgggatcgaaccggccgaccacgaagccgagttcatcacgcagatgcccatgaacacgctggtggaggcggacgatgtggcgggggccgccctgtggctcgcctccgaggagtcccgtcactccaccggcggtgtgatcaccgtcgacgccggctacagcgcccgttga

SEQ ID NO: 40554 - protein, 276 aa, Streptomyces atroolivaceus
MSGRLTGRTAIVTGAGRGVGRACATAFAAQGADLVLVDIAADLPHVPYPAATPSQLDHTARLCREQGAAVLTARADVRDAAACERVVADAVDRFGSLDVLVNNAGIAGPSGRIVHEVTEDEWAVMIDVNLNGAWRMLKAAGASMVAARSGSIVNIASTAGLVGYRNFAGYVASKHGLVGLTKAAALDYAPYRVRVNAVCPGSVRDGEAWEGRMLVEIGRSIGIEPADHEAEFITQMPMNTLVEADDVAGAALWLASEESRHSTGGVITVDAGYSAR

SEQ ID NO: 40555 - DNA, 810 bp, Terrabacter sp
  CDS (1)..(810): transl_table=11
gtgaccgccggctggctcgaggggcggcgagcgctggtcgtgggcgcgggctcgggcatcggccgtgcggttgtggacgtcttcctcgccgagggcgcgcgagtcgcggtcctggagcgcgatccggacaagagcgcggcgatcggggcggccctgcccgaagtcccggtcactgtcggcgacgcggtcacccgtcaggccaacgacgccgcggtcaccgcggcggtcgaggccttcggggggctggacgttctggtcaactgcgtgggggtgttcgacttctaccgcagtcttctcgacctcgacgccgacgtgctagacgtcgccttcgacgagatgttccgcaccaatgtgctttcccacttgcagtccgtgaaagcggcactgccccatctgcaggcgtcggggcgcggagtggtgctccttacagagtcgacgtcctcctatttcccgggtcgaggcggcgttctgtacctgtcctcgaagttcgccgtccgcgggatcgtcacggcgctcgcccacgacctggcgccagaggtgcgggtcaacggggtcgcaccgggcggcacgctgggcaccgacctgcgtgggttgcctagcctgggaactgcggggagcagcctgggcgacatcccgggccgcgccgaggaactggcgtcccgggtaccgctgcaggtcgcgctgacggctgcggaccacgcgtggagctacgtgttcctagcctccgaccggtcccgcggcatcaccggcggggtggtccaccccgacggcgggatcggcgtctccgcttcccccagaaaacgttcctga

SEQ ID NO: 40556 - protein, 269 aa, Terrabacter sp
MTAGWLEGRRALVVGAGSGIGRAVVDVFLAEGARVAVLERDPDKSAAIGAALPEVPVTVGDAVTRQANDAAVTAAVEAFGGLDVLVNCVGVFDFYRSLLDLDADVLDVAFDEMFRTNVLSHLQSVKAALPHLQASGRGVVLLTESTSSYFPGRGGVLYLSSKFAVRGIVTALAHDLAPEVRVNGVAPGGTLGTDLRGLPSLGTAGSSLGDIPGRAEELASRVPLQVALTAADHAWSYVFLASDRSRGITGGVVHPDGGIGVSASPRKRS

SEQ ID NO: 40557 - DNA, 813 bp, Sphingopyxis macrogoltabida
  CDS (1)..(813): transl_table=11
atgggttggctagacggcaaggtagctttgattaccggcggtggcgcgggcatagggcgcgcgctggtggagcggtttgtcgcggaaggggcaaaggtcggcgtacttgaagtcaatgccgggcgtgcggaggagttggctgcggttcttggggattcggtttgcgtcgtaacgggcagcgttgcgagctttgctgacaatgcagcggcggtgcagcgcactgtcgagaagttcgggcggctggatacgttcgttgccaatgcaggtgttttcgatttcttccagcccttggcgcaatacgaaggcgaccagatcggcgccgcgttcgacgaactgatgtcagtcaacgtgaagggcggcctgttgggcgtacgggcggccttgcccgaactcgtgcggtcgcgcggaagcgtgatcttcacgatttcgaatgctggcttctacgctggcggtggcgggccgctctatacggcgtcgaagcatgcgctggtcggactggtcaagcagctggcgcatgaactcgcccccaaggtgagggtgaacgcggttgccccggggggcatgaaaaccgaattgagcggtctttcggcaaccggcacctccggccagagccttagccagatggacgggctggatacgctgctgaaggatatcacgccgctgcaggtttcgcccatgcctgagcaatattgcgggccgtacgtgctgctcgcctcggatgactcagtggtgaccaccggggcgatcatcaataccgatggcggctttggcgtgcgcggcattactggcgtgaggggtggagaaggcctgtag

SEQ ID NO: 40558 - protein, 270 aa, Sphingopyxis macrogoltabida
MGWLDGKVALITGGGAGIGRALVERFVAEGAKVGVLEVNAGRAEELAAVLGDSVCVVTGSVASFADNAAAVQRTVEKFGRLDTFVANAGVFDFFQPLAQYEGDQIGAAFDELMSVNVKGGLLGVRAALPELVRSRGSVIFTISNAGFYAGGGGPLYTASKHALVGLVKQLAHELAPKVRVNAVAPGGMKTELSGLSATGTSGQSLSQMDGLDTLLKDITPLQVSPMPEQYCGPYVLLASDDSVVTTGAIINTDGGFGVRGITGVRGGEGL

SEQ ID NO: 40559 - DNA, 756 bp, Agrobacterium tumefaciens
  CDS (1)..(756): transl_table=11
atgacgcaacagagatttaccgggcggcgtgtgctggtgacgggcacggcccagggcatcggccgccgcatcgccgaacgtttcatcgaggaaggggccgaggtcatcggcctcgaccttctggcaagaacgacggaagcgcccttccgccagatcgcactcgacatcaccgacgcgacggcggtggagaaggcctgcaaggcaatcgaaagcgaatggggcgggctcgatatcctggtcaacgccgccggcatcttgcggctcggcgacagcgaaagcctgacgcctgcggactggaaagcctgcatggacgtcaatgcagcgggaccgttttatatgctgcggcaatggagcagcatcttcaaacggcagcggcgcggtgcgatcgtcaatgtcggctccaatgccgccgtcgtgccgcgcatcggcatgatggcctattgcgcctccaaggcggcgctggtcagcctcagccattgcgccgcccttgagcttgcaccctatggcgtgcgctgcaacgtcgtttcaccgggctccaccgatacgccgatgcttgccggcatgttgagcgatcccgccggcaaggaacggctggtcgccggcctgcccgagcagttcaagctcggcattccgctcggcaagatcgcaaggcctgatgatatcgccgatacggtgctgtttctcgcctccgatcaggccgggcatgtgacgatgcagcagatcgtggttgatggcggcgccacgcttgcggcttaa

SEQ ID NO: 40560 - protein, 251 aa, Agrobacterium tumefaciens
MTQQRFTGRRVLVTGTAQGIGRRIAERFIEEGAEVIGLDLLARTTEAPFRQIALDITDATAVEKACKAIESEWGGLDILVNAAGILRLGDSESLTPADWKACMDVNAAGPFYMLRQWSSIFKRQRRGAIVNVGSNAAVVPRIGMMAYCASKAALVSLSHCAALELAPYGVRCNVVSPGSTDTPMLAGMLSDPAGKERLVAGLPEQFKLGIPLGKIARPDDIADTVLFLASDQAGHVTMQQIVVDGGATLAA

SEQ ID NO: 40561 - DNA, 849 bp, Comamonas testosteroni
  CDS (1)..(849): transl_table=11
atgcaactcaccaatgaagtagccctggtcaccggcggcggctcgggcctgggccgcgccatcgtggaccgcttcgtcgccgaaggcgcgcgcgtggccgtgctcgacaagtcggccgccaggctccaggagttgaaggccgcgcacggcgccaaggtgcttggcatcgaaggcgatgtgcgcgtgctggccgaccaccagaaggccgcgcgcgaatgcgttgctgccttcggcaagatcgactgcctgatccccaacgcgggcatctgggactattcgatgccactggtcgacatccccgacgacaagatcgatgccgccttcgacgaggtgttccacatcaacgtcaaaggctatctgctggccgtcaaggcctgcctgcccgcgctggtgcaaagccgcggcagcgtggtcttcacgatctcgaacgccggcttctaccccaatggcggcggcccgctctacaccgccaccaaacatgccgtcgtgggcatggtgcgcgaactcgctttcgaactggccccgcacgtgcgcgtcaacggtgtggcgcccggcggcatgagcaccgacctgcgtggcccggcctcgctgggcatggccaaccaggccatctccagcgtgccgctgggcgacatgctggcctcggtgctgccggtgggccgcatgcccgtggccgcggaatacaccggggcctatgtgttctttgccacgcgcggcgacaccttccccaccacgggcgctctgctgaaccatgacggtggcatgggcgtgcgcggctttttcgatgctgctgggcggcaaagacctgccgcagaaactgcagctttcataaccaaggagaagacatga

SEQ ID NO: 40562 - protein, 282 aa, Comamonas testosteroni
MQLTNEVALVTGGGSGLGRAIVDRFVAEGARVAVLDKSAARLQELKAAHGAKVLGIEGDVRVLADHQKAARECVAAFGKIDCLIPNAGIWDYSMPLVDIPDDKIDAAFDEVFHINVKGYLLAVKACLPALVQSRGSVVFTISNAGFYPNGGGPLYTATKHAVVGMVRELAFELAPHVRVNGVAPGGMSTDLRGPASLGMANQAISSVPLGDMLASVLPVGRMPVAAEYTGAYVFFATRGDTFPTTGALLNHDGGMGVRGFFDAAGRQRPAAETAAFITKEKT

SEQ ID NO: 40563 - DNA, 819 bp, Burkholderia sp
  CDS (1)..(819): transl_table=11
atgaaattaccagaaaaccaggtcgttatcgtgacaggtgctggctccggtctcggacatgcgctaactgaacgttttttggcggaaggcgcagcggttgtttgtatggaaattaatccggaaaaagccaaaagactgaaagaggatttcggtaagtcagtgtcgatcgtggtaggtgacgtgactaaatatgaagataatcgacgcgccgtagaagaagcggtgagccggttcggtcatctggatacgttcgtcgctaatgccggtgtgtttgattttttcaggccgattacggatacgcctcccgatgctttgtcgcaggcattcgatcagattttcgctattaacgtaaaggggggattgctcggcgccaaggcagctgtgacggaattgaagaaaaccggtggttcgatcatatacaccgtttcaaatgcaggattctattcgggcggcggtggagcaatttatacgtcaactaagcacgcattggtgggcctggttcgccagctggcttatgagtttgctccgtatgtccgcgtgaatggcgtggcacctggtggaatgaaaacggagctgtccggagtttctgcattgggatccgacaagcagaaactgagcgacgtggaagaactggaaagcatgctctgccaaatcacccccctaaatatcgcgccgattccagccgactatacaggaccgtatgtgcttttgtcgtcaaaagtggatgcgggaccgattaccggcgtggtgatcaacacggacggagggctgggtgtgcgagggatcgcaaatgtcaggggcggtgaggccttaaggtga

SEQ ID NO: 40564 - protein, 272 aa, Burkholderia sp
MKLPENQVVIVTGAGSGLGHALTERFLAEGAAVVCMEINPEKAKRLKEDFGKSVSIVVGDVTKYEDNRRAVEEAVSRFGHLDTFVANAGVFDFFRPITDTPPDALSQAFDQIFAINVKGGLLGAKAAVTELKKTGGSIIYTVSNAGFYSGGGGAIYTSTKHALVGLVRQLAYEFAPYVRVNGVAPGGMKTELSGVSALGSDKQKLSDVEELESMLCQITPLNIAPIPADYTGPYVLLSSKVDAGPITGVVINTDGGLGVRGIANVRGGEALR

SEQ ID NO: 40565 - DNA, 765 bp, Aedes aegypti
  CDS (1)..(765)
atggatttcaccggcaaagtagtactcattactggagcgagcagtgggattggagctgccacggcaaagcatttgacgcatttgggggccacagttgtcatgaccggtaggaatgccgaaagtttgaagaaatgtggagccgaatgtgttggaaaacagaagcctctgattttggtggccgacgtgacaaaaccggaagacaacgtccgtgtaattgaagagaccatcaaaaaatttggcaaactagacgtgctggtaaacaacgctggtaggggagtttttggcagtatcgaaaccactagtctggatcaactggatgacatgctgaacaccaatttgagaggagcttatcatctgacgatactagccgtaccccatctaatcaaaagcaaaggaaacatcgttaacgtatcgagcatcactggactcaaaccgtttcccaactcattggcttactgcatttcaaaagccgcgttggatcaattcacaagagtgattgctcttgaacttgcaccgaagcaggtccgggtgaattcagtcaatccagcggtcattgcaaccgacttccaaaatcgagagggtatgagtcccgcacaatatgctgcttttgtgaagcacagcgaaaaaacccatgcccttggacggatcggacaacccagggaagtggcagaagccatagcattcctggcgacggattcggccagtttcatcacaggaacgtgtcttagcgttgatggcggaaggaccatcatgggtccaatttga

SEQ ID NO: 40566 - protein, 254 aa, Aedes aegypti
MDFTGKVVLITGASSGIGAATAKHLTHLGATVVMTGRNAESLKKCGAECVGKQKPLILVADVTKPEDNVRVIEETIKKFGKLDVLVNNAGRGVFGSIETTSLDQLDDMLNTNLRGAYHLTILAVPHLIKSKGNIVNVSSITGLKPFPNSLAYCISKAALDQFTRVIALELAPKQVRVNSVNPAVIATDFQNREGMSPAQYAAFVKHSEKTHALGRIGQPREVAEAIAFLATDSASFITGTCLSVDGGRTIMGPI

SEQ ID NO: 40567 - DNA, 765 bp, Aedes aegypti
  CDS (1)..(765)
atggatttcaccggcaaagtagtactcattactggcgcgagcagcgggattggagccgccacggcaaagcatttgacgcatttgggggccacagttgtcatgaccggtaggaatgccgaaagtttgaagaaatgtggagccgaatgtgttggaaaacagaagcctctgattttggtggccgacgtgacaaaacaggaagacaacgtccgtgtaattgaagagaccatcaaaaaatttggcaaactagacgtgctggtaaacaacgctggtaggggagtttttggcagtatcgaaaccactagtctggatcaactggatgacatgctgaacaccaatttgagaggtgcttatcatctgacgatactagccgtaccccatctaatcaaaagcaaaggaaacatagttaacgtatcgagcatcactggactcaaaccgtttcccaactcattggcttactgcatttcaaaagccgcgttggatcaattcacaagagtgattgctcttgaacttgcaccgaagcaggtccgggtgaattcagtcaatccagcggtcattgcaaccgacttccaaaatcgagagggtatgagtcccgcacaatatgctgcttttgtgaagcacagcgaaaaaacccatgcccttggacggatcggacaacccagggaagtggcagaagccatagcattcctggcgacggattcggccagtttcatcacaggaacgtgtcttagcgttgatggcggaaggaccatcatgggtccaatttga

SEQ ID NO: 40568 - protein, 254 aa, Aedes aegypti
MDFTGKVVLITGASSGIGAATAKHLTHLGATVVMTGRNAESLKKCGAECVGKQKPLILVADVTKQEDNVRVIEETIKKFGKLDVLVNNAGRGVFGSIETTSLDQLDDMLNTNLRGAYHLTILAVPHLIKSKGNIVNVSSITGLKPFPNSLAYCISKAALDQFTRVIALELAPKQVRVNSVNPAVIATDFQNREGMSPAQYAAFVKHSEKTHALGRIGQPREVAEAIAFLATDSASFITGTCLSVDGGRTIMGPI

SEQ ID NO: 40569 - DNA, 834 bp, Pseudomonas sp
  CDS (1)..(834): transl_table=11
atgaaactgaaaggtgaagcggtactgatcacggggggcgcctccggattagggcgcgcgctcgtggaccgattcgtggccgaaggcgccaaagtggcggtgctcgacaagtcggcagagcgccttgcagagctggaaaccgatcatggcgacaacgtgctcggcatcgtcggcgatgtgcgttcactggaagaccagaaacaggctgccagccgctgcgtggccaggttcgggaaaatcgacaccttgattcccaatgcaggcatctgggattactcgacggccttggtcgacctgcccgaagagagcctcgatgccgcgttcgatgaggtctttcacatcaatgtcaagggttatatccatgcagtgaaggcctgcctgccggccctggtcgccagccgtggcaacgtgatcttcacgatctccaatgcgggcttctatcccaatggcggcggccctctttacaccgcagccaagcacgccatcgtgggcctggtgcgtgaactggcgttcgagctggcgccatacgtgcgcgtcaacggcgtggggccgggcggcatcaatagcgatctgagaggtccttcctcgctgggaatgggcagcaaggcgatttcgaccgtaccgctggccgacatgctgaagtcggtgctgccgattggtcgcatgcccgaggtcgaagagtacaccggggcctatgtgttttttgccacccgaggcgatgcggcgcctgcgaccggggccttgctgaactacgacggtggcttgggcgttcgtggattcttctcgggtgccggaggtaatgacttgctcgaacagctgaatatccatccctaa

SEQ ID NO: 40570 - protein, 277 aa, Pseudomonas sp
MKLKGEAVLITGGASGLGRALVDRFVAEGAKVAVLDKSAERLAELETDHGDNVLGIVGDVRSLEDQKQAASRCVARFGKIDTLIPNAGIWDYSTALVDLPEESLDAAFDEVFHINVKGYIHAVKACLPALVASRGNVIFTISNAGFYPNGGGPLYTAAKHAIVGLVRELAFELAPYVRVNGVGPGGINSDLRGPSSLGMGSKAISTVPLADMLKSVLPIGRMPEVEEYTGAYVFFATRGDAAPATGALLNYDGGLGVRGFFSGAGGNDLLEQLNIHP

SEQ ID NO: 40571 - DNA, 768 bp, Pseudomonas putida
  CDS (1)..(768): transl_table=11
atgcacatagccaataaacacttcattgtcagcggcgccgcctccgggttgggtgctgccactgcgcagatgctggtcgaggccggcgccaaggtcatgctggtcgacctcaatgcccaggccgtcgaggccaaggcccgtgagctgggtgacaacgcccgcttcgccgtggctgacatcagcgacgagcaggctgcccaggcggccgtcgatgcagccgtcagcgcctttggcagcttgcaagggctggtcaattgcgccggcatcgttggtgccgagaaagtgctgggcaagcaaggtccgcatggcctggccagcttcgccaaggttatcaacgtcaacctggtcggcagcttcaatttgctgcgcctggccgctgcagccatggctgaaggggctgccgatgaggccggcgagcgtggcgtgatcatcaacaccgcctccatcgctgcctatgacggccagatcggccaggccgcctatgctgcctccaagggcgcgattgccagccttaccttgccggccgcgcgcgaactggcacgcttcggcatccgcgtgatgaccatcgccccgggcatcttcgaaacgccgatgatggctggcatgaccgaggaagtgcgtgcttcgctggctgccggcgtgccgttcccgccacgcctggggcgcccgcaggaatacgctgcgctggctcgtcacatcatcgagaacagcatgctcaacggcgaggtgatccgcctcgacggtgcactgcgcatggctgccaagtaa

SEQ ID NO: 40572 - protein, 255 aa, Pseudomonas putida
MHIANKHFIVSGAASGLGAATAQMLVEAGAKVMLVDLNAQAVEAKARELGDNARFAVADISDEQAAQAAVDAAVSAFGSLQGLVNCAGIVGAEKVLGKQGPHGLASFAKVINVNLVGSFNLLRLAAAAMAEGAADEAGERGVIINTASIAAYDGQIGQAAYAASKGAIASLTLPAARELARFGIRVMTIAPGIFETPMMAGMTEEVRASLAAGVPFPPRLGRPQEYAALARHIIENSMLNGEVIRLDGALRMAAK

SEQ ID NO: 40573 - DNA, 741 bp, Rhodococcus erythropolis
  CDS (1)..(741): transl_table=11
gtgagttacgcactcgagggcaaggttgctgtggttaccggtggcggatccggtatcggcgcagcatgtgtgcgccagctttgtgcgctcggcgccagcgttgtcgttgccgacatcgtcttcgacaacgccactttggtggcgaaggaattcggcgaccgagctgtagctgtcgaagtggacgtggcgcgtgtcgaggacgccgaacggatggttgagacggcggtggcgcacttcggtggactcgacatcgctgtcaacaatgccggtgtgggagtaccggtcaaggcctccgtgggagatacagggttcgaagaatggcgacgtgtgctcgacgtcaacctcgatggcgcattcttctgtatgcgggccgaattgcgacgaatgaggaagggtggttcggtggtcaatctcgcctccgtgatgggcgcggtggcagcggaaggctcgagtagctatgtcgcttccaaacatgctctggtcgggttgaccaaaacggcggccctcgattacgcgacggccggaatccgagtgaacgcggtgggcgctgggttcgtcgataccccgctgatggccgggcgggaccctgaatggcttgccgccgtggcggccagtcaccccttgggcaggttggctcaaccggacgaaattgcatcagtagtagcctttttggcttcgtcggcggcatcgttcgtcactggtgcattcatcccagtcgatggaggttacctcgcccgctga

SEQ ID NO: 40574 - protein, 246 aa, Rhodococcus erythropolis
MSYALEGKVAVVTGGGSGIGAACVRQLCALGASVVVADIVFDNATLVAKEFGDRAVAVEVDVARVEDAERMVETAVAHFGGLDIAVNNAGVGVPVKASVGDTGFEEWRRVLDVNLDGAFFCMRAELRRMRKGGSVVNLASVMGAVAAEGSSSYVASKHALVGLTKTAALDYATAGIRVNAVGAGFVDTPLMAGRDPEWLAAVAASHPLGRLAQPDEIASVVAFLASSAASFVTGAFIPVDGGYLAR

SEQ ID NO: 40575 - DNA, 750 bp, Streptomyces collinus
  CDS (1)..(750): transl_table=11
atggaactcgcactgcacggcaggaaactgctcatcaccggcggcacccggggcatcgggcggggcatcgtcctcgccgcggcccgggcgggcgccgacgtcctcacctgctaccggcaggagagcgaggccgtcgacagcctgaccgccgcgctgaaggagaccgccggcgaccaccacgtgatccgcgcggacgtcggtgacaccgccgaggccgaccgcctcgtcggcgaggccaaggaccgcttcggtcgcctcgacggcgtggtcaacaacgcgggcgtgatcagccacatcccgttcggggaactgccggccgacgagtggtcgcgcatcctcgacaccaacctcaccgcggcctaccggatcattcaccaggcgctgccgctgctcggcaccggctcctcggtcgtcaacatcggctcgcgcggagccgccgcgggcataccactgcgcgcccactacaccgccgcgaaggccgccatgatcgggctgacccgttccctcgcgaaggaactcggcccgaagggcatccgggtcaacgtggtggcccccggcgtcatcgagaccgaggccttcgccgacatgcccgccgagcgcgccgccggactgcgcgccacctactcccagaagaccgccctggcccgcctcggcaccgtcgaggaactcgccggaccggtgctgttcctgctctccgacgccgccgcgtacatcaccggcgagaccctcaacgtcgacggggggatctga

SEQ ID NO: 40576 - protein, 249 aa, Streptomyces collinus
MELALHGRKLLITGGTRGIGRGIVLAAARAGADVLTCYRQESEAVDSLTAALKETAGDHHVIRADVGDTAEADRLVGEAKDRFGRLDGVVNNAGVISHIPFGELPADEWSRILDTNLTAAYRIIHQALPLLGTGSSVVNIGSRGAAAGIPLRAHYTAAKAAMIGLTRSLAKELGPKGIRVNVVAPGVIETEAFADMPAERAAGLRATYSQKTALARLGTVEELAGPVLFLLSDAAAYITGETLNVDGGI

SEQ ID NO: 40577 - DNA, 831 bp, Pseudomonas putida
  CDS (1)..(831): transl_table=11
atgagatttacaggtgaagtgatattgataccgggtggtgcggctggacttgggcgcgctcttgttgatcggttcgtggccgaaggtgccaaggtggctgtgctcgacaagagcgccgaacgcctacaacagctggaatcggatcatggcgaagaagtggtatgcatcgtcggcgatgtgcgctctctggaagaccagaagcgggctgccagctgctgtattgctaagttcgggaagatcgacactttgatccccaacgcaggtatctgggattacaacacgcaattagtcgatctgcctgaagatagtatcgatactgcatttgatgaattgtttcaaatcaatgtcaagggttacatccacgccgtcaaggcctgcctgccggctttggtcgcaagtcgtggcagcgtgatctgcacgatctcgaatgcaggcttctaccccaatggcggaggccctctttacacggcgaccaagcatgcggtcgtgggcttggtgcgtgagctggccttcgagctggcaccatatgtgcgagtcaatggcgtgggggtgggcggtatgagcacggatttgagaggtccttgctcgctgggaatgagtgagcaatcgatatcgagcgtgccgttggctgagttgctgcaggatgtactgccgattggccgcatgcctgacgctgaagaatatacaggcgcctatgtgtttttcgctacgcgttgcgactcggtaccggccaccgggaccttgctgaattacgacggtggcatgggcgttcgcggaattttttccgcggtaggtggtaaagatcttctcgcaaaactgaacatcgattaa

SEQ ID NO: 40578 - protein, 276 aa, Pseudomonas putida
MRFTGEVILIPGGAAGLGRALVDRFVAEGAKVAVLDKSAERLQQLESDHGEEVVCIVGDVRSLEDQKRAASCCIAKFGKIDTLIPNAGIWDYNTQLVDLPEDSIDTAFDELFQINVKGYIHAVKACLPALVASRGSVICTISNAGFYPNGGGPLYTATKHAVVGLVRELAFELAPYVRVNGVGVGGMSTDLRGPCSLGMSEQSISSVPLAELLQDVLPIGRMPDAEEYTGAYVFFATRCDSVPATGTLLNYDGGMGVRGIFSAVGGKDLLAKLNID

SEQ ID NO: 40579 - DNA, 846 bp, Burkholderia sp
  CDS (1)..(846): transl_table=11
atgaagctgacaggtgaagtggcattgattaccggtggcgcctccggactggggcgcgccttgctcgaccggttcgtcgccgagggagcacgcgtggcgctgctcgacaagtcggccgagcgcctgcgggaactggaggtggtccatggagggaacgcggtcggcgtcgtcggcgatgtgcgctccctgcaggatcagaagcgcgccgccgagcgctgtcttgctgcattcggaaagatcgacacgcttattcctaatgcgggcatctgggactattcgaccgccttggccgatctgccggaagacaagatcgatgcggcattcgacgacatttttcatgtcaacgtgaagggctacatccacgccgtcaaggcctgcctgccagccctggtgtccagccgcggcagtgttgtcttcacgatctctaacgctggcttctatcccaacggcggcggcccgctctataccgcgaccaagcacgcagtggtgggcctagtccgccaaatggcgtttgagctggctcctcatgtgcgcgtcaacggcgtggcaccgggcggcatgaacaccgatctgcgcggtccctcttcgctcgggctgagcgaacagtcgatctcgtcggtgccgctcgccgacatgctgaaatcggtgctgccgatcggccgcatgccagcgctcgaagagtataccggtgcctatgtcttcttcgccacgcggggagattcgctgcccgccaccggcgccttactgaactacgacggcggcatgggcgttcgaggttttttgacggcagcgggcggcgccgacctgcccgagaagctgaacatcaatcgcgagggacaagaatga

SEQ ID NO: 40580 - protein, 281 aa, Burkholderia sp
MKLTGEVALITGGASGLGRALLDRFVAEGARVALLDKSAERLRELEVVHGGNAVGVVGDVRSLQDQKRAAERCLAAFGKIDTLIPNAGIWDYSTALADLPEDKIDAAFDDIFHVNVKGYIHAVKACLPALVSSRGSVVFTISNAGFYPNGGGPLYTATKHAVVGLVRQMAFELAPHVRVNGVAPGGMNTDLRGPSSLGLSEQSISSVPLADMLKSVLPIGRMPALEEYTGAYVFFATRGDSLPATGALLNYDGGMGVRGFLTAAGGADLPEKLNINREGQE

SEQ ID NO: 40581 - DNA, 804 bp, Streptomyces galilaeus
  CDS (1)..(804): transl_table=11
gtgaatcgagcggcccggcctacggtccggggcatgagcgccatagcagaaccgacagcgccgcggggcgtgatcgtcaccggcggcgggaccgggatcgggcgggccacggcccacgccttcgccgaccgcggcgaccgggtactcgtcgtaggccgcaccgccgcgaccctggccgggaccgccgagggccaccccggcatcagtgtcctgaccgccgatctcaccgatccggacggtccgcgcgccatcaccgacgcggcgctggacgcgttgggccgtatcgacgtcctcgtgaacaacgcggccaccggtgggttcgccggcctggcggagaccgagccggaggccgcccgcgagcagttcgacagcaacctcctggccccgctgctgctcacccggcagaccctggacgccctgtcggccgacggcgggggaaccgtgctgaacatcggctcggccggagctctgggccgccgggcctggccgcagaacggtgtctacggcgccgccaaggccgggctcgacttcctcacccggacctgggccgtcgaactggcaccccgcggcatccgtgtcctcggcctggcgcccggcgtgatcgacaccggcatcggtgaacgctcgggcatgtcacgggaggcctacgcgggcttcctcgggcagatcgccgcccgcgtcccggccggccgggtcggccggcccgaggacatcgcctggtgggccgtccagctggccgacccgcgcgccgcttacgcgaccggagcggtgctcgcggtcgacggcggtctgtccctcacctga

SEQ ID NO: 40582 - protein, 267 aa, Streptomyces galilaeus
MNRAARPTVRGMSAIAEPTAPRGVIVTGGGTGIGRATAHAFADRGDRVLVVGRTAATLAGTAEGHPGISVLTADLTDPDGPRAITDAALDALGRIDVLVNNAATGGFAGLAETEPEAAREQFDSNLLAPLLLTRQTLDALSADGGGTVLNIGSAGALGRRAWPQNGVYGAAKAGLDFLTRTWAVELAPRGIRVLGLAPGVIDTGIGERSGMSREAYAGFLGQIAARVPAGRVGRPEDIAWWAVQLADPRAAYATGAVLAVDGGLSLT

SEQ ID NO: 40583 - DNA, 813 bp, Nocardioides simplex
  CDS (1)..(813): transl_table=11
atgagcgcgaaccgtttcgtcggcaaggttgcattcatcaccggagcggcgcggggccagggccgcgccgaggcagtgcggctggcatccgagggcgccgacatcatcgcgatcgacgcgtgtgccgacttcgactccaccgcctacgacggcgccaccgaggcggacctcgccgagaccgtcgcacaggtcgaggcacagggccgaaagatcgtcgccaccaagacggatgttcgcgacttcgccgcagtgtccgaagcgctcgcaaccggcatcgccgcgctgggccgactcgacgtcgtcgtcgcgaatgccggcatctgttcgggcgccatgtcgtgggagatcacccccgagcagtggcaggagacgctcgatgtcaacctcaccggcgtgttccacacctgcaaggccgcgatcccgcacctgatcgagcagggcgagggcggttcgatcgtcatcgccagctccgtggcgggtctgcgcgggctgccgttcctcggccactacgtggccagcaagcacggcgtcaccgggctcgcgaagacgctcgctgtcgaactcggcgcgcacaacattcgcgtcaacaccgttcatcccaacggcgtcgacacgggcatgcaggtcaacgacatgcacgcgctggtgcaggagtatgcgaccacgctggccccgatcttcatgggcagcctgcccgaccagatcagccggcccgaggacatcgccaacgccgtcgcgtggctggcgtcggacgaggcccggcacgtcaccggcatccagctgcccgtcgacctcgggactctcatccgctga

SEQ ID NO: 40584 - protein, 270 aa, Nocardioides simplex
MSANRFVGKVAFITGAARGQGRAEAVRLASEGADIIAIDACADFDSTAYDGATEADLAETVAQVEAQGRKIVATKTDVRDFAAVSEALATGIAALGRLDVVVANAGICSGAMSWEITPEQWQETLDVNLTGVFHTCKAAIPHLIEQGEGGSIVIASSVAGLRGLPFLGHYVASKHGVTGLAKTLAVELGAHNIRVNTVHPNGVDTGMQVNDMHALVQEYATTLAPIFMGSLPDQISRPEDIANAVAWLASDEARHVTGIQLPVDLGTLIR

SEQ ID NO: 40585 - DNA, 750 bp, Spodoptera littoralis
  CDS (1)..(750)
atgttcgcaaataaagtggtactagtaacaggtggtagctccggtatcggcgcagctactgtggaagcattcgttaaggaaggcgcttctgtagccttcgtgggaagaaaccaagccaagcttaaggaagtagagagccgctgccagcagcatggagccaacatcctggctatcaaagcagatgtctccaaagacgaggaagcgaaaatcatcgtacaacaaactgtcgacaagttcgggaagcttgatgtgcttgttaacaacgctgggattctacggttcgcgagtgttctggagccgactttaatacaaacttttgatgaaactatgaacacgaatttacgtccagttgtcctcatcactagcctggctatccctcatttgattgctacaaaagggagcatagttaacgtatccagtatactgtctacaatagtaagaataccagggattatgtcatacagtgtgtcaaaggctgctatggatcacttcacaaaattggcagcgttggagctggctccttctggcgtgcgagtgaactcagtcaaccctggaccagttcttactgatatcgcagctggttctggcttttctcctgatctgcttgaagatacaggggctcatacaccgttggggaaagctgcgcagtctgaggagattgctgatatgattgtgtatctggctagtgataaagctaagagtgttacggggtcctgttatatcatggacaatggactcgcgctgcagtaa

SEQ ID NO: 40586 - protein, 249 aa, Spodoptera littoralis
MFANKVVLVTGGSSGIGAATVEAFVKEGASVAFVGRNQAKLKEVESRCQQHGANILAIKADVSKDEEAKIIVQQTVDKFGKLDVLVNNAGILRFASVLEPTLIQTFDETMNTNLRPVVLITSLAIPHLIATKGSIVNVSSILSTIVRIPGIMSYSVSKAAMDHFTKLAALELAPSGVRVNSVNPGPVLTDIAAGSGFSPDLLEDTGAHTPLGKAAQSEEIADMIVYLASDKAKSVTGSCYIMDNGLALQ

SEQ ID NO: 40587 - DNA, 834 bp, Alcaligenes faecalis
  CDS (1)..(834): transl_table=11
atggcatggcttgaaggacaaagcgtttttttgacgggtggtgttgcaggtctcggtcgagcgctcgtaaaaagacttgtagaagaaggtgccaacgtcactgtgttggatcgaaatgcacgggggcttgatgagctcgttgaaagttttaagggacgggtcgcgggctcgcccggcgatgtgcgcaacttggccgataaccgcaaggccgtcgaactggctgtggagcgtttcggcaagctggatactttcaatcggcaacgccggcatctgggattattgtgtcccccttgtcgacctgccggacgatgccatcagcgaagctttgatgaggtcattggaatcaatctaatgggctacgtgatgggcatcaaagccgcagcgccggcgttggtgcgctcccgagggtcagttatcttgaccctgtcaagctccgctttctatgcaggtggcggcggcgtgctctataccgtagccaagcacgcggcagtgggactgattaagcaggcggcgcatgagttggccccctatgtgcgcgtcaacggtgtggcacctggcgggattgcttctgatctgcgtggaccgaagtcgcttgggatgggtgagcagtcgataacctctgtacccttggccgacctcgtcaaagacattgccccgatcggcaggctgtctgacacagaggagtacaccggtagctatgtctacctggcttctgcccgcaactcagcaccagcaaccggcgtgatcatcaactgcgatggtggcatgggtgtgcgaagcgtccttggccctgccagcggtggcaagggcttactagaaaaattcggcggctga

SEQ ID NO: 40588 - protein, 277 aa, Alcaligenes faecalis
MAWLEGQSVFLTGGVAGLGRALVKRLVEEGANVTVLDRNARGLDELVESFKGRVAGSPGDVRNLADNRKAVELAVERFGKLDTFNRQRRHLGLLCPPCRPAGRCHQRSFDEVIGINLMGYVMGIKAAAPALVRSRGSVILTLSSSAFYAGGGGVLYTVAKHAAVGLIKQAAHELAPYVRVNGVAPGGIASDLRGPKSLGMGEQSITSVPLADLVKDIAPIGRLSDTEEYTGSYVYLASARNSAPATGVIINCDGGMGVRSVLGPASGGKGLLEKFGG

SEQ ID NO: 40589 - DNA, 816 bp, Rhodococcus sp
  CDS (1)..(816): transl_table=11
gtgggatttctggacggcaaggtggcgctcgtcaccggcggcggatcgggtatcggccgcgctgtggtcgagctctacgtgcaagaaggcgcgaaagtgggggtcctcgaaatctctccggagaaggtgaaggacttgcgtaacgcactgcccgccgactccgtcgtggtgacggaaggcgacgccacgtcgatggctgataacgaacgcgccgtcgccgacgtcgtggacgcattcgggccgcttaccacgctcgtctgcgtggtcggcgtattcgactacttcaccgagattccacaactgcccaaggacaggatcagtgaggcgttcgatcaactcttcggcgtcaacgtaaagagcaatctgttgagtgtgaaggcggcgctcgaccagctgatcgagaacgagggcgacatcatccttaccctttccaacgccgccttctatcccggtggcggcggtccgctgtatgtgtcgtcaaagttcgctgtccgtggccttgtggccgaactcgcgtacgagctggcgccgaaggtacgcgtcaacggcgttgcaccaggcggcactatcaccgaactgcgcggcatcccggccctggccaacgagggccaaagcctcaaggacgtgccagacatcgagggtctaatcgagggcatcaatccgctgggcgtcgtcgcccagcctgaggatcactcttggtcatacgcgcttctcgcctcgcgggagcgtacctcggcggtgaccggcaccataatcaatagcgacggcggtctcggggtccgcggcatgacgcggatggcgggcctctcgcagtga

SEQ ID NO: 40590 - protein, 271 aa, Rhodococcus sp
MGFLDGKVALVTGGGSGIGRAVVELYVQEGAKVGVLEISPEKVKDLRNALPADSVVVTEGDATSMADNERAVADVVDAFGPLTTLVCVVGVFDYFTEIPQLPKDRISEAFDQLFGVNVKSNLLSVKAALDQLIENEGDIILTLSNAAFYPGGGGPLYVSSKFAVRGLVAELAYELAPKVRVNGVAPGGTITELRGIPALANEGQSLKDVPDIEGLIEGINPLGVVAQPEDHSWSYALLASRERTSAVTGTIINSDGGLGVRGMTRMAGLSQ

SEQ ID NO: 40591 - DNA, 801 bp, Sphingomonas xenophaga
  CDS (1)..(801): transl_table=11
atgtctaacaggcttgatggacaggtggcgctacttaccggtggcgccaccgggatcggggcggcggtggtcgcgcgttatattgaggagggtgccaaggttggcgtcctggtcaaggacgatgagcaggtagaactcgtgcgttcgcggcatggggacagcgtggtggccgtggcgggagacgtgcgttcctatgccgacaatgcccgcgccgtggcggaaaccgtggcggctttcggcaagctcgatgtatttgtcgggaacgttgggatctgggattttatggtcccgctcgaacagcaggatcccgagcaactcggcaaggtcttcgacgaaatcttcgacgtcaacctgaagggttatttctttggtgcccgcgccgccatccccgaactcaggaaggttaagggaagcatcattttcacggcctcgacctcgagttattataccggaggcggcggcacgctatacgtcgcctctaagcacgcggtgctcgggctgatcaagcaactggcttgggaactggcacccgaaatccgggttaacggcgttgcaccgggagggacccggaccccactcagcggcactcagacgggtggctttgcagaaatgaagatggaacagatgcccgggcttgacgaaatgatttccagcatgaccccgctcgggcggatagccgaaccagccgaccatgctggtctttacgcgcttttggcttcgcgccgggactcttcgtacctgactggcactatgctgctcagtgatggcggtagcggaatcggcaatcgtcctgatggttga

SEQ ID NO: 40592 - protein, 266 aa, Sphingomonas xenophaga
MSNRLDGQVALLTGGATGIGAAVVARYIEEGAKVGVLVKDDEQVELVRSRHGDSVVAVAGDVRSYADNARAVAETVAAFGKLDVFVGNVGIWDFMVPLEQQDPEQLGKVFDEIFDVNLKGYFFGARAAIPELRKVKGSIIFTASTSSYYTGGGGTLYVASKHAVLGLIKQLAWELAPEIRVNGVAPGGTRTPLSGTQTGGFAEMKMEQMPGLDEMISSMTPLGRIAEPADHAGLYALLASRRDSSYLTGTMLLSDGGSGIGNRPDG

SEQ ID NO: 40593 - DNA, 834 bp, Burkholderia xenovorans
  CDS (1)..(834): transl_table=11
atgaaactgaaaggtgaagcggtactgatcacggggggcgcctccggattagggcgcgcgctcgtggaccgattcgtggccgaaggcgccaaagtggcggtgctcgacaagtcggcagagcgccttgcagagctggaaaccgatcatggcgacaacgtgctcggcatcgtcggcgatgtgcgttcactggaagaccagaaacaggctgccagccgctgcgtggccaggttcgggaaaatcgacaccttgattcccaatgcaggcatctgggattactcgacggccttggtcgacctgcccgaagagagcctcgatgccgcgttcgatgaggtctttcacatcaatgtcaagggttatatccatgcagtgaaggcctgcctgccggccctggtcgccagccgtggcaacgtgatcttcacgatctccaatgcgggcttctatcccaatggcggcggccctctttacaccgcagccaagcacgccatcgtgggcctggtgcgtgaactggcgttcgagctggcgccatacgtgcgcgtcaacggcgtggggtcgggcggcatcaatagcgatctgagaggtccttcctcgctgggaatgggcagcaaggcgatttcgaccgtaccgctggccgacatgctgaagtcggtgctgccgattggtcgcatgcccgaggtcgaagagtacaccggggcctatgtgttttttgccacccgaggcgatgcggcgcctgcgaccggggccttgctgaactacgacggtggcttgggcgttcgtggattcttctcgggtgccggaggtaatgacttgctcgaacagctgaatatccatccctaa

SEQ ID NO: 40594 - protein, 277 aa, Burkholderia xenovorans
MKLKGEAVLITGGASGLGRALVDRFVAEGAKVAVLDKSAERLAELETDHGDNVLGIVGDVRSLEDQKQAASRCVARFGKIDTLIPNAGIWDYSTALVDLPEESLDAAFDEVFHINVKGYIHAVKACLPALVASRGNVIFTISNAGFYPNGGGPLYTAAKHAIVGLVRELAFELAPYVRVNGVGSGGINSDLRGPSSLGMGSKAISTVPLADMLKSVLPIGRMPEVEEYTGAYVFFATRGDAAPATGALLNYDGGLGVRGFFSGAGGNDLLEQLNIHP

SEQ ID NO: 40595 - DNA, 846 bp, Comamonas testosteroni
  CDS (1)..(846): transl_table=11
atgaagctgacaggtgaagtggcattgattaccggtggcgcctccggactggggcgcgccttggtcgaccggttcgtcgccgagggagcacgcgtggccgtgctcgacaagtcggccgagcgcctgcgggaactggaggtggcccatggagggaacgcggtaggcgtcgtcggcgatgtgcgctccctgcaggatcagaagcgcgccgccgagcgctgtcttgctgcattcggaaagatcgacacgcttattcctaatgcgggcatctgggactattcgaccgccttggccgatctgccggaagacaagatcgatgcggcattcgacgacatttttcatgtcaacgtgaagggctacatccacgccgtcaaggcctgcctgccagccctggtgtccagccgcggcagtgttgtcttcacgatctctaacgctggcttctatcccaacggcggcggcccgctctataccgcgaccaagcacgcagtggtgggcctagtccgccaaatggcgtttgagctggctcctcatgtgcgcgtcaacggcgtggcaccgggcggcatgaacaccgatctgcgcggtccctcttcgctcgggctgagcgaacagtcgatctcgtcggtgccgctcgccgacatgctgaaatcggtgctgccgatcggccgcatgccagcgctcgaagagtataccggtgcctatgtcttcttcgccacgcggggagattcgctgcccgccaccggcgccttactgaactacgacggcggcatgggcgttcgaggttttttgacggcagcgggcggcgccgacctgcccgagaagctgaacatcaatcgcgagggacaagaatga

SEQ ID NO: 40596 - protein, 281 aa, Comamonas testosteroni
MKLTGEVALITGGASGLGRALVDRFVAEGARVAVLDKSAERLRELEVAHGGNAVGVVGDVRSLQDQKRAAERCLAAFGKIDTLIPNAGIWDYSTALADLPEDKIDAAFDDIFHVNVKGYIHAVKACLPALVSSRGSVVFTISNAGFYPNGGGPLYTATKHAVVGLVRQMAFELAPHVRVNGVAPGGMNTDLRGPSSLGLSEQSISSVPLADMLKSVLPIGRMPALEEYTGAYVFFATRGDSLPATGALLNYDGGMGVRGFLTAAGGADLPEKLNINREGQE

SEQ ID NO: 40597 - DNA, 834 bp, Pseudomonas putida
  CDS (1)..(834): transl_table=11
atgaaattgacaggcgaagtggtgttgatcacgggaggcgcctccgggctggggcgagcgctcgtggatcgattcgtggccgaacgggcaaaagtggcagtgctggacaagtcggccgagcgtctcgcacagctggaaaccgatcatggcgacaacgtgcttggcgtcaccggcgatgtccgttcactggaagatcagaagcaggcggccagccgctgcgtggccaagttcggaaaaatcgacaccctgatccccaatgcaggcatttgggattactcgacggccttgatcgacctgcccgaagagagcctcgatgccgcgttcgatgaggtctttcacatcaatgtcaagggttatatccatgcagtgaaggcctgcctgccggccctggtcgccagccgtggcaacgtgatcttcacgatctccaatgcgggcttctatcccaatggcggaggccctctctacaccgcagccaagcacgccgtggtgggtctggtgcgtgagctggcgttcgagctggcgccatacgtgcgcgtcaacggcgtggggccgggcggcatcaatagcgatctgagaggcccctcctcgctggggatgggcggcaaggcgatttcgaccgtgccgcttgccgacatgctcaagtcggtgcttccgatcggccgcatgcctgaggccgaggagtacaccggggcctatgtgttttttgccacgcgaggtgatgcggcgcctgcgaccggggccttgctgaactacgacggtggcttgggcgttcgtggattcttctcgggtgccgggggtaatgacttgctcgaaagactgaatatcaattcctga

SEQ ID NO: 40598 - protein, 277 aa, Pseudomonas putida
MKLTGEVVLITGGASGLGRALVDRFVAERAKVAVLDKSAERLAQLETDHGDNVLGVTGDVRSLEDQKQAASRCVAKFGKIDTLIPNAGIWDYSTALIDLPEESLDAAFDEVFHINVKGYIHAVKACLPALVASRGNVIFTISNAGFYPNGGGPLYTAAKHAVVGLVRELAFELAPYVRVNGVGPGGINSDLRGPSSLGMGGKAISTVPLADMLKSVLPIGRMPEAEEYTGAYVFFATRGDAAPATGALLNYDGGLGVRGFFSGAGGNDLLERLNINS

SEQ ID NO: 40599 - DNA, 843 bp, Rhodococcus globerulus
  CDS (1)..(843): transl_table=11
gtgagactccaggatgaggttgtcctcgtcaccggcggttgtgccggcctgggacgcgctatcgtagatcggttcgtctgcgagggcgccagggttgccgtgctcgaccggtctgttgcaggtctcgaggagctgcgtgccgctcatggtgacgcggtcgtggccgtcgagggagacgtccgttatctcgacagtcacaaggagaccgtcgcgaagtgcgtcgagacatttggaaagctagattgctacatcggaaacgcgggagtttgggactactcgacggcgctcgtcgaaattccagaggaccgtctcgatgaggcgttcgacgagatgtactccatcaatgtgaagggctacctcctcggcgtcaaggccgctctgggggccctctacgccagcaggggcagcgtcatcttcacggtgtccaatgctggcttctaccctgccggtggtggcgctctctacacgggcgcgaagcacgcgatcgtcggcatggtcaagcagctggcctacgagctaggcccacacatcagggtgaatggaatcgcgccaggcggcctcgggggaagcgatctgcgaggtctcaaggccctcgacctcgccgaggtctcgctctcgaaggtcccgctgggcgacatgctcaaggacatcctcccgacggggcagatggcctccgccgaggagtcgacgggcgcctatgtcttcttcgccacccggtccgaaaccgtgcctctgacagggagtgttcttaactacgacggcgggatcggggtacggggcatgtccgaggcaaatcgcggcgacctattggatcagttctactcaaagggagcgctagtatga

SEQ ID NO: 40600 - protein, 280 aa, Rhodococcus globerulus
MRLQDEVVLVTGGCAGLGRAIVDRFVCEGARVAVLDRSVAGLEELRAAHGDAVVAVEGDVRYLDSHKETVAKCVETFGKLDCYIGNAGVWDYSTALVEIPEDRLDEAFDEMYSINVKGYLLGVKAALGALYASRGSVIFTVSNAGFYPAGGGALYTGAKHAIVGMVKQLAYELGPHIRVNGIAPGGLGGSDLRGLKALDLAEVSLSKVPLGDMLKDILPTGQMASAEESTGAYVFFATRSETVPLTGSVLNYDGGIGVRGMSEANRGDLLDQFYSKGALV

SEQ ID NO: 40601 - DNA, 825 bp, Oryza sativa
  CDS (1)..(825)
atggcaggcagctcccatgtttctgctgatgcaaggaagctggtgggcaaggtggcggtgatcaccggcggcgcgagcggcatcggcgcgtgcacggcgcggctgttcgtgaagcacggcgcccgcgtcgtggtcgccgacatccaggacgagctgggagctagcctcgtcgcggagctcggcccggacgcctccagctacgtgcactgcgacgtcacgaacgagggcgacgtcgccgccgcggtcgaccacgccgtcgccacgttcgggaagctcgacgtcatgttcaacaacgccggcgtcaccggcccgccgtgcttcaggatcaccgagagcaccaaggaggacttcgagcgcgtgctggccgtgaacctgatcggcccgttcctcggcaccaagcacgcggcgcgggtgatggcgccggcgcgccgtggcagcatcatctcgacggcgagcctgtcgtcgtcggtgtccggcacggcgtcgcacgcgtacacgacgtcgaagcgcgccctggtggggttcacggagaacgcggccggcgagttgggccggcacgggatccgcgtcaactgcgtttcccccgccgcggtcgccacgccgctggctagggctgccatgggtatggacatggacgacgagaccattgaggcgatcatggagaagtcggcgaacctaaagggcgttggactcaaggtggacgacatcgccgccgcggcgctgttcctcgccagcgacgacgggcggtacgtgagcggccagaacctgcgcgtcgacggcggcgtgtccgtcgtcaactcgagctttggtttcttcagggactga

SEQ ID NO: 40602 - protein, 274 aa, Oryza sativa
MAGSSHVSADARKLVGKVAVITGGASGIGACTARLFVKHGARVVVADIQDELGASLVAELGPDASSYVHCDVTNEGDVAAAVDHAVATFGKLDVMFNNAGVTGPPCFRITESTKEDFERVLAVNLIGPFLGTKHAARVMAPARRGSIISTASLSSSVSGTASHAYTTSKRALVGFTENAAGELGRHGIRVNCVSPAAVATPLARAAMGMDMDDETIEAIMEKSANLKGVGLKVDDIAAAALFLASDDGRYVSGQNLRVDGGVSVVNSSFGFFRD

SEQ ID NO: 40603 - DNA, 1044 bp, Linum usitatissimum
  CDS (1)..(1044)
atggatctgattcacacgttcctcaactttgtagctccaccattcacattcttctccctctgcttcctccttccgccttacttcctcttcaagaccttcacctcagcggtgtcctatgtcttcagcgagaatgtctccggcaaggtcatcctcatcaccggcgcctcctctggcatcggcgagcatctggcttatgagtatgggagcagaggcgcatgtttggtactggtggcacgcagagaaaaaggacttagagaagtagttgaccttgcccttgaactcggatctcctcaagtcattatgatcgtcggagatgtccaaaaggtcgatgactgccgcagaatcgtcaacgagaccattaaccatttcggcagactggatcacttggtgaacaatgctgagatcggttcagtctgcttctttgaagatgcaactgatgtcaccaacttccgtaccataatggacaccaacttctggggttcggcttacataacccaattcgcaattccgtacctgctacaagcggctggcaagatcattgctctctcttcagcaggttcttggctccctgagccaaggatgaccatctacaatgcaagcaaggcagctatggtggcattcttcgagactcttagagtcgagctaagcccagacataggcgtcctaatcgtcacccctggttacatcgagtcggagctcacacaaggcaaattcatgacagctgaaggcaggatggatgtagatcaagatttgagagatgaaaaatttggtccgataccggtggcgtccgtggtaagcacggcgaagggaatcgtgaatagtgcgtgcagaggggataagtacctgacggtgccggcatgggtgagaacgacgtggttatggaagatcttctgccctgatgctgttgagttgggttaccgcttgttcttcaccagcggccgtcccggtgagccggctcccagcaagaaaatgcttgatatgactggagctcagggattgatgtacccttattccatcctcaaccctgccatcaagacagtttaa

SEQ ID NO: 40604 - protein, 347 aa, Linum usitatissimum
MDLIHTFLNFVAPPFTFFSLCFLLPPYFLFKTFTSAVSYVFSENVSGKVILITGASSGIGEHLAYEYGSRGACLVLVARREKGLREVVDLALELGSPQVIMIVGDVQKVDDCRRIVNETINHFGRLDHLVNNAEIGSVCFFEDATDVTNFRTIMDTNFWGSAYITQFAIPYLLQAAGKIIALSSAGSWLPEPRMTIYNASKAAMVAFFETLRVELSPDIGVLIVTPGYIESELTQGKFMTAEGRMDVDQDLRDEKFGPIPVASVVSTAKGIVNSACRGDKYLTVPAWVRTTWLWKIFCPDAVELGYRLFFTSGRPGEPAPSKKMLDMTGAQGLMYPYSILNPAIKTV

SEQ ID NO: 40605 - DNA, 789 bp, Hordeum vulgare
  CDS (1)..(789)
atggcggccggcggcatgagcagggaggagaggtggagcctggccggcgcgacggcgctcgtcaccggcggcagcaaaggcatcggccaggcgatcgtggaggagctggcggggcacggggcgcgggtgcacacgtgcgccaggagcgcggcggagctggaggagtgccgccgccggtgggaggccaaggggctcccggtcaccgtctccgtctgcgacgtctccctgcgcgccagcagggagcagctcgtggagacggtcaagcaagtcttcggcggcaagctcgacatactggtgaacaacgcggcacagattcttgccaaggcggccgtggagtggacatcggaggagtactcgcacctcatggcgaccaatctagagtcgtgcttccacctcagccagctcgcgcaccccttgctcctcaacgcctccatcgctggaggtagcatcgtcaacatatcctcccttgggggcacacttggtttcacgggccttgcgctttacagtatgacaaaaggaggaataaaccagcttacaaggagccttgctactgaatgggcccagaacaagatccgggtgaattgcgtcgccccgggcgcgaccaagagtgacatgttaagcagtctcccactggagattagagagaacgagttggcgaggactccaatgcggcgggcaggcgagccagcggaggtggctgcaatggtgtcgttcctctgcatgccggcggcatccttcgtcaccggccaggtcatcgccgtcgacggtggtcggacaattagtgcttag

SEQ ID NO: 40606 - protein, 262 aa, Hordeum vulgare
MAAGGMSREERWSLAGATALVTGGSKGIGQAIVEELAGHGARVHTCARSAAELEECRRRWEAKGLPVTVSVCDVSLRASREQLVETVKQVFGGKLDILVNNAAQILAKAAVEWTSEEYSHLMATNLESCFHLSQLAHPLLLNASIAGGSIVNISSLGGTLGFTGLALYSMTKGGINQLTRSLATEWAQNKIRVNCVAPGATKSDMLSSLPLEIRENELARTPMRRAGEPAEVAAMVSFLCMPAASFVTGQVIAVDGGRTISA

SEQ ID NO: 40607 - DNA, 1050 bp, Brassica napus
  CDS (1)..(1050)
atggaattgataaacgatttcctcaatctaactgcacctttctttactttctttggtctttgcttcttcttgccccctttttatttcttcaagttcgtgcagtctatcttctcgacaattttctctgaaaacctatatgggaaagtggttctcatcactggtgcttcctccgggatcggcgagcaattggcatatgagtacgcaagtaaaggtgcatgtttggctctgactgcccgaaggaagaaccgtctagaggaagtggcagagattgctcgtgaagttggatcccctaatgttgtcacagttcacgctgatgtttccaaacctgatgattgtagacgaatcgtcgatgagaccatctcccattttggcagattggatcatcttgtaaacaatgctggaataatgcaaatttcaatgttcgaaaacattgaagaaataactaggacaagagcagttatggatactaacttttggggagcggtttatacaactcgtgctgcgcttccgtaccttcgacaaagcaatggtaagattgtggctatgtcgtcctctgcggcatggctaaccgccccaaggatgagcttttataatgctagcaaagcagctttgttgaacttcttcgagacgttgaggattgagcttggtagcgatgtacacattacaatcgtcacacctggttatattgaatctgaactcacacaaggcaagtacgtctctggtgaaggcgagctagtagtcaaccaagacattagagatgttcaaattggagcatttccggtaacgtcagtatcaggttgtgccaaggggatagtgaaaggtgtgtgtaggaaagagagatacgtgaccgaaccatcgtggtttaaggtgacgtacctttggaaagtgttttgtccggaactgatcgagtggggttgcagattgatgttcttgtccggacatggtacgccggaggaaaatgcactcaacaagaagatcctggacatacctggtgtacgtagtgctctataccctgaatctatcagaacgccagaaatcaagtcggagtag

SEQ ID NO: 40608 - protein, 349 aa, Brassica napus
MELINDFLNLTAPFFTFFGLCFFLPPFYFFKFVQSIFSTIFSENLYGKVVLITGASSGIGEQLAYEYASKGACLALTARRKNRLEEVAEIAREVGSPNVVTVHADVSKPDDCRRIVDETISHFGRLDHLVNNAGIMQISMFENIEEITRTRAVMDTNFWGAVYTTRAALPYLRQSNGKIVAMSSSAAWLTAPRMSFYNASKAALLNFFETLRIELGSDVHITIVTPGYIESELTQGKYVSGEGELVVNQDIRDVQIGAFPVTSVSGCAKGIVKGVCRKERYVTEPSWFKVTYLWKVFCPELIEWGCRLMFLSGHGTPEENALNKKILDIPGVRSALYPESIRTPEIKSE

SEQ ID NO: 40609 - DNA, 1050 bp, Brassica napus
  CDS (1)..(1050)
atggaattgataaacgatttcctcaatctaactgcacctttctttactttctttggtctttgcttcttcttgccccctttttatttcttcaagttcgtgcagtctatcttctcgacaattttctctgaaaacgtatatgggaaagtggttctcatcactggtgcttcctccgggatcggcgagcaattggcatatgagtacgcaagtaaaggtgcatgtttggctctgactgcccgaaggaagaaccgtctagaggaagtggcagagattgctcgtgaagttggatcccctaatgttgtcacagttcacgctgatgtttccaaacctgatgattgtagacgaatcgtcgatgagaccatctcccattttggcagattggatcatcttgtaaataatgctggaataacgaagatttcaatgttcgaaaacattgaagaaataactaggacaagatcagttatggatactaacttttggggatcagtttatacaactcgtgctgcgcttccgtaccttcgacaaagcaatgggaagattgtggctatgtcgtcctctgcggcatggctaaccgccccaaggatgagcttttataatgcgagcaaagccgctttgttgaacttcttcgagacgttgaggattgagcttggcagagatgtacacattacaatcgtcacacctggttatattgaatctgaactcacacaaggcaagtacttctctggtgaaggcgagctagtagtcaaccaagacattagagatgttcaaattggagcatttccagtaacgtcggtatcaggttgtgccaaggggatagtgaaaggtgtgtgtaggaaacagagatacgtgaccgaaccatcgtggtttaaggtgacgtacctttggaaagtgttttgtccggaactgatcgagtggggttgcaggttgctgttcttgtccggacatggtacgtcggaggaaaatgcactcaacaagaagatcttggacatacctggtgtacgtagtgctctataccctgaatctatcagaacgccagaaatcaagtcggagtag

SEQ ID NO: 40610 - protein, 349 aa, Brassica napus
MELINDFLNLTAPFFTFFGLCFFLPPFYFFKFVQSIFSTIFSENVYGKVVLITGASSGIGEQLAYEYASKGACLALTARRKNRLEEVAEIAREVGSPNVVTVHADVSKPDDCRRIVDETISHFGRLDHLVNNAGITKISMFENIEEITRTRSVMDTNFWGSVYTTRAALPYLRQSNGKIVAMSSSAAWLTAPRMSFYNASKAALLNFFETLRIELGRDVHITIVTPGYIESELTQGKYFSGEGELVVNQDIRDVQIGAFPVTSVSGCAKGIVKGVCRKQRYVTEPSWFKVTYLWKVFCPELIEWGCRLLFLSGHGTSEENALNKKILDIPGVRSALYPESIRTPEIKSE

SEQ ID NO: 40611 - DNA, 882 bp, Glycine max
  CDS (1)..(882)
atggcttcgggtgaaaagaaattcccacctcaacaacaacaaacacagcctgggaaggagcatgctatgaatccagtaccccaattcactagccctgactacaagccttcaaataaacttcaaggaaagatagcattagtgactgggggtgactctgggattggacgagcggtgtgtaacttgtttgccttagaaggtgctaccgtgggcttcacatatgtgaaggggcatgaggacaaggacgcgagggacacgttggaaatgatcaagagggcaaagacttcggatgctaaagatccaatggcggtaccagctgatttgggttacgacgagaattgcaagagagtggttgatgaggtcgtgaatgcttatggttgtattgacattctggtcaacaatgcagctgagcaatacgagtgtggaacagtggaggacattgatgagcctaggcttgagagggtctttcgtacaaatatcttctcctatttcttcatgaccaggcatgccttgaagcacatgaaggaaggaagcagcattatcaacacgacatcggtgaatgcatacaagggaaatgcgaaactattggactacacgtccacgaagggagcaattgtggcctatacaaggggacttgctcttcagttggtgagtaagggaattcgggttaatggggtggctcctgggcctatttggaccccattgataccctcctctttcaaggaggaagaaacggctcaatttggtgcccaggtgccaatgaagagagctggccagcctattgaggttgctccgtcttatgtttttcttgcttgcaaccaatgctcctcttacataactggacaagtccttcaccccaatggtggaaccgttgtcaatggttaa

SEQ ID NO: 40612 - protein, 293 aa, Glycine max
MASGEKKFPPQQQQTQPGKEHAMNPVPQFTSPDYKPSNKLQGKIALVTGGDSGIGRAVCNLFALEGATVGFTYVKGHEDKDARDTLEMIKRAKTSDAKDPMAVPADLGYDENCKRVVDEVVNAYGCIDILVNNAAEQYECGTVEDIDEPRLERVFRTNIFSYFFMTRHALKHMKEGSSIINTTSVNAYKGNAKLLDYTSTKGAIVAYTRGLALQLVSKGIRVNGVAPGPIWTPLIPSSFKEEETAQFGAQVPMKRAGQPIEVAPSYVFLACNQCSSYITGQVLHPNGGTVVNG

SEQ ID NO: 40613 - DNA, 963 bp, Glycine max
  CDS (1)..(963)
atggcttccattgccggatccaactgcgtcgctctccgaaccgccaacttcggcgcctccggtaaccggaaaatcggccagatccgccaatggtctccgattctcacgaatctccgtcccgtttccggtcttcgtcaccgatcgaatactccgtttagctcctccggtgtgagagcacaggttgctactctggaggaagcaggaaccggagcaactcagaaagtggaagcgccggttgcagtggtgaccggagcttccagaggcattggaaaagcgattgcactgtcattaggtaaagcaggttgcaaggttctggtcaactatgcaaggtcatccaaggaagctgaggaggtttccaaggagattgaggagtttggtggtcaagctcttacatttggtggagatgtttctaacgaggctgatgtggagtctatgattaaaactgcagttgatgcttggggaacagttgatgtattaataaacaatgcaggaataacaagagatggtttattaatgagaatgaagaaatctcaatggcaggatgttattgatctaaatctcactggtgtttttctttgcacacaggctgctgctaagattatgatgaagaaaaagaagggaaggatcgtcaatattgcatcagttgttggtttggttggcaatgttggacaagccaattatagtgctgcaaaagcaggagtaattggcctgacaaaaactgttgcgaaggaatatgctagtagaaacatcactgttaatgcagttgctccagggtttattgcatctgacatgactgccaagctaggacaagacattgagaaaaagattttggagacaatcccattaggaagatatggccagccagaggaagttgctggactggttgaattcttggctcttaatcaagctgccagttacatcactgggcaggttttcaccattgatggaggtatggtgatgtaa

SEQ ID NO: 40614 - protein, 320 aa, Glycine max
MASIAGSNCVALRTANFGASGNRKIGQIRQWSPILTNLRPVSGLRHRSNTPFSSSGVRAQVATLEEAGTGATQKVEAPVAVVTGASRGIGKAIALSLGKAGCKVLVNYARSSKEAEEVSKEIEEFGGQALTFGGDVSNEADVESMIKTAVDAWGTVDVLINNAGITRDGLLMRMKKSQWQDVIDLNLTGVFLCTQAAAKIMMKKKKGRIVNIASVVGLVGNVGQANYSAAKAGVIGLTKTVAKEYASRNITVNAVAPGFIASDMTAKLGQDIEKKILETIPLGRYGQPEEVAGLVEFLALNQAASYITGQVFTIDGGMVM

SEQ ID NO: 40615 - DNA, 804 bp, Glycine max
  CDS (1)..(804)
atgacaaaacaaagttctaggttggagggtaaggtggctcttatcactggagcagcaagtgggattggtgaagagacagtgagattgttcgctgaacatggagcacttattgttgcaacagatattcaagatgaacaaggtcaccgagttgctgcttcaatagggtcagagagagtgacttaccatcattgtgatgtgagagatgaaaaccaagttgaagaaacaatcaatttcactttggaaaaacatggtcgcatagatgttttgttcagcaacgctggagtaataggttccttatctgggatccttgaccttgatctgaatgagtttgacaacaccatggccacaaatgttcgtggtgtagctgccacaattaagcacacggcacgtgccatggttgctaaaagcacccgtggatccatcatatgcaccactagtgtggctgctactattggtggaacaggtcctcatggttataccacatcaaaacatgctcttctggggttggtgaaatcagcttgtagtgaacttggtgcttatggaataagagttaatagcatatcccctttcggagttgcaacacctcttgcatgcaaagctttcaactttgagcctgagcaagttgaagctaatagctgctcacaggctaatctgaagggtgttgtgttgaaggctaggcatatagctgaagcagctttgtttcttgcttctgatgatgctgctgtttacatcagtggtcacaacttggtggtggatggtgggttctctgtggttaatagaagttattctttcacaccagcttaa

SEQ ID NO: 40616 - protein, 267 aa, Glycine max
MTKQSSRLEGKVALITGAASGIGEETVRLFAEHGALIVATDIQDEQGHRVAASIGSERVTYHHCDVRDENQVEETINFTLEKHGRIDVLFSNAGVIGSLSGILDLDLNEFDNTMATNVRGVAATIKHTARAMVAKSTRGSIICTTSVAATIGGTGPHGYTTSKHALLGLVKSACSELGAYGIRVNSISPFGVATPLACKAFNFEPEQVEANSCSQANLKGVVLKARHIAEAALFLASDDAAVYISGHNLVVDGGFSVVNRSYSFTPA

SEQ ID NO: 40617 - DNA, 882 bp, Glycine max
  CDS (1)..(882)
atggcttccggtgaacagaaattccctcctcaacaacaacaaacacagcctgggaaggagcatgctatgactccagtaccccaattcactagccctgactacaagccttcaaataaacttcaagggaagattgcattagtcactgggggtgattctgggattggacgagcggtgtgtaacttgtttgccttagaaggtgctaccgtggccttcacgtatgtgaaggggcatgaggacaaggacgcgagggacacattggaaatgatcaagagagcaaagacttcggatgccaaggatccaatggcaataccatctgatttgggttacgatgagaactgcaagagggtggttgatgaggtcgtgagtgcttatggtcgtattgacattctggtcaacaatgcagctgagcagtacgagtgtggaaccgtggaggacatagacgagcctaggcttgagagggtctttcgtacaaatatcttctcctatttcttcatggcgaggcatgccttgaagcacatgaaggaaggaagcagcattatcaacacgacatcagtgaatgcatacaagggacatgcgaaactattggactacacgtccaccaagggggcaattgtggcctatacaaggggtcttgcccttcagctggtgagtaagggaattcgggttaatggggtggctccagggcccatttggacccctttgataccagcctctttcaaggaggaagaaacggcccaatttggagcgcaggtcccaatgaagagagctggtcaacctattgaggttgctccttcctatgtttttcttgcttccaaccaatgctcctcttacataactggacaagtccttcaccccaatggtggaaccgttgtgaatggttaa

SEQ ID NO: 40618 - protein, 293 aa, Glycine max
MASGEQKFPPQQQQTQPGKEHAMTPVPQFTSPDYKPSNKLQGKIALVTGGDSGIGRAVCNLFALEGATVAFTYVKGHEDKDARDTLEMIKRAKTSDAKDPMAIPSDLGYDENCKRVVDEVVSAYGRIDILVNNAAEQYECGTVEDIDEPRLERVFRTNIFSYFFMARHALKHMKEGSSIINTTSVNAYKGHAKLLDYTSTKGAIVAYTRGLALQLVSKGIRVNGVAPGPIWTPLIPASFKEEETAQFGAQVPMKRAGQPIEVAPSYVFLASNQCSSYITGQVLHPNGGTVVNG

SEQ ID NO: 40619 - DNA, 963 bp, Glycine max
  CDS (1)..(963)
atggcttccattgccggatccaactgcgtcgctctccgaaccgccaacttcggcgcctccggtaaccggaaaatcggccagatccgccaatggtctccgattctcacgaatctccgtcccgtttccggtcttcgtcaccgatcgaatactccgtttagctcctccggtgtgagagcacaggttgctactctggaggaagcaggaaccggagcaactcagaaagtggaagcgccggttgcagtggtgaccggagcttccagaggcattggcaaagcgattgcactgtcattaggtaaagcaggttgcaaggttctggtcaactatgcaaggtcatccaaggaagctgaggaggtttccaaggagattgaggagtttggtggtcaagctcttacatttggtggagatgtttctaacgaggatgacgtggagtctatgattaaaactgcagttgatgcttggggaacagttgatgtattaataaacaatgcaggaataactagagatggtttattaatgagaatgaagaaatctcaatggcaggatgttattgatctaaatctcactggtgtttttctttgcacccaggctgctgctaagattatgatgaagaaaagaaagggaagaattgtcaatattgcatcagttgttggtttggttggcaatgttggacaagccaattatagtgctgcgaaagcaggagtaattggcctgacaaaaactgttgcaaaggaatatgctagcagaaacatcactgttaatgcagttgctccagggtttattgcatccgacatgactgccaagctaggacaagacattgagaaaaagattttggagacgatcccattaggaagatatggccaaccagaagaagttgccggactggttgaattcttggctcttaatcaagctgccagttacatcactgggcaggttttcaccattgatggaggtatggtgatgtaa

SEQ ID NO: 40620 - protein, 320 aa, Glycine max
MASIAGSNCVALRTANFGASGNRKIGQIRQWSPILTNLRPVSGLRHRSNTPFSSSGVRAQVATLEEAGTGATQKVEAPVAVVTGASRGIGKAIALSLGKAGCKVLVNYARSSKEAEEVSKEIEEFGGQALTFGGDVSNEDDVESMIKTAVDAWGTVDVLINNAGITRDGLLMRMKKSQWQDVIDLNLTGVFLCTQAAAKIMMKKRKGRIVNIASVVGLVGNVGQANYSAAKAGVIGLTKTVAKEYASRNITVNAVAPGFIASDMTAKLGQDIEKKILETIPLGRYGQPEEVAGLVEFLALNQAASYITGQVFTIDGGMVM

SEQ ID NO: 40621 - DNA, 963 bp, Glycine max
  CDS (1)..(963)
atggcttccattgccggatccaactgcgtcgctctccgaaccgccaacttcggcgcctccggtaaccggaaaatcggccagatccgccaatggtctccgattctcacgaatctccgtcccgtttccggtcttcgtcaccgatcgaatactccgtttagctcctccggtgtgagagcacaggttgctactctggaggaagcaggaaccggagcaactcagaaagtggaagcgccggttgcagtggtgaccggagcttccagaggcattggcaaagcgattgcactgtcattaggtaaagcaggttgcaaggttctggtcaactatgcaaggtcatccaaggaagctgaggaggtttccaaggagattgaggagtttggtggtcaagctcttacatttggtggagatgtttctaacgaggctgatgtggagtctatgattaaaactgcagttgatgcttggggaacagttgatgtattaataaacaatgcaggaataactagagatggtttattaatgagaatgaagaaatctcaatggcaggatgttattgatctaaatctcactggtgtttttctttgcacccaggctgctgctaagattatgatgaagaaaagaaagggaagaattgtcaatattgcatcagttgttggtttggttggcaatgttggacaagccaattatagtgctgcaaaagcaggagtaattggcctgacaaaaactgttgcgaaggaatatgctagcagaaacatcactgttaatgcagttgctccagggtttattgcatctgacatgactgccaagctaggacaagacattgagaaaaagattttggagacgatcccattaggaagatatggccaaccagaggaagttgctggactggttgaattcttggctcttaatcaagctgccagttacatcactgggcaggttttcaccattgatggaggtatggtgatgtaa

SEQ ID NO: 40622 - protein, 320 aa, Glycine max
MASIAGSNCVALRTANFGASGNRKIGQIRQWSPILTNLRPVSGLRHRSNTPFSSSGVRAQVATLEEAGTGATQKVEAPVAVVTGASRGIGKAIALSLGKAGCKVLVNYARSSKEAEEVSKEIEEFGGQALTFGGDVSNEADVESMIKTAVDAWGTVDVLINNAGITRDGLLMRMKKSQWQDVIDLNLTGVFLCTQAAAKIMMKKRKGRIVNIASVVGLVGNVGQANYSAAKAGVIGLTKTVAKEYASRNITVNAVAPGFIASDMTAKLGQDIEKKILETIPLGRYGQPEEVAGLVEFLALNQAASYITGQVFTIDGGMVM

SEQ ID NO: 40623 - DNA, 1044 bp, Linum usitatissimum
  CDS (1)..(1044)
atggatctgattcacacgttcctcaactttgtagctccaccattcacattcttctccctctgcttcctccttccgccttacttcctcttcaagaccttcacctcagcggtgtcctatgtcttcagcgagaatgtctccggcaaggtcatcctcatcaccggcgcctcctctggcatcggcgagcatctggcttatgagtatgggagcagaggcgcatgtttggtactggtggcacgcagagaaaaaggacttagagaagtagttgaccttgcccttgaactcggatctcctcaagtcattatgatcgtcggagatgtccaaaaggtcgatgactgccgcagaattgtcaacgaaaccattaaccatttcggcagactggatcacttggtgaacaatgctgggatcagttcagtctgcttctttgaagatgcaaccgatgtcaccaacttccgtaccataatggacacgaacttctggggttcggcttacataacccaattcgcaattccgtacctgcgacaaacggctggcaagatcattgctctctcttcagcaggttcttggcttcctgagccaaggatgaccatctacaatgcaagcaaagcagctatggtggcattcttcgagacgctgagggtggagctaagcccagacataggtgtcctaatcgtcactcctggttacattgagtcggagctcacacaaggcaaattcatgacagctgaaggcaggatggatgtagatcaagatttgagagatgaaaaatttggtccgataccggtggcgtccgtggtaagcacggcgaagggaatcgtgaatagtgcgtgcagaggggataagtacctgacggtgccggcatgggtgagaacgacgtggttatggaagatcttctgccctgatgctgttgagttgggttaccgcttgttcttcaccagcggccgtcccggtgagccggctcccagcaagaaaatgcttgatatgactggagctcagggattgatgtacccttattccatcctcaaccctgccatcaagacagtttaa

SEQ ID NO: 40624 - protein, 347 aa, Linum usitatissimum
MDLIHTFLNFVAPPFTFFSLCFLLPPYFLFKTFTSAVSYVFSENVSGKVILITGASSGIGEHLAYEYGSRGACLVLVARREKGLREVVDLALELGSPQVIMIVGDVQKVDDCRRIVNETINHFGRLDHLVNNAGISSVCFFEDATDVTNFRTIMDTNFWGSAYITQFAIPYLRQTAGKIIALSSAGSWLPEPRMTIYNASKAAMVAFFETLRVELSPDIGVLIVTPGYIESELTQGKFMTAEGRMDVDQDLRDEKFGPIPVASVVSTAKGIVNSACRGDKYLTVPAWVRTTWLWKIFCPDAVELGYRLFFTSGRPGEPAPSKKMLDMTGAQGLMYPYSILNPAIKTV

SEQ ID NO: 40625 - DNA, 1077 bp, Zea mays
  CDS (1)..(1077)
atgcgcgcgctactgcatctgcggctcatcaatccgtgcagtcccagagcaccccgtcttcccgctactcccgcaagggcgctcgtcgcttccttctccggggcgtggcaggcaccttctggtagagcgagagcgagagcagcgccgccggcagttcgcgctatggcgtcccagcaggtgttccgggctcagcagcagcagcagcagcagttcccggctcagcagcaggagtcccagccggggaaggagcacgcgatggacccccggcccgaggccatcgtccaggactacaaggccgccaacaagctcaaggacaaggtggcgctcgtgaccggcggcgactccggcatcgggcgcgccgtgtgcctgtgcttcgcgaaggagggcgcgacggtggccttcaccttcgtgagggggcaggaggagaaggacgcggaggagacgctgcgtgcgctgcgcgacatcgggtccgagacgggcgcgcgcgagccgatggccctgcccgccgacctcgggtacgaggccaactgccgggaggtggtggagcgggtggcgtcggcgtacggcgggcgcatcgacgtggtggtgaacaacgcggcggagcagtacgagcgggagagcatcggggacgtgacggaggcggacctggagcgcgtgttccgcaccaacatcttctcctacttcctggtgtccaagcacgcggtgccgcgcatggagcccggcgcctgcatcatcaacacctcctccgtcaacgcgtacaagggcaacaagacgctgctggactacacggccaccaagggcgccatcgtggccttcacgcgcgcgctctcgctgcagctggccgacaggggcatccgcgtcaacggcgtcgcgccgggccccgtctggacgccgctcatcccggcgtccttcggcaaggagaaggtggagcagttcgggtcccaggtgcccatgaagcgcgccgcgcagccggccgagatcgcgcccagcttcgtcttcctcgccagcaaccaggattcgtcctacatgtccggccagatcctccacgtcaacggaggcgtcatcgtcaatagctag

SEQ ID NO: 40626 - protein, 358 aa, Zea mays
MRALLHLRLINPCSPRAPRLPATPARALVASFSGAWQAPSGRARARAAPPAVRAMASQQVFRAQQQQQQQFPAQQQESQPGKEHAMDPRPEAIVQDYKAANKLKDKVALVTGGDSGIGRAVCLCFAKEGATVAFTFVRGQEEKDAEETLRALRDIGSETGAREPMALPADLGYEANCREVVERVASAYGGRIDVVVNNAAEQYERESIGDVTEADLERVFRTNIFSYFLVSKHAVPRMEPGACIINTSSVNAYKGNKTLLDYTATKGAIVAFTRALSLQLADRGIRVNGVAPGPVWTPLIPASFGKEKVEQFGSQVPMKRAAQPAEIAPSFVFLASNQDSSYMSGQILHVNGGVIVNS

SEQ ID NO: 40627 - DNA, 915 bp, Zea mays
  CDS (1)..(915)
atggcgtcccagcaggtgttccgggctcagcagcagcagcagcagcagttcccggctcagcagcaggagtcccagccggggaaggagcacgcgatggacccccggcccgaggccatcgtccaggactacaaggccgccaacaagctcaaggacaaggtggcgctcgtgaccggcggcgactccggcatcgggcgcgccgtgtgcctgtgcttcgcgaaggagggcgcgacggtggccttcaccttcgtgagggggcaggaggagaaggacgcggaggagacgctgcgtgcgctgcgcgacatcgggtccgagacgggcgcgcgcgagccgatggccctgcccgccgacctcgggtacgaggccaactgccgggaggtggtggagcgggtggcgtcggcgtacggcgggcgcatcgacgtggtggtgaacaacgcggcggagcagtacgagcgggagagcatcggggacgtgacggaggcggacctggagcgcgtgttccgcaccaacatcttctcctacttcctggtgtccaagcacgcggtgccgcgcatggagcccggcgcctgcatcatcaacacctcctccgtcaacgcgtacaagggcaacaagacgctgctggactacacggccaccaagggcgccatcgtggccttcacgcgcgcgctctcgctgcagctggccgacaggggcatccgcgtcaacggcgtcgcgccgggccccgtctggacgccgctcatcccggcgtccttcggcaaggagaaggtggagcagttcgggtcccaggtgcccatgaagcgcgccgcgcagccggccgagatcgcgcccagcttcgtcttcctcgccagcaaccaggattcgtcctacatgtccggccagatcctccacgtcaacggaggcgtcatcgtcaatagctag

SEQ ID NO: 40628 - protein, 304 aa, Zea mays
MASQQVFRAQQQQQQQFPAQQQESQPGKEHAMDPRPEAIVQDYKAANKLKDKVALVTGGDSGIGRAVCLCFAKEGATVAFTFVRGQEEKDAEETLRALRDIGSETGAREPMALPADLGYEANCREVVERVASAYGGRIDVVVNNAAEQYERESIGDVTEADLERVFRTNIFSYFLVSKHAVPRMEPGACIINTSSVNAYKGNKTLLDYTATKGAIVAFTRALSLQLADRGIRVNGVAPGPVWTPLIPASFGKEKVEQFGSQVPMKRAAQPAEIAPSFVFLASNQDSSYMSGQILHVNGGVIVNS

SEQ ID NO: 40629 - DNA, 1077 bp, Zea mays
  CDS (1)..(1077)
atgagcagcaaggacgctgtgttgaacgcgttcctgagctgcttcatgcacgtgggcctggcgctggtgctcctcgtctacctccccgccgcctccgtcctccgcctcctcgtccgccccttgttggccaacaagcaggccgaggacctccgcggcaaggtcgtcctcgtcaccggcgcgtcatccggcatcggcgagcacctggtgtacgagtacgcgaggaacggcgcgtgcgtggcgctggtggcgcggacggaggtggcgctgcgcgccgtggccaaggcggcgcgcgacctcggctcccccgacgtgctggtcgtgccggccgacgtcaccaaggtggacgacgccaagcgcgccgtcgacgagaccctcgcgcacttcggcaaactgaatcatctggtggccaacgcggggatctggtccagctgcttttttgaggagatcaccaacataaccgccttccataatgtgatggacctcaacttctggggtgccgtgtacccgacctacttcgcgctgccgtacctcaaggccagccggggcaacatcgtggtgaccgcctccgtcgccggcagggtgccgacagccaggatgagcttctacaacgcaagcaaaggcgccgtgatacgtttctacgagacgctgagggctgagctggggtcccacgtgcacgtcaccatcctcacgcccggctacgtcgtctccaacctcaccaagggcaagggcctccagaaggacggccatgtcggcatcgacgaggaggcccgcgacatcaacgtggggccgatgccggtgggcaagacggagtcgctggccgaggtggtggtggccagcgtgcgccgtcgggactactacgtcacgtggcccggctggtactggcccttccacatggtcatgtgcgccgcgccggagctggtggactggttctcccgcaccttctacgtctccaagtccggcgaccaggacggcggcggcggcgcgctcagcaagaagatcctggaggccgtcggcgggaagaagttcctctacccccagaccatacgctcacagaccgccatggcagccaataactga

SEQ ID NO: 40630 - protein, 358 aa, Zea mays
MSSKDAVLNAFLSCFMHVGLALVLLVYLPAASVLRLLVRPLLANKQAEDLRGKVVLVTGASSGIGEHLVYEYARNGACVALVARTEVALRAVAKAARDLGSPDVLVVPADVTKVDDAKRAVDETLAHFGKLNHLVANAGIWSSCFFEEITNITAFHNVMDLNFWGAVYPTYFALPYLKASRGNIVVTASVAGRVPTARMSFYNASKGAVIRFYETLRAELGSHVHVTILTPGYVVSNLTKGKGLQKDGHVGIDEEARDINVGPMPVGKTESLAEVVVASVRRRDYYVTWPGWYWPFHMVMCAAPELVDWFSRTFYVSKSGDQDGGGGALSKKILEAVGGKKFLYPQTIRSQTAMAANN

SEQ ID NO: 40631 - DNA, 792 bp, Zea mays
  CDS (1)..(792)
atggcgccaggaggcagcggcgagcggtggagcctggccggcgcgacagcgctggtcaccggtggcagcaaggggatcgggcaagccgtcgtggaggagctggccaggctcggcgcgcgcgtgcacacgtgcgcccgcagcgcggcggacctggaggagtgccgccggcggtgggccgagaaggggctccgcgtcaccgtctccgtgtgcgacgtcgccgtgcgcgccgaccgggagaggctcgtcctggacacggtcagcgcggccttcgacggcaagctcgatatcctggtcaacaacgctgcgctgctgctgctcaagccggcggcggagtgggcggcggaggactacgcgcggatcatggcgaccaacctggagtcgtgcttgcacatctcccagctcgcgcacccgctgctcctcaacgcctccgtcgccggaggggcgagcatcgtcaacgtctcctccatcgccagcgtccttggcttcccgcaggaagttatgtacagcgtcaccaaaggaggactgaatcagatgacgagaagtctagctgtggagtgggcctgcgataggatccgtgtgaactgcgtcgcgccgggcgtgatcatgacggacatgggtaaagagctaccggcggcgttggtggagcaggagcggtcacgcatcccgctgcggcggaccggcgagccggaggaggtggcgtccctggtgtcgttcctctgcatgccggcggcgtcctacgtcaccgggcaggtcatcttcgtcgacggcggccggaccattagtggcgcctga

SEQ ID NO: 40632 - protein, 263 aa, Zea mays
MAPGGSGERWSLAGATALVTGGSKGIGQAVVEELARLGARVHTCARSAADLEECRRRWAEKGLRVTVSVCDVAVRADRERLVLDTVSAAFDGKLDILVNNAALLLLKPAAEWAAEDYARIMATNLESCLHISQLAHPLLLNASVAGGASIVNVSSIASVLGFPQEVMYSVTKGGLNQMTRSLAVEWACDRIRVNCVAPGVIMTDMGKELPAALVEQERSRIPLRRTGEPEEVASLVSFLCMPAASYVTGQVIFVDGGRTISGA

SEQ ID NO: 40633 - DNA, 21 bp, Artificial sequence
  primer
atgagcgatctgcataacgag

SEQ ID NO: 40634 - DNA, 22 bp, Artificial sequence
  primer
ttaaagatccagcccagccgct

SEQ ID NO: 40635 - protein, 331 aa, Artificial sequence
  consensus sequence
  Variant (3)..(5): Xaa in position 3 to 5 is any amino acid
  Variant (7)..(7): Xaa in position 7 is any amino acid
  Variant (9)..(18): Xaa in position 9 to 18 is any amino acid
  Variant (21)..(41): Xaa in position 21 to 41 is any amino acid
  Variant (42)..(63): Xaa in position 42 to 63 is any or no amino acid
  Variant (65)..(81): Xaa in position 65 to 81 is any amino acid
  Variant (82)..(83): Xaa in position 82 to 83 is any or no amino acid
  Variant (85)..(86): Xaa in position 85 to 86 is any amino acid
  Variant (87)..(87): Xaa in position 87 is any or no amino acid
  Variant (89)..(93): Xaa in position 89 to 93 is any amino acid
  Variant (96)..(116): Xaa in position 96 to 116 is any amino acid
  Variant (117)..(135): Xaa in position 117 to 135 is any or no amino acid
  Variant (137)..(174): Xaa in position 137 to 174 is any amino acid
  Variant (175)..(190): Xaa in position 175 to 190 is any or no amino acid
  Variant (192)..(194): Xaa in position 192 to 194 is any amino acid
  Variant (196)..(196): Xaa in position 196 is any amino acid
  Variant (198)..(205): Xaa in position 198 to 205 is any amino acid
  Variant (207)..(212): Xaa in position 207 to 212 is any amino acid
  Variant (213)..(216): Xaa in position 213 to 216 is any or no amino acid
  Variant (220)..(222): Xaa in position 220 to 222 is any amino acid
  Variant (225)..(277): Xaa in position 225 to 277 is any amino acid
  Variant (278)..(328): Xaa in position 278 to 328 is any or no amino acid
TGXXXGXGXXXXXXXXXXGAXXXXXXXXXXXXXXXXXXXXXXXXXXXXXXXXXXXXXXXXXXXDXXXXXXXXXXXXXXXXXXXGXXXDXXXXXAGXXXXXXXXXXXXXXXXXXXXXXXXXXXXXXXXXXXXXXXXNXXXXXXXXXXXXXXXXXXXXXXXXXXXXXXXXXXXXXXXXXXXXXXXXXXXXXXYXXXKXAXXXXXXXXAXXXXXXXXXXRVNXXXPGXXXXXXXXXXXXXXXXXXXXXXXXXXXXXXXXXXXXXXXXXXXXXXXXXXXXXXXXXXXXXXXXXXXXXXXXXXXXXXXXXXXXXXXXXXXXXXXXXXXXXXXXDGG

SEQ ID NO: 40636 - protein, 24 aa, Artificial sequence
  protein pattern
  Variant (2)..(2): Xaa in position 2 is any or no amino acid
  Variant (4)..(5): Xaa in position 4 to 5 is any amino acid
  Variant (6)..(6): Xaa in position 6 is any or no amino acid
  Variant (8)..(8): Xaa in position 8 is Phe, Ile or Leu
  Variant (10)..(12): Xaa in position 10 to 12 is any amino acid
  Variant (13)..(13): Xaa in position 13 is Ala, Cys, Ser, Thr or Val
  Variant (14)..(19): Xaa in position 14 to 19 is any amino acid
  Variant (21)..(22): Xaa in position 21 to 22 is any amino acid
  Variant (23)..(23): Xaa in position 23 is any or no amino acid
TXGXXXGXGXXXXXXXXXXGXXXV

SEQ ID NO: 40637 - DNA, 984 bp, Escherichia coli
  CDS (1)..(984): transl_table=11
atgcctacaaaaatgagaacaacccgtaatctattattaatggctacgctattaggtagcgcactatttgccagggctgcggaaaaagaaatgaccattggcgcaatataccttgatactcagggatactacgctggagtgcgtcagggcgttcaggatgcggcaaaagattcctcagtacaagttcagttaatagaaactaacgcccagggtgatatttcgaaagaaagtacctttgttgataccctcgtggcgcgtaatgtcgatgccattattttatcggcagtgtctgaaaatggcagtagccgtaccgttcgtcgcgccagtgaagcgggcattccggtgatttgctacaacacctgtattaatcaaaagggggtcgataaatatgtctcggcgtatctggtcggcgatccgctggaatttggtaaaaaactgggtaacgctgccgctgattattttattgccaataaaattgaccagccgaaaattgccgtcatcaattgcgaagcctttgaagtttgtgtgcagcgacgtaaaggatttgaagaagttttaaaatcccgcgttcccggcgcgcaaattgtcgctaatcaggaagggactgttttagataaagcgatttccgttggtgaaaaactaattatctccacgccggatctcaacgccattatgggggaatcgggcggtgcgacactcggcgcggtaaaagcggtacgtaatcaaaatcaggccggaaaaattgctgttttcggttcggatatgacaaccgaaattgctcaggagctggaaaacaatcaggtgctgaaagcggtagtggatatttccggtaagaaaatgggcaatgctgttttcgcgcaaacattgaaggttatcaataaacaagccgacggtgaaaaagtgattcaggtgcctatcgatctctataccaaaacggaagacggtaaacagtggctggcaacgcacgttgatggtctgccctaa

SEQ ID NO: 40638 - protein, 327 aa, Escherichia coli
MPTKMRTTRNLLLMATLLGSALFARAAEKEMTIGAIYLDTQGYYAGVRQGVQDAAKDSSVQVQLIETNAQGDISKESTFVDTLVARNVDAIILSAVSENGSSRTVRRASEAGIPVICYNTCINQKGVDKYVSAYLVGDPLEFGKKLGNAAADYFIANKIDQPKIAVINCEAFEVCVQRRKGFEEVLKSRVPGAQIVANQEGTVLDKAISVGEKLIISTPDLNAIMGESGGATLGAVKAVRNQNQAGKIAVFGSDMTTEIAQELENNQVLKAVVDISGKKMGNAVFAQTLKVINKQADGEKVIQVPIDLYTKTEDGKQWLATHVDGLP

SEQ ID NO: 40639 - DNA, 942 bp, Mesorhizobium loti MAFF303099
  CDS (1)..(942): transl_table=11
atgcgtcttatcaagatcctttcaggctgcgccgcagccatcgccatgaccctcgcgcttggctccgcctcggccatggccgaaacctatgcgctggtcaccatcaaccagcaggccctgtttttcaaccagatcaatgacggcgccaaggccgcggcaaaggccgccggcgtcgacctcgtcatcttcaacgccaacaatgtgccgagcgcgcaaaacgacgcgatcgagaactacatcacccagaaggtcgacggcatcattctcgtcgccatcgatgtcaacggcgtgaagcccgcgatcaccgctgccaaggccgccggtattccggtgattgccatcgacgcgcagattccgaatggcgacaatgtcgccttcgtcggcgtcgacaacaccaaggctggcgaggatatcggcaaattctacgccgaatacgtcaagaccaagctgaacggaaccgccaagatcggcgttgtcggcgcgctcaattcgttcatccagaaccagcgcctggacggcttcaagaaggctgtcaccgagagcggccagaaggtgactttcctcgacacggtcgatggccagaacgtacaggacgtggcgctgtcggcctccgaaaacctgatgacggccaatgccgacatgacgacgctttatgcgaccggcgagccggccttgctcggcgccgtttcggccgtcaccagccagggccgtaccggcgacgtcaaggtgtttggctgggacctgaccaagtccgcggtgcaaggcctcgaagagggctgggtaatcgccgtcgtccagcaggatccggccggtgaaggcaaggctgccatcgaagccttcggcaagctcaagaagggcgagaagatcgatccgatcatcaatgttccgatcaccatcgtgaccaaggaaaatgtcggccagttcaaggacatgttcaagtaa

SEQ ID NO: 40640 - protein, 313 aa, Mesorhizobium loti MAFF303099
MRLIKILSGCAAAIAMTLALGSASAMAETYALVTINQQALFFNQINDGAKAAAKAAGVDLVIFNANNVPSAQNDAIENYITQKVDGIILVAIDVNGVKPAITAAKAAGIPVIAIDAQIPNGDNVAFVGVDNTKAGEDIGKFYAEYVKTKLNGTAKIGVVGALNSFIQNQRLDGFKKAVTESGQKVTFLDTVDGQNVQDVALSASENLMTANADMTTLYATGEPALLGAVSAVTSQGRTGDVKVFGWDLTKSAVQGLEEGWVIAVVQQDPAGEGKAAIEAFGKLKKGEKIDPIINVPITIVTKENVGQFKDMFK

SEQ ID NO: 40641 - DNA, 984 bp, Escherichia coli O157:H7 EDL933
  CDS (1)..(984): transl_table=11
  misc_feature (265)..(265): r is g or a
  misc_feature (305)..(305): k is g or t
  misc_feature (331)..(331): r is g or a
  misc_feature (550)..(550): k is g or t
atgcctaaaaaaatgagaacaacccgtaatctattattaatggctacgctattaggtagcgcactatttgccagagctgcggataaagaaatgaccattggcgcaatataccttgatactcagggatattacgctggagtgcgtcagggagttcaggatgcggcaaaagattcttcagtacaggtacagttaattgaaactaacgcccagggtgatatttcgaaagaaagtacctttgttgataccctcgtggcgcgtaatgtcratgctattattttatcggcagtgtctgaaaatggcagtakccgtaccgttcgtcgcgccagtgaarcgggtattccggtgatttgctacaacacctgtattaatcaaaagggggtcgataaatatgtctcggcgtatctggtgggtgacccgctggaatttggtaaaaaactgggtaacgctgccgccgattattttattgccaataaaattgaccagccgaaaattgccgtcatcaattgcgaagcctttgaagtttgtgtgcagcgacgtaaaggatttgaakaagtattaaaatcccgcgttcccggcgcgcaaattgtcgctaatcaggaagggactgttttagataaagcgatttccgttggtgaaaaactgattatctccacgccggatctcaacgccattatgggggaatcgggcggtgcgacactcggcgcggtaaaagcggtacgtaatcaaaatcaggccggaaaaattgctgttttcggttcggatatgacaaccgaaattgctcaggagctggaaaacaatcaggtgctgaaagcggtagtggatatttccggtaagaaaatgggcaatgctgttttcgcgcaaacattgaaggttatcaataaacaagccgacggtgaaaaagtgattcaggtgcctatcgatctctataccaaaacggaagacggtaaacagtggctggcaacgcacgttgatggtctgccctaa

SEQ ID NO: 40642 - protein, 327 aa, Escherichia coli O157:H7 EDL933
  misc_feature (102)..(102): The Xaa at location 102 stands for Ile, or Ser.
  misc_feature (111)..(111): The Xaa at location 111 stands for Ala, or Thr.
  misc_feature (184)..(184): The Xaa at location 184 stands for Stop, or Glu.
MPKKMRTTRNLLLMATLLGSALFARAADKEMTIGAIYLDTQGYYAGVRQGVQDAAKDSSVQVQLIETNAQGDISKESTFVDTLVARNVBAIILSAVSENGSXRTVRRASEXGIPVICYNTCINQKGVDKYVSAYLVGDPLEFGKKLGNAAADYFIANKIDQPKIAVINCEAFEVCVQRRKGFEXVLKSRVPGAQIVANQEGTVLDKAISVGEKLIISTPDLNAIMGESGGATLGAVKAVRNQNQAGKIAVFGSDMTTEIAQELENNQVLKAVVDISGKKMGNAVFAQTLKVINKQADGEKVIQVPIDLYTKTEDGKQWLATHVDGLP

SEQ ID NO: 40643 - DNA, 1044 bp, Agrobacterium tumefaciens str. C58
  CDS (1)..(1044): transl_table=11
atgagccgtccgcgcaataaacgaccctcccgatacgggaggcgtgaaaaacgaccggaggggaggaggttcgatctgcccgaaggtcaaaaatcaacaaatggaggaataatcatgaaattttcacgcattctgctgacgtccgctgcccttcttgccctgtcgctcggttcggccaacgccgccgaagtcaagaagatcggccttgccgtcgccaatctgcaggcgaacttcttcaaccagatcaagcaggccgtcgaagccgaagccaagacgcgcggcattgccgtcgttaccgtcgatgccaagggcgatggcccgacgcaggtcaaccagatccaggatctgctgacccagaatatcgacgcgctgatctatatcccagccggtgccgctgccgccaccgttccggtgaagcttgcgaaagctgccggcgttccggtcatcaacatcgaccgcaatgccgatggcgcgccgggtgataccttccttgccaccgattccgtcgcttccgccaagtcggtttgcgattacatcatcaaacaggccggtggtgccggcaagatggtcatcatccacggccagaagggcactacacctgaagtcgaccgcacgaagggctgcatggaatcggtcaaggccaattccggcgtgaagatcgttgccgagcaatggtccaacatgtggagccaggatgaaggcttccagatcatgcagaacatgctgcaggccaatcccgacgtctccatcgtctttgcacaggcagacggtctggcgctcggcgcggcgcaggcaatcaaggttgccaatccgtcgcagaagatcgtcgttggcggcttcgatggcgatacggcagcgcttgaggcactgaagaatggcgtcttcgacgtgaccgcgacgcagcagacccagaagatgggccgcatggctgtcgagatggccgtcaagatcgtcggcggcgagaaggttccggccgtccagctctccgacgcgacgctgacgaccaaggaaaatgtcgcaggcttcatcgccaaccatccctga

SEQ ID NO: 40644 - protein, 347 aa, Agrobacterium tumefaciens str. C58
MSRPRNKRPSRYGRREKRPEGRRFDLPEGQKSTNGGIIMKFSRILLTSAALLALSLGSANAAEVKKIGLAVANLQANFFNQIKQAVEAEAKTRGIAVVTVDAKGDGPTQVNQIQDLLTQNIDALIYIPAGAAAATVPVKLAKAAGVPVINIDRNADGAPGDTFLATDSVASAKSVCDYIIKQAGGAGKMVIIHGQKGTTPEVDRTKGCMESVKANSGVKIVAEQWSNMWSQDEGFQIMQNMLQANPDVSIVFAQADGLALGAAQAIKVANPSQKIVVGGFDGDTAALEALKNGVFDVTATQQTQKMGRMAVEMAVKIVGGEKVPAVQLSDATLTTKENVAGFIANHP

SEQ ID NO: 40645 - DNA, 954 bp, Agrobacterium tumefaciens str. C58
  CDS (1)..(954): transl_table=11
atgccaaatttcaaacgtcgatatttctccgccgctctcgccgcaaccgtccttgccggcgcgactttatccgctggtctggtccaggctgccgaaaagaccattgccctggtgcagatcaaccagcaggcgctgtttttcaaccagatgaacgaaggagcggaaaaggccgctaaggaagccggcgtcaagctggtgatctttaacgccaacaacgatcccgcagcccagaacagcgccatcgaaacctacatccagcagaaggttgacggcatcgccgtggtcgccatcgatgtcaacggcatcatgccggccgtaaaacaggccgccgccgccaatattcccgtcgtcgcgattgacgccatcctgccggagggtccgcagaaggcgcagatcggcgtggataacggcaaagccggcgccgacatgggaaaatttttcctcgactacgtgaagtccgatatgggcggcaaggccaagatcggcgtcgttggtgcgctgaactccttcatccagaacatccgccagaagggttttgaagacacgatcaaggacaagaccggtatcacgacggctggtgtcgtcgatggccagaacgttcaggacactgcactgtcggcagcggaaaacctgatcaccggcaatccagatatgacggcaatttatgccacgggtgagccggctcttctcggagcggttgccgccgttgaaagccagagcaagcagaaagacatcaaggtgtttggctgggatctgaccaaacaggcgatcaccggcattgatgcgggttatgtcgcaggcgtcatccagcaggatcctgccgagatgggtgcagccgcagtcaaggcgctcaagacggtcgccgatggcggcaccgtcgaaaagaccatcgccgtgccggtcaccatcgtcaccaaggccaatgtcgaaccttaccgcgcggttttcaaatga

SEQ ID NO: 40646 - protein, 317 aa, Agrobacterium tumefaciens str. C58
MPNFKRRYFSAALAATVLAGATLSAGLVQAAEKTIALVQINQQALFFNQMNEGAEKAAKEAGVKLVIFNANNDPAAQNSAIETYIQQKVDGIAVVAIDVNGIMPAVKQAAAANIPVVAIDAILPEGPQKAQIGVDNGKAGADMGKFFLDYVKSDMGGKAKIGVVGALNSFIQNIRQKGFEDTIKDKTGITTAGVVDGQNVQDTALSAAENLITGNPDMTAIYATGEPALLGAVAAVESQSKQKDIKVFGWDLTKQAITGIDAGYVAGVIQQDPAEMGAAAVKALKTVADGGTVEKTIAVPVTIVTKANVEPYRAVFK

SEQ ID NO: 40647 - DNA, 930 bp, Agrobacterium tumefaciens str. C58
  CDS (1)..(930): transl_table=11
atgaaattttcacgcattctgctgacgtccgctgcccttcttgccctgtcgctcggttcggccaacgccgccgaagtcaagaagatcggccttgccgtcgccaatctgcaggcgaacttcttcaaccagatcaagcaggccgtcgaagccgaagccaagacgcgcggcattgccgtcgttaccgtcgatgccaagggcgatggcccgacgcaggtcaaccagatccaggatctgctgacccagaatatcgacgcgctgatctatatcccagccggtgccgctgccgccaccgttccggtgaagcttgcgaaagctgccggcgttccggtcatcaacatcgaccgcaatgccgatggcgcgccgggtgataccttccttgccaccgattccgtcgcttccgccaagtcggtttgcgattacatcatcaaacaggccggtggtgccggcaagatggtcatcatccacggccagaagggcactacacctgaagtcgaccgcacgaagggctgcatggaatcggtcaaggccaattccggcgtgaagatcgttgccgagcaatggtccaacatgtggagccaggatgaaggcttccagatcatgcagaacatgctgcaggccaatcccgacgtctccatcgtctttgcacaggcagacggtctggcgctcggcgcggcgcaggcaatcaaggttgccaatccgtcgcagaagatcgtcgttggcggcttcgatggcgatacggcagcgcttgaggcactgaagaatggcgtcttcgacgtgaccgcgacgcagcagacccagaagatgggccgcatggctgtcgagatggccgtcaagatcgtcggcggcgagaaggttccggccgtccagctctccgacgcgacgctgacgaccaaggaaaatgtcgcaggcttcatcgccaaccatccctga

SEQ ID NO: 40648 - protein, 309 aa, Agrobacterium tumefaciens str. C58
MKFSRILLTSAALLALSLGSANAAEVKKIGLAVANLQANFFNQIKQAVEAEAKTRGIAVVTVDAKGDGPTQVNQIQDLLTQNIDALIYIPAGAAAATVPVKLAKAAGVPVINIDRNADGAPGDTFLATDSVASAKSVCDYIIKQAGGAGKMVIIHGQKGTTPEVDRTKGCMESVKANSGVKIVAEQWSNMWSQDEGFQIMQNMLQANPDVSIVFAQADGLALGAAQAIKVANPSQKIVVGGFDGDTAALEALKNGVFDVTATQQTQKMGRMAVEMAVKIVGGEKVPAVQLSDATLTTKENVAGFIANHP

SEQ ID NO: 40649 - DNA, 942 bp, Thermoanaerobacter tengcongensis MB4
  CDS (1)..(942): transl_table=11
atgagaaaatcacgaatactgttacttttaactatttttgtgacttcagcggcgctgattttgagcggttgtaaaacaaatactccaaatacagcttctactagtaccaaagaggggaaaactataggattagtgatatctactcttaacaatccattctttgtgactttaaaaaatggtgcagaagaaaaagcgaaagaactaggatacaaaataatagttgaagattcgcaaaatgattcatctaaagagctttctaatgtagaagatttgattcaacagaaagtagatgttttacttataaatcctgtggatagcgatgcagttgttactgctataaaagaagcgaatagcaaaaatataccagttataactatagatagatcagcaaatggtggagatgttgtttgccatatagcttcagataatgttaagggtggagaaatggctgcagaatttatagctaaagctctaaaaggcaaggggaatgtagtagaacttgaaggtatacctggggcttctgcagcaagagatagaggcaaagggtttgatgaagctattgctaagtatccagatataaaaatagttgcaaagcaggctgctgattttgatcgttccaaaggtttatcagtaatggaaaacatcttgcaagcccagcccaaaattgatgcagtatttgcgcaaaatgatgaaatggctttaggagctataaaagcaattgaggcagctaatagacaaggaattattgttgtgggatttgatgggacagaagatgctctaaaagctataaaagaagggaaaatggctgctacaattgcgcagcagccagctttaatgggatcacttggtgtggagatggctgataaatacctaaaaggtgaaaaaatacctaactttattcctgcagaacttaaactcataacaaaagaaaatgtacagtga

SEQ ID NO: 40650 - protein, 313 aa, Thermoanaerobacter tengcongensis MB4
MRKSRILLLLTIFVTSAALILSGCKTNTPNTASTSTKEGKTIGLVISTLNNPFFVTLKNGAEEKAKELGYKIIVEDSQNDSSKELSNVEDLIQQKVDVLLINPVDSDAVVTAIKEANSKNIPVITIDRSANGGDVVCHIASDNVKGGEMAAEFIAKALKGKGNVVELEGIPGASAARDRGKGFDEAIAKYPDIKIVAKQAADFDRSKGLSVMENILQAQPKIDAVFAQNDEMALGAIKAIEAANRQGIIVVGFDGTEDALKAIKEGKMAATIAQQPALMGSLGVEMADKYLKGEKIPNFIPAELKLITKENVQ

SEQ ID NO: 40651 - DNA, 984 bp, Escherichia coli CFT073
  CDS (1)..(984): transl_table=11
atgcctaaaaaaatgacaagaacccgtaatttattattaatggctacgctattgggtagcgcactatttgccagggcttctgataaagaaatgactattggcgcaatataccttgatacccagggatattacgccggagtgcgtcagggcgttcaggatgcggcaaaagattcttcagtacaggtacagttaattgaaactaacgcccagggtgatatttcgaaagaaagtacctttgttgataccctcgtggcgcgtaatgtcgatgccattattttgtcagctgtttctgaaaatggcagcagccgcaccgttcgtcgcgccagtgaggcgggcattccagtgatttgctacaacacctgtattaatcaaaagggtgtcgataaatatgtctcggcatatctggttggtgacccgctggaatttggtaaaaaactgggtaacgctgccgccgattattttattgccaacaaaattgaccagccgaaaattgccgtcatcaattgcgaagcctttgaagtttgtgtgcaacgacgtaaagggtttgaagaagtattaaaagcccgcgttcccggcgcgcaaattgtcgctaatcaggaagggactgttttagataaagcgatttctgtcggtgaaaaactgattatctccacgccggatctcaacgccattatgggggaatcgggcggagcgacactcggcgcggtaaaagcggtacgtaatcaaaatcaggccggaaaaattgctgttttcggttctgatatgaccactgaaattgctcaggagctggaaaacaaccaggtgctgaaagcggtggtggatatttccggtaagaaaatgggcaatgctgtttttacgcaaacattgaaggttatcaataaacaagccgacggtgaaaaagtgattcaggtgccaatcgatctctataccaaaacggaagacggtaaacagtggctggcaacgcacgttgatggtctgccctaa

SEQ ID NO: 40652 - protein, 327 aa, Escherichia coli CFT073
MPKKMTRTRNLLLMATLLGSALFARASDKEMTIGAIYLDTQGYYAGVRQGVQDAAKDSSVQVQLIETNAQGDISKESTFVDTLVARNVDAIILSAVSENGSSRTVRRASEAGIPVICYNTCINQKGVDKYVSAYLVGDPLEFGKKLGNAAADYFIANKIDQPKIAVINCEAFEVCVQRRKGFEEVLKARVPGAQIVANQEGTVLDKAISVGEKLIISTPDLNAIMGESGGATLGAVKAVRNQNQAGKIAVFGSDMTTEIAQELENNQVLKAVVDISGKKMGNAVFTQTLKVINKQADGEKVIQVPIDLYTKTEDGKQWLATHVDGLP

SEQ ID NO: 40653 - DNA, 933 bp, Rhodobacter sphaeroides 2.4.1
  CDS (1)..(933): transl_table=11
atgaccccccacttcacccgccgtgccctcggcgccctgctgacctcgagcctgctcggcgccgcggccctgcccgccttcgcgcaggagcagaaaaccgtggcgctggtccagatcaaccagcaggccctgttcttcaacgagatgaatcgcggcgcgcaggaagcggccgacaaggcgggcgtcaagctcgtcatcttcaatgcgaacaacgactcggccgcgcagaacagcgcgatcgagacctacatccaggaaggcgtggacggtctcgcggtggtggccatcgacgtgaacggcatcatgcccgccgtccagcaggcggccgatgcaggcatccccgtggtggccatcgacgcgatcctgcccgaggggccgcagaaggcgcagatcggcgtggacaatgccaaggccggcgccgacctcgcggcgcattacaacgagaccatggccgagccctcgaagctcgggatcgtcggcgcgctcaactcctacatccagaacgtccgcaaggacgggttcgagcaggcgctggacgacaaggtgacggtcgtgggcacggtcgacggccagaacatccaggacgtggcgctgggggcggccgagaacctcatcaccgccaaccccgacctgagcgcgatctatgccacgggcgagcccgcgctgatgggggccatcgccggcgtggccagtcagggcaagcaggccgatgtctcgatcttcggctgggacctgaccgcgcaggccatcgacgccatcgacgagggctatctcaaggccgtgatccagcaggatccggcagcgatgggcgcggcggcggtcgaggcgctggtgacgctcgcggacggcggcgaggtcgacaagaccatctcggtgcccgtgaccatcgtcaccaaggacaatgtcgacggcttccgggcgctctttaaatga

SEQ ID NO: 40654 - protein, 310 aa, Rhodobacter sphaeroides 2.4.1
MTPHFTRRALGALLTSSLLGAAALPAFAQEQKTVALVQINQQALFFNEMNRGAQEAADKAGVKLVIFNANNDSAAQNSAIETYIQEGVDGLAVVAIDVNGIMPAVQQAADAGIPVVAIDAILPEGPQKAQIGVDNAKAGADLAAHYNETMAEPSKLGIVGALNSYIQNVRKDGFEQALDDKVTVVGTVDGQNIQDVALGAAENLITANPDLSAIYATGEPALMGAIAGVASQGKQADVSIFGWDLTAQAIDAIDEGYLKAVIQQDPAAMGAAAVEALVTLADGGEVDKTISVPVTIVTKDNVDGFRALFK

SEQ ID NO: 40655 - DNA, 951 bp, Burkholderia sp. 383
  CDS (1)..(951): transl_table=11
atgaatgtcctctttcgccgtcgcttcctgaccgccgcgctcgccgccgtcgcggttgccgccgcaccggccgtccacgcgcaatcggcgggcaagccgaaggtcgcgctcgtgatgaagtcgctcgccaacgagttcttcctgacgatggaaacgggcgcgaaggaataccagaaacacaacgcgggtcagttcgacctgatcaccaacggcatcaaggacgagaccgacaccgcgaaccagattcgcatcgtcgagcagatgatcgtgtcgaaggtcgacgcgatcgtgctcgcgccggccgattcgaaggcgctcgtgccggtcgtgaagaaggcggtcgacgcgggcatcatcgtcgtgaacatcgacaaccggctcgatcccgacgtgctgaagtcgaagaacctgaacgtgccgttcgtcggcccggacaaccgcaagggcgcgcgcaagatcggcgattacctcgcgaagcggctgaaggcgggcgaccaggttggcatcgtcgaaggcgtgtcgacgacgaccaatgcgcagcagcgcacggccggcttccaggacgcgatgaaggcgggcgggatgaaggtcgtgtcggtgcagtccggcgaatgggagatcgacaagggcaatgcggtcgctgccgcgatgctcaacgaatatccgaacctgaaggcgctgctgtgcggcaacgacaacatggcgatcggcgccgtgtcggccgtgcgcgcggccggcaagcagggcaaggtgctcgtggtcggctacgacaacatcaatgcgatcaagccgatgctgaaggacggccgcgtgctcgcgaccgccgatcagtacgcggcgaagcaggccgtgttcggtatcgacacggcactcaaggcgatcgccgagcatcgcaagcaggccgacatgtcgggcgtggtcgagacgccggtggatctcgtgacgaagtga

SEQ ID NO: 40656 - protein, 316 aa, Burkholderia sp. 383
MNVLFRRRFLTAALAAVAVAAAPAVHAQSAGKPKVALVMKSLANEFFLTMETGAKEYQKHNAGQFDLITNGIKDETDTANQIRIVEQMIVSKVDAIVLAPADSKALVPVVKKAVDAGIIVVNIDNRLDPDVLKSKNLNVPFVGPDNRKGARKIGDYLAKRLKAGDQVGIVEGVSTTTNAQQRTAGFQDAMKAGGMKVVSVQSGEWEIDKGNAVAAAMLNEYPNLKALLCGNDNMAIGAVSAVRAAGKQGKVLVVGYDNINAIKPMLKDGRVLATADQYAAKQAVFGIDTALKAIAEHRKQADMSGVVETPVDLVTK

SEQ ID NO: 40657 - DNA, 954 bp, Rhizobium leguminosarum bv. viciae 3841
  CDS (1)..(954): transl_table=11
atgacactgaatttgacaagacgaacgatgatcgcagccgccggatttacggcattgaccttcatcggcctcaccggcgctcaggcgcaggaaaagaagaccgtcgcactagtgcagatcaaccagcaggcgcttttcttcaaccagatgaatgagggcgcccagaaggcggccgatgccgccggcgtcaagctggtgatcttcaacgccaacaacgagacgacggcgcagaacagcgcgatcgaaacctatgtccaggaaaaggtctccggccttgctgtcgtggcgatcgacgtcaacggcatcatgccggcggtcaagcaggcggccgatgccggcattcctgtcgtcgccatcgacgccatcctgcccgatggtccgcagaaggcgcagatcggcgtggacaatgccgcggccggcgccgacatgggcaaatacttcctcgactacgtcaaggcgaacatgggcggcaaagccaagctcggcgtcgtcggcgcgctgaactcgttcatccagaacatccgccaggacggcttcgagaagaccctgaaaggcgtcgacggcattgaaatggccggcgtcgtcgacggccagaatatccaggacaacgcccttgcggcggctgaaaacctgatcaccgccaatcctgacctgacagcgatctacgccactggcgagccggccctgatgggggcgatcgccgccgtccagagccagggcaagcaggacaaaatcaaggtgttcggctgggatctgactgctgaagccattgccggtatcgatgccggcttcgtcgtcgccgtcgtccagcaggatccggccgcaatgggcggtgccgccgtcgacgcgctagtgaaggcctcggccggcgaggccgtcaccaagacgatctcggtgccgatcactatcgtgaccaaggagaatgtcgagccgtaccgggccgtcttcaaatga

SEQ ID NO: 40658 - protein, 317 aa, Rhizobium leguminosarum bv. viciae 3841
MTLNLTRRTMIAAAGFTALTFIGLTGAQAQEKKTVALVQINQQALFFNQMNEGAQKAADAAGVKLVIFNANNETTAQNSAIETYVQEKVSGLAVVAIDVNGIMPAVKQAADAGIPVVAIDAILPDGPQKAQIGVDNAAAGADMGKYFLDYVKANMGGKAKLGVVGALNSFIQNIRQDGFEKTLKGVDGIEMAGVVDGQNIQDNALAAAENLITANPDLTAIYATGEPALMGAIAAVQSQGKQDKIKVFGWDLTAEAIAGIDAGFVVAVVQQDPAAMGGAAVDALVKASAGEAVTKTISVPITIVTKENVEPYRAVFK

SEQ ID NO: 40659 - DNA, 990 bp, Mycobacterium smegmatis str. MC2 155
  CDS (1)..(990): transl_table=11
atgccgagatcgctgcggcggagggcggtccggtttgcgacgctgatgctggtcgcggcactggccgtatccggttgctcacgcatcggcgagaacggtcgcatcgcagtggtgtacctgaacgccgagggtttctatgcgggggtcaaggtcggggtgaagaaggccttcgccgacgccggcgacgctccccagctgatcgagaccaacgcgcggtccgatccatcgcaggagagcgccttcatcgatacggtgagctcggtgcaggtcgacgcgctgatcttgtcgccgacatctgccgacgcctcggtgccggctgtccggcttgcccatgacagtgggatcccggtgatctgctacaacacgtgcgtcaccgagtctgatgcccgcaagtacgtcgactcctggattctcggctccccgcaggagttcgggcgtatcggtggtgagcagatgggcaactacttcatcgagaacggcatcacccaccccaaggttgcagtgatcaactgcgagcagttcgaggtgtgcattcagcgtcgacagggattcgagcaagctctgacgagtttggtgcccgccgccgagatcgtcgccaatcagcaggggttgctcgtggacgaggccgtcgaggcctccgagcggatcctcacagcccaccccgacctggacgcgttctacggtgaagccggatccatgacggtgggtgcggtacgtgccgtgcaggccagaaggctcaccggccgggtcgtggtcttcggcggcgacatgtccacgcagatcgctcagatgctgcaggaggggtcggttctccgaggcgtcgccgacatctccggcatcaccgtcggtgaaatggcagccgacgcggcgctgcgcctcctcagagggcagcggtctgagaacctcatcgtcgacgctcccgtcgatgcgtacgagggacctgatgcgggcacccgttggctgcgggaacatcccgacggaatcccatga

SEQ ID NO: 40660 - protein, 329 aa, Mycobacterium smegmatis str. MC2 155
MPRSLRRRAVRFATLMLVAALAVSGCSRIGENGRIAVVYLNAEGFYAGVKVGVKKAFADAGDAPQLIETNARSDPSQESAFIDTVSSVQVDALILSPTSADASVPAVRLAHDSGIPVICYNTCVTESDARKYVDSWILGSPQEFGRIGGEQMGNYFIENGITHPKVAVINCEQFEVCIQRRQGFEQALTSLVPAAEIVANQQGLLVDEAVEASERILTAHPDLDAFYGEAGSMTVGAVRAVQARRLTGRVVVFGGDMSTQIAQMLQEGSVLRGVADISGITVGEMAADAALRLLRGQRSENLIVDAPVDAYEGPDAGTRWLREHPDGIP

SEQ ID NO: 40661 - DNA, 25 bp, Artificial sequence
  primer
atgcctacaaaaatgagaacaaccc

SEQ ID NO: 40662 - DNA, 22 bp, Artificial sequence
  primer
ttagggcagaccatcaacgtgc

SEQ ID NO: 40663 - protein, 299 aa, Artificial sequence
  consensus sequence
  Variant (2)..(7): Xaa in position 2 to 7 is any amino acid
  Variant (8)..(10): Xaa in position 8 to 10 is any or no amino acid
  Variant (12)..(30): Xaa in position 12 to 30 is any amino acid
  Variant (31)..(31): Xaa in position 31 is any or no amino acid
  Variant (33)..(36): Xaa in position 33 to 36 is any amino acid
  Variant (38)..(48): Xaa in position 38 to 48 is any amino acid
  Variant (49)..(52): Xaa in position 49 to 52 is any or no amino acid
  Variant (54)..(55): Xaa in position 54 to 55 is any amino acid
  Variant (57)..(71): Xaa in position 57 to 71 is any amino acid
  Variant (74)..(88): Xaa in position 74 to 88 is any amino acid
  Variant (90)..(91): Xaa in position 90 to 91 is any amino acid
  Variant (93)..(95): Xaa in position 93 to 95 is any amino acid
  Variant (100)..(153): Xaa in position 100 to 153 is any amino acid
  Variant (154)..(161): Xaa in position 154 to 161 is any or no amino acid
  Variant (163)..(164): Xaa in position 163 to 164 is any amino acid
  Variant (167)..(186): Xaa in position 167 to 186 is any amino acid
  Variant (187)..(189): Xaa in position 187 to 189 is any or no amino acid
  Variant (191)..(203): Xaa in position 191 to 203 is any amino acid
  Variant (206)..(218): Xaa in position 206 to 218 is any amino acid
  Variant (221)..(222): Xaa in position 221 to 222 is any amino acid
  Variant (224)..(233): Xaa in position 224 to 233 is any amino acid
  Variant (234)..(234): Xaa in position 234 is any or no amino acid
  Variant (236)..(236): Xaa in position 236 is any amino acid
  Variant (238)..(238): Xaa in position 238 is any amino acid
  Variant (240)..(264): Xaa in position 240 to 264 is any amino acid
  Variant (265)..(265): Xaa in position 265 is any or no amino acid
  Variant (267)..(293): Xaa in position 267 to 293 is any amino acid
  Variant (294)..(297): Xaa in position 294 to 297 is any or no amino acid
LXXXXXXXXXKXXXXXXXXXXXXXXXXXXXXGXXXXAXXXXXXXXXXXXXXXAXXDXXXXXXXXXXXXXXXVDXXXXXXXXXXXXXXXVXXAXXXGIPVXXXXXXXXXXXXXXXXXXXXXXXXXXXXXXXXXXXXXXXXXXXXXXXXXXXXXXXXXXXXXXRXXGFXXXXXXXXXXXXXXXXXXXXXXXDXXXXXXXXXXXXXPDXXXXXXXXXXXXXGAXXAXXXXXXXXXXXVXGXDXXXXXXXXXXXXXXXXXXXXXXXXXXGXXXXXXXXXXXXXXXXXXXXXXXXXXXXXXXTK

SEQ ID NO: 40664 - protein, 51 aa, Artificial sequence
  protein pattern
  Variant (2)..(9): Xaa in position 2 to 9 is any amino acid
  Variant (10)..(10): Xaa in position 10 is any or no amino acid
  Variant (12)..(14): Xaa in position 12 to 14 is any amino acid
  Variant (15)..(15): Xaa in position 15 is any or no amino acid
  Variant (17)..(17): Xaa in position 17 is Asp or Asn
  Variant (18)..(18): Xaa in position 18 is Leu, Met or Val
  Variant (19)..(19): Xaa in position 19 is any amino acid
  Variant (20)..(20): Xaa in position 20 is Ala or Ile
  Variant (21)..(21): Xaa in position 21 is Phe, Ile, Leu or Val
  Variant (22)..(22): Xaa in position 22 is any amino acid
  Variant (23)..(23): Xaa in position 23 is Ala, Cys or Gly
  Variant (24)..(24): Xaa in position 24 is Glu, Gly, Gln or Thr
  Variant (25)..(25): Xaa in position 25 is Ala, Gly, Asn or Ser
  Variant (26)..(26): Xaa in position 26 is Asp, Glu or Gly
  Variant (27)..(27): Xaa in position 27 is Gly, Asn, Pro or Ser
  Variant (28)..(29): Xaa in position 28 to 29 is any amino acid
  Variant (30)..(30): Xaa in position 30 is Ile, Leu, Met or Val
  Variant (33)..(33): Xaa in position 33 is Ala, Ile or Val
  Variant (34)..(34): Xaa in position 34 is any amino acid
  Variant (35)..(35): Xaa in position 35 is Ala or Gly
  Variant (36)..(36): Xaa in position 36 is Ile or Val
  Variant (37)..(37): Xaa in position 37 is any amino acid
  Variant (38)..(38): Xaa in position 38 is Ala, Asn, Ser or Val
  Variant (39)..(41): Xaa in position 39 to 41 is any amino acid
  Variant (42)..(42): Xaa in position 42 is Ala, Gln, Ser or Thr
  Variant (43)..(43): Xaa in position 43 is any amino acid
  Variant (44)..(44): Xaa in position 44 is Asp, Lys or Arg
  Variant (45)..(45): Xaa in position 45 is Ile or Val
  Variant (46)..(46): Xaa in position 46 is any amino acid
  Variant (47)..(47): Xaa in position 47 is Ile or Val
  Variant (48)..(48): Xaa in position 48 is any amino acid
  Variant (50)..(50): Xaa in position 50 is any amino acid
DXXXXXXXXXLXXXXPXXXXXXXXXXXXXXGAXXXXXXXXXXXXXXXXGXD

SEQ ID NO: 40665 - DNA, 684 bp, Escherichia coli
  CDS (1)..(684): transl_table=11
atgaccgttgatgacatcatggtgccgcgcagtgaaattatcggtattgatatcaacgatgactggaaatcgattctgcgccaactctcccactcacctcacgggcgcatcgtgctctaccgtgattcgctggacgacgccatcagtatgctgcgagtacgtgaagcctggcggttgatgtcggagaaaaaagagttcaccaaagaaaccatgctgcgcgccgcggacgagatctattttgtgccggaaggtacgccgctcagcacgcagttggtaaagtttcagcgcaacaaaaagaaagtcggcctggtcgtcaacgagtatggagacattcaggggctggtgacggttgaagatattctggaagagattgtcggcgatttcactacgtcgatgtcgccaacacttgccgaagaggtcacgccgcaaaacgacggttcggtgattatcgatggcaccgccaacgtgcgggaaatcaacaaagcctttaactggcatctaccggaagatgatgcccgcacggttaatggcgtcattcttgaggcactggaagagatccctgtcgcaggcacccgcgtgcgtattggcgagtacgatatcgatattctcgacgtacaggacaatatgattaagcaggtaaaagtttttcctgtgaaaccgctgcgcgagagtgtggcggagtaa

SEQ ID NO: 40666 - protein, 227 aa, Escherichia coli
MTVDDIMVPRSEIIGIDINDDWKSILRQLSHSPHGRIVLYRDSLDDAISMLRVREAWRLMSEKKEFTKETMLRAADEIYFVPEGTPLSTQLVKFQRNKKKVGLVVNEYGDIQGLVTVEDILEEIVGDFTTSMSPTLAEEVTPQNDGSVIIDGTANVREINKAFNWHLPEDDARTVNGVILEALEEIPVAGTRVRIGEYDIDILDVQDNMIKQVKVFPVKPLRESVAE

SEQ ID NO: 40667 - DNA, 1281 bp, Vibrio cholerae O1 biovar eltor str. N16961
  CDS (1)..(1281): transl_table=11
ttggacgacatatcaacgggtatcttatttgcgctactcgcgtgtctcatcattatttccgcctatttctccggttctgaaaccggcatgatggctctcaaccgttaccgtttaaagcatttggccaacagcggccataaaggtgctaaacgtgttgaaaagctactggatcgtccagatcgtttgattggcttaatcctgattggtaacaacctcgtcaatatcctcgcctctgcgattgccaccattatcggtatgcgcctgtatggcgatttaggtgtcgcaattgccacgggggccttaactttagtgattctggtgtttgccgaagtcacgcctaaaactctagccgcgctttacccagagcgagtctcttacgccagcagcgtgttactgacgattttgatgaagctgctttcacctttggtgctgttcgttaacttgatgaccaatggcttgatccgcattctcggcatctcaccgaaacatggcaaaggcgatcatttaagctcagaagagttacgtactgtggttaatgaagcgggaggactcatccctcgccgccaccaagatatgctgctgtcgatcctcgatttagaacacgtcaccgtcaacgacatcatgatcccgcgtaatgagataacggggatcaatatcaatgatgattggaagtcgattgtgcgtcagttagtccattcaccacatgggcgagtcgtactgtaccgtgacaagattgacgaagtggtcgggattttgcgtttacgtgaagcctcacgctttatgcttgagaagaacgactttaacaaagagatgctgctgcgcgctgcggatgagatttactttatccctgaaggtacaccgcttaacgttcagctgctcaaattccaacgtaataaagaacgcattggtttaatcgtggatgaatacggtgaaatcattggtttaaccacgctcgaagatattttggaagagattgtcggtgaatttaccacatccatgtctccaagcttggccgatgaaattactccacaaggtgatggcagtttcttgattgaaggcagcgccaatattcgtgacattaacaagagcctgaaatggaagcttcctaccgatggaccacgaaccttaaacggtttgattttggagcaccttgaagagatcccagcgagccatctgagtgtgaaagtggcacagcacaaaatggaaatcctcgagctggaagagaatcggattaagttggtcaaagtttacccaagaaaaaccaaagtcagcttggtttaa

SEQ ID NO: 40668 - protein, 426 aa, Vibrio cholerae O1 biovar eltor str. N16961
MDDISTGILFALLACLIIISAYFSGSETGMMALNRYRLKHLANSGHKGAKRVEKLLDRPDRLIGLILIGNNLVNILASAIATIIGMRLYGDLGVAIATGALTLVILVFAEVTPKTLAALYPERVSYASSVLLTILMKLLSPLVLFVNLMTNGLIRILGISPKHGKGDHLSSEELRTVVNEAGGLIPRRHQDMLLSILDLEHVTVNDIMIPRNEITGININDDWKSIVRQLVHSPHGRVVLYRDKIDEVVGILRLREASRFMLEKNDFNKEMLLRAADEIYFIPEGTPLNVQLLKFQRNKERIGLIVDEYGEIIGLTTLEDILEEIVGEFTTSMSPSLADEITPQGDGSFLIEGSANIRDINKSLKWKLPTDGPRTLNGLILEHLEEIPASHLSVKVAQHKMEILELEENRIKLVKVYPRKTKVSLV

SEQ ID NO: 40669 - DNA, 1260 bp, Pasteurella multocida subsp. multocida str. Pm70
  CDS (1)..(1260): transl_table=11
ttggacagtattccccttagtaccctctttattacactcatcatcttattgatcatctctgcttatttttcaggctctgaaaccggtttgttgtctgccaatcgttatcgactacgccatttagccgaaaaagggcatagaggtgcgaaaaaagcggaaaaattactgaaaaaaacagatgttttgcttagcctgattttaatttgtaataacttagtcaatattactgcttctgccattaccacgattatcggcatgcgcttatatggcgatgcgggagtcgccattgcaactggggcattaacctttgtgatgcttatttttgctgaaattttgccgaaaactatcgccgcccgttatccagaaaaagtggcattcacgtccagtcatttgttgtccgtttttctgcgactttttaccccgttggtctatttaatgaatttaattattcaggggattttggcactattacgtctaaaatcagataataaatcaacttcattaagcccagaagaattacgttccatcgtaaatgaatcaggtaaatttattccttccgcccaccaagaaatgctgttatctattttggatttagaaggggtcaccgtagatgacattatggtgccacgtaatgacattgggggtattgatattgacgatgattggaaagccattatgcgtcaacttaaccatgcagcgcacgggcgtgttgtactgtataaaggaaatatggatgaaaatattttggggatgttacgtgtacgtgaagcctatcgcttaatgctcgataaaaatgaatttaacaaagaaactttaatccgtgccgccgatgaagtgtattttattcctgaaggtacgccactgaatagccaattattaaatttccgcaacaataaagaaaggattggtttagttgtagatgaatatggtgatattaaaggcttagtcaccttagaagatatcttagaagagattgtcggtgaatttaccacttcaacagccccatcaattaacgatgaagttatcccacaatcagacggttctcttatcattgagggctccgccaatttacgtgatttgaataaattatttgactggaatctcgataccgaagatgcacgtaccttcaacggcttaattttagagcatttagaagaaattccagaagaaggaacggtatgtgaaattaatgggctacaaatcacgattctagaagtgaatgacaacatgattaaacaagccaaagtcattaaactttaa

SEQ ID NO: 40670 - protein, 419 aa, Pasteurella multocida subsp. multocida str. Pm70
MDSIPLSTLFITLIILLIISAYFSGSETGLLSANRYRLRHLAEKGHRGAKKAEKLLKKTDVLLSLILICNNLVNITASAITTIIGMRLYGDAGVAIATGALTFVMLIFAEILPKTIAARYPEKVAFTSSHLLSVFLRLFTPLVYLMNLIIQGILALLRLKSDNKSTSLSPEELRSIVNESGKFIPSAHQEMLLSILDLEGVTVDDIMVPRNDIGGIDIDDDWKAIMRQLNHAAHGRVVLYKGNMDENILGMLRVREAYRLMLDKNEFNKETLIRAADEVYFIPEGTPLNSQLLNFRNNKERIGLVVDEYGDIKGLVTLEDILEEIVGEFTTSTAPSINDEVIPQSDGSLIIEGSANLRDLNKLFDWNLDTEDARTFNGLILEHLEEIPEEGTVCEINGLQITILEVNDNMIKQAKVIKL

SEQ ID NO: 40671 - DNA, 684 bp, Shigella flexneri 2a str. 301
  CDS (1)..(684): transl_table=11
atgaccgttgatgacatcatggtaccgcgcagtgaaattatcggtattgatatcaacgatgactggaaatctattctgcgccaactctcccactcacctcacgggcgcatcgtgctttaccgtgattcgctggacgacgccatcagtatgctgcgagtacgtgaagcctggcggttgatgtcggagaaaaaagagttcaccaaagaaaccatgctgcgcgccgcggacgagatctattttgtgcctgaaggtacgccgctcagcacgcagttggtaaagtttcagcgcaacaaaaagaaagtcggcctggtcgtcaacgagtatggagacattcaggggctggtgacggttgaagatattctggaagagattgttggcgatttcactacgtcgatgtcgccaacacttgccgaagaggtcacgccgcaaaacgacggttcggtgattatcgatggcaccgccaacgtgcgggaaatcaacaaagcctttaactggcatctaccggaagatgatgcccgcacggttaatggcgtcattcttgaggcactggaagagatccctgtcgcaggcacccgcgtgcgtattggcaagtacgatatcgatattctcgacgtacaggacaatatgattaagcaggtaaaagtttttcctgtgaaaccgctgcgcgagagtgtggcggagtaa

SEQ ID NO: 40672 - protein, 227 aa, Shigella flexneri 2a str. 301
MTVDDIMVPRSEIIGIDINDDWKSILRQLSHSPHGRIVLYRDSLDDAISMLRVREAWRLMSEKKEFTKETMLRAADEIYFVPEGTPLSTQLVKFQRNKKKVGLVVNEYGDIQGLVTVEDILEEIVGDFTTSMSPTLAEEVTPQNDGSVIIDGTANVREINKAFNWHLPEDDARTVNGVILEALEEIPVAGTRVRIGKYDIDILDVQDNMIKQVKVFPVKPLRESVAE

SEQ ID NO: 40673 - DNA, 1206 bp, Pseudomonas putida KT2440
  CDS (1)..(1206): transl_table=11
atggacaccctgccgtacgcaccgctattcggcactctggcactggcccttttgtggtcagcactgttcactgccgtggaggctgcccgcctgcagctcaatggcacactgcgcgccggcgaagacggccatcccgtgctgccagcccaggccttggtgctgtgcgccagcctgggcaagctgctggtgctggggctggcctgcctggtgggccagcgccagagtggcgagcacggcttctggctggcaggcctggccgcgaccctcaccttgctggtgtttgccgagtatctgccgcggcgcctggcccggcgtaacccgcaggcgttcgtgagccttggtgccagcctgctgaaagtgcctctcgcactgctgcagccactggcctgcctgctggacggcgccgccaagctgattctgcgcccgttccgggcacagcccacagcggtggccctgcacacgcaggaggccgacgacttcgatgaggatgaacagcacgaagcgcctcgccagggtctgctcgacggcctgcagtcgctggacaagatcaccgtcaacgacatcctggtgccgcgcaacgaagtggatggcatcaacctcgacgagccgatcgaacgcatcgtcgagcagctgatcgtcagccgccacacccgcctgccggtctaccacaacgacatcaaccaggtcgaagcgatcctcaacaccaagctgatcagccacctgctgcccaaggccgagctgaccctggaagcgctgcacagcgcctgctacgaaccttatttcgtaccagaaagcacgcccctgcaaatgcagttgttgaacttccacaagcagcaacgccgcttgggcgtggtggtggacgagtacggcgaagtactgggtatcgtcaccctggaagacattctcgaagagatcgtcggcgagttcgaggacgagcaaagcctggaaaacccgcatgtgcacccgcaacccgacggtaccttcgtcatcgatggcaccgcttcgttacgcgaaatcaaccgcaccctgagctggcacctgccctgcgacggcgggccgaaaaccctcaacgggctggttaccgaagcgctggaaagcatcccggaaagcgctgtttgcctgaaaataggccgctatcgcctggaaatccttgaaacagaggacaattgcgccagcaaggtactggtgtggaccgtgacccgatag

SEQ ID NO: 40674 - protein, 401 aa, Pseudomonas putida KT2440
MDTLPYAPLFGTLALALLWSALFTAVEAARLQLNGTLRAGEDGHPVLPAQALVLCASLGKLLVLGLACLVGQRQSGEHGFWLAGLAATLTLLVFAEYLPRRLARRNPQAFVSLGASLLKVPLALLQPLACLLDGAAKLILRPFRAQPTAVALHTQEADDFDEDEQHEAPRQGLLDGLQSLDKITVNDILVPRNEVDGINLDEPIERIVEQLIVSRHTRLPVYHNDINQVEAILNTKLISHLLPKAELTLEALHSACYEPYFVPESTPLQMQLLNFHKQQRRLGVVVDEYGEVLGIVTLEDILEEIVGEFEDEQSLENPHVHPQPDGTFVIDGTASLREINRTLSWHLPCDGGPKTLNGLVTEALESIPESAVCLKIGRYRLEILETEDNCASKVLVWTVTR

SEQ ID NO: 40675 - DNA, 1278 bp, Vibrio vulnificus CMCP6
  CDS (1)..(1278): transl_table=11
ttggacgacatatctacgggtatcttatttgcgctactcgcgtgtcttatcgtcatttcaggctatttctctggttcagagacagggatgatgtcactgaaccgatatcgcttaaagcacctcgccaattctgggcacaaaggggctaagcgtgtcgaaaagttactgagccgcccagaccgattaattggtttgattcttatcggtaacaaccttgtcaatattcttgcctccgccattgcgaccattctcggcatgcgcctttatggtgatttgggtgttgcaattgcaaccggtgcccttaccttagtcgttttggtttttgcagaagtcacccctaaaaccgtggccgcactctatcctgaacgagtttcatacgcgagcagcattttgctggtggttttgatgaaactgctttcgcctttggtgatgttggtgaattttattaccaatggtttcattcgcttacttggtttgaaagcgcaacacaacggcgaagacaatctcagctccgaagaattgcgtaccgtggtaaacgaagcgggcagcttaatcccccagcgacaccaagatatgctggtttccattttggatttagaacacgtcacggtgaatgacatcatgatcccgcgtaatgagattaccggcattgatatcaatgacgattggaaatccattgtccgtcagctgactcactctcctcatggccgcattgtcttgtatcgcgacaaaatcgacgaagccgttggtatgttaaggttacgagaagcgtatcgcttgatgcttgagaagaatgagttcaacaaagagaccttgctacgagcggcagatgaggtctatttcattcccgaaagcaccccactcaatgttcagctactcaagttccaacgcaataaacagcgcatcggcctgattgtcgatgaatatggcgatattatcggcctagtgacactggaagacattctagaagagatcgtgggtgaatttaccacctcgattgcaccaagcctttcagatgagattactccgcaaggcgacggcagtttccttattgaaggaagcaccaacatccgtgatatcaataaaggtttgaaatggaaactgccaaccgatggtcctagaacactcaatggcttaattttggagcacttagaagacattccagaaagccacctcagtgtgaaagtggccggccacgcgatggaaattgtggaacttgaagaaaaccgaattaagtcggtaaaagtctttcctaagcgaaaacgcaaaacgacctaa

SEQ ID NO: 40676 - protein, 425 aa, Vibrio vulnificus CMCP6
MDDISTGILFALLACLIVISGYFSGSETGMMSLNRYRLKHLANSGHKGAKRVEKLLSRPDRLIGLILIGNNLVNILASAIATILGMRLYGDLGVAIATGALTLVVLVFAEVTPKTVAALYPERVSYASSILLVVLMKLLSPLVMLVNFITNGFIRLLGLKAQHNGEDNLSSEELRTVVNEAGSLIPQRHQDMLVSILDLEHVTVNDIMIPRNEITGIDINDDWKSIVRQLTHSPHGRIVLYRDKIDEAVGMLRLREAYRLMLEKNEFNKETLLRAADEVYFIPESTPLNVQLLKFQRNKQRIGLIVDEYGDIIGLVTLEDILEEIVGEFTTSIAPSLSDEITPQGDGSFLIEGSTNIRDINKGLKWKLPTDGPRTLNGLILEHLEDIPESHLSVKVAGHAMEIVELEENRIKSVKVFPKRKRKTT

SEQ ID NO: 40677 - DNA, 1281 bp, Vibrio parahaemolyticus RIMD 2210633
  CDS (1)..(1281): transl_table=11
ttggacgacatatctacgggtatcttatttgcgctactcgcgtgtcttatcgtcatatcaggttatttttctggttcagaaacagggatgatgtctttgaaccgttaccgcttgaagcacttagcgaaaagtgggcataagggcgccaaacgtgtcgaaaagttattagaccgaccagatcgcttgattggtcttattcttatcggcaacaacctcgtgaacattcttgcttcagcaattgcgactatcatcggcatgcgtctttatggcgatttaggtgtcgcgatcgcaacgggtgcgctaactatggttgtcttggtgtttgccgaagtcacaccaaaaaccgttgcagcgctgtatccagagcgtgtttcctacgcgagcagcatcttgctcactatcctaatgaaagtgctatcaccgctcgtaatgctggtgaactttattactaatggtttcattcgtttgcttggcgtgaaagctgatcacacggtagaggatcatctgagttcggaagagttacgcacggtcgtaaatgaagctggcggacttatccctcgtcgtcaccaagacatgttggtgtctattctcgatctcgaacacgttactgtaaatgacattatggtgccacgtaatgagattacgggtatcgatattaacgatgactggaaatccattgttcgtcagttaacacactcgccacacggtcgaatcgttttttatcgcgaccaaatcgatgaagtggttggtatgctgcgtttacgtgaagcgtaccgtttgatgctagaaaagaacgagttcaacaaagagacgttactacgcgcggcagatgaagtgtattacattcctgaaggcacgccgctgaacgtacaaatgttgaagttccaacgcaacaagcagcgcatcggtctgatcgtagacgagtacggtgatatcatcggtctaatcactcttgaagacatcctagaagagatcattggtgagttcacgacgtctatttctcctagtttgtctgatgaaatcagcccacaaggcgatggtagtttcttaattgaaggcagcaccaatatccgcgatatcaacaaaggtttgaaatgggatttacctaccgatggccctagaaccttgaatggtctgattttggaacacctagaagatattccagagagtcatttaagtgtccgtgtcgcgggccacccaatggaaattgttgaaatcgaagaaaaccgaatcaagctagttcgagtctatccgaagaagaaaaaatcaacgtccaaataa

SEQ ID NO: 40678 - protein, 426 aa, Vibrio parahaemolyticus RIMD 2210633
MDDISTGILFALLACLIVISGYFSGSETGMMSLNRYRLKHLAKSGHKGAKRVEKLLDRPDRLIGLILIGNNLVNILASAIATIIGMRLYGDLGVAIATGALTMVVLVFAEVTPKTVAALYPERVSYASSILLTILMKVLSPLVMLVNFITNGFIRLLGVKADHTVEDHLSSEELRTVVNEAGGLIPRRHQDMLVSILDLEHVTVNDIMVPRNEITGIDINDDWKSIVRQLTHSPHGRIVFYRDQIDEVVGMLRLREAYRLMLEKNEFNKETLLRAADEVYYIPEGTPLNVQMLKFQRNKQRIGLIVDEYGDIIGLITLEDILEEIIGEFTTSISPSLSDEISPQGDGSFLIEGSTNIRDINKGLKWDLPTDGPRTLNGLILEHLEDIPESHLSVRVAGHPMEIVEIEENRIKLVRVYPKKKKSTSK

SEQ ID NO: 40679 - DNA, 1323 bp, Haemophilus ducreyi 35000HP
  CDS (1)..(1323): transl_table=11
ttgaccgcttacacaagctggcaaacgccacatttattcatattcatacaacaggattatattttggacagcattccactaagcagtctttttatcacactcatcatactcctccttctttccgcctttttttccagcgcagaaaccggcctcatgtcgcttaatcgctacaaaatacgccatttaaccgcacaaggccacaaaggcgcaaaactagcggaaaaattactcaacaaaacggacgtactactcagcctaatcttaatctgcaacaacctgattaacatcgccgcctctgccatcgcaacaatgataggcatacggctagcgggcgacacaggcatcgcgattgccaccggcattctcaccttagttatgctagtgttttctgaaatcttacccaaaaccatagcggtaatttaccccgaaaaaatcagctttttagccagctacatcctcaccccattaaaaaaactgctcatgccactggtgtttttaatgaacctcatcattaaatacctaatgaaattaatgcgcattcgccaacacgaaaaaagcgggctgagtatagaagaattacgcagcgtagtattagaagcgggcaaatttatcccgaccgctcaccaagaaatgctcatctccattttagatatggaaaaagtgactgttgaagatattatggtgccacgcaacgacattggcggtattgatattgaagacgactggaaagccattatccgccagctcaaccacgccgcacacgggcgagtcgtgctttataaaggcaatatggataaaaacatcctcggcattttacgtatacgcgaagcattccgcttattactagacaaagaggaacccagcaaaaaaaccctaatccgagcggtggacgaagcctattttattccggaaggcacaccactcatcacccaattaatgcattttaaaaccaacaaagaacgccttggtttagtggtggatgaatatggcgacatcaaagggctagtaacattagcagatattttagaagaaattgtaggcgaatttaccacctctaccgcacccaccttagccgaagaggttaaacagcagtctgatggctctgtgattatcgaaggctctgccaatttacgtgatttaaataaactatttaattggcatttaccgattaatgaagtccgcacctttaacggcttaattttagaacatttagaaaaaattccgatagaaggtacccaatttaggctaaaccaacttaatattaccgttttagaagtggcggataatatggtgaaaaaagtgaaagtagaactgattgaatag

SEQ ID NO: 40680 - protein, 440 aa, Haemophilus ducreyi 35000HP
MTAYTSWQTPHLFIFIQQDYILDSIPLSSLFITLIILLLLSAFFSSAETGLMSLNRYKIRHLTAQGHKGAKLAEKLLNKTDVLLSLILICNNLINIAASAIATMIGIRLAGDTGIAIATGILTLVMLVFSEILPKTIAVIYPEKISFLASYILTPLKKLLMPLVFLMNLIIKYLMKLMRIRQHEKSGLSIEELRSVVLEAGKFIPTAHQEMLISILDMEKVTVEDIMVPRNDIGGIDIEDDWKAIIRQLNHAAHGRVVLYKGNMDKNILGILRIREAFRLLLDKEEPSKKTLIRAVDEAYFIPEGTPLITQLMHFKTNKERLGLVVDEYGDIKGLVTLADILEEIVGEFTTSTAPTLAEEVKQQSDGSVIIEGSANLRDLNKLFNWHLPINEVRTFNGLILEHLEKIPIEGTQFRLNQLNITVLEVADNMVKKVKVELIE

SEQ ID NO: 40681 - DNA, 1293 bp, Photorhabdus luminescens subsp. laumondii TTO1
  CDS (1)..(1293): transl_table=11
ttggagcatgtctcaacaagcacattactgattattttaatcatcatggtcattgtctcagcttatttctccgcttccgagacaggtatgatgacaatgaatcgttatcgcttacgtcatctggcaaagcaagggaatcactctgcccgcagagttgaagcattacttcgtcatcctgagcagctcatcagcctgattcttatcggtaacaatctggttaatattcttgcctcagcactcgcgactattattggtatgcgtctttatggcgatgccggagttgctatcgcaaccggtattctgacctttattgtgctgatattttctgaagttatgccaaaaacgatagccgccctctatcctgaaaaagtcgcttttccgagtagttttttgctccgcccgttacagaaaatcatgctgccgttagtctgggtgctaaataaaattactttattgttaatgcgttgccttggtatcaaacaacctactggctccagtcacgcaatgagtaaagatgaacttcgcactattgtgcatgaatcaaatgccaagctatcacagcaacatcaggatatgctgatttcaattttagatctggaaaaagtcacaatcggcgacattatggttccccgtaatgaaattgttggcattgatattaatgatgactggaaatccatcattcggcaattaactcattctcctcatggccggatcgtgctttaccgtgattcacttgatgatgccattggtatgcttcgtgtgcgtgaagcttaccgattgatgacagaaaaaaaagagttcaccaaaagaaacctgatcaaagcagcagataaaatctactatgtccccgtcagcacgccacttaatatccagttagtgaatttccaacgtaataaggagaaggccgggctcatcgttgatgaatatggtgatattcaaggtctggtcactgttgaagatatcctcgaagagattgtcggtgattttacaacatcaatgtctccttctctggcagaagaagtttcaccacaaagcgatgggactattttggttgacgggacagccaatatccgcgaattaaataaagccttcaactgggcattgcctgttgatggaccacgaacggttaatggtatggtgcttgaagagttgggagaaatacccgcacttaatgtacaagtgcaaatcggcaaatataattttgaagtactttcagtgaacgataatgtcattaaacaagttcgcgtcactcccatcagcctattttctgatcaaaaagcacaagtcatttaa

SEQ ID NO: 40682 - protein, 430 aa, Photorhabdus luminescens subsp. laumondii TTO1
MEHVSTSTLLIILIIMVIVSAYFSASETGMMTMNRYRLRHLAKQGNHSARRVEALLRHPEQLISLILIGNNLVNILASALATIIGMRLYGDAGVAIATGILTFIVLIFSEVMPKTIAALYPEKVAFPSSFLLRPLQKIMLPLVWVLNKITLLLMRCLGIKQPTGSSHAMSKDELRTIVHESNAKLSQQHQDMLISILDLEKVTIGDIMVPRNEIVGIDINDDWKSIIRQLTHSPHGRIVLYRDSLDDAIGMLRVREAYRLMTEKKEFTKRNLIKAADKIYYVPVSTPLNIQLVNFQRNKEKAGLIVDEYGDIQGLVTVEDILEEIVGDFTTSMSPSLAEEVSPQSDGTILVDGTANIRELNKAFNWALPVDGPRTVNGMVLEELGEIPALNVQVQIGKYNFEVLSVNDNVIKQVRVTPISLFSDQKAQVI

SEQ ID NO: 40683 - DNA, 1284 bp, Yersinia pseudotuberculosis IP 32953
  CDS (1)..(1284): transl_table=11
gtgttggagcacgtatcaactagctcattgatcattatcttagtcattatgatcatcgtttcagcttacttctctgcatccgaaaccggcatgatgacacttaaccggtatcggatgcgtcacttatccaaacaaggcaaccgtgccgcacgtcgggtggaaaagctcctgaaccgcccagatcgcctaataagtttggtactgattggcaataatctggttaacatactggcatctgcgctggcgacgattgtcggtattcgtttatacggtgatgccggagttgccatcgcaaccggggtgctaacttttgtgatcctgatttttgctgaagtcctgccaaaaactatcgctgccctttatcctgaacgtgtcgcattccctagcagtatgctcctgacccccctgcaaaagatcatgctgccactcgtgtggctactgaataccattactcgcgggttgatgcatttatgtggcattagaggaaatgtgcgcagcagtgatgcgatgagtaaagatgaattacgcacgatagtgagtgagtcccaatcaaaaatctctcgccgcaatcaagacatgttgatttcagtattagatctggagaaagtgactgtcagcgatatcatggtaccgcgtaatgaagtcgtcggtatcgatattaatgatgattggaagtcaatcatgcgccagcttacacactcgccccatggtcgcattgtgttatatcgccagtccttggatgacgctattggcatgctacgtgtgcgggaagcctatcggttgatgacggagaaaaaggaatttaataaagagaacctactgcgtgcagccgatgaaatctactttatccccgaaggcacgccactcaatgtacaactggtgaaattccaacgtaataaaaagaaagtcggcatgattgtcgatgaatatggtgatattcaaggtttagtgacagttgaagatattctggaggagatcgtgggtgattttaccacctcaatgtcccctacgcttgcggaagaagttaatccacagagcgacggctcggtactgattgatggcagtgccagcgtccgcgaagtgaacaaagcctttaactggtcattacccgtcgatgcccgcaccatcaatggcatgttgctggaagagctagaagaaattccgcaagcacatattcacgtccgtcttggaaattaccaaattgaagtacttgatgtgcaggaaaatatgattaagcgggttaaaattaccccaatgacttccgcagaacattcgaccctataa

SEQ ID NO: 40684 - protein, 427 aa, Yersinia pseudotuberculosis IP 32953
MLEHVSTSSLIIILVIMIIVSAYFSASETGMMTLNRYRMRHLSKQGNRAARRVEKLLNRPDRLISLVLIGNNLVNILASALATIVGIRLYGDAGVAIATGVLTFVILIFAEVLPKTIAALYPERVAFPSSMLLTPLQKIMLPLVWLLNTITRGLMHLCGIRGNVRSSDAMSKDELRTIVSESQSKISRRNQDMLISVLDLEKVTVSDIMVPRNEVVGIDINDDWKSIMRQLTHSPHGRIVLYRQSLDDAIGMLRVREAYRLMTEKKEFNKENLLRAADEIYFIPEGTPLNVQLVKFQRNKKKVGMIVDEYGDIQGLVTVEDILEEIVGDFTTSMSPTLAEEVNPQSDGSVLIDGSASVREVNKAFNWSLPVDARTINGMLLEELEEIPQAHIHVRLGNYQIEVLDVQENMIKRVKITPMTSAEHSTL

SEQ ID NO: 40685 - DNA, 1260 bp, Mannheimia succiniciproducens MBEL55E
  CDS (1)..(1260): transl_table=11
ttggacagtattccccttagtacgttatttataactctctttattctcctgattctctcggcctatttttccagttcggaaaccggattgctttctttgaaccgttatcgcatgcgctatctcgccgaaaaaggacataaaggcgccaaaaaaacggaaactttacttaaaaaaaccgataaattactcagcctgattcttatctgcaataatctggtcaatatttcggcttccgctatcgccaccatcattggtatgcgtttgtacggcgatatgggtgttgccatcgcaacaggcgtactcacctttgtgatgctggttttttccgaaatttatccgaaaacaattgcggcgatctatccggaaaaagtagcctttacctcaagccacctgttaattctcttgatgaaactattctcacctttagttttcttcatgaatattattattcaggggcttataaagattaccgggctgaaaaccgaaacaaaagcgcattccatcagcccggaagaattacgagccattgtgaatgaatcgggtaaatttataccttccgctcaccagaaaatgttactttctattcttgatttagaagaagtaacagtcgatgacattatggtgccgcgcaatgatatttcgggcattgatattgatgacgactggaaagcgattatgcgtcagttaaaccatgcaccgcacggtcgcgtggtactttataaaggcgatatggaacaaaacgtattaggtatgctgagagttcgtgaggcctatcgcctaatgatggataaaaacgaattcactaaagaaatgcttattcgtgccgtggatgaaatttattacattccggaaggcacaccgctcactgcgcaattattaaactttcgtcacagaaaagaacgtatcggcttggtggtagacgaatacggcgatattaaaggcttggtcacactggaagatattttagaggaaatcgtgggtgaatttactacttcaaccaccccctctatcaatgaagagatcaccaaacaatccgacggttcaatgattatcgacggctccgcaaatatccgcgatatcaataaaatgttgaactggcatttaaatacagatgaagcgcgcacctttaacgggctgatcctggaatatcttgaagaaatcccacaggaaggaacggtttgtgagattgaagggttacaaattactattcttgaagtgagcgaaaatatggtgaaacaagcaaaagtcgtgaaattataa

SEQ ID NO: 40686 - protein, 419 aa, Mannheimia succiniciproducens MBEL55E
MDSIPLSTLFITLFILLILSAYFSSSETGLLSLNRYRMRYLAEKGHKGAKKTETLLKKTDKLLSLILICNNLVNISASAIATIIGMRLYGDMGVAIATGVLTFVMLVFSEIYPKTIAAIYPEKVAFTSSHLLILLMKLFSPLVFFMNIIIQGLIKITGLKTETKAHSISPEELRAIVNESGKFIPSAHQKMLLSILDLEEVTVDDIMVPRNDISGIDIDDDWKAIMRQLNHAPHGRVVLYKGDMEQNVLGMLRVREAYRLMMDKNEFTKEMLIRAVDEIYYIPEGTPLTAQLLNFRHRKERIGLVVDEYGDIKGLVTLEDILEEIVGEFTTSTTPSINEEITKQSDGSMIIDGSANIRDINKMLNWHLNTDEARTFNGLILEYLEEIPQEGTVCEIEGLQITILEVSENMVKQAKVVKL

SEQ ID NO: 40687 - DNA, 1266 bp, Colwellia psychrerythraea 34H
  CDS (1)..(1266): transl_table=11
atgctttttaccattcttggcatcttaatactgatttctgcttatttttcaggttctgaaactggcatgatgtcattgaatagatatcgattacgtcatcttgaaaaacaaaaacacagaggtgctaagcgagttagtaaattactcgctcgaccagatcgccttattggtttaattcttattggtaataacctagttaatgtttttgcatcattagttgctggggttatttttaatcgatacttcggcgatgctgggattttatatgctggtttagtactgaccttggtcatcttaatttttgcagaggtcacgccaaaaacattggcggcactctatcctgaacaagtagctttccctagttcaatagttttaagcttattgcttaaaatcctttttcctattgtggttgtcgtcaattggataaccaatggtattttaaggcttcttggtgttagctctgaacaaagagagcaacatagccttagtagtgaggagctaagaaccgttgtgaatgaatctggcgcgttattacatcagcgtgatcaagatatgctagtaagtattctagacttagaaaaggtctccgttgaagacataatgatcccacgcagtgacttagttggcattgatgttaacgatgactggaaaaaaattcaaaaacagcttactcaagctaatcatacccgtgtattactctatcgcgatagtatcgatgatgttgttggttatatccatgctagagatgccttaaaattgttatcaaaaaatcagttcaacaaagctactttactaagagcggtacgtgagttgtattttgtacctgaaggtactccattaaatattcaactattaaagtttcagcatgctaaagagcgtataggtctagtggttgatgaatacggtgatattcaaggcttagtaacgttagaagatattcttgaagagattgttggtgactttactaccaccatgaccccaacaaccagtgatgaggtaaccttacagcctgatggcagctatttagtggatggtagcgcgagtattcgtgatattaataaagagatgtcatggcaattgcccacagatggccctaaaacccttaacggcttaattatcgagtatttggaagagataccaaaaagtaatattagcttgcgtatctctggctaccctgtcgaaatcattgacgttgcaggcaataagattaaaactgttagggtcatgcctgagcactttatcgatgaaagtcctgaagaagagtaa

SEQ ID NO: 40688 - protein, 421 aa, Colwellia psychrerythraea 34H
MLFTILGILILISAYFSGSETGMMSLNRYRLRHLEKQKHRGAKRVSKLLARPDRLIGLILIGNNLVNVFASLVAGVIFNRYFGDAGILYAGLVLTLVILIFAEVTPKTLAALYPEQVAFPSSIVLSLLLKILFPIVVVVNWITNGILRLLGVSSEQREQHSLSSEELRTVVNESGALLHQRDQDMLVSILDLEKVSVEDIMIPRSDLVGIDVNDDWKKIQKQLTQANHTRVLLYRDSIDDVVGYIHARDALKLLSKNQFNKATLLRAVRELYFVPEGTPLNIQLLKFQHAKERIGLVVDEYGDIQGLVTLEDILEEIVGDFTTTMTPTTSDEVTLQPDGSYLVDGSASIRDINKEMSWQLPTDGPKTLNGLIIEYLEEIPKSNISLRISGYPVEIIDVAGNKIKTVRVMPEHFIDESPEEE

SEQ ID NO: 40689 - DNA, 1260 bp, Haemophilus somnus 129PT
  CDS (1)..(1260): transl_table=11
ttggatagtatcccccttagtaccttatttattacattaattatcttacttattctctcagcttatttttccggttctgaaacgggagtgctttccgttaatcgctatcgtatgcgatttttagcagaaaaagggcataaaggggcacaaaaaacagagaaattgcttaagagaacggatgttttcctcagtctaattttaatttgcaataacttagttaatatttccgcatcagcaattgcaaccattataggtatgcgtatatatggtgatgttggcgttgccgttgcgacaggtttattgacctttgtaatgttaattttttcagaaatttttcctaaaactattgccgcactttatcctgaaaaagttgcttttgtttcaagtcatattattagcatactattgaaaatttttagtccattagtttttattataaatctatttattaccgggctaatgaaactttttcgtttagaaaatgaagtaaaagcacattctcttaactcagaagaattacgtgcaatagtgaatcaatcaggacaatatatcccttctgcacaccaagaaatgcttctttctattttggacttagagaaagttacggtcgatgacattatggtgccacgtaatgatatagccggtattgatgttgatgatgattggaaatcgattatgcgtcagctgaatcatgccgctcacgggcgtgttgtactttataaaggcagtattgatgaaaatgtactgggtatattacgggttcgtgaggcttatcgcctaatgctggataaaaatgaatttagtaaagaaacgctcattcgtgcagtagatgaaacttatttcatccctgaggggacagaattgaatactcaattacttaatttccgcaacaataaagaacgtattggcttggtcgtagacgaatatggggatattaaaggactcgtaacgttagaagatattttggaagaaattgtcggtgaatttaccacttcaaccgccccatctattgatgaagaagtgacacagcaatctgacggaacaataattattgaaggatctgccaatttacgtgatttaaataaattatttaattggaatttagataccgaagatgcccgcacttttaatggattgattttagaacatttagaagaaattcctaatgaaggaactgaatgtgaaataaacgggctaaaaattactgtattagaagtggcggataatatgattaaacaagttaaagttgaaaaagtttaa

SEQ ID NO: 40690 - protein, 419 aa, Haemophilus somnus 129PT
MDSIPLSTLFITLIILLILSAYFSGSETGVLSVNRYRMRFLAEKGHKGAQKTEKLLKRTDVFLSLILICNNLVNISASAIATIIGMRIYGDVGVAVATGLLTFVMLIFSEIFPKTIAALYPEKVAFVSSHIISILLKIFSPLVFIINLFITGLMKLFRLENEVKAHSLNSEELRAIVNQSGQYIPSAHQEMLLSILDLEKVTVDDIMVPRNDIAGIDVDDDWKSIMRQLNHAAHGRVVLYKGSIDENVLGILRVREAYRLMLDKNEFSKETLIRAVDETYFIPEGTELNTQLLNFRNNKERIGLVVDEYGDIKGLVTLEDILEEIVGEFTTSTAPSIDEEVTQQSDGTIIIEGSANLRDLNKLFNWNLDTEDARTFNGLILEHLEEIPNEGTECEINGLKITVLEVADNMIKQVKVEKV

SEQ ID NO: 40691 - DNA, 1272 bp, Shewanella sp. MR-7
  CDS (1)..(1272): transl_table=11
ttggacgctatatcgacaagcgcactcctcattttcttactagtgcttattctttgttctgcctacttttcaggttctgaaaccgccatgatgacccttaaccgctatcggttaagacatctcgcctcaaacggccataaaggtgccattcgtgccctcaagttgctcgaacgcccagaccgcttaattggcttaattctgattggcaataacctagttaatattcttgcctcggccattgccaccattgttggtatgcgcctttggggcgatttaggcgtcgcgatagccacaggtgtgctgaccttagtcgtgctggtctttgccgaagtcacacccaaaaccatcgccgccttgaaccctgagcgaattgccttcccatcgagtattttactcattggtttatcaacaatttttgcctatgtcgttaccagcgttaactggataaccacaggtatgctgcgtctctttggcatcaaaaccatcagcagcagtgatgcactcagccaagaagaattaaggacggtagtccatgaggctggcgccttgatcccccaacgccaccaagagatgttgttatcaatcttggatttagagaaggtcaccgtggaggacatcatggtgccgcgctcggatatttacgccattaacgtcaacgatgattttaagtatatcaaccgtcaagtgatccaaagtccacatactcgtgtactggtttaccgcgatactattgacgatgccgtcggctttattcatctgcgtgacgcgctgcgactgcaatcgaaagagcagttcagtaagtcctcattactacgtgccgtcaaagagctctactttattcccgaaggcacgccgctcaatgtgcaattagccaactttcagcacaataaagagcgcatcggcctagtggtcgatgaatacggtgatattcaaggattggtaacactcgaagatattctcgaagaaattgtcggcgacttcaccacctctatgctggccacaccgagtgaagacattaccgcccaacaggatggaagctacttagtcgatgccagtatcactatccgtgatttgaataaagaaatgaaatgggacttcccaaccgatggccccaaaaccctcaatggcttgatcttagagtatttagaagatatccccgccgaaaacactagcctgcgcctagccggttatccattagaagtcattgaagttgcagacaatatggtcaaaaccgtacgtatcattccacagcattatcagtctcaaaagtaa

SEQ ID NO: 40692 - protein, 423 aa, Shewanella sp. MR-7
MDAISTSALLIFLLVLILCSAYFSGSETAMMTLNRYRLRHLASNGHKGAIRALKLLERPDRLIGLILIGNNLVNILASAIATIVGMRLWGDLGVAIATGVLTLVVLVFAEVTPKTIAALNPERIAFPSSILLIGLSTIFAYVVTSVNWITTGMLRLFGIKTISSSDALSQEELRTVVHEAGALIPQRHQEMLLSILDLEKVTVEDIMVPRSDIYAINVNDDFKYINRQVIQSPHTRVLVYRDTIDDAVGFIHLRDALRLQSKEQFSKSSLLRAVKELYFIPEGTPLNVQLANFQHNKERIGLVVDEYGDIQGLVTLEDILEEIVGDFTTSMLATPSEDITAQQDGSYLVDASITIRDLNKEMKWDFPTDGPKTLNGLILEYLEDIPAENTSLRLAGYPLEVIEVADNMVKTVRIIPQHYQSQK

SEQ ID NO: 40693 - DNA, 1293 bp, Pseudomonas aeruginosa UCBPP-PA14
  CDS (1)..(1293): transl_table=11
atggatgagctgcaccccgggtacctggtcggcctgctggttctcctggtcgcctgctcggcgttcttctcctgcgtcgagaccgccctgctcaacctcgaccgttaccgcctgcgcctacaggccaagcaaggcctgcgcggggcccggcgcagcagttggctgctgctgcacgacgaccgcctgcgcggcaccctgttgttcggccgcaccctggtcaacgtcagcgccgccgccctggccagttgggccgcgctgcgccactggggcgtcatcggcctggccgtcgccatccccggcatgaccctgctcctgctgctgttcggcgccctgctgccgcgccgctacggcgcccttcgctcggaacgcgtcgccctgccgctcagcctgccgctcctgatcctgcagcgcctgtgctggcccctgctgtggctgctgaccctgctaagcaacgcgctgctgcgcctgctcggcgtcgccgcggcggaacaggacgacagcggacgcagccgcgacgaagaggccctgcatccggccgacaacccccaggccagcgaggtcaaccggcatgacatgctgctcggcctgctggacctggagaaggtcacggtcaacgacctgatgatcccgcgcaacgaaatcgaaggcatcgacctcgacgacgaactcgaggtcatcgtcgagcaactgcgcaccaccagccacacccgcctgccggtctaccgcgacgacgtcaaccagatcgaaggggtcgtgcacatgcgccagatcgcgcgcctgctgacccagggccgcctgaccaaggagaatctccgccaggcctgcatggagccgtatttcgtgccggaaagcacgccgctgtcgacccagctggtgaacttccagaaggagaagcgccgtatcggcgtggtggtcgacgaatatggcgaggtgatcggcatcgtcacgctggaggacatcctcgaagagatcgtcggcgacttcaacgacctcgacagcctcgacaacccggatatccaggcccaggaagacggcagcttcgtcatcgacggcagcgccaacctgcgcgagctgaacaagtcgcttggctggcaattgccctgcgacggcccgaagactctcaacggcctggtcaccgaagccctggagcagatccccgattgcgcggtgtgcctgcgcatcggcccctactgcctggaaatccagcagtcggcggaaaaccgtgtgaaaagcgtgcgcgcctggcatccccgcgcgctgaccccgctggtcgaaagcgacgccagcgtctga

SEQ ID NO: 40694 - protein, 430 aa, Pseudomonas aeruginosa UCBPP-PA14
MDELHPGYLVGLLVLLVACSAFFSCVETALLNLDRYRLRLQAKQGLRGARRSSWLLLHDDRLRGTLLFGRTLVNVSAAALASWAALRHWGVIGLAVAIPGMTLLLLLFGALLPRRYGALRSERVALPLSLPLLILQRLCWPLLWLLTLLSNALLRLLGVAAAEQDDSGRSRDEEALHPADNPQASEVNRHDMLLGLLDLEKVTVNDLMIPRNEIEGIDLDDELEVIVEQLRTTSHTRLPVYRDDVNQIEGVVHMRQIARLLTQGRLTKENLRQACMEPYFVPESTPLSTQLVNFQKEKRRIGVVVDEYGEVIGIVTLEDILEEIVGDFNDLDSLDNPDIQAQEDGSFVIDGSANLRELNKSLGWQLPCDGPKTLNGLVTEALEQIPDCAVCLRIGPYCLEIQQSAENRVKSVRAWHPRALTPLVESDASV

SEQ ID NO: 40695 - DNA, 1272 bp, Shewanella sp. ANA-3
  CDS (1)..(1272): transl_table=11
ttggacgctatatcgacaagcgcactcctcattttcttactagtgcttatcctttgttctgcctacttttcaggttctgaaaccgccatgatgacccttaaccgctatcggttaaggcatctcgcctcaaacggccataaaggtgcgatacgcgccctcaagttactcgaacgtcctgaccgcttaattggcttgattctgataggtaataacctcgttaatattctcgcctccgccatagcgaccattattggaatgcgcctttggggcgatttaggcgtcgcggtcgccacaggtgtgctgaccttagtcgtattagtctttgccgaagtcacccccaaaactatcgccgccttgaaccctgaacgcattgccttcccatcgagtattttactcattggtctatcaacgatttttgcctatgtcgtcaccagcgtgaactggataaccacaggcatactgcgcctctttggcatcaagaccatcagcagtagcgatgcactgagccaagaagagttaaggacggttgtacatgaggctggcgccttgatcccccaacgccaccaggaaatgctgttatcgattctcgatttagaaaaagtgaccgttgaagacatcatggtgccgcgctcggatatctacgcgattaacgtcaacgatgactttaaatttatcaatcgccaagtgatccaaagcccacatactcgagtgttggtataccgcgataccattgacgatgccgtcggctttattcatctgcgtgacgcactgcgcctgcaatcaaaggagcagttcagtaaatcctcattgctacgtgcggtaaaagaactctactttattcccgaaggaacaccgctcaatgtgcaattagccaactttcagcacaataaagagcgcatcggcctagtggtcgatgaatatggtgatattcaaggattggtgacactcgaagatattctcgaagaaattgtcggcgacttcactacctctatgttggccacaccgagtgaagatattactgcccagcaggatggaagctacttagtcgatgccagtatcactatccgtgatttgaataaagaaatgaaatgggatttcccaaccgatggccctaaaaccctcaatggcttgatcttagagtatttagaggatatccccgccgagaacactagccttcgcctagcgggttacccattagaagtgattgaagtcgcggataatatggtcaaaacagtacgcatcattccgcagcattatcagtcgccacgctaa

SEQ ID NO: 40696 - protein, 423 aa, Shewanella sp. ANA-3
MDAISTSALLIFLLVLILCSAYFSGSETAMMTLNRYRLRHLASNGHKGAIRALKLLERPDRLIGLILIGNNLVNILASAIATIIGMRLWGDLGVAVATGVLTLVVLVFAEVTPKTIAALNPERIAFPSSILLIGLSTIFAYVVTSVNWITTGILRLFGIKTISSSDALSQEELRTVVHEAGALIPQRHQEMLLSILDLEKVTVEDIMVPRSDIYAINVNDDFKFINRQVIQSPHTRVLVYRDTIDDAVGFIHLRDALRLQSKEQFSKSSLLRAVKELYFIPEGTPLNVQLANFQHNKERIGLVVDEYGDIQGLVTLEDILEEIVGDFTTSMLATPSEDITAQQDGSYLVDASITIRDLNKEMKWDFPTDGPKTLNGLILEYLEDIPAENTSLRLAGYPLEVIEVADNMVKTVRIIPQHYQSPR

SEQ ID NO: 40697 - DNA, 1260 bp, Haemophilus somnus 2336
  CDS (1)..(1260): transl_table=11
ttggatagtatcccccttagtaccttatttattacattaattatcttacttattctctcagcttatttttccggttctgaaacgggagtgctttccgttaatcgctatcgtatgcgatttttagcagaaaaagggcataaaggggcacaaaaaacagagaaattgcttaagagaacggatgttttcctcagtctaattttaatttgcaataacttagttaatatttccgcatcagcaattgcaaccattataggtatgcgtatatatggtgatgttggcgttgccgttgcgacaggtttattgacctttgtaatgttaattttttcagaaatttttcctaaaactattgccgcactttatcctgaaaaagttgcttttgtttcaagtcatattattagcatactattgaaaatttttagtccattagtttttattataaatctatttattagcgggctaatgaaactttttcgtttaaaaaatgaagtaaaagcacattctcttaactcagaagaattacgtgcaatagtgaatcaatcaggacaatatatcccttctgcacaccaagaaatgcttctttctattttggacttagagaaagttacggtcgatgacattatggtgccacgtaatgatatagccggtattgatgttgatgatgattggaaagcgattatgcgtcagctgaatcatgccgctcacgggcgtgttgtactttataaaggcagtattgatgaaaatgtactgggtatattacgggttcgtgaggcttatcgcctaatgctggataaaaatgaatttagtaaagaaacgctcattcgtgcagtagatgaaacttattttatccctgaggggacagaattaaatactcaattacttaatttccgcaacaataaagaacgtattggcttggtcgtagacgaatatggggatattaaaggactcgtaacgttagaagatattttggaagaaattgtcggtgaatttaccacttcaaccgccccatctattgatgaagaagtgacacagcaatctgacggaacaataattattgaaggatctgccaatttacgtgatttaaataaattatttaattggaatttagataccgaagatgcccgcacttttaatggattgattttagaacatttagaagaaattcctaatgaaggaactgaatgtgaaataaatgggctaaaaattactgtattagaagtggcggataatatgattaaacaagttaaagttgaaaaagtttaa

SEQ ID NO: 40698 - protein, 419 aa, Haemophilus somnus 2336
MDSIPLSTLFITLIILLILSAYFSGSETGVLSVNRYRMRFLAEKGHKGAQKTEKLLKRTDVFLSLILICNNLVNISASAIATIIGMRIYGDVGVAVATGLLTFVMLIFSEIFPKTIAALYPEKVAFVSSHIISILLKIFSPLVFIINLFISGLMKLFRLKNEVKAHSLNSEELRAIVNQSGQYIPSAHQEMLLSILDLEKVTVDDIMVPRNDIAGIDVDDDWKAIMRQLNHAAHGRVVLYKGSIDENVLGILRVREAYRLMLDKNEFSKETLIRAVDETYFIPEGTELNTQLLNFRNNKERIGLVVDEYGDIKGLVTLEDILEEIVGEFTTSTAPSIDEEVTQQSDGTIIIEGSANLRDLNKLFNWNLDTEDARTFNGLILEHLEEIPNEGTECEINGLKITVLEVADNMIKQVKVEKV

SEQ ID NO: 40699 - DNA, 1173 bp, Actinobacillus pleuropneumoniae serovar 1 str. 4074
  CDS (1)..(1173): transl_table=11
atgtcgctcaaccgctataaaatgcgccaccttgccgaaagcggtcataaaggggcgaaacttgcggagaaactccttaacaaaacggatgttttacttagtcttatccttatttgtaataacttagtcaatatcgccgcctccgcgattgctaccatgatcggtatgcgtttagccggcgatgccggtgtggcgattgccaccggtgcgctgacttttgtgatgctggttttctcggaaattctgcctaaaaccattgcggcgatttatccggaaaaaatcggctttttcgccagttatatcttaacgccgttaaaaaaattattaatgccgcttgtgttcttgatgaatttaatcatcagcggcttaatgaaattattacgcgttaaaaaagatgaaaataccggattaagtgcggaagaattacggggcgtagtattggaagcgggcaaatttattccgaccgaacaccaagaaatgctaatttccattttagatatggagaaagtgacggttgaagatattatggtgccgcgtaacgatatcggtagcattgatattgatgacgattggaaatcgattatgcgccagcttaaccacgccgctcacgcccgagtcgtgctttataaaggtaatatggataaaaacatcatcggtatgctgcgcgtacgagaggcgttccgtttacttttagaaaaagacgagccgagtaaagaaacgctgattcgagcggttgatgaagtttatttcattcccgaagggacacctttaaccacacaattaatgaatttcaaaagtaataaagaacgtatcggtttagtggtggacgaatacggggatattaaaggcttagtcactttggaagacattcttgaagaaatcgtcggcgaatttactacctcgaccgcaccgacgatagaagaagaagtcaaaccgcagtccgacggctcggtgattattgaaggttcggcaaatttacgtgatctgaataagttatttgattggaatctgcctgttgatgaagccagaacctttaacggattgatcctggaacatttagagaaaattccggacgaagatactcagtttagcttatataacctgaaaataacgattcttgaagtgagcgataatatggttaaacaagcgaaagtcgagcctatacaaaattaa

SEQ ID NO: 40700 - protein, 390 aa, Actinobacillus pleuropneumoniae serovar 1 str. 4074
MSLNRYKMRHLAESGHKGAKLAEKLLNKTDVLLSLILICNNLVNIAASAIATMIGMRLAGDAGVAIATGALTFVMLVFSEILPKTIAAIYPEKIGFFASYILTPLKKLLMPLVFLMNLIISGLMKLLRVKKDENTGLSAEELRGVVLEAGKFIPTEHQEMLISILDMEKVTVEDIMVPRNDIGSIDIDDDWKSIMRQLNHAAHARVVLYKGNMDKNIIGMLRVREAFRLLLEKDEPSKETLIRAVDEVYFIPEGTPLTTQLMNFKSNKERIGLVVDEYGDIKGLVTLEDILEEIVGEFTTSTAPTIEEEVKPQSDGSVIIEGSANLRDLNKLFDWNLPVDEARTFNGLILEHLEKIPDEDTQFSLYNLKITILEVSDNMVKQAKVEPIQN

SEQ ID NO: 40701 - DNA, 1290 bp, Haemophilus influenzae R2846
  CDS (1)..(1290): transl_table=11
ttgattaacgaacaaaaggattttcccttggatagcattccccttagtactttatttattattcttattatctgtttagttttatcagcctatttttctggttctgaaactggactactctccctcaataaatatcgtcttcgttttctatctgaacaaggcaataaaggcgcgaaaaaagcggaaaaactgctagaaaagccagataccttgttaagttttattcttatttttaataaccttgtgaatatcagcgcatctgcaattgcaacagtaattggtatgcgtttatatggcgatgccggcgtggcgattgcaacgggtttgctcactttcgtaatgctcgtattttctgaaatattccccaaaacggtggctgcaatgcacgcagaaaaagtgagttttttttcaagtcatattttaacttcattgcttaaaatcttttatccgctcgtttggttaatgaatatttttactaaatccttgatgcaaatagtagggttaaaacttgatatgcaaaaacaagtaattagtagtgaagaactgcgtagtattgtgtcagaagcgggcgaagcaacaccaaatgaacaacatccacaaatgttactgtctattttggatatggaaaccgtcactgttgatgacattatggttccccgcaacgaaatcggcggtataaatattgatgatgattggcgagctattatgcgccagctcaatcacgccgcacacaatcgtgttgtactttataaaagtagccttgatgaacaagtacttggcattttgcgcgtgcgtgaagcattccgcttgctccttgaaaaaaatgaatttaccaaagaaaccttaattcgtgccgcagatgaagtgtatttcattcctgaaagcacgccattaaaaacgcaacttgcaaatttccgtacaaataaagagcgaattggcttagttgtagatgaatacggcgatattaaagggcttgtcactttggaggatattttggaggaaatcgttggggattttaccacttccaccgccccaagcattgacaaagaagtaattcaacagtctgatggttcaatgattatcgatggctccgctaatctacgcgatctcaacaaaatgtttaactgggaattagatacagaagatgctcgtacttttaatggtttaatcttagaacacttagaggaaatacccgacgaaggtacgatttgcgaaattgatggtttgctaatcactattcttgaagtgggcgataatatgataaaacaggcgaaagtcgtcaaactttaa

SEQ ID NO: 40702 - protein, 429 aa, Haemophilus influenzae R2846
MINEQKDFPLDSIPLSTLFIILIICLVLSAYFSGSETGLLSLNKYRLRFLSEQGNKGAKKAEKLLEKPDTLLSFILIFNNLVNISASAIATVIGMRLYGDAGVAIATGLLTFVMLVFSEIFPKTVAAMHAEKVSFFSSHILTSLLKIFYPLVWLMNIFTKSLMQIVGLKLDMQKQVISSEELRSIVSEAGEATPNEQHPQMLLSILDMETVTVDDIMVPRNEIGGINIDDDWRAIMRQLNHAAHNRVVLYKSSLDEQVLGILRVREAFRLLLEKNEFTKETLIRAADEVYFIPESTPLKTQLANFRTNKERIGLVVDEYGDIKGLVTLEDILEEIVGDFTTSTAPSIDKEVIQQSDGSMIIDGSANLRDLNKMFNWELDTEDARTFNGLILEHLEEIPDEGTICEIDGLLITILEVGDNMIKQAKVVKL

SEQ ID NO: 40703 - DNA, 1221 bp, Pseudoalteromonas tunicata D2
  CDS (1)..(1221): transl_table=11
gtgctaatttcaggttatttttcaagctctgaaaccggcatgatgtctttaaaccgctatcggttaaagcatttagagaaagaaaatcataaaggtgcgttacgggttagcgccttactcaaacgacctgacagactcataggtttgatcttaatcggtaataatctagttaatattgccgcatctgcagtagcaaccattataggtatgcgcctttatggcgacgtcggcattgccattgccacttttgtgttaacctttgtgattttaatttttgctgaagtcacaccaaaaacactggctgctatttatcctgaaaaaattgcgtttccaagctcaattttattaaaaatattattaatagtgttatttcctttagttgttgcaattaattggatcactaatggtttgttaaaattatttggcatcagtcataaagatattcaagagcacagcttaagcactgaagaattacgcacagttgtatatgaatcaggctctttaattcccgaacaccaccaaaacatgttgatgtcgattcttgatttagagcaggtcactgtcgaagatgtgatgatccctcgtaatgaaattattgcgattgatattaatgatgagtggaagtctattatgaaacaattgactcatgctcaacatactcgcgtcttactttaccgcgaccaaatcgatgacgcagttggttttattcactctcgtgatgcattaagactgctcactaaagagcagttcactaaagcgaatttattacgtgccgtacgcgagatttactatattcctgaaggcacatcgcttaatacacaattacttaaatttcaacaaagtaaagagcggatcggcttagtggttgatgaatatggtgatattcaaggcttagtgacactcgaagatattctcgaggaagtcgttggcgatttcactaccacaatggcacgctcagccagtgaagaagtgatattacagcccgatggttcatacctagttgatggcagtgccaatattcgtgatattaataaagaaatgaattggcaatttccaattaatggtccaaaaacctttagcggccttattgttgaatttttagaggaaattcctgaagcaaacgttggtttgcgtattgcgggctatccgattgaaattattgaagtaaaagaaaacatgataaaagttgcacgagtcattcctgagtttaaaaaggactaa

SEQ ID NO: 40704 - protein, 406 aa, Pseudoalteromonas tunicata D2
MLISGYFSSSETGMMSLNRYRLKHLEKENHKGALRVSALLKRPDRLIGLILIGNNLVNIAASAVATIIGMRLYGDVGIAIATFVLTFVILIFAEVTPKTLAAIYPEKIAFPSSILLKILLIVLFPLVVAINWITNGLLKLFGISHKDIQEHSLSTEELRTVVYESGSLIPEHHQNMLMSILDLEQVTVEDVMIPRNEIIAIDINDEWKSIMKQLTHAQHTRVLLYRDQIDDAVGFIHSRDALRLLTKEQFTKANLLRAVREIYYIPEGTSLNTQLLKFQQSKERIGLVVDEYGDIQGLVTLEDILEEVVGDFTTTMARSASEEVILQPDGSYLVDGSANIRDINKEMNWQFPINGPKTFSGLIVEFLEEIPEANVGLRIAGYPIEIIEVKENMIKVARVIPEFKKD

SEQ ID NO: 40705 - DNA, 1227 bp, Photobacterium sp. SKA34
  CDS (1)..(1227): transl_table=11
atgatcgttctatcggcttatttctccagttcagaaacaggcatgatggcgctaaaccgctacaaactacgccacatggccaaccaaggccataaaggagccaaacgtgtcgagaaactactttctcgtactgatcgcttaattggcctaattctgatcggcaataatttagttaatattttagcgtcagcaattgcgactattcttggtatgcgtctttatggcgatgcaggtgtggcaattgcaacgggtgccctgactattttgatccttgtctttgcagaagtaacccctaagacggtagctgcgctctatcctgaacgtgtctcttatgccagcagcatcatcttaaacattttaatgaaagtgctttatccattagtgtggtttgttaatgggatcaccagtgcgtttcttttcattttaggattaaagaacagcaataacagttcatctaaactaagctcagaagaattgcgtaccattgtcaacgaagctggcggcttaatcccacgtcgtcaccaagatatgctgttatcgattcttgatttagaaaatgtcaccgttgaagacttaatggtaccgcgcagtgagatcgcggcgattaacgtgaatgatgattggaaatcaatagtccgccaactaagtcattcagcccatggtcgtatcgtactttaccgcgacaacattgatgaagttgtaggaatgctacgtgtacgtgaagcctaccgcctaatgatggacaaaaacgatttcagtaaagaaaatctattacgtgcggctgatgaagtctatttcattccagaaggcaccccactgaacattcagcttttgaagttccaacgtaataaagagcgtatcggtttaattgttgacgagtatggtgatattcaaggcttgatcacagtagaggatattcttgaagagatcgtcggggaatttacaacatcgattgcaccaacgttagcagaagaaatcacggcacaaagtgatggtagcttgatgattgaaggcagcgctaacattcgcgatttgaataaaagcttaaattggaaattacctacggatggccctcgtactttaaatggtcttatcctcgaacatcttgaatatattccagataataaagttagcttcatgattgcgaatcataaaatggaaatcgttgaggtttcaggcaatatgataaagctgattaaagtgttacccaacacgcaaaataagtga

SEQ ID NO: 40706 - protein, 408 aa, Photobacterium sp. SKA34
MIVLSAYFSSSETGMMALNRYKLRHMANQGHKGAKRVEKLLSRTDRLIGLILIGNNLVNILASAIATILGMRLYGDAGVAIATGALTILILVFAEVTPKTVAALYPERVSYASSIILNILMKVLYPLVWFVNGITSAFLFILGLKNSNNSSSKLSSEELRTIVNEAGGLIPRRHQDMLLSILDLENVTVEDLMVPRSEIAAINVNDDWKSIVRQLSHSAHGRIVLYRDNIDEVVGMLRVREAYRLMMDKNDFSKENLLRAADEVYFIPEGTPLNIQLLKFQRNKERIGLIVDEYGDIQGLITVEDILEEIVGEFTTSIAPTLAEEITAQSDGSLMIEGSANIRDLNKSLNWKLPTDGPRTLNGLILEHLEYIPDNKVSFMIANHKMEIVEVSGNMIKLIKVLPNTQNK

SEQ ID NO: 40707 - DNA, 1269 bp, Vibrio sp. Ex25
  CDS (1)..(1269): transl_table=11
ttggacgacatctctacgggtatcttgtttgcgctactcgcgtgtcttatcgtcatatcaggttacttttccggctcagaaacagggatgatgtctctgaaccgttatcgcttaaagcacttagccaaaaatgggcataaaggcgctaagcgagtcgaaaggctattagaccgtccagatcgtttgattggtcttattcttatcggcaacaacctcgttaatattctcgcgtccgccatcgcgaccattattggtatgcgtttgtatggtgatttaggtgtcgctatcgcaaccggtgcactgactatggttgtattggtttttgctgaagttaccccaaaaacaattgcagcgctgtaccctgaacgcgtgtcttacgcgagcagtatcctactgaccatattgatgaagttactatcgcctttggtgatgctcgttaactttattacgaatggctttattcgtttacttggcgtaaaagcggatcactcagtagaagaccatcttagttccgatgagctgcgtaccgtagtaaacgaagctggcggcttgatccctcgccgacaccaagacatgttggtgtctattttggatcttgagcacgtcactgtgaacgacatcatggtgccacgtaatgagattaccggtatcgatattaatgatgactggaaatccatcgttcgtcagcttacccactcaccacatggacgcattgttttttatcgtgaccaaattgatgaagtggttggcatgctgcgcctgcgtgaagcttaccgcctgatgctggaaaaaaacgagttcaataaagagacgctattacgtgctgcggatgaagtctattacatcccggaaggtacgccactgaacgtgcaaatgttaaagttccaacgcaacaaacagcgtattggtctgattgttgatgagtatggcgacattattggcttggtgacattggaagatattctggaagagatcattggcgaattcacgacctcgatttctccaagcctttctgatgaaatcagtcctcaaggtgacggaagcttcctcattgaaggcagcaccaatatccgagatatcaataaaggcctgaaatgggatttaccaacggatggcccaagaacgttaaacggtcttattttagagcacctggaagatattccagagagccatttaagcgtgagagtggcgggtcatccaatggagcttgttgagattgaagaaaaccgcatcaagctcgttcgtgtttatcctaaaaagaaaaaatag

SEQ ID NO: 40708 - protein, 422 aa, Vibrio sp. Ex25
MDDISTGILFALLACLIVISGYFSGSETGMMSLNRYRLKHLAKNGHKGAKRVERLLDRPDRLIGLILIGNNLVNILASAIATIIGMRLYGDLGVAIATGALTMVVLVFAEVTPKTIAALYPERVSYASSILLTILMKLLSPLVMLVNFITNGFIRLLGVKADHSVEDHLSSDELRTVVNEAGGLIPRRHQDMLVSILDLEHVTVNDIMVPRNEITGIDINDDWKSIVRQLTHSPHGRIVFYRDQIDEVVGMLRLREAYRLMLEKNEFNKETLLRAADEVYYIPEGTPLNVQMLKFQRNKQRIGLIVDEYGDIIGLVTLEDILEEIIGEFTTSISPSLSDEISPQGDGSFLIEGSTNIRDINKGLKWDLPTDGPRTLNGLILEHLEDIPESHLSVRVAGHPMELVEIEENRIKLVRVYPKKKK

SEQ ID NO: 40709 - DNA, 1227 bp, Alteromonadales bacterium TW-7
  CDS (1)..(1227): transl_table=11
ttggtacttttttctgcttatttttctggttctgaaactgggattatgtcaatcaatcgtatacgcctgcgacatcttgcaaagcaagatcaccgtgcagctaaacgagtcagtaaattacttagccgtcccgataggcttattggcctcattttaattggtaacaacctagtaaatatagccgcagctcaagttgccactattataggtatccgcctatacggtgatttaggtatcgcaatagcaacaggtgtacttaccttggtagtgcttatatttgctgaagttacgcctaaaacactcgcagccctttaccccgaaaaagtagcctttccaagctcagtgatactcaaaggcctgctgaaaatcatgtttccgtttgttgtagttgttaactggctaactaacggcatattacgtttatttggtattagtgcagctcaaatcgatgagcacagcatgagcaaagaagaattaaaaacagtcgtgaacgaatcaggtgctttattacctgctcgtcaccaaagcatgctgacttcaatcttagatctagaacaagttactgttgaagatattatgattccacgtaacgaaattgtggcgattgatataaacgacgattggaaagtaattagccgccagctaacacatgcacaacatacacgtgttttgttgtatcgcgataatattgatgatgctgtcggttttattcactcacgtgatgcgctgcgacttttaacaaaagagcaatttgacaaaccgtcactattgcgtgcagttcgcgaaatttactttatccccgaaggcacatcgttaaatacacaactatttaagtttcaacaatcaaaagagcgaattggtatagttgttgatgaatacggcgatattcaaggactagtaacccttgaagacattttagaagaggtggtgggcgatttcacgaccactcaaacacgtacgccaagtgaagaagtgacaacacaacctgatggttcgtttattgtagatggtggcgcaaacgtccgtgacttaaataaagaaatggaatgggactttcctcttgatggccctaaaacattaagcggcttaattgttgaatatttagaagatattcctgacgcaaatatcagtttacgtattgcgggatacccattagaagttctcgaagtaaaagaaaacatgattaaacaggttaaaatacaacctaaaaaacgtactcgtcaataa

SEQ ID NO: 40710 - protein, 408 aa, Alteromonadales bacterium TW-7
MVLFSAYFSGSETGIMSINRIRLRHLAKQDHRAAKRVSKLLSRPDRLIGLILIGNNLVNIAAAQVATIIGIRLYGDLGIAIATGVLTLVVLIFAEVTPKTLAALYPEKVAFPSSVILKGLLKIMFPFVVVVNWLTNGILRLFGISAAQIDEHSMSKEELKTVVNESGALLPARHQSMLTSILDLEQVTVEDIMIPRNEIVAIDINDDWKVISRQLTHAQHTRVLLYRDNIDDAVGFIHSRDALRLLTKEQFDKPSLLRAVREIYFIPEGTSLNTQLFKFQQSKERIGIVVDEYGDIQGLVTLEDILEEVVGDFTTTQTRTPSEEVTTQPDGSFIVDGGANVRDLNKEMEWDFPLDGPKTLSGLIVEYLEDIPDANISLRIAGYPLEVLEVKENMIKQVKIQPKKRTRQ

SEQ ID NO: 40711 - DNA, 1206 bp, Pseudomonas putida GB-1
  CDS (1)..(1206): transl_table=11
atggacaccctgccgtacgcaccgctattcggcacactggcactggccctgttgtggtcagcactgttcaccgccgtggatgccgcccgcttgcaactcaatggcacgcaacgcgctggcgaagatggccagcccatgctgccagcccaggccctggtgctgtgtgccagcctgggcaaactgctggtgctgggcctggcctgcctggtgggccagcgctacagtggcgagcacggcttctggctggccggtctggccgccaccctcagcttgctggtgttcgccgaatacctgccgcggcgcctggcccggcgcaacccgcaggcgttcgtcagcctgggcaccagcctgctgaaagtccccctcgccctgctgcagccgctggcctacctgctggacggcttcgccaagctgctgctgcgcccgttccgcgtacagcccacagccgtggccttgcatgctcaggaatcggatgacttcgacgaagacgaggaacacgaaccacctcgccacagcctgctcgacggcctgcagtcgctggacaaggtcaccgtcaacgacatcctggtgccacgtaacgaagtggacggcatcaacctcgacgagccgatcgagcgcatcatcgagcagttgatcgtcagccgccacacccgcctgccggtctaccacaacgacatcaaccaagtcgaagccatcctcaacaccaagctgatcagccacctgctgcccaaggccgagctgaccctggatgcgctgcacagcgcctgctacgaaccctatttcgtacccgaaagcacgcccctgcaaatgcaactgctgaacttccacaaacaacaacgccgcttgggcgtggtggtggacgagtacggcgaggtactgggcatcgtcaccctggaagacatcctcgaagagatcgtcggcgagttcgaggacgagcaaagcctggaaaaccctcacgtgcacccgcagcccgatggcaccttcgtcatcgacggcacggcttcgttacgtgaaatcaaccgcaccttgggctggcacctgccctgcgacggtgggccgaaaaccctcaacgggctggttaccgaagcgctggaaagcatcccggagagcgccgtttgcctgaagatcggccgctatcgcctggaaatcctcgaaacagaggacaattgtgccagcaaggtactggtgtggaccgtgacccgatag

SEQ ID NO: 40712 - protein, 401 aa, Pseudomonas putida GB-1
MDTLPYAPLFGTLALALLWSALFTAVDAARLQLNGTQRAGEDGQPMLPAQALVLCASLGKLLVLGLACLVGQRYSGEHGFWLAGLAATLSLLVFAEYLPRRLARRNPQAFVSLGTSLLKVPLALLQPLAYLLDGFAKLLLRPFRVQPTAVALHAQESDDFDEDEEHEPPRHSLLDGLQSLDKVTVNDILVPRNEVDGINLDEPIERIIEQLIVSRHTRLPVYHNDINQVEAILNTKLISHLLPKAELTLDALHSACYEPYFVPESTPLQMQLLNFHKQQRRLGVVVDEYGEVLGIVTLEDILEEIVGEFEDEQSLENPHVHPQPDGTFVIDGTASLREINRTLGWHLPCDGGPKTLNGLVTEALESIPESAVCLKIGRYRLEILETEDNCASKVLVWTVTR

SEQ ID NO: 40713 - DNA, 1188 bp, Vibrio anguillarum
  CDS (1)..(1188): transl_table=11
atgatgtctttgaaccgctaccgcttaaagcacttggccaataccggccacaaaggtgcaaagcgtgttgaaaaactgcttgatcgtccagatcgcctcattggtttgatcctcattggcaacaacctagtcaatattttagcttctgcaattgccactattattggtatgcgcctttatggggatctaggagtggccattgccactggtgcgctgacgttggtcgttctggtttttgctgaagtgacgccaaaaacattagcagcgctttaccctgaacgcgtctcttacgccagcagcatcttactgaccttcttaatgaagatattgtcaccattggtgatgttcattaacttcatcaccaatggtttcatccgcttactaggccttaaggccaagcatggggcggaggatcatctaagctctgaagagttgagaaccgtcgtcaacgaagcgggtggtcttattcctcgtcgccaccaagatatgctgctttccattctcgatctcgaacatgttacggtgaacgacatcatgatcccacgtaacgaaattactggtatcaatattaacgatgattggaaatctatcgtgcgtcagttaactcactcgccacacggacgcgtggtgctttaccgagacaaaattgatgaagcggtgggcatattgcgccttcgtgatgcttctcgtttgatgttggaaaaaaaagagttcaataaagagatgattttacgtgccgctgatgaagtctacttcatcccggaaggcacaccgctcaacgtacaattacttaaattccaacgcaacaaagagcggattggcctgatcgttgatgaatacggtgatatcaatggcttgatcactgttgaagatattctcgaagagattgtgggggaattcacaacctcgatggcaccaagcttagccgatgaaattacaccacaaagtgatggcagcttcttgattgatggcagcgcaaatatccgtgacattaacaaagggctgaagtggaaactgccaacaacgggcccaagaaccttaaacggtttacttttggagcaccttgaagatattccaagtagccatttaagtgtcaaagtctctggtcatgcgatggagattgtggatgtagaagaaaaccgcattaagcaggttaaagtctttccacgcaaagccaaaaagcattaa

SEQ ID NO: 40714 - protein, 395 aa, Vibrio anguillarum
MMSLNRYRLKHLANTGHKGAKRVEKLLDRPDRLIGLILIGNNLVNILASAIATIIGMRLYGDLGVAIATGALTLVVLVFAEVTPKTLAALYPERVSYASSILLTFLMKILSPLVMFINFITNGFIRLLGLKAKHGAEDHLSSEELRTVVNEAGGLIPRRHQDMLLSILDLEHVTVNDIMIPRNEITGININDDWKSIVRQLTHSPHGRVVLYRDKIDEAVGILRLRDASRLMLEKKEFNKEMILRAADEVYFIPEGTPLNVQLLKFQRNKERIGLIVDEYGDINGLITVEDILEEIVGEFTTSMAPSLADEITPQSDGSFLIDGSANIRDINKGLKWKLPTTGPRTLNGLLLEHLEDIPSSHLSVKVSGHAMEIVDVEENRIKQVKVFPRKAKKH

SEQ ID NO: 40715 - DNA, 1188 bp, Vibrio vulnificus
  CDS (1)..(1188): transl_table=11
atgtcactgaaccgatatcgcttaaaacacctcgccaattctgggcacaaaggggctaagcgtgtcgaaaagttactgagccgcccagaccgattaattggtttgattcttatcggtaacaaccttgtcaatattcttgcctccgccattgcgaccattctcggcatgcgcctttatggtgatttgggtgttgcaattgcaaccggtgcccttaccttagtcgttttggtttttgcagaagtcacacctaaaaccgtggccgcactctatcctgaacgagtttcatacgcgagcagcattttgctggtggttttgatgaaactgctttcgcctttggtgatgttggtgaattttattaccaatggtttcattcgcttacttggtttgaaagcacaacacaacggcgaagacaatctcagctccgaagaactgcgtaccgtggtaaacgaagcgggcagcttaatcccccagcgacaccaagatatgctggtttccattttggacttagaacacgtcacagtgaatgacatcatgatcccgcgtaatgagattaccggcattgatatcaatgacgattggaaatccattgtccgtcagctgactcactcccctcatggccgcattgtcttgtatcgcgacaaaatcgacgaagccgttggtatgttaaggttacgagaagcgtatcgcttgatgcttgagaagaatgagttcaacaaagagaccttgctacgagcggcagatgaggtctatttcattcccgaaagcaccccactcaatgttcagctactcaagttccaacgcaataaacagcgcatcggcctaattgtcgatgaatatggcgatattatcggcctagtgacgctggaggatattctagaagagatcgtgggtgaatttaccacctcgattgcaccaagcctttcagatgagattactccgcaaggcgacggcagtttccttattgaaggaagcaccaacatccgtgatatcaataaaggtctgaaatggaaactgcccaccgatggtcctagaacgctcaatggcttaattttggagcacttagaagacattccagaaagccacctcagtgtgaaagtggccggccacgcgatggaaattgtggaacttgaagaaaaccgaattaagtcggtaaaagtctttcctaagcgaaaacgcaaaacgacctaa

SEQ ID NO: 40716 - protein, 395 aa, Vibrio vulnificus
MSLNRYRLKHLANSGHKGAKRVEKLLSRPDRLIGLILIGNNLVNILASAIATILGMRLYGDLGVAIATGALTLVVLVFAEVTPKTVAALYPERVSYASSILLVVLMKLLSPLVMLVNFITNGFIRLLGLKAQHNGEDNLSSEELRTVVNEAGSLIPQRHQDMLVSILDLEHVTVNDIMIPRNEITGIDINDDWKSIVRQLTHSPHGRIVLYRDKIDEAVGMLRLREAYRLMLEKNEFNKETLLRAADEVYFIPESTPLNVQLLKFQRNKQRIGLIVDEYGDIIGLVTLEDILEEIVGEFTTSIAPSLSDEITPQGDGSFLIEGSTNIRDINKGLKWKLPTDGPRTLNGLILEHLEDIPESHLSVKVAGHAMEIVELEENRIKSVKVFPKRKRKTT

SEQ ID NO: 40717 - DNA, 684 bp, Salmonella typhimurium
  CDS (1)..(684): transl_table=11
atgaccgttgatgacatcatggtgccgcgtaatgaaattatcgggatcgatatcaatgacgactggaagtctatcgagcggcagctcacccactcgccgcacggacgcattgtgctctatcgcgattcgctggatgacgccatcagtatgctgcgcgtgcgtgaagcctggcggttaatggccgagaaaaaagagttcaccaaagagatgatgctgcgcgccgccgatgaaatctattacgtcccggaaggtacgccgctcagtacgcaactgataaaatttcagcgcaataaaaagaaagtcggactggtcgtcaacgaatatggcgatatccaggggctggtcaccgtggaagatattctcgaggagatcgttggcgacttcaccacatcgatgtcgccgacactggcggaagaggtcacgccgcaaaacgacggttcggtcattattgacggtaccgccaacgtccgggaaatcaataaagcgtttaactggcacctgccggaagatgacgcgcgcaccgtcaacggggtgattctggaggcgctggaggaaattccggttgctggcacgcgcgtgcgcattgagcagtacgatatagatattctcgatgtacaggaaaatatgattaaccaggtaaaggttgtaccggtaaaaccgctgcgcgagagtgtggcggagtaa

SEQ ID NO: 40718 - protein, 227 aa, Salmonella typhimurium
MTVDDIMVPRNEIIGIDINDDWKSIERQLTHSPHGRIVLYRDSLDDAISMLRVREAWRLMAEKKEFTKEMMLRAADEIYYVPEGTPLSTQLIKFQRNKKKVGLVVNEYGDIQGLVTVEDILEEIVGDFTTSMSPTLAEEVTPQNDGSVIIDGTANVREINKAFNWHLPEDDARTVNGVILEALEEIPVAGTRVRIEQYDIDILDVQENMINQVKVVPVKPLRESVAE

SEQ ID NO: 40719 - DNA, 24 bp, Artificial sequence
  primer
atgaccgttgatgacatcatggtg

SEQ ID NO: 40720 - DNA, 18 bp, Artificial sequence
  primer
ttactccgccacactctc

SEQ ID NO: 40721 - protein, 387 aa, Artificial sequence
  consensus sequence
  Variant (2)..(5): Xaa in position 2 to 5 is any amino acid
  Variant (6)..(15): Xaa in position 6 to 15 is any or no amino acid
  Variant (17)..(21): Xaa in position 17 to 21 is any amino acid
  Variant (24)..(28): Xaa in position 24 to 28 is any amino acid
  Variant (30)..(33): Xaa in position 30 to 33 is any amino acid
  Variant (35)..(38): Xaa in position 35 to 38 is any amino acid
  Variant (42)..(43): Xaa in position 42 to 43 is any amino acid
  Variant (45)..(47): Xaa in position 45 to 47 is any amino acid
  Variant (49)..(51): Xaa in position 49 to 51 is any amino acid
  Variant (53)..(53): Xaa in position 53 is any amino acid
  Variant (55)..(56): Xaa in position 55 to 56 is any amino acid
  Variant (58)..(59): Xaa in position 58 to 59 is any amino acid
  Variant (61)..(63): Xaa in position 61 to 63 is any amino acid
  Variant (65)..(68): Xaa in position 65 to 68 is any amino acid
  Variant (70)..(72): Xaa in position 70 to 72 is any amino acid
  Variant (74)..(74): Xaa in position 74 is any amino acid
  Variant (76)..(76): Xaa in position 76 is any amino acid
  Variant (78)..(79): Xaa in position 78 to 79 is any amino acid
  Variant (81)..(83): Xaa in position 81 to 83 is any amino acid
  Variant (84)..(84): Xaa in position 84 is any or no amino acid
  Variant (86)..(88): Xaa in position 86 to 88 is any amino acid
  Variant (90)..(98): Xaa in position 90 to 98 is any amino acid
  Variant (99)..(99): Xaa in position 99 is any or no amino acid
  Variant (101)..(107): Xaa in position 101 to 107 is any amino acid
  Variant (108)..(108): Xaa in position 108 is any or no amino acid
  Variant (110)..(138): Xaa in position 110 to 138 is any amino acid
  Variant (139)..(140): Xaa in position 139 to 140 is any or no amino acid
  Variant (142)..(154): Xaa in position 142 to 154 is any amino acid
  Variant (155)..(160): Xaa in position 155 to 160 is any or no amino acid
  Variant (163)..(165): Xaa in position 163 to 165 is any amino acid
  Variant (168)..(168): Xaa in position 168 is any amino acid
  Variant (170)..(170): Xaa in position 170 is any amino acid
  Variant (174)..(174): Xaa in position 174 is any amino acid
  Variant (178)..(178): Xaa in position 178 is any amino acid
  Variant (181)..(182): Xaa in position 181 to 182 is any amino acid
  Variant (184)..(185): Xaa in position 184 to 185 is any amino acid
  Variant (187)..(189): Xaa in position 187 to 189 is any amino acid
  Variant (194)..(194): Xaa in position 194 is any amino acid
  Variant (196)..(196): Xaa in position 196 is any amino acid
  Variant (200)..(203): Xaa in position 200 to 203 is any amino acid
  Variant (205)..(205): Xaa in position 205 is any amino acid
  Variant (207)..(209): Xaa in position 207 to 209 is any amino acid
  Variant (211)..(214): Xaa in position 211 to 214 is any amino acid
  Variant (216)..(218): Xaa in position 216 to 218 is any amino acid
  Variant (219)..(219): Xaa in position 219 is any or no amino acid
  Variant (221)..(224): Xaa in position 221 to 224 is any amino acid
  Variant (226)..(226): Xaa in position 226 is any amino acid
  Variant (228)..(228): Xaa in position 228 is any amino acid
  Variant (231)..(232): Xaa in position 231 to 232 is any amino acid
  Variant (233)..(233): Xaa in position 233 is any or no amino acid
  Variant (235)..(236): Xaa in position 235 to 236 is any amino acid
  Variant (238)..(238): Xaa in position 238 is any amino acid
  Variant (240)..(241): Xaa in position 240 to 241 is any amino acid
  Variant (243)..(243): Xaa in position 243 is any amino acid
  Variant (246)..(247): Xaa in position 246 to 247 is any amino acid
  Variant (249)..(249): Xaa in position 249 is any amino acid
  Variant (251)..(252): Xaa in position 251 to 252 is any amino acid
  Variant (255)..(255): Xaa in position 255 is any amino acid
  Variant (259)..(260): Xaa in position 259 to 260 is any amino acid
  Variant (263)..(264): Xaa in position 263 to 264 is any amino acid
  Variant (266)..(268): Xaa in position 266 to 268 is any amino acid
  Variant (270)..(270): Xaa in position 270 is any amino acid
  Variant (272)..(272): Xaa in position 272 is any amino acid
  Variant (275)..(275): Xaa in position 275 is any amino acid
  Variant (283)..(283): Xaa in position 283 is any amino acid
  Variant (288)..(288): Xaa in position 288 is any amino acid
  Variant (298)..(298): Xaa in position 298 is any amino acid
  Variant (302)..(308): Xaa in position 302 to 308 is any amino acid
  Variant (309)..(309): Xaa in position 309 is any or no amino acid
  Variant (311)..(313): Xaa in position 311 to 313 is any amino acid
  Variant (315)..(315): Xaa in position 315 is any amino acid
  Variant (319)..(322): Xaa in position 319 to 322 is any amino acid
  Variant (324)..(327): Xaa in position 324 to 327 is any amino acid
  Variant (329)..(330): Xaa in position 329 to 330 is any amino acid
  Variant (333)..(335): Xaa in position 333 to 335 is any amino acid
  Variant (337)..(337): Xaa in position 337 is any amino acid
  Variant (340)..(343): Xaa in position 340 to 343 is any amino acid
  Variant (344)..(345): Xaa in position 344 to 345 is any or no amino acid
  Variant (347)..(347): Xaa in position 347 is any amino acid
  Variant (351)..(352): Xaa in position 351 to 352 is any amino acid
  Variant (354)..(354): Xaa in position 354 is any amino acid
  Variant (357)..(357): Xaa in position 357 is any amino acid
  Variant (360)..(379): Xaa in position 360 to 379 is any amino acid
  Variant (381)..(382): Xaa in position 381 to 382 is any amino acid
  Variant (384)..(386): Xaa in position 384 to 386 is any amino acid
NXXXXXXXXXXXXXXAXXXXXLLXXXXXLXXXXLXXXXLVNXXAXXXAXXXGXRXXGXXGXXXAXXXXTXXXLXFXEXXPXXXXAXXXEXXXXXXXXXXLXXXXXXXXPXXXXXXXXXXXXXXXXXXXXXXXXXXXXXXXEXXXXXXXXXXXXXXXXXXXMLXXXLDXEXVTVXDIMXPRXXIXXIXXXDDWKXIXRQLXXXXHXRXXXYXXXXDXXXXGXXXXRXAXRLXXXKXXFXKXXLXRAXXEXYXXPEXTPLXXQLXXFXXXKXRXGLXVDEYGDIXGLVTXEDILEEIVGXFTTXXXXXXXXEXXXQXDGSXXXXGXXXXRXXNKXXXWXLPXXXXXXTXNGLXXEXLEXIPXXXXXXXXXXXXXXXXXXXXNXXKXXXV

SEQ ID NO: 40722 - protein, 60 aa, Artificial sequence
  protein pattern
  Variant (3)..(3): Xaa in position 3 is Ala or Val
  Variant (4)..(4): Xaa in position 4 is Asp, Lys or Arg
  Variant (6)..(6): Xaa in position 6 is any amino acid
  Variant (8)..(8): Xaa in position 8 is Phe or Tyr
  Variant (9)..(9): Xaa in position 9 is Ile or Val
  Variant (12)..(12): Xaa in position 12 is Gly or Ser
  Variant (14)..(14): Xaa in position 14 is Glu, Pro or Ser
  Variant (16)..(17): Xaa in position 16 to 17 is any amino acid
  Variant (19)..(19): Xaa in position 19 is any or no amino acid
  Variant (21)..(21): Xaa in position 21 is any amino acid
  Variant (22)..(22): Xaa in position 22 is any or no amino acid
  Variant (24)..(26): Xaa in position 24 to 26 is any amino acid
  Variant (28)..(28): Xaa in position 28 is any amino acid
  Variant (29)..(29): Xaa in position 29 is Lys or Arg
  Variant (30)..(30): Xaa in position 30 is Ile, Leu or Val
  Variant (32)..(32): Xaa in position 32 is Ile, Leu or Met
  Variant (33)..(33): Xaa in position 33 is Ile or Val
  Variant (35)..(35): Xaa in position 35 is Asp or Asn
  Variant (41)..(41): Xaa in position 41 is any amino acid
  Variant (44)..(44): Xaa in position 44 is Ile or Val
  Variant (46)..(46): Xaa in position 46 is Leu or Val
  Variant (47)..(47): Xaa in position 47 is Ala or Glu
  Variant (53)..(54): Xaa in position 53 to 54 is Ile or Val
  Variant (56)..(56): Xaa in position 56 is Asp or Glu
  Variant (60)..(60): Xaa in position 60 is Ser or Thr
RAXXEXYXXPEXTXLXXQXLXXFXXXKXXXGXXVXEYGDIXGLXTXXDILEEXXGXFTTX

SEQ ID NO: 40723 - protein, 20 aa, Artificial sequence
  protein pattern
  Variant (2)..(2): Xaa in position 2 is Asp, Glu, Asn or Ser
  Variant (4)..(4): Xaa in position 4 is Ile or Leu
  Variant (6)..(6): Xaa in position 6 is Ile or Val
  Variant (9)..(9): Xaa in position 9 is Asn or Ser
  Variant (10)..(10): Xaa in position 10 is Asp or Glu
  Variant (11)..(11): Xaa in position 11 is Ile, Leu or Val
  Variant (12)..(12): Xaa in position 12 is any amino acid
  Variant (13)..(13): Xaa in position 13 is Ala, Gly or Ser
  Variant (15)..(15): Xaa in position 15 is Asp or Asn
  Variant (16)..(16): Xaa in position 16 is Ile or Val
  Variant (17)..(17): Xaa in position 17 is Asp, Glu or Asn
  Variant (20)..(20): Xaa in position 20 is Phe or Trp
VXDXMXPRXXXXXIXXXDDX

SEQ ID NO: 40724 - protein, 30 aa, Artificial sequence
  protein pattern
  Variant (2)..(2): Xaa in position 2 is Ile or Val
  Variant (3)..(4): Xaa in position 3 to 4 is any amino acid
  Variant (6)..(6): Xaa in position 6 is Gly, Asn, Pro or Ser
  Variant (9)..(9): Xaa in position 9 is Ser or Thr
  Variant (10)..(10): Xaa in position 10 is any amino acid
  Variant (11)..(11): Xaa in position 11 is Ile, Leu or Met
  Variant (12)..(12): Xaa in position 12 is Ile or Val
  Variant (13)..(13): Xaa in position 13 is Asp or Glu
  Variant (15)..(15): Xaa in position 15 is Gly, Ser or Thr
  Variant (16)..(16): Xaa in position 16 is Ala or Thr
  Variant (17)..(17): Xaa in position 17 is Asn or Ser
  Variant (18)..(18): Xaa in position 18 is Ile, Leu or Val
  Variant (20)..(20): Xaa in position 20 is Asp or Glu
  Variant (21)..(21): Xaa in position 21 is Ile, Leu or Val
  Variant (24)..(24): Xaa in position 24 is any amino acid
  Variant (25)..(25): Xaa in position 25 is Phe, Leu or Met
  Variant (26)..(26): Xaa in position 26 is any amino acid
  Variant (28)..(28): Xaa in position 28 is any amino acid
  Variant (29)..(29): Xaa in position 29 is Phe or Leu
  Variant (30)..(30): Xaa in position 30 is Asp, Asn or Pro
EXXXQXDGXXXXXGXXXXRXXNKXXXWXXX

SEQ ID NO: 40725 - protein, 29 aa, Artificial sequence
  protein pattern
  Variant (2)..(2): Xaa in position 2 is any or no amino acid
  Variant (4)..(4): Xaa in position 4 is any amino acid
  Variant (5)..(5): Xaa in position 5 is Glu, Lys or Arg
  Variant (7)..(7): Xaa in position 7 is Leu or Val
  Variant (8)..(9): Xaa in position 8 to 9 is any amino acid
  Variant (10)..(10): Xaa in position 10 is Ala or Ser
  Variant (11)..(11): Xaa in position 11 is any amino acid
  Variant (13)..(13): Xaa in position 13 is Gly or Thr
  Variant (15)..(15): Xaa in position 15 is Ile or Val
  Variant (16)..(16): Xaa in position 16 is Leu or Val
  Variant (17)..(17): Xaa in position 17 is Phe, Leu or Val
  Variant (19)..(19): Xaa in position 19 is Lys or Arg
  Variant (20)..(20): Xaa in position 20 is Asp, Gly or Gln
  Variant (21)..(21): Xaa in position 21 is any amino acid
  Variant (22)..(22): Xaa in position 22 is Ile, Leu or Met
  Variant (23)..(23): Xaa in position 23 is Asp or Glu
  Variant (24)..(24): Xaa in position 24 is any amino acid
  Variant (25)..(25): Xaa in position 25 is Ala, Asn or Val
  Variant (26)..(26): Xaa in position 26 is Ile or Val
  Variant (27)..(28): Xaa in position 27 to 28 is any amino acid
  Variant (29)..(29): Xaa in position 29 is Ile, Leu or Met
KXIXXQXXXXXHXRXXXYXXXXXXXXXXX

SEQ ID NO: 40726 - DNA, 702 bp, Escherichia coli
  CDS (1)..(702): transl_table=11
atgacacaggcagaacgccgccatgaccggctggctgtcaggctgtcactgataatcagccgtctggttgcgggtgaaacgttgagcgtgcgcaaactggcggctgagtttggcgtgtcagtgcgcacgctgcggcgtgattttcgtgaacgactgatgtatctggacctggagtatcagtccggatactgccgcttacgcactgctggcagtgagatgcagatggtgcccgacgtgcttatctttgcccaccgcagcgggctggccgggctttttcccggccttgaccgccgtctggtgaatgcactgctgatgtgcgatgagtctccctgcgtgatagcaccagccaatccggttccttcgccttcaggagcattgtctttctggagactgattcaggccattaccgggcgcaggcgggtgacgctgattgcagaggggcgacgctgtgagcgcctagctccctgccggttactcatccaccagcagacctggtatctggtggctgaacacgaagggcatatcgccgtattcacacttgatgaaatccatctgattcagcctttgcaggagacttttcgccgcaatgacagtctgtgtcgcctggttgaagacccggtcttcattcaggccttaccccattttcgctttatccagcattcactgcttacgtttgttccggccgacagcccaccggaataa

SEQ ID NO: 40727 - protein, 233 aa, Escherichia coli
MTQAERRHDRLAVRLSLIISRLVAGETLSVRKLAAEFGVSVRTLRRDFRERLMYLDLEYQSGYCRLRTAGSEMQMVPDVLIFAHRSGLAGLFPGLDRRLVNALLMCDESPCVIAPANPVPSPSGALSFWRLIQAITGRRRVTLIAEGRRCERLAPCRLLIHQQTWYLVAEHEGHIAVFTLDEIHLIQPLQETFRRNDSLCRLVEDPVFIQALPHFRFIQHSLLTFVPADSPPE

SEQ ID NO: 40728 - DNA, 681 bp, Escherichia coli CFT073
  CDS (1)..(681): transl_table=11
atgtctgatgatcgttcccggcatgatcgtctggcggttcgcttatcactcattatcagccgactgatggccggagaatctctgtcactaaagacactgtcagatgaatttggcgttacagaacgtactttacagcgcgattttcatcagcgtctggttcacctggatttagagtacagaaatggcaggtacagcctcagacgacagagcagcccgtgtgcgatccctgaaatgctttcttttatacagaataccgggatcgcacggatacttccgctccggaacggacgactgataacctgtcttaccgacaaccaggagccctctccctgccttatctggctaccggcgccggatatcactgcaacgttccccgagtgtttctcgcaactcatcctggcaataagacagtgtatccacatctctctgatgactgagcgatggtatccgtcactggagccctgccggctcatttattacagcggtagctggtatctgatcgcgttacagaagggaaaactgcaggtctttcctctggcagatatcaaatcagtcagcctgacatcagaacggtttgaacggagaggccacatccacagtctggtcgctgaagagcgttttatctccgccctgccacatttctctttcatccataaacttatcaacacctttaacctgtga

SEQ ID NO: 40729 - protein, 226 aa, Escherichia coli CFT073
MSDDRSRHDRLAVRLSLIISRLMAGESLSLKTLSDEFGVTERTLQRDFHQRLVHLDLEYRNGRYSLRRQSSPCAIPEMLSFIQNTGIARILPLRNGRLITCLTDNQEPSPCLIWLPAPDITATFPECFSQLILAIRQCIHISLMTERWYPSLEPCRLIYYSGSWYLIALQKGKLQVFPLADIKSVSLTSERFERRGHIHSLVAEERFISALPHFSFIHKLINTFNL

SEQ ID NO: 40730 - DNA, 681 bp, Escherichia coli CFT073
  CDS (1)..(681): transl_table=11
atgtctgataatcgttcccggcatgatcgcctggcggttcgcttatcactcattatcagccgactgatgaccggagaatctctgtcactaaaaacactgtcagatgaatttggcgttacagaacgtactttacagcgcgattttcatcagcgtctggttcacctggatttagagtacagaaatggcaggtacagcctcagacgacagagcagcccgggtgcgatccctgaaatgctttcttttatacagaataccgggatcgcacggatacttccgctccggaacggacgactgataacctgtcttaccgacaaccaggagccctctccctgccttatctggctaccggcgccggatatcactgcaacgttccccaagtgtttctcgcaactcatcctggcaataagacagtgtatccacatctctctgatggctgagcgatggtatccgtcactggagccctgccggctcatttattacagcggtagctggtatctgatcgcgttacagaagggaaaactgcaggtctttcctctggcagatatcaaatcagtcagcctgacatcagaacggtttgaacggagaggccacatccacagtctggtcgctgaagagcgttttatctccgccctgccacatttctctttcatccataaacttatcaacacctttaacctgtga

SEQ ID NO: 40731 - protein, 226 aa, Escherichia coli CFT073
MSDNRSRHDRLAVRLSLIISRLMTGESLSLKTLSDEFGVTERTLQRDFHQRLVHLDLEYRNGRYSLRRQSSPGAIPEMLSFIQNTGIARILPLRNGRLITCLTDNQEPSPCLIWLPAPDITATFPKCFSQLILAIRQCIHISLMAERWYPSLEPCRLIYYSGSWYLIALQKGKLQVFPLADIKSVSLTSERFERRGHIHSLVAEERFISALPHFSFIHKLINTFNL

SEQ ID NO: 40732 - DNA, 714 bp, Escherichia coli B
  CDS (1)..(714): transl_table=11
atgtctcaggctgagcgtcgttatgaccgcctgtctgtccggctttctctgattatcagccgtctgctcgcgggtgaaacgctgaatatgcgcaaactggccgctgagtttggcgtctcggagcgtaccctacatcgtgatttccgcgagcgtctgatttatctcgacctcgaatatcaggatggctgctgccgtctgctgaccggaggccgtcaggagattcgggaggaggccgcaatgcagtttgcccgtcagtcaggcactggcgcgttgtttcctgatatggaccaccatctggtcaattcattgctgagcagcaaggactcctcgccatgtcttatctggcatccgggggcatccgtaacgtcttcccgcccaggcatcttcacacgactggtcagggcggtatcagaaaacaggaaggtaaccctgctggctgacggatgccgttgcgacaaccttgccccctaccgactgattttcagcaccggtgggtggtttctggtgggggaacaccttgcccggataaccgtttttgcactgcacacagttcactccgtgacgtttcacgcggaaaccttcacaccagacggacatttcacccgcattctgtcacacccggattttttacaggcgttacctcattttcatgtttttcattcactactcgctgacggcagttacgggcagcttacccataaggaacaggcatga

SEQ ID NO: 40733 - protein, 237 aa, Escherichia coli B
MSQAERRYDRLSVRLSLIISRLLAGETLNMRKLAAEFGVSERTLHRDFRERLIYLDLEYQDGCCRLLTGGRQEIREEAAMQFARQSGTGALFPDMDHHLVNSLLSSKDSSPCLIWHPGASVTSSRPGIFTRLVRAVSENRKVTLLADGCRCDNLAPYRLIFSTGGWFLVGEHLARITVFALHTVHSVTFHAETFTPDGHFTRILSHPDFLQALPHFHVFHSLLADGSYGQLTHKEQA

SEQ ID NO: 40734 - DNA, 20 bp, Artificial sequence
  primer
atgacacaggcagaacgccg

SEQ ID NO: 40735 - DNA, 22 bp, Artificial sequence
  primer
ttattccggtgggctgtcggcc

SEQ ID NO: 40736 - protein, 216 aa, Artificial sequence
  consensus sequence
  Variant (2)..(6): Xaa in position 2 to 6 is any amino acid
  Variant (8)..(8): Xaa in position 8 is any amino acid
  Variant (12)..(12): Xaa in position 12 is any amino acid
  Variant (23)..(24): Xaa in position 23 to 24 is any amino acid
  Variant (27)..(27): Xaa in position 27 is any amino acid
  Variant (29)..(32): Xaa in position 29 to 32 is any amino acid
  Variant (34)..(35): Xaa in position 34 to 35 is any amino acid
  Variant (40)..(41): Xaa in position 40 to 41 is any amino acid
  Variant (45)..(45): Xaa in position 45 is any amino acid
  Variant (49)..(50): Xaa in position 49 to 50 is any amino acid
  Variant (53)..(54): Xaa in position 53 to 54 is any amino acid
  Variant (60)..(61): Xaa in position 60 to 61 is any amino acid
  Variant (63)..(65): Xaa in position 63 to 65 is any amino acid
  Variant (67)..(80): Xaa in position 67 to 80 is any amino acid
  Variant (81)..(81): Xaa in position 81 is any or no amino acid
  Variant (83)..(86): Xaa in position 83 to 86 is any amino acid
  Variant (88)..(92): Xaa in position 88 to 92 is any amino acid
  Variant (94)..(98): Xaa in position 94 to 98 is any amino acid
  Variant (100)..(102): Xaa in position 100 to 102 is any amino acid
  Variant (104)..(108): Xaa in position 104 to 108 is any amino acid
  Variant (109)..(109): Xaa in position 109 is any or no amino acid
  Variant (113)..(113): Xaa in position 113 is any amino acid
  Variant (115)..(128): Xaa in position 115 to 128 is any amino acid
  Variant (130)..(131): Xaa in position 130 to 131 is any amino acid
  Variant (133)..(134): Xaa in position 133 to 134 is any amino acid
  Variant (136)..(143): Xaa in position 136 to 143 is any amino acid
  Variant (145)..(152): Xaa in position 145 to 152 is any amino acid
  Variant (153)..(153): Xaa in position 153 is any or no amino acid
  Variant (155)..(155): Xaa in position 155 is any amino acid
  Variant (157)..(157): Xaa in position 157 is any amino acid
  Variant (160)..(165): Xaa in position 160 to 165 is any amino acid
  Variant (167)..(167): Xaa in position 167 is any amino acid
  Variant (169)..(177): Xaa in position 169 to 177 is any amino acid
  Variant (180)..(180): Xaa in position 180 is any amino acid
  Variant (182)..(191): Xaa in position 182 to 191 is any amino acid
  Variant (193)..(193): Xaa in position 193 is any amino acid
  Variant (195)..(208): Xaa in position 195 to 208 is any amino acid
  Variant (210)..(211): Xaa in position 210 to 211 is any amino acid
MXXXXXRXDRLXVRLSLIISRLXXGEXLXXXXLXXEFGVXXRTLXRDFXXRLXXLDLEYXXGXXXLXXXXXXXXXXXXXXXFXXXXGXXXXXPXXXXXLXXXLXXXXXXSPCXIXXXXXXXXXXXXXXFXXLXXAXXXXXXXXLXXXXXXXXXLXPXRLXXXXXXWXLXXXXXXXXXVFXLXXXXXXXXXXEXFXXXXXXXXXXXXXXFXXALPHF

SEQ ID NO: 40737 - protein, 50 aa, Artificial sequence
  protein pattern
  Variant (2)..(2): Xaa in position 2 is any amino acid
  Variant (13)..(13): Xaa in position 13 is Leu, Met or Val
  Variant (14)..(14): Xaa in position 14 is Ala or Thr
  Variant (17)..(17): Xaa in position 17 is Ser or Thr
  Variant (19)..(19): Xaa in position 19 is Asn or Ser
  Variant (20)..(20): Xaa in position 20 is Leu, Met or Val
  Variant (21)..(21): Xaa in position 21 is Lys or Arg
  Variant (22)..(22): Xaa in position 22 is any amino acid
  Variant (24)..(24): Xaa in position 24 is Ala or Ser
  Variant (25)..(25): Xaa in position 25 is Ala or Asp
  Variant (30)..(30): Xaa in position 30 is Ser or Thr
  Variant (31)..(31): Xaa in position 31 is any amino acid
  Variant (35)..(35): Xaa in position 35 is any amino acid
  Variant (39)..(39): Xaa in position 39 is His or Arg
  Variant (40)..(40): Xaa in position 40 is Glu or Gln
  Variant (43)..(43): Xaa in position 43 is Ile, Met or Val
  Variant (44)..(44): Xaa in position 44 is His or Tyr
  Variant (50)..(50): Xaa in position 50 is Gln or Arg
LXVRLSLIISRLXXGEXLXXXXLXXEFGVXXRTLXRDFXXRLXXLDLEYX

SEQ ID NO: 40738 - protein, 58 aa, Artificial sequence
  protein pattern
  Variant (2)..(2): Xaa in position 2 is any or no amino acid
  Variant (4)..(7): Xaa in position 4 to 7 is any amino acid
  Variant (8)..(8): Xaa in position 8 is any or no amino acid
  Variant (10)..(10): Xaa in position 10 is Phe or Tyr
  Variant (12)..(12): Xaa in position 12 is Ile or Val
  Variant (13)..(13): Xaa in position 13 is Ala or Gly
  Variant (14)..(16): Xaa in position 14 to 16 is any amino acid
  Variant (17)..(17): Xaa in position 17 is Ala or Gly
  Variant (18)..(18): Xaa in position 18 is His, Lys or Arg
  Variant (19)..(19): Xaa in position 19 is Ile or Leu
  Variant (20)..(20): Xaa in position 20 is Ala, Gln or Thr
  Variant (23)..(23): Xaa in position 23 is Ala, Pro or Thr
  Variant (25)..(25): Xaa in position 25 is any amino acid
  Variant (26)..(26): Xaa in position 26 is Asp, Glu or Thr
  Variant (27)..(27): Xaa in position 27 is Ile or Val
  Variant (28)..(28): Xaa in position 28 is His or Lys
  Variant (29)..(29): Xaa in position 29 is any amino acid
  Variant (30)..(30): Xaa in position 30 is Ile or Val
  Variant (31)..(31): Xaa in position 31 is Gln, Ser or Thr
  Variant (32)..(33): Xaa in position 32 to 33 is any amino acid
  Variant (34)..(34): Xaa in position 34 is Ala, Gln or Ser
  Variant (36)..(36): Xaa in position 36 is any amino acid
  Variant (38)..(39): Xaa in position 38 to 39 is any amino acid
  Variant (40)..(40): Xaa in position 40 is Asp, Asn or Arg
  Variant (41)..(41): Xaa in position 41 is Asp or Gly
  Variant (42)..(42): Xaa in position 42 is any amino acid
  Variant (43)..(43): Xaa in position 43 is Phe, Ile or Leu
  Variant (44)..(44): Xaa in position 44 is any amino acid
  Variant (45)..(45): Xaa in position 45 is Arg or Ser
  Variant (46)..(46): Xaa in position 46 is Ile or Leu
  Variant (47)..(47): Xaa in position 47 is Leu or Val
  Variant (48)..(48): Xaa in position 48 is Ala, Glu or Ser
  Variant (49)..(49): Xaa in position 49 is Asp, Glu or His
  Variant (50)..(50): Xaa in position 50 is Glu or Pro
  Variant (51)..(51): Xaa in position 51 is any amino acid
  Variant (53)..(53): Xaa in position 53 is Ile or Leu
  Variant (54)..(54): Xaa in position 54 is Gln or Ser
LXIXXXXXWXLXXXXXXXXXVFXLXXXXXXXXXXEXFXXXXXXXXXXXXXXFXXALPH

SEQ ID NO: 40739 - protein, 18 aa, Artificial sequence
  protein pattern
  Variant (2)..(3): Xaa in position 2 to 3 is any or no amino acid
  Variant (5)..(5): Xaa in position 5 is Leu or Val
  Variant (7)..(7): Xaa in position 7 is any amino acid
  Variant (8)..(8): Xaa in position 8 is any or no amino acid
  Variant (10)..(10): Xaa in position 10 is Ala or Gly
  Variant (11)..(11): Xaa in position 11 is Ala, Asn or Pro
  Variant (12)..(12): Xaa in position 12 is Asp, Pro or Ser
  Variant (13)..(13): Xaa in position 13 is Ile or Val
  Variant (14)..(14): Xaa in position 14 is Pro or Thr
  Variant (15)..(15): Xaa in position 15 is Ala or Ser
  Variant (16)..(16): Xaa in position 16 is Pro, Ser or Thr
  Variant (17)..(17): Xaa in position 17 is any amino acid
  Variant (18)..(18): Xaa in position 18 is Gly or Pro
PXXCXIXXPXXXXXXXXX

SEQ ID NO: 40740 - protein, 29 aa, Artificial sequence
  protein pattern
  Variant (2)..(2): Xaa in position 2 is any amino acid
  Variant (3)..(7): Xaa in position 3 to 7 is any or no amino acid
  Variant (9)..(9): Xaa in position 9 is Ala or Ile
  Variant (10)..(10): Xaa in position 10 is any amino acid
  Variant (11)..(11): Xaa in position 11 is Asn, Gln or Arg
  Variant (12)..(12): Xaa in position 12 is Ser or Thr
  Variant (14)..(14): Xaa in position 14 is any amino acid
  Variant (15)..(15): Xaa in position 15 is Ala or Gly
  Variant (16)..(16): Xaa in position 16 is any amino acid
  Variant (17)..(17): Xaa in position 17 is Ile or Leu
  Variant (18)..(18): Xaa in position 18 is Phe or Leu
  Variant (20)..(21): Xaa in position 20 to 21 is any amino acid
  Variant (22)..(22): Xaa in position 22 is Asp or Asn
  Variant (23)..(23): Xaa in position 23 is any amino acid
  Variant (24)..(24): Xaa in position 24 is His or Arg
  Variant (26)..(26): Xaa in position 26 is Ile or Val
  Variant (27)..(27): Xaa in position 27 is Asn or Thr
  Variant (28)..(28): Xaa in position 28 is Ala, Cys or Ser
MXXXXXXFXXXXGXXXXXPXXXXXLXXXL

SEQ ID NO: 40741 - DNA, 1014 bp, Escherichia coli
  CDS (1)..(1014): transl_table=11
atgatgacgacgatgctggaagtggcgaagcgcgccggggtttcaaaagcgaccgtttcccgcgtgctttcaggtaatggctacgtcagccaggagactaaagatcgcgtgtttcaggcggtagaagagagcggttaccgtccaaacttgctggcgcgcaatctgtcggcgaagagtactcagacgctggggctggtagtgaccaacacgctttaccacggcatttattttagtgaattactctttcatgccgcgcgaatggcggaagagaaagggcggcagttgctattggcagatggtaaacacagcgcagaagaagagcgccaggcgattcagtatctgctggatctgcgctgcgacgcgatcatgatttacccgcgttttttaagcgtggatgagatcgatgacatcattgacgcgcacagtcagccgataatggtgcttaatcgccgcctgcgcaaaaacagcagccatagcgtctggtgcgatcataaacagaccagttttaacgccgtggcagagttgataaacgccgggcatcaggagattgctttccttaccggctcgatggattcccccaccagcattgaacgtcttgccgggtataaagacgcgctggcgcagcatggtattgcgctcaatgaaaaacttatcgctaacggtaaatggacgcctgccagcggggccgaaggggtagaaatgttgctcgaacgtggggctaaatttagcgcgttagttgccagtaacgacgatatggcgataggtgcgatgaaagcgttacacgagcgcggcgtagcggtgccagagcaggtgtcagttatcggattcgatgatatcgctattgccccctacaccgttccggcgctctccagcgtaaaaattccggtgactgagatgattcaggaaattattggacggctgatttttatgctcgatggcggggatttctcaccgccgaaaaccttcagcggaaaactgatccgccgcgactcactcattgctccttcgcgataa

SEQ ID NO: 40742 - protein, 337 aa, Escherichia coli
MMTTMLEVAKRAGVSKATVSRVLSGNGYVSQETKDRVFQAVEESGYRPNLLARNLSAKSTQTLGLVVTNTLYHGIYFSELLFHAARMAEEKGRQLLLADGKHSAEEERQAIQYLLDLRCDAIMIYPRFLSVDEIDDIIDAHSQPIMVLNRRLRKNSSHSVWCDHKQTSFNAVAELINAGHQEIAFLTGSMDSPTSIERLAGYKDALAQHGIALNEKLIANGKWTPASGAEGVEMLLERGAKFSALVASNDDMAIGAMKALHERGVAVPEQVSVIGFDDIAIAPYTVPALSSVKIPVTEMIQEIIGRLIFMLDGGDFSPPKTFSGKLIRRDSLIAPSR

SEQ ID NO: 40743 - DNA, 1122 bp, Arabidopsis thaliana
  CDS (1)..(1122)
atgggtaaaccagtaacgttatacgatgtcgcagagtatgccggtgtctcttatcagaccgtttcccgcgtggtgaaccaggccagccacgtttctgcgaaaacgcgggaaaaagtggaagcggcgatggcggagctgaattacattcccaaccgcgtggcacaacaactggcgggcaaacagtcgttgctgattggcgttgccacctccagtctggccctgcacgcgccgtcgcaaattgtcgcggcgattaaatctcgcgccgatcaactgggtgccagcgtggtggtgtcgatggtagaacgaagcggcgtcgaagcctgtaaagcggcggtgcacaatcttctcgcgcaacgcgtcagtgggctgatcattaactatccgctggatgaccaggatgccattgctgtggaagctgcctgcactaatgttccggcgttatttcttgatgtctctgaccagacacccatcaacagtattattttctcccatgaagacggtacgcgactgggcgtggagcatctggtcgcattgggtcaccagcaaatcgcgctgttagcgggcccattaagttctgtctcggcgcgtctgcgtctggctggctggcataaatatctcactcgcaatcaaattcagccgatagcggaacgggaaggcgactggagtgccatgtccggttttcaacaaaccatgcaaatgctgaatgagggcatcgttcccactgcgatgctggttgccaacgatcagatggcgctgggcgcaatgcgcgccattaccgagtccgggctgcgcgttggtgcggatatctcggtagtgggatacgacgataccgaagacagctcatgttatatcccgccgttaaccaccatcaaacaggattttcgcctgctggggcaaaccagcgtggaccgcttgctgcaactctctcagggccaggcggtgaagggcaatcagctgttgcccgtctcactggtgaaaagaaaaaccaccctggcgcccaatacgcaaaccgcctctccccgcgcgttggccgattcattaatgcagctggcacgacaggtttcccgactggaaagcgggcagtcttctgttgttcatcctaagaagaagagaaaggtttga

SEQ ID NO: 40744 - protein, 373 aa, Arabidopsis thaliana
MGKPVTLYDVAEYAGVSYQTVSRVVNQASHVSAKTREKVEAAMAELNYIPNRVAQQLAGKQSLLIGVATSSLALHAPSQIVAAIKSRADQLGASVVVSMVERSGVEACKAAVHNLLAQRVSGLIINYPLDDQDAIAVEAACTNVPALFLDVSDQTPINSIIFSHEDGTRLGVEHLVALGHQQIALLAGPLSSVSARLRLAGWHKYLTRNQIQPIAEREGDWSAMSGFQQTMQMLNEGIVPTAMLVANDQMALGAMRAITESGLRVGADISVVGYDDTEDSSCYIPPLTTIKQDFRLLGQTSVDRLLQLSQGQAVKGNQLLPVSLVKRKTTLAPNTQTASPRALADSLMQLARQVSRLESGQSSVVHPKKKRKV

SEQ ID NO: 40745 - DNA, 1035 bp, Vibrio cholerae O1 biovar eltor str. N16961
  CDS (1)..(1035): transl_table=11
ttgcggactcagtttgaaggattgttgatggcaaccataaacgatgtgtgtaaattggcgggtgtctccaaagccacggtatcacgagtgctgaatgagacaggccaagtcaaagcacaaacgcgtgaagcggtacttgccgccatgcagcagctcggttatcagcccaacagtttggcgcaggcgctcgctaccaataccacaaactcaattggcttggtgctgccgcattttgagagcagctattttggttcgattttgtttgaagccgaacaaggcgcgcagaaagctgggaaaaaactgctggttatgaacagcaaaaacagtgagcaaggcgaaaaagaagcggtcgccacattagcggcgcagcgttgtgatgcgatcttgctgtacagtcgtcatttgaatgaggtgcaattacttgaattacaacagcaacatccatcgcccttagtgatcctcaatcgccgtttacatcacccgcaattgcacagctttgggctcgatcaaacgcaaattgcccagttagcgatgcagcatttgttgaatttagggcatcgtcaaattgcctgcattacatcgccgttggtgagcgagacgggaaaaattcgttatcaggtctatcaacaagcgttacatgagcaagggatagagttgagctcgtccttggtcattgaaggggataacacgctgcttggtggttatcaggcaatgcaacaactgctgcaacaaggcatttccatgacggctgtttttgcctgtaacgatgatatggcgctcggtgcaatgcgtgccatgcatgaacatggcattcatgtacccaaacaagtttccataatcgggattgataatgaacccgcggcggcttttgctatcccgagtttatcgagcgtgagtctaccgatcggcgagttaactcagcaagcaatcagtttggctgtcgagattgctaataaaaaaccacaagatgcacagcacaggctctatcaagggagtttgatcgcccgtgaatccaccatagcgctcaaactatga

SEQ ID NO: 40746 - protein, 344 aa, Vibrio cholerae O1 biovar eltor str. N16961
MRTQFEGLLMATINDVCKLAGVSKATVSRVLNETGQVKAQTREAVLAAMQQLGYQPNSLAQALATNTTNSIGLVLPHFESSYFGSILFEAEQGAQKAGKKLLVMNSKNSEQGEKEAVATLAAQRCDAILLYSRHLNEVQLLELQQQHPSPLVILNRRLHHPQLHSFGLDQTQIAQLAMQHLLNLGHRQIACITSPLVSETGKIRYQVYQQALHEQGIELSSSLVIEGDNTLLGGYQAMQQLLQQGISMTAVFACNDDMALGAMRAMHEHGIHVPKQVSIIGIDNEPAAAFAIPSLSSVSLPIGELTQQAISLAVEIANKKPQDAQHRLYQGSLIARESTIALKL

SEQ ID NO: 40747 - DNA, 1008 bp, Vibrio cholerae O1 biovar eltor str. N16961
  CDS (1)..(1008): transl_table=11
atggcaaccataaaagacgtagcacgtgaagccggtgtatctgtggcaacggtttcacgcgtcatcaacaaatccccgaaagccagccaagcctcgattgatacggtgaccagtgcgatgcacaaactcggctatcgtccgaacgccgcggctcgcgctttagtcaatcaaagcaccaataccataggggtcttggtcagcgatgtttctgatcccttctttggaactttagtcaaagccgtcgacactgtcgcccaccgcgaaggaaaacatttgctgatcggcaacggctaccaccgagcggaagaagagcgccgcgcgctggaactgctcatcaacagccgctgtgatgcactggtcatccactccaaagcgcttcccaatgaagagctgattgagtacgccaacgaggtaaaaacgctggtgttgatcaatcgccatattcctcagctcgccgatcgctgtatttcactcgacaaccagaaaggtgcttatttagcaaccgattttctcatccgtcaaggacatagaaacattgcttgcatcagctcctctcatcaaattgaggatgccgatcagcgtattgcgggctatcaacaagccttgaacgaacatggcatcaccctaagcagcagctatattgaaaaagccagcccagacagtgaaggcggcgaacaggcgatgactaacctactggtgaaatcactgccttttaccgcagtggtcgcttacaacgacaatatggccgctggagccctgttggtacttgaggaaaatgggcattcggttcctgaacatgtctcagtgattggttttgacgatgccctgatttcgcgctacttacgcccacgcctgacgaccgtgcgttacccaatccaactgatggcagaaaaagccactcagttggctcttgctttggcaaccgatgcaccgcgtgaaaatgatccgatgatcttttcgcccaccatcgttcgccgcgacagcgtggcacaaaaaagagagccttaa

SEQ ID NO: 40748 - protein, 335 aa, Vibrio cholerae O1 biovar eltor str. N16961
MATIKDVAREAGVSVATVSRVINKSPKASQASIDTVTSAMHKLGYRPNAAARALVNQSTNTIGVLVSDVSDPFFGTLVKAVDTVAHREGKHLLIGNGYHRAEEERRALELLINSRCDALVIHSKALPNEELIEYANEVKTLVLINRHIPQLADRCISLDNQKGAYLATDFLIRQGHRNIACISSSHQIEDADQRIAGYQQALNEHGITLSSSYIEKASPDSEGGEQAMTNLLVKSLPFTAVVAYNDNMAAGALLVLEENGHSVPEHVSVIGFDDALISRYLRPRLTTVRYPIQLMAEKATQLALALATDAPRENDPMIFSPTIVRRDSVAQKREP

SEQ ID NO: 40749 - DNA, 1023 bp, Agrobacterium tumefaciens str. C58
  CDS (1)..(1023): transl_table=11
atgagcaaagaccaaggttcgaatatcagggaagttgcagctctcgcgggcgtttccatcgcgaccgtatcgcgggcgctgcaacaacccgacaaggttcgcccggaaacccgaaagaaggttttcgacgccgtccggcaggcgaacttcgttcccaacgcccaggccgcaagcttccggcgtcaatccaacaacaccgtcatccttctcgtccgagatatcggcaacccgttttatctcgaaatctacaagggtgtggaagaagcagccggcgaagcaggtttcaaggtcctgatgggtgacgcccgcaatgacgaacaccgcgtggcgacccatatcgacatggtcaggcagaaacatgccgacggcctgatattgatgaccggacagtttccgtccgagcttctcgatcaagccgatgcgctgccgccgattgtcatcgcgtcggagacggtgccgggcctcgcgctgccgaccgtcaaggtggacaaccgtgccgcctccatgaatgccatgcgccacctcatcgctgcggggcatcaaaggatcgtgcatcttgctggccccgttccggaaagcctggcgcaggaacgtttcgatggttaccgcgcggcacttgccgaggccggtatcgcttatgccgacgaacttgtcgtgacgggcgattacagcattgaggccggccgccaggcgattgccggtcttctcgaaggtggcatcgccttcaccgcgatcttcgcatcgagcgaccagatggcgattggcgcgatcagcgagctgcggggcaggggtctctcggttccggctgacgtctccgtcatcggcttcgacgacatcatcttcgccaatgccttcgaaccgccgctgacgacggtacgtcagccccggcaggaaatgggccgcagggccatggcgctgatggtggaccggctgaacggcaaacgcacggcagaaaccatcgtgctggatacggaacttgtggtgcgcggctcggtcgcgccctgccgcccgccgcatcggtag

SEQ ID NO: 40750 - protein, 340 aa, Agrobacterium tumefaciens str. C58
MSKDQGSNIREVAALAGVSIATVSRALQQPDKVRPETRKKVFDAVRQANFVPNAQAASFRRQSNNTVILLVRDIGNPFYLEIYKGVEEAAGEAGFKVLMGDARNDEHRVATHIDMVRQKHADGLILMTGQFPSELLDQADALPPIVIASETVPGLALPTVKVDNRAASMNAMRHLIAAGHQRIVHLAGPVPESLAQERFDGYRAALAEAGIAYADELVVTGDYSIEAGRQAIAGLLEGGIAFTAIFASSDQMAIGAISELRGRGLSVPADVSVIGFDDIIFANAFEPPLTTVRQPRQEMGRRAMALMVDRLNGKRTAETIVLDTELVVRGSVAPCRPPHR

SEQ ID NO: 40751 - DNA, 1023 bp, Salmonella typhimurium LT2
  CDS (1)..(1023): transl_table=11
atgatggcgacaatgctggatgtttcccgccatgcgggcgtatcaaaggccaccgtctcacgagtgctgaatgggacggggcaggtaaaagaaagcacgcgccagaaagtgtttacggcgatgcaggctctgggctatcgccccaacctgctggcacgctcgctggcgaatcgcaccagcaacagcatcggtctggtcgtctctacgtttgacggcttctatttcggcagtttgttgcgccgggcgtcgcgccaggcggagtctcataacaagcagttgatcgtcaccgatggtcacgatacgccggaacgagagcagaaagccgtacaaatgttggccgacagacagtgcgacgctattattctttacactcgctatatggatgagctggcgattttgtcgttgattgacgccacggaaatgccgctggtgattattaatcgcaacgtcactcaggcccgcgatcgcgctattttcttcgagcaggagacggcggcattccaggcggtggaatatctgattacgcagggccatcgcgatatcgcctgtattacgctgcctgttcatactcccaccggcacatcacgcgtagcgggttatcgcaaggcgctggaaaagtatggcattccctggcaaccggcaaaagtgaaatacggcgattacacgctgacgcgcggctatgacgcctgccgggaattactggaggaaggcgtcacgtttagcgcgctattcgcctgtaatgatgacacggcgctgggcgcggcaaaagcgctgcgccaggccggattacgcatcccacaggatgtgtcgctgtttggttttgacgatgcgccgggcgcaacctggcttgagccggggctttcaacagtctatttacccatcgaggctatgatagccaccgcgatcgatcaggccgttcgtctggcgaacagcgagccggtcgccccgatcccgccctttaccggcacgctgattctgcgcgagtccgtcgccgcgggcccgttttttcaacgtccggcctaa

SEQ ID NO: 40752 - protein, 340 aa, Salmonella typhimurium LT2
MMATMLDVSRHAGVSKATVSRVLNGTGQVKESTRQKVFTAMQALGYRPNLLARSLANRTSNSIGLVVSTFDGFYFGSLLRRASRQAESHNKQLIVTDGHDTPEREQKAVQMLADRQCDAIILYTRYMDELAILSLIDATEMPLVIINRNVTQARDRAIFFEQETAAFQAVEYLITQGHRDIACITLPVHTPTGTSRVAGYRKALEKYGIPWQPAKVKYGDYTLTRGYDACRELLEEGVTFSALFACNDDTALGAAKALRQAGLRIPQDVSLFGFDDAPGATWLEPGLSTVYLPIEAMIATAIDQAVRLANSEPVAPIPPFTGTLILRESVAAGPFFQRPA

SEQ ID NO: 40753 - DNA, 1011 bp, Shigella flexneri 2a str. 301
  CDS (1)..(1011): transl_table=11
atgacgacgatgctggaagtggcgaagcgcgccggggtttcaaaagcgaccgtttcccgcgtgctttcaggtaatggctacgtcagccaggagactaaagatcgcgtgtttcaggcggtagaagagagcagttaccgcccaaatttgctggcccgcaatctgtcggcgaagagtactcagacgctggggctggtagtgaccaacacgctttatcacggcatttattttagtgaattactgtttcatgccgcgcgaatggcggaagagaaagggcgacagttgctattggcagatggtaaacacagcgccgaagaagagcgccaggcgattcagtatctgctggatttgcgctgcgacgccattatgatttacccgcgttttttaagcgtggatgagattgatgacatcattgacgcgcacagtcagccgataatggtgcttaatcgccgcctgcgcaataatagcagccatagcgtctggtgcgatcataaacagaccagctttaacgccgtggcagagttgataaacgccgggcatcaggagattgctttccttaccggctcgatggattcccccaccagcattgaacgtcttgccgggtataaagacgcgctgtcgcagcatggtattgcgctcaatgaaaaacttatcgctaacggtaaatggacgcccgccagcggggccgaaggggtagaaacgttgctcgaacgaggggctaaatttagcgcgttagttgccagtaacgacgatatggcgataggtgcgatcaaagcgttgcacgagcgcggcgtagcggtgccagagcaggtgtcagttatcggattcgatgatatcgcaattgccccctatatcgttccggcgctctccagcgtaaaaattccggtgactgagatgattcaggaaattattggacggctgatttttatgctcgatggcggggatttctcaccgccgaaaacctttagcggaaaactgatccgccgcgactcactcattgccctttcgcgataa

SEQ ID NO: 40754 - protein, 336 aa, Shigella flexneri 2a str. 301
MTTMLEVAKRAGVSKATVSRVLSGNGYVSQETKDRVFQAVEESSYRPNLLARNLSAKSTQTLGLVVTNTLYHGIYFSELLFHAARMAEEKGRQLLLADGKHSAEEERQAIQYLLDLRCDAIMIYPRFLSVDEIDDIIDAHSQPIMVLNRRLRNNSSHSVWCDHKQTSFNAVAELINAGHQEIAFLTGSMDSPTSIERLAGYKDALSQHGIALNEKLIANGKWTPASGAEGVETLLERGAKFSALVASNDDMAIGAIKALHERGVAVPEQVSVIGFDDIAIAPYIVPALSSVKIPVTEMIQEIIGRLIFMLDGGDFSPPKTFSGKLIRRDSLIALSR

SEQ ID NO: 40755 - DNA, 1002 bp, Vibrio vulnificus CMCP6
  CDS (1)..(1002): transl_table=11
atggccacaattaaagatgtcgctcgcgaggctggcgtttccatcgccaccgtctcacgagtgattaataaatcgcccaaagccagtaaagcgtcgattgaatccgtcactcaagcaatggccaaactgggctaccgccccaacgccgccgccaaagcgttggtgagtcaaagcaccaacaccatgggcgtattggttggtgatgtatcggatcccttcttcggcacgctgattaaagccgtcgatgaagtggcccatgaaaatggcaagcatctactgattggcaatggctatcacaatgccgaggaagagcgcagagccattgaactgctgatcaatagccgttgcgatgcactggtgattcattcgaaaggcttgagcgatgaagagttgctgtcatacgcgcaagaagtgccaagcttagtgatcatcaatcgtcatattccaaaaatcgcgcaacgctgcatttccctcgataactacaaaggggcctatttggctacagagtatttgattcgccatggccaccaacacattgcctgcatttcatcgagccacaaaattgaagacgccgacgcgcgcatcgctgggtatctcgccgcattaagagacaatcacatcgagctctccagtgcgtacatcgaacaaggcgagcccaatagtgatggtggggaaacggcaatgactaacctgctgacaaaatctctgccgatcaccggcgtggtcgcttacaacgactacatggcggcgggtgcgctatcggtattggatgaaaatggcttaaaggtgccagagcaagtgtcaatgataggattcgatgatggcttgattgctcgctatgtcagccctcgcctcaccaccgtgcgctatccaatacagatgatggcagagaaagccgcgagactggcgatcgatttggctcgccagcaagaagccgaccacagcaccatgatcttctcacccactttggtaagaagagattctgtggccaagctctcttag

SEQ ID NO: 40756 - protein, 333 aa, Vibrio vulnificus CMCP6
MATIKDVAREAGVSIATVSRVINKSPKASKASIESVTQAMAKLGYRPNAAAKALVSQSTNTMGVLVGDVSDPFFGTLIKAVDEVAHENGKHLLIGNGYHNAEEERRAIELLINSRCDALVIHSKGLSDEELLSYAQEVPSLVIINRHIPKIAQRCISLDNYKGAYLATEYLIRHGHQHIACISSSHKIEDADARIAGYLAALRDNHIELSSAYIEQGEPNSDGGETAMTNLLTKSLPITGVVAYNDYMAAGALSVLDENGLKVPEQVSMIGFDDGLIARYVSPRLTTVRYPIQMMAEKAARLAIDLARQQEADHSTMIFSPTLVRRDSVAKLS

SEQ ID NO: 40757 - DNA, 999 bp, Vibrio parahaemolyticus RIMD 2210633
  CDS (1)..(999): transl_table=11
atggcaacgatcaaggatgtcgcgaaagaagcaggtgtttcggtcgcaacggtttctcgcgtgatcaacaagtccccaaaagccagtcaatcatcggtagagtcggtcaccaaagcaatgagaaaattgggttacagacccaatgccgcagctcgcgcactggtgagtcaaagcacaaataccatgggtgtgttggtgagtgatgtgtccgatcctttcttcggcacgctggtcaaatccgtcgataatgtcgcgcgcgaaaatggcaaacatatcttgattggcaacggttaccataatccagaagatgagcgtcaagccctagaattactgatcaacagccgttgcgatgcaatagtcatccactcgaaaggcttatctgatgaggagctaattggctacgcccaagaagtgaaaggtatggtgcttatcaatcgtcatatcccagaactggccgaacgttgtatttcccttgataaccgcaaaggagcattcctcgcgacagaatatttaattcgtcacgggcatcgcaaaatcgcttgtattgcctcatcccacgatatcgaagataccgatgagcgattgcaaggttaccaagccgcattgaaagaacatggtattgagctctccaaaagctacatcgaatacggtgaacccaacagtgatggtggcgaagttgcgatgaccaacctgttaaccaaatctttggagattactggagtggtggcctacaacgactacatggccgctggcgcactcgcagcgttagatcaaaatggcattgacgtaccaagtaaggtttctatggtcgggttcgatgatggcttgatcgcccgctttgttcaccctagcttgactactattcgctacccaatcgagatgatggcagaacgcgccgcccgtttggctttggcgctgtctcgtgacgaaaaagttgaagatgaaaccattatttttagcccaacgttagtacgaagaaattctgtcgagcgttgttga

SEQ ID NO: 40758 - protein, 332 aa, Vibrio parahaemolyticus RIMD 2210633
MATIKDVAKEAGVSVATVSRVINKSPKASQSSVESVTKAMRKLGYRPNAAARALVSQSTNTMGVLVSDVSDPFFGTLVKSVDNVARENGKHILIGNGYHNPEDERQALELLINSRCDAIVIHSKGLSDEELIGYAQEVKGMVLINRHIPELAERCISLDNRKGAFLATEYLIRHGHRKIACIASSHDIEDTDERLQGYQAALKEHGIELSKSYIEYGEPNSDGGEVAMTNLLTKSLEITGVVAYNDYMAAGALAALDQNGIDVPSKVSMVGFDDGLIARFVHPSLTTIRYPIEMMAERAARLALALSRDEKVEDETIIFSPTLVRRNSVERC

SEQ ID NO: 40759 - DNA, 1023 bp, Salmonella enterica subsp. enterica serovar Typhi Ty2
  CDS (1)..(1023): transl_table=11
atgatcaccattcgtgatgtagcgcgccaggctggcgtgtctgtagcgaccgtttcccgcgtactgaataacagcgcgttggtcagtcccgacacccgtgacgccgttatgcaggccgtcaccctgctgggatatcggccaaatgcgaatgcgcaagcgctggccactcaggtgagcgataccatcggcgtcgtagtcatggatgtttccgatgcctttttcggcgctctggtgaaagccgtagatctggtcgcgcagcagcaccagaaatatgttctcattggcaacagttatcatgaggcggaaaaagagcgccatgcgattgaagtcttgatccgtcagcgttgtaacgcattgattgttcactcaaaagccttaaccgatcgcgagctgagcgactttatggatcagatccccggtatggtgctgattaaccgtatcgtgccgggttatgcgcatcgttgtgtctgtctcgacaatgtgagcggcgccagaatggcgacccgaatgttgctgaataatggacatcaacgcatcggctacctggccttcagccaccgtattgaagatgacgcgatgcgcagagaagggtggttacacgcgctgcaagagcagggggttgctgcgtcggagagctggattggcaccggcacgccagatatgcagggcggcgagtcggcaatggttgagttgctgggacgcaatctgcaactgacggcggtatttgcctataacgataacatggcgtcgggcgcgctgacggcgttaaaagataacggcatcgccattcccttgcatctgtctgtcatcggtttcgatgatatccctattgctcgttataccgatcctcagttgactaccgtgcgctatcctattgcttctatggcgaaaatcgcgaccgagctggcgttacagggggccgcaggcacgctggatatcacggcgacgcactgcttcatgccgacgctggtacggcgccattcggtggcgtggcgacagaatgcggtactgatcactaactga

SEQ ID NO: 40760 - protein, 340 aa, Salmonella enterica subsp. enterica serovar Typhi Ty2
MITIRDVARQAGVSVATVSRVLNNSALVSPDTRDAVMQAVTLLGYRPNANAQALATQVSDTIGVVVMDVSDAFFGALVKAVDLVAQQHQKYVLIGNSYHEAEKERHAIEVLIRQRCNALIVHSKALTDRELSDFMDQIPGMVLINRIVPGYAHRCVCLDNVSGARMATRMLLNNGHQRIGYLAFSHRIEDDAMRREGWLHALQEQGVAASESWIGTGTPDMQGGESAMVELLGRNLQLTAVFAYNDNMASGALTALKDNGIAIPLHLSVIGFDDIPIARYTDPQLTTVRYPIASMAKIATELALQGAAGTLDITATHCFMPTLVRRHSVAWRQNAVLITN

SEQ ID NO: 40761 - DNA, 1023 bp, Salmonella enterica subsp. enterica serovar Typhi Ty2
  CDS (1)..(1023): transl_table=11
atgatggcgacaatgctggatgtttcccgccatgcgggcgtatcaaaggccaccgtctcacgagtgctgaatgggacggggcaggtaaaagaaagcacgcgccagaaagtgtttacggcgatgcaggctctggactatcgccccaacctgctggcacgctcgctggcaaatcgcaccagcaacagcatcggtctggtcgtctctacgtttgacggcttctattttggcagtttgttgcgccgggcgtcgcgccaggcggagtttcataacaagcagttgatcgtcaccgatggtcacgatacgccggaacgagagcagaaagccgtacaaatgttggccgacagacagtgcgacgctattattctttacactcgctatatggatgagccgacgattttgtcgttgattgacgccacggaaatgccgctggtgattattaatcgcaacatcactcaggcccacgatcgcgctattttcttcgagcaggagacggcggcattccaggcggtggaatacctgattacgcagggccatcgcgatatcgcctgtattacgctgcctgttcatactcccaccggcacatcacgcgtagcgggttatcgaaaggcgctggaaaaatatggcattccctggcaaccggcaaaagtgaaatacggcgattacacgctgacgcgcggctatgacgcctgccgggaattactggaggaaggcgtcacgtttagcgcgctattcgcctgtaatgatgacacggcgctgggcgcggcaaaagcgctgcgccaggccggattacgcatcccgcaggatgtgtcgctgtttggttttgacgatgcgccgggcgcaacctggcttgagccggggctttcaacagtctatttacccatcgaggatatgatagccaccgcaattgatcaggccgttcgtctggcgaacagcgagccggtcgccccgatcccgccctttaccggcacgctgattctgcgcgagtccgtcgccgcgggcccgttttttcaacgtccggtctaa

SEQ ID NO: 40762 - protein, 340 aa, Salmonella enterica subsp. enterica serovar Typhi Ty2
MMATMLDVSRHAGVSKATVSRVLNGTGQVKESTRQKVFTAMQALDYRPNLLARSLANRTSNSIGLVVSTFDGFYFGSLLRRASRQAEFHNKQLIVTDGHDTPEREQKAVQMLADRQCDAIILYTRYMDEPTILSLIDATEMPLVIINRNITQAHDRAIFFEQETAAFQAVEYLITQGHRDIACITLPVHTPTGTSRVAGYRKALEKYGIPWQPAKVKYGDYTLTRGYDACRELLEEGVTFSALFACNDDTALGAAKALRQAGLRIPQDVSLFGFDDAPGATWLEPGLSTVYLPIEDMIATAIDQAVRLANSEPVAPIPPFTGTLILRESVAAGPFFQRPV

SEQ ID NO: 40763 - DNA, 1002 bp, Vibrio vulnificus YJ016
  CDS (1)..(1002): transl_table=11
atggccacaattaaagatgtcgctcgcgaggctggcgtttccatcgccaccgtctcacgagtgattaataaatcgcccaaagccagtaaagcgtcgattgaatccgtcactcaagcaatggccaaactgggctatcgccccaatgccgccgccaaagcgttggtgagtcaaagcaccaataccatgggcgtattggttggtgatgtatcggatcccttcttcggcacgctgattaaagccgtcgatgaagtggcccatgaaaatggcaaacatctactgattggtaatggctatcacaatgccgaggaagagcgcagagccattgaactgctgatcaatagccgttgcgatgcactggtgattcattcgaaaggcttgagcgatgaagagttgctgtcatacgcgcaagaagtgccaagcttagtgatcatcaatcgtcatattccacaaatcgcgcaacgctgcatttccctcgataactacaaaggggcctatttggctacagagtatttaattcgccatggccaccaacacattgcctgcatttcatcgagccacaaaattgaagacgccgacgcgcgtatcgctggatatctcgccgcattaagagataatcacatcgagctctccagtgcgtacatcgaacaaggcgagcccaatagcgatggcggagaaacggcaatgactaacctgctgacaaaatctctgccgatcaccggcgtggtggcttacaacgactacatggcggcgggtgcgctatcggtattggatgaaaatggcttaaaggtgccagagcaagtgtcaatgataggattcgatgatggtttgattgctcgctatgtcagccctcgcctcaccaccgtgcgctatccaatacagatgatggcagagaaagccgcgagactggcgatcgatttggctcgccagcaagaggccgaccacagcaccatgatcttctcacccactttggtaagaagagattctgtggccaagctctcttag

SEQ ID NO: 40764 - protein, 333 aa, Vibrio vulnificus YJ016
MATIKDVAREAGVSIATVSRVINKSPKASKASIESVTQAMAKLGYRPNAAAKALVSQSTNTMGVLVGDVSDPFFGTLIKAVDEVAHENGKHLLIGNGYHNAEEERRAIELLINSRCDALVIHSKGLSDEELLSYAQEVPSLVIINRHIPQIAQRCISLDNYKGAYLATEYLIRHGHQHIACISSSHKIEDADARIAGYLAALRDNHIELSSAYIEQGEPNSDGGETAMTNLLTKSLPITGVVAYNDYMAAGALSVLDENGLKVPEQVSMIGFDDGLIARYVSPRLTTVRYPIQMMAEKAARLAIDLARQQEADHSTMIFSPTLVRRDSVAKLS

SEQ ID NO: 40765 - DNA, 1044 bp, Erwinia carotovora subsp. atroseptica SCRI1043
  CDS (1)..(1044): transl_table=11
atggaagtactcaacgtctcaggatgtcccatgtcaacaatgcaggaagtggcgaagaaagcaggcgtatcaaaagcgacggtgtcgcgcgtgctttcaggtaaaggctataccagtgaagaaaccaaaacgctggtctatcaggccattgaagagacgggatatcagccaaatttactggcgcgtaatctggcgaccagcaagtcagcctgcattggtttggtggtgacgaatacgctctatcacggcagctattttaatgaattactgtcacaggccgccaagaagctcgaagacaatgggcgtcagttaattctggtcgacggtaaacacagtgccgctgaagaacgcgatgcgattcaattcctgctcggtttacgctgcgatgcgattatcatctacccccgttttcttaacgtggatgagatggatgacatcatcgagaagcacaagcagccaatcatggtggtcaaccgtaaactgcgtaaacaccaaagccactgcatctgctgcgatcacaaaggttccagctacaacgccacgcagcatctgatcgcacgcggtcataaagacatcgcgtttatcaccggttcactggattcaccgaccgctatcgaacgcctttctggctacaaagacgccctgaaagcagctaacatcgcagtacgggatgaactgatcgtgagagggaaatggacgccgcgctgtggatcactcgccattaccaccctgcgcgatagccaggtatcgttcagcgccgtgcttgccagtaatgacgatatggcgattggcgcaataaaagcgctggatgaagctggcgttgccgtaccgaacgacgtctctgtggtcgggttcgacgatattcccaccgcgccgtttttgaagccgtcgctctccagcgtaaaagatccggtgagcgatatgattaacgaggtgattaaccgcctgatcgcgatgctggacggcgggtatttttcgaaagagaacctgtttttgtctgaactgcgggtcagagattccattcaggacgggccgtacgggtaa

SEQ ID NO: 40766 - protein, 347 aa, Erwinia carotovora subsp. atroseptica SCRI1043
MEVLNVSGCPMSTMQEVAKKAGVSKATVSRVLSGKGYTSEETKTLVYQAIEETGYQPNLLARNLATSKSACIGLVVTNTLYHGSYFNELLSQAAKKLEDNGRQLILVDGKHSAAEERDAIQFLLGLRCDAIIIYPRFLNVDEMDDIIEKHKQPIMVVNRKLRKHQSHCICCDHKGSSYNATQHLIARGHKDIAFITGSLDSPTAIERLSGYKDALKAANIAVRDELIVRGKWTPRCGSLAITTLRDSQVSFSAVLASNDDMAIGAIKALDEAGVAVPNDVSVVGFDDIPTAPFLKPSLSSVKDPVSDMINEVINRLIAMLDGGYFSKENLFLSELRVRDSIQDGPYG

SEQ ID NO: 40767 - DNA, 1011 bp, Erwinia carotovora subsp. atroseptica SCRI1043
  CDS (1)..(1011): transl_table=11
atggccacaataaaggatgttgctcgtctatcaggggtatcagtcgctacggtttcgcgagtaatcaataactcacccaaagccagtacagcctcaagggaagccgtacacaaagccatggaggagctgcgatatcatccaaacgccaatgccagagcgctcgcacaccaaagtgcagagacaatggggctggtcgttgcggatgtatccgatccattttttgggacgatggtcaaatctgtcgaacaaattgcacaggcaaccggcaatttcttgctgattggtaacggctaccacaatgctgagcaggaaaagaaagctattgagcagttgattcgccaccgctgcgcgggactgatcgttcacgccaaaatgctttcagatgaggaattggcagcgctgatgagccatattccggatatggtgctcatcaaccgcaccttgcccggttatgaaaaccgctgcgttgcgcttgatgaccgctatggttcctggctggcgacacgtcatttaattcaggaaggccatcagaagatcggttttctctgttctaatcaccaaatttccgactccgtcgaccgcctgcaaggctatatggatgcgctgcaagagcacggcatcgcacgagatgaacgcctcattgcacgcgcatcaccagatgaactaggcggtgaagccgccatgatggagctcctcagtcggggcggcaacatgacggcagtggtgtgctacaacgactctatggcggcgggtgcactttccgtcctgagtgataacagcatcaacgtaccgcaagatatgtcggtgataggatttgatgacgtattgatcgctcgctacctccgccctcgcctgaccaccgtacactacccggtgtccgccatggccattcaggcagcagaattagctatcgcgttatcccacggtaaacaactcaacgaaaccacgaatatgtttagcccgacgctggtacgccgtcattcggtaagcccccctatcagcaagaaataa

SEQ ID NO: 40768 - protein, 336 aa, Erwinia carotovora subsp. atroseptica SCRI1043
MATIKDVARLSGVSVATVSRVINNSPKASTASREAVHKAMEELRYHPNANARALAHQSAETMGLVVADVSDPFFGTMVKSVEQIAQATGNFLLIGNGYHNAEQEKKAIEQLIRHRCAGLIVHAKMLSDEELAALMSHIPDMVLINRTLPGYENRCVALDDRYGSWLATRHLIQEGHQKIGFLCSNHQISDSVDRLQGYMDALQEHGIARDERLIARASPDELGGEAAMMELLSRGGNMTAVVCYNDSMAAGALSVLSDNSINVPQDMSVIGFDDVLIARYLRPRLTTVHYPVSAMAIQAAELAIALSHGKQLNETTNMFSPTLVRRHSVSPPISKK

SEQ ID NO: 40769 - DNA, 1026 bp, Erwinia carotovora subsp. atroseptica SCRI1043
  CDS (1)..(1026): transl_table=11
atgaaaaccatgcttgaagtggcgaaacgcgcaggcgtgtccaaagcgaccgtgtccagagtgctaaacggcatcggccaggtcaaacaggcaacgcgcgatgcagtatttcaggcaatggatgagctcggctaccgccctaattttctggcgcgttcgctggctcgccgtacctcaaacagcatcggtctcgttatctccaattttgacggcccctattttggccgcctgctacgtcgtgccgcagagataacggaaagcagcgggaagcacctgatcgtcaccgacgggcacgatacgcccgaagacgaaatgcgcgcggtgcaacttctgtctgacagacagtgtgacgccattattctctacacccgctatatgtccgaagcggatctcatgacattgctcaacacgcagaccattccaatcatggtgatgaatcgcgatctgccgcaggcgcgggaacgctgtattttcttccgccagcagcaggccgcgtttgacgtggtgaattacctgatcgaacaaggccatcgcgaaatcgcctgcattaccgcaccgatgcaaacgccgacggcacgagcacgcctcgcgggctatcagcaggcattaatcgaccaccagatcgacgttgacccgcgccgggtggcgcacggaaccagcatggtcgccagtggctatcaggccgcacgccagttgctggataacggcatcagctttagcgcgctgttcgtcagcaacgatgatatggcgattggcgcgatgaaagcgctatacgaagcggggaaaagattgccgcaggatgtctccgtcttcggctttgacgatgaaccctgcgcgacctacctgcacccttcactttccaccgtctatatgccgattgaagaaatggccgctaccgcgattacgcaagtgctggatctgattgcaggcaaagacgtcaaaccgctgcaaccttttaccggcgaacttaagctgcgcgaatcggtacagaaagggccgtattacggacagcaaaactcgcggtaa

SEQ ID NO: 40770 - protein, 341 aa, Erwinia carotovora subsp. atroseptica SCRI1043
MKTMLEVAKRAGVSKATVSRVLNGIGQVKQATRDAVFQAMDELGYRPNFLARSLARRTSNSIGLVISNFDGPYFGRLLRRAAEITESSGKHLIVTDGHDTPEDEMRAVQLLSDRQCDAIILYTRYMSEADLMTLLNTQTIPIMVMNRDLPQARERCIFFRQQQAAFDVVNYLIEQGHREIACITAPMQTPTARARLAGYQQALIDHQIDVDPRRVAHGTSMVASGYQAARQLLDNGISFSALFVSNDDMAIGAMKALYEAGKRLPQDVSVFGFDDEPCATYLHPSLSTVYMPIEEMAATAITQVLDLIAGKDVKPLQPFTGELKLRESVQKGPYYGQQNSR

SEQ ID NO: 40771 - DNA, 1038 bp, Erwinia carotovora subsp. atroseptica SCRI1043
  CDS (1)..(1038): transl_table=11
atggcaaccatgctcgatgtagcgaaaaaagccggtgtatccaaggccaccgtatcacgcgtgctgacagggaataactacgtcagtaaaaccacgcgggatcgggtattccaagcaattgaagagattggctaccgacccaacctcctggcgcgacagctcgccacaagcaaatcgcaaattattggtttggtcgtgactaacacgctgtatagcggcccctatttcagcgaattgctgttccaaacggcaaccatgacggaaaaatacgggcggcagctcatcatggcggatggtaagcacagcgcggaagaagagcgtgaagcgatccagttcctgctcgatttacgctgcgatgccgtcattatctatccgcgctttctttctatcgaagcgctggaaagcattatcgaacagcatgaacagccgatcatggtcgtgaaccgcacattgcatcagcacagtgataacggtatctgcgccgatcaccagcaacactgccatgatgccgtcaattacctgattacacagggccatcgtgatattgcgtttatctgcggatcgtcaaactcccccacgggcacaagcaggctggcaggttatcgacaggcgttagtggacaacggaattccctgtgatgacaggctgattgcacaaggtgattggacccatgacagcggttatacggcagcaaaatcactgcttcaacggacgctcaccttcagcgcactggttgccagcaatgacgatatggcgatcggcgcggcaaaagcgctgcgtgaacacggcctcgcgattccgcaggatgtctcgctactggggttcgacgatttaccgatggcctcatggttctacccgcccctcactaccgtacatgtgcccgtcgccgagatgatcaactatacccttgagaaactgctgtgtcggctggagggtgaaaccgtcatacctgcacccgccttcaagggtacattaatcatccgtgactctgtcagcaaaggtcctcagagtggcattctttcacgcgatacggtgtaa

SEQ ID NO: 40772 - protein, 345 aa, Erwinia carotovora subsp. atroseptica SCRI1043
MATMLDVAKKAGVSKATVSRVLTGNNYVSKTTRDRVFQAIEEIGYRPNLLARQLATSKSQIIGLVVTNTLYSGPYFSELLFQTATMTEKYGRQLIMADGKHSAEEEREAIQFLLDLRCDAVIIYPRFLSIEALESIIEQHEQPIMVVNRTLHQHSDNGICADHQQHCHDAVNYLITQGHRDIAFICGSSNSPTGTSRLAGYRQALVDNGIPCDDRLIAQGDWTHDSGYTAAKSLLQRTLTFSALVASNDDMAIGAAKALREHGLAIPQDVSLLGFDDLPMASWFYPPLTTVHVPVAEMINYTLEKLLCRLEGETVIPAPAFKGTLIIRDSVSKGPQSGILSRDTV

SEQ ID NO: 40773 - DNA, 987 bp, Yersinia pseudotuberculosis IP 32953
  CDS (1)..(987): transl_table=11
atggttacactggaagacgtcgcggtattagccggggtatcccgtgctacggtttcccgcgtggtcaacggtgataccaatgtaaaggcccttacacgtgaaaaggttgagcaggctgtcgccgttctcggttataccccgcaccctgccgcacgggcactggcatccagccaaagtaatacgctggggttggtgaccacctcataccgagggggcttttttggtgccttaatggattttgtgcaaacagaaacagaatcccaaggtaaacaactgttggtcactcagggacgagataatgcagataaagaatggttagccattcagcggctgtataacttacgctgcgatgggttaatcctgcatgtgcgctttctcagcgacgaaaggctgcgtcagttagctgcagcaaaccggccttttgtattattggataggttggttcctgatcttgaggctcgctgtgtgacctttgatcaccatcatgccagccaaatggcaacgcaggtgttgattgatgcgggccatcgcgacatcgcctgtatcagcggctcttcacaacgccaatccagtgttttacgcattcagggctttcttgatgccatgcagttggcgggcttagaacccgtggcttgtttggagggcgtttacgatctggaaagtggctacctgcgggctgacgaaatcctcaagcaaccccggctaccgacggctatctattgctgtaatgaagagatggccattggagcattactggcgataaataaacacggtttacaggtgccgcaagatatttcgctgatttgctatgacagtggcgagcgcgctccttttgtctgcccagccttgaccagcgtacactttccaatcgtggaaatggcgcaatatgctacacagttgctgattgacccgctgatccctgccgtcaatttcccacccgcgattatcatgcgtgattctgttatgccgccgaaaacagcgtgttaa

SEQ ID NO: 40774 - protein, 328 aa, Yersinia pseudotuberculosis IP 32953
MVTLEDVAVLAGVSRATVSRVVNGDTNVKALTREKVEQAVAVLGYTPHPAARALASSQSNTLGLVTTSYRGGFFGALMDFVQTETESQGKQLLVTQGRDNADKEWLAIQRLYNLRCDGLILHVRFLSDERLRQLAAANRPFVLLDRLVPDLEARCVTFDHHHASQMATQVLIDAGHRDIACISGSSQRQSSVLRIQGFLDAMQLAGLEPVACLEGVYDLESGYLRADEILKQPRLPTAIYCCNEEMAIGALLAINKHGLQVPQDISLICYDSGERAPFVCPALTSVHFPIVEMAQYATQLLIDPLIPAVNFPPAIIMRDSVMPPKTAC

SEQ ID NO: 40775 - DNA, 999 bp, Vibrio sp. Ex25
  CDS (1)..(999): transl_table=11
atggcaacgatcaaggatgtcgcgaaagaagccggtgtttcggtcgcaacggtttctcgcgtgatcaacaagtccccaaaagccagtcaatcatcggtagagtcggtcaccaaagcaatgagcaaattgggttacagacccaatgccgcagctcgcgcactggtgagtcaaagcacaaataccatgggtgtgttggtgagtgatgtgtccgatcctttcttcggcacgctggtcaaatccgtcgataatatcgcgcgcgaaaatggcaaacatatcttgattggcaacgggtatcacaatccagatgatgagcgtcaagccctagaattgctgatcaacagccgttgcgatgcaatagtcatccactcgaaaggcttatctgatgaggatctaattggctacgcccaagaagtaaaaggtatggtgcttatcaatcgtcatatcccagagctggctgaacgctgtatttcccttgataaccgcaaaggagcattcctcgcgacagaatatttaattcgtcacgggcatcgcaaaatcgcttgcattgcctcatcccacgatatcgaagatacagatgagcgattgcaaggttaccaagccgcattgaaagaacatggtattgaactctccaaaagctacatcgaatacggtgaacccaacagtgatggtggcgaagttgcgatgaccaacctgttaaccaaatctttggagattactggagtggtggcctacaacgactacatggccgctggcgcactggcagcgttgaatcaaaatggcattgacgtaccaagtaaggtttctatggtcgggttcgatgatggcttaatcgcccgctttgttcaccctagcttgactactattcgctacccaatcgagatgatggcagaacgagccgcccgtctggctttggcgctatctcgtgacgaaaaaattgaagacgaaaccattatttttagcccaactttagtacgaagaaactctgtcgagcgttgttga

SEQ ID NO: 40776 - protein, 332 aa, Vibrio sp. Ex25
MATIKDVAKEAGVSVATVSRVINKSPKASQSSVESVTKAMSKLGYRPNAAARALVSQSTNTMGVLVSDVSDPFFGTLVKSVDNIARENGKHILIGNGYHNPDDERQALELLINSRCDAIVIHSKGLSDEDLIGYAQEVKGMVLINRHIPELAERCISLDNRKGAFLATEYLIRHGHRKIACIASSHDIEDTDERLQGYQAALKEHGIELSKSYIEYGEPNSDGGEVAMTNLLTKSLEITGVVAYNDYMAAGALAALNQNGIDVPSKVSMVGFDDGLIARFVHPSLTTIRYPIEMMAERAARLALALSRDEKIEDETIIFSPTLVRRNSVERC

SEQ ID NO: 40777 - DNA, 1002 bp, Vibrio vulnificus
  CDS (1)..(1002): transl_table=11
atggccacaattaaagatgtcgctcgcgaggctggcgtttccatcgccaccgtctcacgagtgattaataaatcgcccaaagccagtaaagcgtcgattgaatccgtcactcaagcaatggccaaactgggctaccgccccaacgccgccgccaaagcgttggtgagtcaaagcaccaataccatgggtgtattggttggtgatgtatcggatcccttcttcggcacgctgattaaagccgtcgatgaagtggcccgtgaaaatggcaaacatctactgattggtaatggctatcacaatgccgaggaagagcgcagagccattgaactgctgatcaatagccgttgcgatgcactggtgattcattcgaaaggcttgagcgatgaagagttgctgtcatacgcgcaagaagtgccaagcttagtgatcatcaatcgtcatattccacaaatcgcgcaacgctgcatttccctcgataactacaaaggggcctatttggctacagagtatttgattcgccatggccaccaacacattgcctgcatttcatcgagccacaaaattgaagacgccgacgcgcgcatcgctgggtatctcgccgcattaagagacaatcacatcgagctctccagtgcgtacatcgaacaaggcgagcccaatagcgatggcggggaaacggcaatgactaacctgctgacaaaatctctgccgatcaccggcgtggtggcttacaacgactacatggcggcgggtgcgctatcggtattggatgaaaatggcttaaaggtgccagagcaagtgtcaataataggattcgatgatggtttgattgctcgctatgtcagccctcgcctcaccaccgtgcgctatccaatacagatgatggcagagaaagccgcaagactggcgatcgatttggctcgccagcaagaggccgaccacagcaccatgatcttctcacccactttggtaagaagagattctgtggccaagctctcttag

SEQ ID NO: 40778 - protein, 333 aa, Vibrio vulnificus
MATIKDVAREAGVSIATVSRVINKSPKASKASIESVTQAMAKLGYRPNAAAKALVSQSTNTMGVLVGDVSDPFFGTLIKAVDEVARENGKHLLIGNGYHNAEEERRAIELLINSRCDALVIHSKGLSDEELLSYAQEVPSLVIINRHIPQIAQRCISLDNYKGAYLATEYLIRHGHQHIACISSSHKIEDADARIAGYLAALRDNHIELSSAYIEQGEPNSDGGETAMTNLLTKSLPITGVVAYNDYMAAGALSVLDENGLKVPEQVSIIGFDDGLIARYVSPRLTTVRYPIQMMAEKAARLAIDLARQQEADHSTMIFSPTLVRRDSVAKLS

SEQ ID NO: 40779 - DNA, 1300 bp, Streptomyces thermoviolaceus
  CDS (199)..(1245): transl_table=11
gagccacggggcagcaagcgctttctatcgaggccatagctaacctctccgcagtggcggggacaagagtccgcgcggaccgtgccgttcggccgtcggaccggcggcccggtcacccgtggtcgggtcgccggtgaggcccggcgccccacggccgcacccgcccggagacgacctgcgcgaccggaggacgacgagatgaccgtgaccctggcggacgtggcggcccgcgcccaggtctcgcccgcacaggtgtcgcgcgtgctgaacggcaactatccggtggccgccgccacccgggaacgggtgctcaaggccgtcgccgagctggactacgtcctcaacggcccggcgagcgcgctcgccgccgccacctccgacctggtcggcatcctcgtcaacgacatcgccgacccgttcttcgggatcatggcgagcgcggtccagtccgagatcggcggctccgcaggccgggcgggcggggaacggctcgcggtggtctgcaacaccggcggctcaccggaacgcgagctgaattacctcaccctgctgcaacggcagcgggccgcggccgtggtggtcaccggcggcgccgtggaggacgggccgcacgcctcggcgatcgccgccaagctgcgcaagctgaccgccgccgggacccgcgtggtgctgtgcggacgcccgccggccgaggacaccggcgcggacgccctgaccttcgacaaccggggcggcgcccggcagctgaccgctcatctgatcggcctgggccaccgccggctcggctacatcgccggccccgaggagcgcaccaccacccgccaccgcctggagggacaccggcaggcgctcgcggcagccggcctcgaggacgacccgaccctgacggtccacggccgctacgaccgccgttccggctacgaggccacctgggacctgctgcgccgcgcccccgacctgacggccgtcgtcgccgccaacgactcggtggccctcggcgcctgcgcggccctgcgcgaggcgggactgcgcatccccgaggacgtctcggtggccggcttcgacgatctgcccttcagtgtcgacgcggtgcccgccctgacgaccgtccgcctgccgctgtccgaggccggcgcccgcgcgggccgcatcgccaccggccgggaggaaccgccgcccggggggatcgccacggtgcggggggagctgatggtgcgggggtcgacggcggtgccgcgggggtgagggggcgaagggggcgcgggcggcgcaaggccgcgctgcccgtggtgtccggccc

SEQ ID NO: 40780 - protein, 348 aa, Streptomyces thermoviolaceus
MTVTLADVAARAQVSPAQVSRVLNGNYPVAAATRERVLKAVAELDYVLNGPASALAAATSDLVGILVNDIADPFFGIMASAVQSEIGGSAGRAGGERLAVVCNTGGSPERELNYLTLLQRQRAAAVVVTGGAVEDGPHASAIAAKLRKLTAAGTRVVLCGRPPAEDTGADALTFDNRGGARQLTAHLIGLGHRRLGYIAGPEERTTTRHRLEGHRQALAAAGLEDDPTLTVHGRYDRRSGYEATWDLLRRAPDLTAVVAANDSVALGACAALREAGLRIPEDVSVAGFDDLPFSVDAVPALTTVRLPLSEAGARAGRIATGREEPPPGGIATVRGELMVRGSTAVPRG

SEQ ID NO: 40781 - DNA, 1146 bp, Streptomyces reticuli
  CDS (82)..(1137): transl_table=11
ggatcctcgcaccgctcgccactctggccaggactgttagattccagccagaacaggactgcggcgagaaaggcggagcccatggcaagccacggagggcggggccggagcggagggcggcccacgctcgaagaggtcgccgcccgggccggggtcgggcggggcacggtctcccgggtgatcaacggctcgccccgggtcagcgacgccacccgcgccgcggtcgaggcggccgtcgccgaactcggctacgtccccaacaccgccgcccgcgccctcgcggccaaccgcaccgacgccatcgacctggtcgtccccgaacccgagacccgcttcttcgccgagccctacttctcggacatgctgcgcggtgtcggagcggaactcgccgacaccgagatgcagctgctgctgatcttcgccggcagcgaccgcgagcggcagcgcctcgcccagtacctggcggcccaccgggtcgacggcgtcctcctcgtctcggtccacgccgacgaccccctccccgacctgctggcccagctggagatcccggccgtgatcagcggcccgcgctcggccgccgagaccctcacctcggtggactcggacaactacggcggcgcccgctcggcggtggagcacctgctgagccggggccggcgccggatcgcgcacatcaccggccgcctggacgtctacggcgcccagcgccgcgccgacggctaccgcgacgccctgcgcgacgcgggccacccggcggacgaactcctcatcgagccgggcgacttcaccgaggagggcggccggcgcgcgatgaccctcctcctctcccgccaccccgacctggacgcggtcttcgccggctcggacgtgatggcggccggcgcccggcaggtgctgcgcgaggcgggccgccgcatccccgacgacatcgccctcgtcggctacgacgactccgccatcgcccgccacatggacccgcccctcaccagcgtccgccagcccatacaggagatgggccgcgcgatgatcgacctcctcctgaccgacatcgccgaccgccgcccacccgcgtcccggggcctggaccgacgccaggcggtactgccgacggaactggtggtccgggcgtcgtcgtgagggagtact

SEQ ID NO: 40782 - protein, 351 aa, Streptomyces reticuli
MASHGGRGRSGGRPTLEEVAARAGVGRGTVSRVINGSPRVSDATRAAVEAAVAELGYVPNTAARALAANRTDAIDLVVPEPETRFFAEPYFSDMLRGVGAELADTEMQLLLIFAGSDRERQRLAQYLAAHRVDGVLLVSVHADDPLPDLLAQLEIPAVISGPRSAAETLTSVDSDNYGGARSAVEHLLSRGRRRIAHITGRLDVYGAQRRADGYRDALRDAGHPADELLIEPGDFTEEGGRRAMTLLLSRHPDLDAVFAGSDVMAAGARQVLREAGRRIPDDIALVGYDDSAIARHMDPPLTSVRQPIQEMGRAMIDLLLTDIADRRPPASRGLDRRQAVLPTELVVRASS
